United States Patent Application Publication US 2019/0348154 A1 - sequence listing, part 34

SEQ ID NO: 125695 - DNA, 312 bp, Enterobacter cloacae
atggctgtcgaaacaaaatttgttgtcgtaagaaaaggtgaagagaaaatgacatttgccagtaagaaagaggctgacgctcacgacaagctgctcgatatggccgacgcgttcaccgactggctgttgcaaagcggaatgcagatggatgaaacgcaggctgaaaatcttggcctgtatctcgccgagcagaaagagaccgtgcagcatattctgcgtaccagcaagcttcccgatctcactgctgctgctgataaaacagaatccgatgcggctgacacgaaaaaaatcagggctgtgaaagcggcctga

SEQ ID NO: 125696 - DNA, 1389 bp, Enterobacter cloacae
atgcaaaacgtctggtatcacctgaggcgcccgacgctggtacggcgaattatcatcgcccagatgctgctgcttaccctgctgtggtgtctttttctaaccttcattctgtgggaggacctgcgcagccctcccatccttacgggcagtaaaacgtacgaaaccgtttttaccctggttgagcgtatggacggacgtccgcaggatcgtaccgccgtgctggaagcctttagccaggccctgcgggaaggttacggcggaggggaagatcccgtgctgtcgattaacctcatcgttcgcaaaaataataccgttatttttgcctccgacggtgcgcccgcggggataacaaacacccggttcggcgaactggagcatgttcagagtggagatcgtacctggaccagccgcaccctcaaatccccgcactccgacgtggaggtcaccctcttcacgccagccagcggctggaacttctttatctatctgaactcacgcgggtactacatcctgccgctgctggtctgcttcccgtttctgctgtttcccgcgtggctctcaatccgcattgcgatgcgtccatggaataaggtggtcaatgaaattacgttacgcacgccggacgacctctcccctttaagagccgtaccgaagcaccgggagcttcgccagatggtggacgcgatcaacgacttccttgccagggtgcgtgaaagcgcggaaagggagcggattttcatcgcggatgccgcgcacgagctgcgtacccccctcgcggcgatgcgcatcaacgtggaggcgctgcagtcctgggtcattagcgagagccagaaggagctgcttgcgggcgtgattcgcagcaacagccgcgccgcgcgcctcgtcaatcagctgctgctgatgatgcacagtgaatcgcgcattgatacggctatggaacccgtgccgctgacaacgcttattcaggaacgaatggccgagctggaaccgctagcgtctgcgcgcaaaattgagctggaattctttgccgatgatgacgtctggatccacggcgtcagggaacgcctggtgtcgctgattgataatctcattgagaacgccgtgaagtacagccccgagggcgggaggattcaggtcgacgtgagcgcctgcgatcgcgtcgttcagctgcgcgtctccgatgcgggcccgggtattccgcctgaactgcgcgagcgcgtgttcgaccgctttttccgcgatcccaatcaggtgcagagcggcagcgggctggggcttgccatcgtcaaagcggtggcgcagcagcacaacagcagcgtaaacctgagtacgtcctcggaaggcggcctcctggtgacggttgacttcccgaaccgcacgtttagctaa

SEQ ID NO: 125697 - DNA, 678 bp, Enterobacter cloacae
gtgaaaattctacttatcgaagacgacctggatctcggcaatggcgtacgtatcgccctctcagatcaagggtttgacgtcatatgggttcgccgtaaagaggatgcgctgcatcagcttgacgtctgcgtgccggaacttattttgctcgacctggggctacccgacggcgatggcatgagcctgatgacgcgtttgcgccagcagctcaaggggatccccgtcatcatcctgacggcgcgagggacattgcaggatcgcctgtgcgggctggatgccggcgcggacgactatctcgtcaaaccctttattctcgccgagctgctggcgagagtgcgagcccttgcacggcgcagctacggttttgaaaatgaggcgatagaaattcgcgggctctctcttcatgtcccgacgcgtcgcgtgacggtgagtgcccgccatatcgatttgacggccagtgaatacgcgctgctggaaacgttgatgctgcgcgcggaccgcgtgctgacacggcggtttctggaggaaaggatattcggcaacaaagagaacctcagcaacgcgctcgacgtgcatatgggaaatttgcggcggaaaatcggcgacggctatgtgcgaacggtccggggcgtcgggtacgtcattgataccgtctccattcaaaaggtgagcggttaa

SEQ ID NO: 125698 - DNA, 837 bp, Enterobacter cloacae
atgagaaatattgaactgcgtcatacgttccctcatttactttcgggccgttgcctgaaaaccctcgtgccgggcgtcgttctggcgttactggctacgcctgtactggcggaagaacagcgccagggtaacgtcttaaccctgggaggcggcgtggatgtggggccgcgctactcgggttcagagaaaacccgcgtctcagcggctcaggtagtggattattccatggcaaatggcttctttatcggcaccacgcgagggatcggttatggtaacaatgttggcaacctggattacagcgcagcgctgagctatcgaacgggccgtaaagataaagacgtgagcagcgattccatcagctccggcagcgacgagctgcgggggatgggtgagattaaaggctcggctatcgtggtacccgggctggggtacaaggtgaccgactggctgaatctgcagctgcaggctgaggttccggtgtctgagagagacaacggagaggcagtgcatttcggcttgagcagcccgctctatacctcaccaacaaatgcggtgacgctggcgctgaccggcagttggggatccgacaagtatatgcagacgtattacggggtcaacgccgcccagtcggccgcatcgggctttgcccgacatgacgccggggccgggatttatgcctggtcgatgaaccttgactggacccacaagctcacctcgcgctggagcgtgcttgcctcagcgggcgtgacgcagctgacgggggatgcgggcgatagcccgattgtgcatcgaaaaacgtcgccgacggggagtttgaaggtgacatacagtttttga

SEQ ID NO: 125699 - DNA, 1722 bp, Enterobacter cloacae
gtgttcggaaaactgttgttaaactacatgccaggtttacaaaatttgttagcctacgataaaagctggctaaaacatgatgttaaagcggggttatccgttgcggctgtcgcgctacctgttgcgattgcttacgctgagctggcgggggtgggggcaattgtagggctctattcctgcgttttaccgatgatagcttacgcactgtttggctcttcacgccagcttattgtgggccctgatgccacaacctgcgcggtgattgcggccgtcgtatttccgctttctgcaggaaaccccgaactgcactggcagctgacgatcatcatgacattgatgatgggcgggtggtgtttgcttgccagtaaatttcggctgggcgcgctcgccgatctgctttctcatcccattcttaccggtttacttaatggcgtagccgtgacgattatcgtcgggcaattaggcaaggtgttggggattaagcttgatgaagcgcaggttattgaaaaaataatcgccttgccaggtcgactttcagatagccatttattaaccgtaggaatatccctttttacgttaattattttaatggtgatcaaaacgtatcgcagccagtggccagcacctttaatcgccattgtgataacaacggcactggtatgggtgacctctgcgcaacagtacggcattgccacgattgggggagaaggcttccagcctggtttacccatcgttcactggggggcgttccagccggggccgatgcgtgatttggtgatcccggcgctgaacctggcgttggtcagttttgtcagtctgatgctgaccgcccgcagtttcgccgcaaaaaatggctacgaaattaatgcggatgcagagttccgggctttgggtattgcgaacattatgtcggggttatctcaggggtttgctatcagcggagccgattcccggaccgcggtgaatgattcggttggggggaaaagtcagctggtttccgtggtcgccgccttgatcatcggtatcgtcgtagtatttttcactcatccattacaattcattccggtatctgcgttagggattgttctaatgtatgcatcgtggtcattaatcgatttgcgtgggctatggaacctgaggcgcagaaataaacaggcctttcgcctggccttcttcacgtttggctgtgtgttaattatcggcgttatccaggggatcggccttgcagtgttgcttggcctgttgcagttccttcgtacggtatttcgcccctctgagcacctgctgggcactgacgaagagggaatgattcactcgttagggaatacaaccgatattaaaatggtcccgggcgtgctgatgtatcgatttaactcaccgttgacctattttaatgtggcttattttaaacgtcgggtattgaacctggttgatggggcagccataaaacctaaatgggtggtcattgatgccgttgcctgcttcacctattcagacatcagtgtcctggcaaccattaatgagttaaagcgtgacctgaaaggtcgacagattaaattaattcttgcgggcaggaaaacggagttaacacgctggtttaaagacagtcggccaacaatgaatgatgatgacatgattctggcgccagacctctacctggcacttcggttcattcaaagcaaagagagtgcgagtgagggggaatcagtcagtgatacataa

SEQ ID NO: 125700 - DNA, 375 bp, Enterobacter cloacae
atgcgcgctttttacctgcgcacttttaacaaaacattagaatatattgccagtgctttttttagcggcttttgccttgggtttgtattgagcttaaatggttatgatatttatgtctatctcttcccggacaaaataattggctatgaatctgaatatgaggttgtctttccggggccttcgagaggtaagcatggccattgtgaagcgggtctctggttaaaagatcagaacaccaacagatggattcagctttgtacaaacaaagaatatctgcacagccaccgtaagcagggaatgactggggtgtgggtaacggcccgtgtgaataatattggaagttacattgtgagttatgagtttatttatttgtag

SEQ ID NO: 125701 - DNA, 615 bp, Enterobacter cloacae
atgaaagatgtctcacatcgtgaatcgttcgcgttcagcgcccgggtgctgggtgcgctgttttatttcgcgccagacagcgagcaggccgcgccgctggtgcaggccctcactgcgggcgaatgggttcaggactggcctctgccttcggaaacgctgcgacccgtagccgacacctttgccgcgtctgccgatgagccgctgagggacgcctggcaacggctgtttattggcccttacgccctgcccgcgccaccgtggggctccgtctggcttgaccgcgaatccgtgctgtttggcgactcgaccctcgcgctgcgccagtggatgcgggagaacgctatcgcgtttgagatgcagcagaatgaaccggaagaccacttcgggactttgctgctgctggcggcatggctggccgagaacggccgcgaggcggagtgcgctcagcttctggcgtggcacctgctgccgtggagcacccgcttcctgacggtgtttgtcgagaacgccaaccatccgttttataccgcgctgggtaagcttgcgcagctgacgctcgcggactggcgatccgggctccttattccggttgcggaaaagacgctgtatcgctaa

SEQ ID NO: 125702 - DNA, 1035 bp, Enterobacter cloacae
atggagtccatctggaactacgcgggcaacaccctcatcaaccagcactccgatatcaataaaacccacgatatcctgcaggatgaaagcaagtgcgagatgattgtggtcatcgataacttcatgacgtcgtcagcgaagtatgccgatatcgtgttgccggacctgatgaccgtcgagcaggaagacatcattccaaacgattatgcgggcaacatgggctacctgatattccttcagcccgtgaccgcgccgaagtttgaacgcaagcccatctactggatcatgagcgaagtggcgaaacgcctcgggccggatatccaccagaaattcaccgaaggacggacgcaggaacagtggctgcagtatctgtatgccaaaatgctcgaaaaagatcccaaactgccgtcctatgacgagctgaaaaaaaggggcatttacaagcgcaaagatccgaacggccattttgtggcctataaaaaattccgtgaaaacccggaagccaatccgctgaaaacgccatcggggaagattgaaatttactccagcaagctggcggagattgcggccacctgggaactggaaaaagatgagaccatcagcccgctgcccgtctacgcgtcaaccttcgacggctgggacgcgcccgagcgcgcgcggttcccgctgcagctgtttggcttccactttaaggcccgtacccactcgagctacggtaatgtagatgtcctgaaagccgcctgccgccaggaggtctggcttaatcccgtcgatgccgaaaaacgcggcattaagaacggcgatacggtgcgcgtctttaacgaccgcggcgaggtacgaattgaagcgaaagtgacgccgcgcatcatgcccggcgtcagcgccatgggccagggggcctggcacgacgccaatatgagtggcgatcgtgtcgaccacggctcatgcatcaacaccctgaccacgcaccgcccgtcaccgctggccaaaggcaacccgcagcacaccaatctggtagagatcgagaaggtgtaa

SEQ ID NO: 125703 - DNA, 1335 bp, Enterobacter cloacae
atgcgtcagagagagcttgcagccacagctaagtccttcatgttggataggcctgatgtctcgctacaggagcttacggaccacctccggtctatggctgagcagttcctgacagacgccagtgatgactactggaatggacttgaggtcgctactctggtggacgagaagtccaacctgaaggagctagccgctacgcaagccttgagtctggaccagcagaagggcataaggttagcgcttgaagtcctgaccgcagcacagcagagggtagacactggtgatgcctctggtctgattaagctgattgatgataataaccatactgattactcaactataggcgactctacgtcaattctgaagaatgagcagggggatagaccagcagttttcacacaggagcgtcagccatctgtggttttttcaagcctagtgtcctcgctgctggctgagaaggtccagaccctgaagtcctccagctacaaggacctgtcgtcctcactgaataccgtctctcggttcttacctgaagacatggacctgatgtcccgctctgagtggctggctgtcagggactccatgctggctgctgaggtgagaccatcgacaatcaacaagctgctgactaaggcgaagatgtgtcttgattatggcctgatgaatgggcaacttgagggccgcaaccctattgaacggatgaagctgaccaaggatatcgactccaagcgcagagcgttcacagacgaggagctggagagacttctggtccgtgttgagtctgagtatcagttcacacgacacacggctcacacgacctctgaggcccgtagatgggcgtctctggtgtctgtggtcactggcgcgaggtctgctgaagtctgccacctgactaaacgtgacattgtcaccttagacaacggtttaacctgcatcgacatcaatgaagatggggacggtaagtctgtgaagaacaagcattcagtccgacttgtaccgctgaccgatggggcctgtgggttcgacctgaagtccttccttgaatgggtagacacgcagcctgacgacggcggtcctctcttcgggatgactccgagcgcctactctagctggtttaactctagggtcctgactgaggcactgggagacgctgagaacgtttctctccatagtctgaggcattggctggcgacccgaatgaaagagcgtggagtcaatctggtggacgctcagggcatcttaggccatagcagtcagtcaattacgtatgacctgtacgggaaaggacacgctgttggtaggctggctgaggtgctgaagacagctttactttaa

SEQ ID NO: 125704 - DNA, 369 bp, Enterobacter cloacae
atggcacgacccatcgcaactcacgacaacacgttcaccaaagcctacttgcagcagcactgcggggacctgctgccattcgatggtcagggtgacttgagtggctggctggatgatgtccttactggtgctggtcgcctgagcgaatcaatggcaagcaataccaagcctgtcagcccatacttgattctgacccaactactaacgcacgacacattaactgtaagcgctgtgcaggagtccctgagccgtaagcgtgttgccttgggtgaacctatggtttcaactcgctacgctcgctacgtctatgctgccgtcgtcagcgccagtaaatccgtccagtaccacgccagtaaagctggttcatga

SEQ ID NO: 125705 - DNA, 390 bp, Enterobacter cloacae; identical to SEQ ID NO: 39774

SEQ ID NO: 125706 - DNA, 741 bp, Enterobacter cloacae; identical to SEQ ID NO: 39775

SEQ ID NO: 125707 - DNA, 225 bp, Enterobacter cloacae
atggctatgattgaccctcgtacacctatcggcaaagcaacccttcgttaccgtggtctacctacacgtcatctgctgtctctgctgagacttggagtcgaagaccccgagcgcccgtactacagtcgagacgagctgatagctatgttggtggaccgtgatttagacaatcagttacgccgagcctttgcgaagtctagcgcagctagtgaactggagtcttga

SEQ ID NO: 125708 - DNA, 492 bp, Enterobacter cloacae
atgttattcaacaacaacgactggaaactatcagtcaccgacatcaatccctatgaaaatactgtgagtctggacggtcagtcctatccgctgtctctggcgattaagaccctgattccgggctacctgtcaggcttaccgtccaccagccgcgaggcgatggagttactggaagctctggctgaagctggcgtgaccattggcaacttcttcagtaatgacctgatgaccgcctatggtcgccgccagcagaacaagcgagccgaagctgagcgtattgctaaagagcagcgcattcaggctgagcgtatgcgtgaagagaacatgactgatgcagagtggcagaaagagctacagcgccgtgaacaggtcaaagctgaacgccggacctatggtgagcacctccgcagtgctacccattccgctgggcgctcccgtgcttctatggtcgctgacattgagtccacggacaactggatggacagcctctaa

SEQ ID NO: 125709 - DNA, 987 bp, Enterobacter cloacae
atgacgattaaagacgctttccagttcggcattgagccagtacgtatcaccgacaccgacaacattcagattaacgaaggtttgccaactaacgcagaccctcaggtctacgcctttgagctggctaaactggttaagacaatgctgaatggtgtgctgaaatccgctcaggagaacatcccgttccctgtagaagtcctgcctacccgcaatagcctgcctactccaatcattgctcacactctggctgaccgctctgtggtcgttcctgtccgtggtggtaagcgacctgaagtcgtgaccgttccgtctggacaagaaatcgtggtcgaaccaatcgagcaggctattctcatctctgagcagaccaagctctgggacgccaagtcatccaccggattcactcagggcacacttcagcaggacgctatgaacatctgtgagaatgtggtccgtaccatcaacgctcgcatggtcgacgttctggagtcctccaaactgttgaagaccgtagagcttccggtcctgactggcagcctgaccgctaaggcagacactatcatggacgctctgtatgacaacaccgaatcttctttcggttctgaggttactgattacggtatcatcgcccatgagtcacacctcaaggctctctcccgtctggctgctaagcagggcttcggtggtgaagacgctatcgtcgatatgctggggactgatattgcgtattacaacggtgaagaccgtggcgtgttcatgatggctaagcgttttacggctctgagcttcggttgcttccgccacgatggcgaaaacattacggcggtcctgtcccgtgatggtgactctcagtctcactctctggaaatcctcggtaaagtgttcgttgtcgctgaagctgctacgaccgtcaagatgggcactggctcagctactgccgtcctgcctgtagtcaaacgcctgaagttcaccaagaccgaagcgtaa

SEQ ID NO: 125710 - DNA, 207 bp, Enterobacter cloacae
atgtctatgacttccgcagacctaaggtccctcctgactctggtctataaactcgtgttcctctctgtgggcctctatatggacctctccggtcgactcggtgtgaatgtattcgacactctgtctaaggctgtgggtgggcttctggggggcttaggtttgtactcacagtgggaccgatggtttctgacagaaaaatgtgaatga

SEQ ID NO: 125711 - DNA, 150 bp, Enterobacter cloacae
atgaaaaaagaaccgggctttacgcccggttttttatacgcctgtaaccgttacagcataaaaactaagattatgttctttataaataaaaccggcgaggttaaaggtcactccctccgggagatgtatttaaccgaattcaggctgtaa

SEQ ID NO: 125712 - DNA, 672 bp, Enterobacter cloacae
atgttcccttatatctctcatctgctcgcagcgatgctgctgggcgcaattattggcgcggaaagacagtggcgccagcgtatggccgggcttcgcaccaatgctctggttgcaacgggtgcggccgtgtttattttaagttccctctcgacgtcacccgatagcccggggcgtattgcagcgcagattgtctccggaataggtttccttggcgctggcgttattatgcgtgagggaatgaatattcgcggtcttaataccgccgcgacactgtggtgttcggccggaattggcgtgctatgtggattaggtcaattctggaatgccggtatggccagcgtgattattctgtgcgccaacatcctgcttcgcgaagctgcgcagcggattaatcaactgcccgcgatccatgaaggcgaaaaatgctatgtcctgaaaatcacctgtgatgacgagcatgaagatgcggtgcggcagagtgtggtcaacatggcgaaagagttgacgttgagtctgaaagccatttattgcgatacggcgcaagcagaaggaaaaactgaaatacgggccgaggtgatgacccgtgaggaataccggaaattactcgagctaattatgggtaatatcggcgggaataaaattatggcttccgtaagctgccacgcaatatga

SEQ ID NO: 125713 - DNA, 324 bp, Enterobacter cloacae
atgtcgcaacaaccggagttgtccttttctccgtcaatgctgcccgctttgtgctattttattgtatctattgtaatttttttcttgttatatatcgggaaacagaaggttaaccggctccgtaaatacccactgttcatagcctatacgctgtttgtgatagccattgcagccatccagattaacgtttttgccaacggctatgagtttgttcgcggttttttacatatcgattttgatccctggcggtacgattcggtgtactgggggtcattgatattcgctatgctttacctgctggcaatgcccaggaacaggtattag

SEQ ID NO: 125714 - DNA, 900 bp, Enterobacter cloacae
atggacaaacttgacgctctaaaattttttatcatagcctctgagaccttgaacttccgcgaagcagccatcaagctgtcggtttcaccatcagtagtaacccgaacagtcgctgagctggagaaacaacttggtgaacctttattcaaacgcaatacgcgttcgatctttctcaccagtttcggcgaactatttttaccccaagcgaagcgactgcttgaagattctgaaaaactatttcagacagcgaaagatgataatgacatgaagggtattgttcgtatcacattacttcgatttccaaatcatgaacaaatcttgtatgaactattgactgcactacgtccctatcctgagttatttatcgactggcgtttagatatgatgaaacttgatactattgagcatcgtatcgatataggtatacgcgtagggcgagaacctaatccaaactttatcattaaaaatatcggacaagttgaacatattttggttgcatcccctgaacttattgagcgactgggagcacctactgatttagaagatcttcgacagcgttatccatttagtggtttaattaatcctgaaacgggaaaatcatttgagtttatgagtgacgcagtaaatacttttgtccctcgtcatattgagttttatactacagatccatatgccgaaattcaggctgcattggccgggagaacggttgtacagtccagcgactttatctgtagggagtacttagcaagcggccaacttgttcccccattgccagaactgcgacaggagaaatggcaattttatttatatcggccttaccagctgattactcccaaaagggtgacggtcgttttctcgttattagaaaaaatattacgcaaatatttcgcatcaaaataa

SEQ ID NO: 125715 - DNA, 573 bp, Enterobacter cloacae
atgtcaattcaaccagtagagttaaacaaagcctatcgtttattacaggtcgggccaacgacgatgatatcggctaaaaatgatggcattgaaaatgtcatggcagcggcctgggtgggattagtaggcaataacaaagtgatggcttttataggtccacaggcatttactcgcgggcttgtagaaaaaagcggatattacgttgtacagatcccagtagtgaatcagatggaaatggttttatatgctggaggtcacagttattccgacacacccgataaaaatagtaaaatcccactattttatcagaaagagtttgatctgcctttagtggaaggttgcgctggctggttagtatgtaaggtcatacccaatgaagaaaatgaaaagcagcacaacttgttcatgggtgaaattgtcggagcatggagtgatgatcgcgttttcaaaaatgggcactggatttttgatgatgcaccagatgaattacgtactgtccattacgttgctggcggacagttttacgccattggcaaagggacaaaatttaattatggtccgggaaaagactaa

SEQ ID NO: 125716 - DNA, 462 bp, Enterobacter cloacae
gtgaataatcagcatttgcgttttaccaaagacaaatttattgtcacaaccgatcccagcttttttcagctagaagccattcacgattacctctcgcaatcgtcctgggctcctggtattgatgctgaaacggtcaggatatcaatccagaacagcctttgtttcgcgctcctggatggaacaagacaaatcggcttcgcccgtctggtcacagactatgccacttttggttatttgtgtgacgtctacgtgctgaacgattatcagaaaagtggtcttggccgttggctgattgaatgctgtcatgcccatccattgttgtcacgtctgcgacggataatgctggtaaccgacagcgcgccatggttataccagaagctggggtataacccattgaaccgaccagattttgtctggcaaatcaatcgacccgatatttatcgtaaccccgggcaaaaataa

SEQ ID NO: 125717 - DNA, 603 bp, Enterobacter cloacae
atgaccaaaaaagtcaatttaatgaccgatgcgaacgctatcgtcaatactgtgaatgaagccgtatctcagcgaattaaactctatcgtaagcataagaagatatccctcgatgaactctcccgtcgggcaggcgtcagcaagggagcgctggttgagatagagggatgccgggcgaatcccagcattgccctgttatgccgcctggctgccgcaatgggggtttcggtggctgattttgtggatgtcagttcaaaaccgaccgtgcatctcattgctgaagatgagatcccagaattgtgggaaggtgaaaaaggcgggagagcaagattgctcgcagggtcaggtggccctgatatgaccgagctctggatgtgggaaatgcagccgggggaaaagtttgcgtcccccggccacacggaaggtacgcttgaactgttttatgtgcagtcgggcacgctcacactcggcgttcaggaacacgtgtatcgggtaaatactggctgttcggctaccgccagaacggacgttcctcatttctatgaaaaccagggggagaacccgctggtatttatcatgacagtacatgaaaaagcatcctga

SEQ ID NO: 125718 - DNA, 696 bp, Enterobacter cloacae
gtgctaacagtatctccgtcaattacccctgaaatttatcgtattgctcccggttttcgtgcactgagcatttgcgtaaaagctgcgccagtgcttaatcccgacattggggaaacggcgctgcatgaagcctgtgaagccgttctggccggtgaaccagattgggcggactctcatctggcggcatgggccgacgtttttcaaaagtttggtgctaaacctaaacgcaccccttgctcagcagatgcgttacgcaagcgcgtgttacgtgacggaacgatgccagcgctcgatcctatcgttgatctttataatgccgttagtctccgctatgccgttccggttggtggagagaatctctctgcctatcagggggcgccgcgtctgactgtggcaaaaggaacagagccttttgataccgtcaaagagggagaggccaccgttgagtatccttcacaaggcgaggttatctggtgtgatgatatcggcgtgacctgccgtcgctggaactggcgacaggggatcagaacccgcttaggcgtggaggctcagcaaatgtggttcattctggagagtctcccgcagatgccgctggatagacttcacgaagccggcaagatgctgaccgacggcctggaaaaaatgatgcccggtctgtggtttgaagttactctcatcgaagaacaacagcagtaa

SEQ ID NO: 125719 - DNA, 894 bp, Enterobacter cloacae
atgtttaccggtttgtcggcgtttccattaaccccagtcactgcccgcggcgtggatgaaaagggttttagccatattctttcccgtcttacagacgctcgggttgattctatgggcatcctggggtcaaccggaagctacgcctatctgacccgggagcagcgcaagcgcgtagcaacgctggctaaacagcatgcagggaacatccccgttatggtgtgtgtgggagcggtcagtaccgatgccattctgcatctggcagaggatgcacaggcagctggtgcgaatgcgctgttactcccggcggtcagctaccagccactccgtgacgaagaagtcttttcactctttgagaccgttacccggcacgcgtctgtaccggtgtgtatctatgataatccgggcactacgcattttacctttacggatgaacttcacggtcgtctctcctcacttgagggggttcgctcggtcaagatccctggcgtcccggatagccacgctgcagcgattgaacgggtgaatgcgttacgtcaacttttgcgtcctggcgtaacaatcggtattagtggcgacgcttatgcggggctgggattaaacgccggttgtgaagtgtggtattccgtgtgtggcggtctgttccctgagatggcgaaacaaatcaccgaagctgcggcggcaaacgatcatcaacgcgttacagccctgacaacccgccttgagccgttgtggtcgctcttccggaaacatggcggaagtattcgcgttattgccgctgcggctggcgtgcttgggcttaccgacatggattgcctgcctcgccctctgcaaccgttgtcagctggcgacatcgcggatattgcccatgtaataagcacgctggagttgaagtga

SEQ ID NO: 125720 - DNA, 303 bp, Enterobacter cloacae
atgctggcaaacgcacgccagtttatgcccgtcaggatcgcgcagataggcaacataaaaatcggggccgtaggcggttcgtgtaccgggcacgccttcatcctttcctcccgcacggaggcccgctgcatggaagcgtctgacaatttccgcgctatcggctctgaatgcgaacattgtcccgtttcccgccgtcgcgggttgctggtcaaaaggaggacaaatgcagaagctaaattcgtcatccggatgattttcgtttccccacattgcccagctatcagtccaggcgggcagacgtga

SEQ ID NO: 125721 - DNA, 438 bp, Enterobacter cloacae
atgtcgcagacgttaccggaaattgatgtcatgttcgtcgccgggttcgggcccatttcacaggatacagcgtccagcaccgcgttttatatccagacactcggtctgccgctgaagccgatggagggcaatgccgattatctgctcactgaagagggacgcttaccgggcgtgaagcattttgccgtctggccgctgtcacaggcggcaacgtcctgttttggtaaatcggaatggccagtggagcatccgataccgcagggatggattgaatacgaggtgcaggatctcgattccgctacccgtgttctgagtgaaaaaggctatcggttgttggtcgccaaccgcacggaaccgtggggacaaaccgttactcgcctgctcagcccggaaggtttgctgaccggactaacagttacgccgtggctgcgtggatag

SEQ ID NO: 125722 - DNA, 1161 bp, Enterobacter cloacae
atgttgaaacgcacgtcaccgttactcttcgctattatcgcttttatcgtcgggctgaacctgcgccccattctggcctcggttggccccctgttctccgtgctgcagcgcgaagcagggctgaccgcgacgcaattcagcctgctgaccaccctgccggtggcgatgatgggactggctgccctgtgtggcccctggcttttagccaggatcggtgccgtcaggggaattatgctcgggctgttcatcctgctggtagcctgttcattacgcggttttagcacctcgctgacgggtttgatgggcacagcgttactgggcggggccagcatcggcacgatccaggcgttaatgcctgccctgataaaaaaggcgtatacgcaaacggccagcacgatcatgtcgctattcagcacgggcattatggccggtgcggcagtcgccgccgccagcgccgagccgctgttttcatggctcacgctgaagcccgcgctggctatggcaggcgtgcttgcgctgctggcgctgatgctgtggttacccctggttaagcagcctcaaggtgaacaaacagcacatgaatccgttacgctctcttcctcccggactggactccttctgctctttttcggcgtggggacgggtgcctacacgctggtcttagcctggctgcccccgctctatattcaggcaggatggtccgcacgcagcagcggctatatgctggcctggctgaccttaaccgaggtggccgccgggtttgccgtctccgcgctgatcggtaaattccccgaccgccgtgttccgctgataactgtactgttactgctgctggcggggttactgtgtctggtcttctctccaggtaccacgccggtcttatcaaccttgctgcttggcatcggtatcggcgccctcttcccgctgtcgcttatcgtcacgttcgatcatgcgcgaacgcccgcgcaggccgggaagttactgtctaaagttcagggaggaggatatatgatcgccgcgctcatgccgctagttgccgggatcgttcgcgacagttcggtctcgctgaccagcgcctggctggtgatgagtgcgggagtcgtgctgttaatcgttatcgcgttcactttcaaacccgccgcgaacgtgcaggcgcggtga

SEQ ID NO: 125723 - DNA, 492 bp, Enterobacter cloacae
atgcccgagctggacgcctcgtcgatgaaaatttttggccgaatgctcaggctgatgaagcacctgggaaaagaacgcgcgctggccatggcgccgtttggctttcgcgagggcgagtttgacgtcctcgccacgctgcgccgcgccggggagccgtactgcctttcgcccacgcagctgtatacatccctgttgatcacctcaggggcgatgacgaaccggctcaaccatctcgaacagcaaggccttatcaggcggattgccgatcccgacgacaagcgcagctcgctcgtcagcctgacgccgcacgggcaggagcgtatcgaacaggcgctgctcgtgcatacggaaacgcaaaatgcgctgctgagaaacctctctgaggcgcaacgcgcgcagcttgagtccctgctcagggtgctgctgctgacgtttccggtcgaggaatgggatgaaacgtcaccgagtgccgataatacaaaaacagcatga

SEQ ID NO: 125724 - DNA, 471 bp, Enterobacter cloacae
atgacactcgatgttttatttcatctaatgaaaatgatctcacctgaaaaaaacatcgcgggtgaaaatatacatgcgttaatgacgttactttcgtcagaaaacgatagcggtgaggtgctttcgccctttattcatcgactgcatcttctgtctttcgcccaaagcaatccgcgtaacgccgaagagctgctctctgcgcatttacccaaagacgacgggatccttccggttctggacttcgcggactggccccgggtgcgttacgccgcttcaggcgaagttcagacgcctgaatctgaggagtacttccgtgaaatgacatcggctaccaatctattacgttctgcgctgatcgaagctgaacgcgcaaagggaacccctgcgctatatatactggataaattactcaacctgaacagcgccctgccggaaagatataaaaagatggcaaatattccctacgcataa

SEQ ID NO: 125725 - DNA, 678 bp, Enterobacter cloacae
atgagattagagagtgcgtcagttttagaagaactccggaccaggctaagacccgcatcggtcgcgcaggtcggtgggttccggccgcctgaagatcccattacgtcatggtttctgaagggcgtttctcgtgcagatgaaggattacccacctggaagggcaaacccatgtttccacttcttcagatcagggtcgacgagcttcctgttattcctgaccagttgaagggcatagcccttctggtgttgtttcacaatgtggaacaacatccctttgacgaaccgcacggtgaaggatggttaattcgcgagtatgccagcctcgaagggcttcagccattgcctgaattggacacgccgtatcggccgtttccagttcattggctgagtgtcattgacgatgctcctggatgggaagatgcctgggatattattgatctctcttgcgtaaatgatgatgagcaggccagtgatagtttttttgaagatttcaatcgatacaggggaaccaaggtagggggatttccgactgagatacaacacggtgtgggaatcgaagagtttgtttttcaggttgggtcagaagaaaaagtaaactggatgtgggcggataacggtatcggttactttcaccggtcatcagaaggggaatggcggttttcatgtcagttctactga

SEQ ID NO: 125726 - DNA, 303 bp, Enterobacter cloacae
atgttgaaaagattagtcgcggggcagatgagcttaccgatgactttctggggatggggaatttgcggtaattttctactgggtctcattgggcttgctggagtacagaccggtcacccggccatggtgccgctttcctatatacttaaagccattctgttcagtgctgtactttccggcataactttcattctgcgtcgaaaaatcacggtattgggtgggatcgctttttttattattttgattcaggtgattatgagtgtagtgatgacgataggccttttctcgttattttttgaataa

SEQ ID NO: 125727 - DNA, 3090 bp, Enterobacter cloacae
atgagcggaagtcgcttcaacctgtcagcgctggccgtccgcgagcgttccgtcacgctgtttctgatcgttctggtgacgattgccggtatttacgccttttttgggctcgggcgcgcggaagatccgcccttcaccgtgaagcagatgacggcgattgccgtctggccgggtgcgaccgcacaggagatccaggatcaggtcgcggagccgctggaaaagcgcctgcaggaactcaaatggtatgaccgtaccgaaacctatacccgccccggcatggcgtatatcacgctgtcgttgcaggacaagaccccgccagccgaagtgcaggaggagttctatcaggcgcgtaagaagcttggtgatgaatccctgcgtcttccggcgggcgtcattggcccgatgatcaatgatgaattctcggatgtcacctttgccctctttgccctgaaagcaaaaggcgaaccgcagcggcagctggtacgcgatgccgaaggcctgcgccagcagcttctgcacgttcccggggtgaaaaaagtgaacattatcggcgaacaggccgagcggatttatatcgccttctcccatgatcgtctggccacgatgggcctctcaccgcaggatattttcaatgccctcaatagccagaatgccctggccgcggcgggcgccattgagacccggggcgcgcagatttttatccgcctggacggcgcgttcgatgaactgcagaaaatccgcgatacgcctttagtcgcccagggcaaaacgctcacgctgtcggatgtggcaacggttgaacgaggctatgaagatcccccgacgatgctgatacgcaatcagcatgaacccgccctgctgctgggcgttgtcatgcgtgagggctggaacggcctggcgctgggtaaagcgctggatgcggagacggcgaaaatcaacgatagcctgccgcttggcatgaccctgaccaaagtcaccgaccagtccgtgaatatccgctcctcggtcgatgagtttatgatcaaattcttcgtcgccctgcttgtggtcatggtggtctgttttgtcagcatgggctggcgcgtgggggtggtggttgcggcggcggtgccgctgaccctggcggtcgttttcgtggtgatggaggccgcgggaataaactttgaccgcgtcacgctgggctccctgatcctcgccctcggcctgctggttgacgatgccattatcgccatcgaaatgatggtggtgaagatggaggaaggttacgacagaatcaaagcctcggcctacgcctggagccacaccgccgcgccgatgctggccggtaccctggtgacggcgattggctttatgccgaatgggtttgcccagtcgaccgccggggaatacaccagcaatatgttctggattgtcggcctcgccctgattgcctcatggtttgttgcggtggtgttcacgccgtatctgggggtgaagatcctgccggcgatccccaaagtggaaggcggccatgccgccatctataacacgcctcgctataaccgctttcgccagctgcttggccgcgttatcgccagaaaatggcgcgtggccggctccgtggtcgccattttcattctggccgtgctcggcatggggctggtaaaaaaacagttcttcccgacctccgatcgcccggaagtgctggttgaagtgcagatgccttatggcacctcgattgcgcaaaccagcgccgctaccgcaaaaatagaagcgtggctgggcaagcagccggaagccaaaatcgtcacggcctatattggtcagggctcgccccgtttctatctggcaatggcccccgagctgcccgatccctcttttgcgaaaatcgtgatcctgacggacagcgagacgtcacgcgaggcgctcaagttcaggctcagggaggccgttgccagcggccttgcgcccgaagcccgcgtgcgggtgacgcagctggtgtttggcccctactcgcctttcccggttgcctggcgcgtgtcggggccggatgtcaaacaggtgcaggacatcgccgaacgggtgaaagccgtgcttcaggcaagcccgatgatgcgaaccgttaacaccgactggggctcgcgcgttccggtgctccatttcactctcgatcagaaccgcctgcaggcgaccggcttaacctccagcgccgttgccgggcagcttcagttcctgctctccggcgtgcctgtcacctccgtgcgggaagatattcgatcggtagcggtcgttgcccgcgcggcgggtgatatccgccttgacccggcaaaaatcgaaggctttaccctggtcggcaatgcgggacagcgcgtgccgctgtctcaaattggcaagatagaggtcggcatggaagacccgatcctgcgccgccgcgatcgcacccccacgattaccgtacggggcgatatcgccgacaatcttcagccgccggacgtgtcggtcgccatcatgaagcagctccagccgatcgttgattcgctgccggctggctaccgcattgacatggcggggtcgattgaggagtcgggtaaagccacgcaggccatgttaccgctgttcccgatcatgattgccctgacgctgctgatcatcattttgcaggtgcgctcactctccgcgatggtcatggtgttcttaaccgcgccgctggggctgattggcgtcgtgccgaccctgctgatatttaatcagccgtttggcatcaacgcgctggtcggcctgatcgccctctccggcattctgatgcgcaatacgctgatcctgatcggtcaaatcgatcataaccagaaggacggcctcgatccgttccaggcggtggtcgaggcgacggtccagcgcgcacgcccggttttattgaccgccatggcggccgtgctggcgttcattcccctgacgcattcggtgttctggggcacgctggcctggacgctgatcggcggaacgctgggcgggacgatcattacgctcgtcttcctgcccgcgatgtatgcgatctggttccggatccgcccggttgaacaacgcgtgcagcctgccacggaaaacgtgtaa

SEQ ID NO: 125728 - DNA, 1110 bp, Enterobacter cloacae
atgctcaggctcacttcagcccgccttgccatatgtcttctgccgtttgccctcgcggcatgcggcgatatttccgcgagtgacgatccgcgcactaagccaccgcttgtcagatccgcctctgtcgagatggcgaaccctaccgcccgcgccttcacgggcgtggtggtggcaagaacgcaaagcgacctgggcttcagggttcagggaaaaatcctcgaacgcctggtggataccgggcagaccgtcagacagggacagcctttgctgcgtctcgatcctgttgacctgaaattacaggcccaggcgcagcagcgcgcagtggatgctgcccaggcgcgggcgagaaaagccaccagcgatgaggcgcgttatcgcggtctggtggcgtccggcgcggtgtccgccgcggagtacgatcagattaaagcggcggccgatacggccagggcggatctcagcgccgcccgggcgcaggccaacgtggcgcaaaacgccacgggctatgccgtcctgctggcggattcagacggcgtggtgatggagacgcttgccgaacccggtcaggtggtcagcgccggacaggtggcgatccgccttgccagagcgggacagcgcgaagcgctcgtgcagcttccggagacgctgcgccctgccgtcggcagcgaagcacgggccacgctttatggccgtgaacaacacccggtcaccgccacgttgcgcctgctgtctgactccgcggatgccacaacccggacgtatgaagcacgctacgtgctggcaggccagctggcgaacgcgccgctgggggcaaccgtcacgctcagccttgaagacccgaaagcggaaggtcaggccatgcaggtcccgctggcctcactctacgatgcgggtaaagggcccggcgtctggcgcatttccgcccagccggcaaaggtcatatggacgccggttaaggtgctgagcgtgggtgaagacgcggtccagatcgcgggcggcgtgaagcccggggagaagatcgttgcgttaggcgcccatcttctgcacgaaggtgaagttgtcaggctggcagaacagcgccatgccgctccggcggagaacgcgccatga

SEQ ID NO: 125729 - DNA, 723 bp, Enterobacter cloacae
atgatgacccgtaaaaccttaattatcggcggcgcttccggcatcggtttcgccgtgggcaccctgcttgccgggcgcggcgaggagattatgcttgcgggacgcgatagcgcgaaactggacgcggcacggcaacgactgggcgctcatgccgcgtctgttagcactctcgtgctcgatatcagccgtgaggcagagcttgttgcgctcagtgaaacgctgggcgaggtcaataatattgtcgtcacggcgggctcacaggcgccgggcgggctgctttccggactggatctccgtgcggcaagacaggcctttgatacaaaattctggggaagcctgaatgtcgcccgctatctcagcgggaacatcgctccccgcgggacgctgaccttcaccagcgggtttgtggcgcgccgcaccggggcgggcgccatcgtaaaaaccacgatgaatgccgccattgaggccgcgacaaaggtgctggcgaaagagctttccccgctgcgcgtcaacgtcgtgagtccggggctgaccgacacggaagcgtatgcggggatggacgccgccgcgcgggaaaaaatgctcgcaggcgcggcggaaaccctgccagccaaagcctggggaagggcgcaggacatcgcacaagggtatcttttcgccatggacaatccgtttgtcaccgggtcggtcattgatattgagggcggggcgttaattaactga

SEQ ID NO: 125730 - DNA, 540 bp, Enterobacter cloacae
atgaaatatacgacgtgctttcgtcccgctatcgcggcgcttatttttgctggtctgtcgggcaatgctatttccgcgcagggggaaagagtacagccgaaacagctgattgtggacaagagcctgccccaggtgcaattaaagacgaatgaagccgttgccagagaatatgccacgttctggaacaccggtaatgaaactctggcgcgtgatgccctggcggcaaactttgttgataaaacaccgccggaaggccgtaagcaggggccggaaggcgctattttagcctcgcgggcgtttcgcacggccgtgcccgatttgcgctgcgacgttgagcagatgattatttcaggcgaccgcgtggtctcacatttacatttttacggcacattcaccgggacatttggcaggctgaaaggaaaggggcagaaaatagattttattgccacggatatctatgaaatccgtgacggtaaaattgcagcgaactggcatattgaggacaatctgacgctgatgaaacagctgggcgcgctgtaa

SEQ ID NO: 125731 - DNA, 582 bp, Enterobacter cloacae
atgaaagcagaatccgaaaacaacgataaaaaaataagcgtcagggataaaatattactgacggcccacgatctgttttattccacaggcttcagagcgacgggggtggatacgctgattaaagaggcgaaagtgacgaaggtgacgttttatcgccattttccgagtaagagcttgcttattctcgcctatttacactatcgacatgaaatatggattaactggtttgaggccacgcttcgtcgacatctcgttgaaggccagacgcctgcggacgctctatcggctaccctttatgaatggtttatttcgcctgatttccacggctgtgcgtttattaatgccagcgccgaagccaaatccgaagatattgaaagcgaaataaaagcgatatgccgcgatcataaaatcgaaacaaagaagattattgcgttgctgacaaagatcgctgatgagcgcgtcgtcaatgaaatcatgctgctcattgacggtgccattattcatgcgcagatgggcatggagacggatgaggtcatcacgtcgttgaagagggcgctggcagggttacccgatggcaattga

SEQ ID NO: 125732 - DNA, 513 bp, Enterobacter cloacae
atgacgcttcgaattcgacaggccaccggggccgattcaacgctattaagcgagttgggatatcgtatctatcccgcgcattttcagcatttgtgggtatcagatgcagagatgaaggattttttggacgccgagtataccccttccgtcattgagcagagcctgtccgagagccatgtttcctggtttgtggcagaaaccgatcggccagtgggatttatgaaagtgacctgggacgccatgcttccggaaacggacaagaggggcgttctcctcaacaagctctacctcgatcctgccgagaccggcaagcactatggtcaggacatgttcaataaaattatcgacatggcccgaagcaggggaaaggactctctctggctggaagtgcttgagcagaacgtgggagcgtaccggttctaccagaagcagggcatgctctgcatcaagaacgtccttttcgaaactgcctcacagcagagcatactcaaaattatggggatgtctctttag

SEQ ID NO: 125733 - DNA, 492 bp, Enterobacter cloacae
atgcctattcctccctatatgtggctaaaagacgacggtggagcacatattaaaggttctgtagatgttcaggatcgtgaaggtagcattgagatcataggactgagtcatggccttaacctcccggtagacagcgctaacggcaagatcaccggcacgcgtcaacactcatctatgcggattgaaaaggaagttgatagcgccacgccctacctttacaaagcagcatctaccggtcaggcactcaaaagcgctgaaattaagttctatcatattaatgatgccggacaggaagtctgttattacaccgtactaatggagaacgtaaaggttacgggtgttaactgcagcgtgccgaacgtgaaaatcgctgccaacgataaaatgaaccatgttgaaagcgtaagtctgcagtacgaaaaaattacctggcgcatcgtcgacgggaacataatgcacagtgacgcctggaacgaacgccctacagcataa

SEQ ID NO: 125734 - DNA, 522 bp, Enterobacter cloacae
atggccttaaaaggaacgatgctgctaaatggtgctgactatgcgccttttaacctgtacggcgttggcgtgtttatggcgcattccgggcagggaatttacagaaacaacggattttgtggtgcagttaaagggtcgggtccaattcccccaggtaaatactggattgttgacagagggactggaggtttcttttcaggtttaaaagcgaaggttcaggatcggtggaataaggtcaggtccggtgcagaatttggccgcgatgagtggtttgctttgtacaaggatgactggggaatcgatgatggtacctggattgataacgtctatcggggtttgtttcggctgcatccgggtacggtatctgaaggatgtatcacgattgcccataattctgattacgcactgatccggaatgctctcatgagtacagagcttattcaggttccctgtatgcggtcactgatggcacgcggttgggttgaggtgagtgaaagtggatataccaacgagtgcccttaa

SEQ ID NO: 125735 - DNA, 795 bp, Enterobacter cloacae
atggttcagccccattttcccgttctggcggatgccacgctggcggccttcaatactgtcggtgaatggctggcgcaggacgacctgagcgcgacccgtccgagcccggaagtcgatgcggtgattctggccggaaacgcggtgatccccaccattgacgcggcctgccgtattgccgcccagagagatgtaccgcttctgatcagcggcggtatcgggcattcgaccccctttttatatgctgccatcggcagccatccgcgttatcacaccgtaccggtcacagggcgggccgaagcgagcattcttgccgacattgcgcgggcgttctggcagatccccgaggcgcgtctgtgggttgaggatcgctccaccaactgcggtgaaaacgcgcgctttagctggaacatgctgaaacagcatcatcgaacgaccgggcgggtgctggtggtgcaggatccgacgatgcagcgccgcacgatggcgacgtttgcccgcgtgtgtcgtgatgagcccgattcaccgcagtggataagccatcccgggtttacgccgacgctgcaaaacggtaacgagggcgtggaattcagcgagggccacaccgggctgtggcccgttgaccgttacctttcactggttatgggggagctgccgcgcctgtatgatgacgccaacggctatggcccggccgggcgggattatattgctcacgttgaattccccgaggccgtcaccgccgcgtggaaacagctgcagcaggatcctgtcctgaagggcgcacgtaaaataatttag

SEQ ID NO: 125736 - DNA, 669 bp, Enterobacter cloacae
atgacgacagccccttttatccgccctcaactcaccctgccaaacggcgctgacaaactgctgctgcactcctgctgcgccccctgctccggtgaagtgatggaggctatccaggcgtcgggcattgagtacaccattttcttctataaccccaatatccatccgcaaaaggaatacctcattcgtaaggaggaaaatattcgctttgcggaaaagcacggcgtgccgtttgttgatgccgattacgacaccgataactggtttgagcgcgcgaaaggcatggaatgggaacccgagcgcggcgtccgctgcaccatgtgcttcgatatgcgtttcgagcgtacggcgctctatgcggcagaaaatggattcagcgtcatcagcagctcgctggggatctcccgctggaagaacatgcagcagataaatgactgcggccagcgtgcggcggcgcgctatccgggtatggtgtactgggactataactggcgcaaacagggcggatcctcacgcatgattgagatcagcaagcgggaacagttttaccagcaggaatactgcggctgcgtttattcgctcagggacagtaacctgcaccgtaagtcacagggccgcccgctgatccgcattgggaaactgttttacggtcaggatgacaatgagaaataa

SEQ ID NO: 125737 - DNA, 498 bp, Enterobacter cloacae
atgaaaaagctaacatggctgttattacttatgctgacaggttgtaccgggacaagtaaaccccagccccagtctccccccaagccaccggcaggcgtcataaaaatccttgaagataaaagaattgcttcgtatatcgattttcgggtgatttcaacttatcagggtaacgatcacttacgccgcttttatttcatcaataactacgccgagaagacactcattataaaaaatcctcccgtctacatagcgagctcacgggcaatcgacgtgattaactgcgacaaaaaccagcgtgccgttatggcgcgaacctatttttcgaaaccgttcgcggaaggcgatgtcgtacatgtgacacaggatgtgggacaatgggaaagttacccgaaagactctctttttgggataatagcggaaagcatgtgcagtattcccgttgaaaaactcaagccagagccagcgaaagataatcgaaaaccgttactggatgaataa

SEQ ID NO: 125738 - DNA, 624 bp, Enterobacter cloacae
atgcgtaaactcatctcctccattgggctcatagcaggtatggctgtagccacacccgcggttcacgccagcacgttgacacaaacgttaacccgctgcgactcaacctttttcaacgagatttatcatcagcgagccaaactcagccgcgtagcccccttaacgcttaacaagcattcgcaggcctggttcaaagcacctgaagacggcaatcgcaccatctggtttgctcaaccgctgcatgaattaaatctgacggtatcgggatattacctgcaaaccagcaatctcgatgaaatcaattacggtaagtactattactggggactcattttcaaagagtcacaagaagaagtgatgtccagacttgatcatttgtcctggaaaaaggcgggagatgattatgtttctcagacgatgattaaaatcaacccaaacagtgactgggaagacaacgcgcaggcggtgtcaggtattgctccggcaaaagaaagtaccgaaaagctgttaatgctcagcaaaagcaaagacgggacattattgctctgtaccgttcagggaaatgtaacgcctgacatgctgacgacattacgacctgatttatccgcaggggatgcgaaatga

SEQ ID NO: 125739 - DNA, 390 bp, Enterobacter cloacae
atgaggtgtcaagatctgaatactattcagaacaacgcaaaccataaactcgctaagctggacgtttttgtgttaaatggtggcatcaatcagcaggtgattattgtgaaatttttttggctaattttaaaactcataacagcatcactttatgtgttcctggtagtttttagttctggatttgtaggttcgagtacagccaatgcaattaatcttgaaacacttaacctaaactatgggttaattgcaaaggattcggcggtatacgcaatctgcgcaactggtgcgacattggttgtgccacctgtcttatatgtaattcagcattatgtctggcctgtactgaagtttatcggcctgaagattcgctacttctttcatggatactaa

SEQ ID NO: 125740 - DNA, 150 bp, Enterobacter cloacae
atgaacctgtcctgtatcttgaaccacggtgagttggagcgcgtcctgggcgtacggattatggttcggctgactatgcatggtggtttgtgggtgaattttaactggggtagctatagaaagcatattggtaactttcggaatgaataa

SEQ ID NO: 125741 - DNA, 675 bp, Enterobacter cloacae
atgagactctatattcttgtcgagggtaagcaaactgaacgtaaagtttatccttgttggctggcccaacttgctgctcatatgcaacaggttgagtcacctgatctggtacttgaaaataattatttcctcatcagtggtgagggttatcctcgactcttagacgtgtccctacaaaacagtttgaatgatattgctcaaaatggcaattatgatatgttttggatagttttagactctgatggcgaggatgttgaggcaagggcaaatgacatttatgagcgtatatctgatttgaatatcgacattaaagattgttcggtagaaattataatgcaaaacccttgtattgagacatggggtttaggcaacagaggtgtaattagcttaaaccaattacatgatgaattcaatgagtgcttccatttttatgatgtagcgtcaaatgatcctgagttgatgacaaaacctgataatttcattggtactattgctaactatcatgaatattatataaaaaacatgtacaagcaagtcagaatgacttacagcaaaaacagaccaatcgcactaaccagcagcaatacgctagaacaaataatcaaaagaacgaatgatacaccagatcatttaccatcatttaaaaaattctttgatttagcgagtcaactctaa

SEQ ID NO: 125742 - DNA, 1149 bp, Enterobacter cloacae
atgaaaataatttcacttactgcaaaaaacacccattcgaaccttgagatactgcctgtacagttcgataacctgtcccttctggtaggagcatcaggagtaggtaagacacagatactcaatgcagttcgagacgtctcccggatcgcgagagggttcgctgttggaagttttaagtgggagctcacttttgaaatagataactgcacctatttttgggctggtgaaactgacaagtctaaagacaactcgtttcaagcaaaagcaatgggtggtttttggggttttgaccaaaaagagaacaggccagatgttgttaatgaaatcatcaaaaaaaatgatgtggttctaataaaccgtgatggactcgacatcatttttaaaggcaaaaaaacagtaaaactttcttctaaggaaagcgttatacactcacttaaggaagaggatgatattagaaaaattcatgaagcattttcttctgtaataactacaactgatctcgaaatgccacgctttcccgggttttatggtgtacctaagaataagccaactcatttcgataatcttaatgcacttcgaaactcaaaaagaccttttatccaaaagctttattattgccaagagttttttgcttctgatttcgaagaaataattaattcctatatggatatctttccttatgttgaagatgttgccattgacagagtgtctgttggccattctgacgatgaggaagaatactttcaattcattcttaaaataaaagagcgcgggatcaatgaatgggtgttccagcatgatatgtcttcaggtatgtttaaaaccctataccacatttcatgcattttcctttcatctgacggatctgtatttttgattgatgaatttgaaaatgggttcggtgtaaactgtattgatgatgtcacaaaaacacttatttcatgtggcagaaacatccaattcattatcactagccatcatccatatataatcaataatatacccgcatcaaaatggaagataatttctcgtaaagcgggcaggatttctgcgcatgatccatctgagttttcgctgatgaaatcaaatcatgaatcatttactaaactcataaatcttagtatctaccaagatggtgctgatagatga

SEQ ID NO: 125743 - DNA, 597 bp, Enterobacter cloacae
atgcaactgaaccggattaaagccgtgcgcgtctgtaaagctccgcatcgtatcgctggcagaccttcagtggttgcgcataatcgtgtgcagcggcagtttaccgttgtctgggccaatcaggtctgggtcagcgatattacttatattcgcgcctggcagggctggctgtatctggcggtggttatcgctctcttagcccgtaacgtggttggctggtcgatgaagcccactctctctcgcgaactcgcgttggacgctctgatgatggtcgtttggcgtcgaaaaccggacggcgaggttatcgtacataaagatcagggcagccagtatggtagtgacgactggcagcgcttctaccgggccaataacctggcgccgagcatgagcaggcgtggcaactgctgggataatacggtggccgaatcgttcttcagttcgctgaaaaaagaacggatcagaaaacgcatacataaaaccagggatctggcccgggcggatatcttcgattacattgaagtgttctgcaaccgggcccgacgccacagtcatctcggcggcgtcagtccggaggccttcgaacaggcctcatcgtga

SEQ ID NO: 125744 - DNA, 285 bp, Enterobacter cloacae
atgggcacaccacgatttacacctgaatttaagaaagaagccgtccgtcagataacggaacgcggttattccgtcaccgaagtttctgaccggctgggcgtttcagcacacagtctctataagtggttgcgggctatcaaacacgataacagcgagcagcatgcccgtgatttactggaagcgaaaagcgagctcctgaagctcaggacccaactgaagcgcactgaagaagaacgggacattctgaaaaaggcggcgcggtactttgcaagggagcccgactga

SEQ ID NO: 125745 - DNA, 510 bp, Enterobacter cloacae
atggccatgaagcgtgaaaatgaaaagttacccgggatagatgaaagatatcgcttgctgacgtttgaatacgcgtttcgtcaggtggggtttattgttctgttaggtattatcgttgccgccattgccggtctgttttcaagcggaatagtcagcgatacggtaaaaacaaattccgctaagtcgctgaccataaactatgagcgctttgggcggcgggagacggagacacggatgcagcttgcgtttccggtgaaaacggaggggacctataccctcagcgtcaccagcgagcgtagcgaggcgtatgatccaggcagcgtctggccccagccggacgccatgttcagccacggaaacagcctttattttgtttatcacaacctgaaaaagacggacaacttttcggtattactctttaccacaccgtcccgagccggtaaatggaactcggtcatccgcgtaaacaacgaaccggagatcaccctctggcaatttatttacccgtag

SEQ ID NO: 125746 - DNA, 204 bp, Enterobacter cloacae
atgagcatcagtcccaggacaattaaacggtgccatttagcggcagcgataatatggttcattctcgctatcccttccgtcatctggtggaagaacagcgtgctatgggtcattatcatcagtatttatgccaatattgtcggccatttatctggctacagtgccgcacgtgccgatcaggctgctgaaagtgagaccaaataa

SEQ ID NO: 125747 - DNA, 540 bp, Enterobacter cloacae
atgtcttcagaactcatccccgtcacccaggatatcgaacttcgcgccgtcgaagagcgctacaccgccgacctgcacaatctcgttgttaaaaacagagcctttctgcaaaccgcctttgactgggcgcagcacgtgggcagcgaagaggatacccgccgcaacgtgcagagcaaccagatgctgcatcagcgcggctacgccaaaatgtttttgattttcaaggatgatgcgttagttggcatcctgtcgttcaacactattgaaccgacgaacaaagccggctacatcggctactggctggatgaagcccaccaggggcagggcattctctctcagtcactgcaggcgtttatgcgctactacgctgaacgcggtgagatccgtcgttttgtgatcaagtgtcgggtggcgaatcagcacagcaacagcgttgccgtgcgcaacggttttacgctggaagggtgcctgcgggaagcggaatacctgaatggccgctttgacgacgtgaatatctacggcaggatttataccctataa

SEQ ID NO: 125748 - DNA, 675 bp, Enterobacter cloacae
atgcgtactcaaactttttttaaagttgcagtgcttactggtctgttggcgttggcgggctgttcttcaaaagtcgccgctccggaacaatactccggctttttaaaagattattcaggcttacagcaaacgacctcggcgacgggaaaaccaacgctgcgttgggtcgatccttcgtataacgaagccaattacgacagcattctctggacgccaattacctattatccaacgccaaaacccaccacgcaaattgggcaaaaaacgcttgatgagttgttgaattacaccaataacaaaatgaaaacggcgattggtacgcgtaagccagttgtcaccacgccgggtaaacacagcctgattttccgtggcgcgattaccggggtgagttcgcagaaagaggggctgcagttctatgaagtggtgcctgttgcgctggtggttgccgggacgcagatggcaaccggacaccgcaccatggatacgcatctcttctttgaaggcgagctgatcgatgcggccactaataaaccggtcatgaaggtggtacgtaaaggcgaaggtaaagagctgaataacgaaaacacaccaatgacctttgcgacgctgaagcaggttgttgatgacatggcgacggacgccaccatgtttgatgtgaaaaagaccgcgaaataa

SEQ ID NO: 125749 - DNA, 537 bp, Enterobacter cloacae
atggtcaccacacacgtttttatcgcaaccagtcttgatggctacatcgcccgacacaatgatgatatcgactggctgctgcagcgcgatgacccgaatgaggatcatggctacacggctttcatcgcggacaaagactggatcgtgatgggccgggggagctatgagaaggtgcggacctttgagacatggccttatgaccggcccgtgctggtgctctcccgacagctggtcgacacgcccgtacccgacgcgctgaggggcaaagtacagttttccggccgcacgccaaaggaggtgctcgacgatctggcgaggcagaacgcccgtcgcgtctatctcgatggtgggcaagtcatacagtcgttcctgcgagaaggactggtggccgatatggtgatcacaaccgttcctgtcctgctcggttcgggaaaatcgctgtttggcgcccttcccggggatatcgatttgacgctggtctccagccgcagctttccttcgggtctggtgcagtcgcactatcgggtgacgccataa

SEQ ID NO: 125750 - DNA, 843 bp, Enterobacter cloacae
atgcgtgcaaaacactgttttctcgtactgagtacgttgctgttttcatttaatgccactgccggtttgttcgattctgcgcccgaatttaaatgtggtcgtgaggatgccattgctgctatgcaatctaaaatcagagatgatgcgatgagtaaattgcaggaaacgtatctggcaacgccttcgcaattttatggaaaaccgcttaaatcttacctggaaaaagcacagcaaataactattcatttggaaaatgtcacaacgacaccgtttgataaaaatgattcaaaccgcagttgtaccgctaaggtgaccctcaccatgccaacggaaattcttgggtttattgcatcctatcctcagaagttaggtgggataaatcaagggggcggcaaggtgcttaacaatagtgttcaatgggagaagtttgtttatttattatctctggcagacaatggcaaagatatttctgcatcctatgaatattctggtagggattatatttctcagtcgctggccgctatgactatgctggcaatgaataaatccgaacttgagaaagccgatctcgataacaaattaaacaatgccatatttgcctattcagaaaacgatggtcagttaaataatctctggaaatcgcttccagagtctgtcagagcctctatgaaaaaagaacagaatctctggattaacgagaaggctaaaagatgcgggaagatcagtgatgcgtcttctactgccacgcctgttgagacaagaatcaagatctatcagtgccagtctgaaagaacctttgaaagatttatctatctgggtggagatgaagaacgacagtattaa

SEQ ID NO: 125751 - DNA, 789 bp, Enterobacter cloacae
atgcaggagattgatttttatctggtcgatgcgttcagcaataccacgtttggcggcaacccggccgccgtttgtccgctcaaggaatggttacccgatgagaccttgctgaaaatggcacagcagcataatcagtcggaaacggcctttttcgtctgcactaaaggaggcattgagctacgctggtttaccacgcttaccgaagtcaatctctgcggccacgccacccttgccgccgcgtacgttctgtttaatgaactggattaccccgactcgcggatccactttgataccgcctctggccgcctgacggtcagccgggagggggagtggatgacgctggacttcccggcatgtccaacccatgaagagacgccgccgccggagatgctctcggcgctcggtatccgtcattacgttgcagcacgcaaagggcgcgcctggctgatcgtgctggacaatcgccagcaggttgaagcactcgcgccacgcttttcggcgatgacgccgggcgagcataaggtgagcgtgacggcacggggtgagggggaatacgattttgtcagccgctttttctcccccggggtatccgttccggaagacccggtcaccggctccgcgcacacgatgctgatcccgtactggggtgaacagttggggaaaacagccatgcttgcccgtcaggtttccgcgcgcggcggcgacgtgcgctgtgagctgaaaggctcgcgcgtgctgatgagcggacaggcttcactttatctgaaaggcacagtttttctgcgctaa

SEQ ID NO: 125752 - DNA, 588 bp, Enterobacter cloacae
atgaagtttttgagtttgttaaccggacgggttttccaggatctcctgcaacatggtaaagatatagaggaggctattgctcgtcgtgatacccgccttctggataattccactcccgagctggaacggtatttttcgcgccccctcagcgagcttccgcgtcaaaatccttacccggtagctatgctgttacctctgtttttagtggcgtttgcgctaaaccttttgccttttctcagcacgttgcagggtttgtcacctttacatcatgcattgagctttttcttaccatcattgacgatgacaggcgcgctcattgtgacaagcgtactactggctcgtggaaagacgtcgggattgtcgggctttatggcgttgttcatcatcctgctgataacgaccctcgttcaggttctacatgtcatgctttctcatgatggaagcctctggccacacgtcattgcatctttcgcgctgttactttgtcgggtggtgatgaacggcagcggctttgttctgtttacgctctattgtcgtactcagcgtcttgccagattggcacgggaaatgcggctaaaaagccgttaa

SEQ ID NO: 125753 - DNA, 639 bp, Enterobacter cloacae
atgaattctgtcattgaattttttttacacgactacgatgatttacccccagcattagcgcgcgaactttaccgactccggagaaaaacgtttcgggaccgactcgactggaaagtggaatgcgtcgaaggtatggagaaggatcaatttgattcccataacacgacatatttactgggtatgtatgatggacaactgttatgcggcgcacgatttattaacgcaacgcagcccacaatgataagcgaaatttttcataattatttcgacaaccccattatttttcccgcagatgttccttgttgtgaagtgagccgtttatttttagataaagaaatacgagattccgcaagtctgcatggcgtgcccgccagtaaagcattgtttcttgcaatgaatatttattgcatgaagaacaaatatcatggaatgtatgctgtagccagtcgtggaatgtatgccatatttcgccatgcgaactggaaagttgaagttattcagcgtggtgtttctgaaaaaggcgaggttatttactatatttatatgcccgccagcaccagcattattgaagacattattagcaaagacaaatccagtcactggcttcgcgaaatgctcgagcacttacgccatttataa

SEQ ID NO: 125754 - DNA, 693 bp, Enterobacter cloacae
gtgaaggatacatattacaacgacttaacgatcaatacgcaaattcagagtgagctggacgcgttttttgaggacttcaaagggatcgtcttcgcctacgccattatgaacaagaaagatccctcacagatgaggataatcaataacagtccagagtggtttactatctaccttgaaaaaaaatatcagttcattgaccctgttatcattcgggctttgcgctgtgtggaagattttttctgggaaagtgatgttgtcctgtcagatggttataacctgacgcgtattttcgacgaaagtgtccagtatgatatttatcagggacagacgtttcctctgcatgactatttgaataatcttgttgtcttatccgtcatcagtcctaagcattctgggattgacattgaaaaatatcggccgcattttctacgtttccttgttcagttacaccagaagacactcaatctgtatagtcagcatcagcagaaaaagaatgttttcctgtcgccacgtgagcgccaaatccttaaatgggtcagcgccggaaaaacgtacgcagaaatttctgttatattgtctattgctgagcgcaccgttaaattccatatgggcaacatcatgaaaaagctcggcgtgaataatgcaaggcacgcaataaaacttggaacggaactccggttactggaggactga

SEQ ID NO: 125755 - DNA, 387 bp, Enterobacter cloacae
atgtttgatcatgtgaaatttggcgtcagcgattatgaaaaaagtaaaaccttcttcctcgaggcgcttcgtccgcttggtgtagaactcatcgatgaaggcgcgccggattatggtgttgagatgagctctggcgacgtttcgctttgccttttccagacaaatgacaaaccagcgcctctgcatctggcgtttgtggccaagacccgtcagcaggtagatgatttttaccatgccgcgctgggcgctggcggacgtgataacggtgagccggggctacgttcctatggtgaaaattactatgccgcttttgtcatctcgcctgatggtcataacatcgaagccgtatgccatgcgccggaaagtcatttagaagctaaatcctga

SEQ ID NO: 125756 - DNA, 1038 bp, Enterobacter cloacae
atgaagtatgtgaatctgggtcgtagcggtttgcaagtctcccgtctttgcctcggttgtatgagctatggtgaacctgaacgcctgcctcaaccctggtccctggatgaaaaagcgtcacgaccgctcatccgtcaggcgcttgaagctggcattaatttttttgataccgcgaatatctactcgggcggaagttctgaagagatcactggaaaagcgctgagagaaatggccagacgcgatgagatcgttgtggcgacaaagaccttctttccgtggcgcaactcacccaataccgggtttctttcccgcaaggccatttttcagtctattgacgatagcctgatgcgcttaggtatggattatgtggatctctttcagattcaccgctttgaccactccacgcctgttgaagagaccatggaggctctgcatgacctcgttaaatcaggaaaagtacgttacatcggcgcatcatctatggaagcctggcgctttgcaaaaatgcagcatactgcagagcgtaacggctggacccgatttattacgatgcaaccgcaatacaatctgctttaccgggaagaagagcgcgagatgttgcccctgtgtgaagaccagggcgttggtgtgatcccctggagtccgatggcgcgcggcaggctcacgcgcgactggagtgtcacgtcccgacgaacgcaaaacgatgcctttgcgttaaaaatgtatgagaacgcagcccttctggataagcccgttattgatgtcgttgccagcattgctgaaaagcacgatgtgccaagagcccatgttgcacttgcctggttgctatcaaaaacggtcatcacagccccgatcattggcgcgaccaaaccagaacatctttccacggctatcagcgcactggactttacacttagcgatgctgaaatcacggaactcgaggcactctatctgccgcaccccgtcgacgggatcattcccccgcttcctgatacgcccccttcactcacgccgccttcagcaatacagaaccgttaa

SEQ ID NO: 125757 - DNA, 909 bp, Enterobacter cloacae
atgcaaataagcagagctgatgtcgccgatctcatttatttcatggctattgcacgtcatcgcagtttcagccgtgcggcgattgaattaggtgtcagtgcatcagcgcttagtcatgccctgaagggactggaaacccggctcggggttcgcctgcttaatcgcacgacaaagagcgtcacccctacggcagcaggtgaagaactggttcagtctgtccttcagcctttcgacataatagaaggcgcatttgaatcgcttaacaagtatcgtaatacccctggcggacgtatccgcatcaatgctgccgttgaagcggccaatcttttgcttgcgccggttatgcccgcgtttatggatcgctatcccgatattgaaatcgatattgtggccagcaaccgtatggttgacgtcactgatgcgggcttcgatgccggtatccgctatggtggcaccgtcccggaagacatggttgcccggcgtttatctgccgatattcgctgggttatcgccgcatcccccgactaccttgaacgctacggaacgcctgaacatcctgatgatttattacaccatcgctgtataagcaatcgtctcggcgacgatcggatttatcgctgggaacttgagcgagacggcgaaacgtaccaaatcactgtgccaggctctgtgacggtcaatcaggctgaaacgggccttgtggccgtcttaggcggagccggcctaatgtattttccggagcctcttgttgcaccctatgtgaaggatggacggctccgcctggtgcttacggaatggtcgccgctggaggaaggtttttatatctattattcaagccgccggcaactgccgaccgggcttcgccttctgattgagttcatacaggaggccaggccgctggggttgtga

SEQ ID NO: 125758 - DNA, 588 bp, Enterobacter cloacae
atgattaaaattttatcccttcgcctgaaacactgtaacgcgctggccaacagcatgagcaatgcctccccgacacagctgcagcagtttaagacgcaattgtccgaacagatgggtaagcctgtgggactacataccatgggtattccggcagcgatcagtacgctcggggtgattgtcagtttcgccattccgcagctgtggttgggctatggcgtactcgccgcactcagccagccagctgaacgcgtattcgtgtgggttgtgctggtcgccctgcttttcgctggcatcaacggcgtgacgatgttcatgattggcaaaggcagcatgcgcgccgtacggatacaccttgcgctggcggtgataagcctggtattaacggcagcctatctgctggtcgcgctgatcggtaacccttttccgggcgtcagtctgactgcggcattggtgagtatcgtcatgttattgcttagcggcagctgtatcctctccacatccttttataagatgctgctgtttactctgcataatcgtgcctggcgcaagctgagcgggcaaactcgcgatgcacacacaccgcactaa

SEQ ID NO: 125759 - DNA, 1305 bp, Enterobacter cloacae
atgattaatcgatccgaaacactacgacaattgctgagacaaggcccggtatcggtaaggcaactgactgatattatgggtattagtcagcctaccgtttcacgatcgattaaagcgcttggcgatgaggttgttcgcattggctccggtccatctattcactatgtgctgcgggatacacatcgaggattcagttcggctcctgtctaccgcatcacggaagagggtcaggttaaatcgctgggtaaactcattccggtttatccagacggttttgtaatggcgcaaacggacaatgtgtgcctccatagcgatgggttgccgtggtggttgtttgacatgcggcctcagggataccttggccgcgcgtacgcctcgcgattttcatccgagctgggcctgccgccaaatccagataactggagtgatactgacgttatcagggctttgctcgctcatgggcacgatgcggtggggaacctgttaatcggagaacaggcgaggaatcattttgtagagatgccgtcgcctgttgcggtggaccgcgcaaccgcatacccgtcgctggcgcaggccgtgagcgcgggcgaattaccgggctcctctgctgggggtgaacagccgaagttctgtacttatacagaacgtggccacgtcattgtgaaattcacggcaccggacgataaccctgtaagcgaacgctggcgagaccttttgctagcagaacatcttgcgttaagcgtgcttggcgtcgaaaccgaggtgtttgattttggcggacagcgcttccttgagatcccgcggttcgaccgtacgggaccccttggtcgtaagggactcttttctttacgtgcgctcgaggcggagtttgtcggcagggcaagagaatcctggccggtactggtgaatgagctggcaaagcagggctgtgttcaccaggatgcggtcgccagcacgtcaaggctttgggcgtttggtatgctgatcggcaataccgacatgcaccacggtaatctgtcgtttatcagttcccatggacggccttacgatcttgctcctgcctatgacatgctgcccatgggatttgccccgaaatcaggaggcgcactggtgaatacgctgcgtccggctacgcttattgacgcgatcgggggagaaacctggcatgaagcactggcgctggccgagcgcttttatacgctggccagcagttgcggccgcttttctgccaattttgcgccatgtcttgccgcattgcgcagccatctggacgaggcgagattgaaggtgtcgcgtcttggataa

SEQ ID NO: 125760 - DNA, 3177 bp, Enterobacter cloacae
atgattgaatggattatccggcgttcggttgccaaccgtttcctggtgatgatgggtgcgctgtttctcagcgtctgggggacatggaccatcatcaacaccccggtcgatgccttgcccgatctgtctgacgttcaggtgattatcaaaacaagctatcccggccaggccccgcagattgttgaaaaccaggtgacctatccactcaccaccaccatgctgtcggttcctggcgcgaagaccgtgcgcggtttttcacagtttggtgattcgtatgtgtacgttatttttgaagacgggaccgatctgtactgggcccgctcgcgcgtgctggagtacctgaatcaggttcagggcaaactccccgccggggtgagttccgaaatcggcccggacgccacgggcgtaggctggatatttgagtatgcgctggtggaccgcagcggaaaacacgatctcgccgagctgcgatcattgcaggactggttcctgaaatttgagctgaaaacaatcccgaacgtggccgaggtggcctccgtcggcggcgtggtgaagcagtatcagattcaggttgacccgttaaagctggcgcagttcggcgtcagcctgccggaagttaagcagtcccttgaatcgtctaatcaggaagcggggggatcgtccgtagaaatcgcggaagcggaatatatggtgcgggccagcggctatctgcagaccatcgatgatttcaatcacatcgtcctgaaaaccggtgagaacggtgtgccgatttacctgcgtgatgttgcccgcgtacaaacggggccggaaatgcgccgcggtattgccgagctgaacgggcagggtgaagtggcgggcggcgtggtgatcctgcgttcgggtaaaaacgcgcgcgaggtcattacggcggtaaaagacaagctggagacgctgaaggccagcctgccggaaggcgttgagattgtgaccacctacgatcgcagccagctcatcgaccgggccattgataacctgagcagcaaacttctcgaagagtttatcgtggtggccatcgtctgtgcgctgttcctctggcacattcgctcggcgctggtggcgattatctctctgccgcttggcctgtgtattgcctttatcgtcatgcatttccaggggctgaacgccaatattatgtcgctgggaggcattgccatcgccgtcggcgcgatggtggatgccgccatcgtgatgattgagaacgcgcataagcggctggaagagtgggatcaccagcacccgggagagcagattgataacgccacccgctggaaggtgattaccaacgcctctgtagaggttggaccggcgctgtttatcagcttgctgatcatcactttatccttcattcccatctttacccttgaggggcaggaaggacggctgtttggtccgctggccttcaccaaaacgtacgccatggcaggggcggccgcgctggccatcatcgtgatccccattctgatgggattctggatccggggtaaaatccccgccgagacccgtaacccgctgaacaggctgctgattaacgcctatcatccgctgctgattcgggtgctcaactggcccaaaacaaccctgctggttgcggccttatccatcttcacggtgatctggcccctgagccaggtaggcggcgagttcctgccgaagattaatgagggcgatctgctgtatatgccgtcaacgttgcccggcgtctctccggcagaagcggccgcgctcttacagaccacggacaagttaataaaaaccgtccctgaagtggcctctgtcttcggcaagaccggcaaagccgaaacggcaacggattccgcgccgctcgaaatggtggaaaccaccattcagcttaagcctgaggatcggtggcgtcccgggatgacgattgacaagatcgttgaggagcttgataagaccgttcgtttgcccggtctggcgaatctctgggttccgcccattcgcaaccgcattgatatgctgtcgaccgggattaaaagcccgattggcatcaaggtgtctggtaccgttctggctgatatcgacgccacggcgcaaagcattgaagcggtagccaaaacggtgccgggcgtggtgtctgccctggcagaacgtctggaaggcgggcgctacatcgatgtcgatatcaaccgggagaaagcctcccgctatggaatgacggtgggcgacgtgcagctgttcgtctcctcggccatcggcggtgcgacggtgggtgaaacggtggaaggcgtggcccgctatccgattaatattcgttaccctcaggactaccggaatagcccgagcgcgttgaagcagatgccgatcctgacgcctatgaaacagcagattacgctgggtgatgtggcagatatcaacgttgtttcaggccccacgatgctgaaaacggagaatgcccggcctgcgagctggatttatatcgatgcccgcggcagggatatggtgtcggtggtgaacgacattaagacggccatcagccagaacgtgaagctcaggccgggtaccagcgtgtcattctccgggcagtttgaactgcttgagcacgccaacaagaaactgacgctgatggtgccgatgacgctaatgatcattttcgttctgctctatctggcgttccgtcgcgtggatgaggccctgttgatcctgatgagcctgccgttcgcgctggtcggcgggatatggttcctgtactggcagggcttccatatgtccgtggcaaccggcaccgggtttatcgccctggccggggtggcagcagagtttggagtggtcatgctgatgtatttgcgtcatgccgttgaagcacatccggcgctgtcccagcgcgaaacgttcactgaacaggggcttgatgacgccctttatcagggcgccgtgctgcgcgtgcggccaaaggcgatgaccgtcgcggtgattattgccggtctgctgcccattctctgggggaccggggcaggctcagaagtcatgagccggatagcggcgcccatgatcggcgggatgatcacggcaccgctgctgtcactgtttattattcctgcggcgtataagttaatttggttgcgcaggcataaaccagagacagccgttggtgaagatgacaggggagtcaatacctga

SEQ ID NO: 125761 - DNA, 339 bp, Enterobacter cloacae
atgcgcaattcacttaacgccgtcgtatttggtgcaatcattatgttttctgccggccttcaggctgaggttcatcaacacgcggagatgagcgctgccagcgaaggtgcctcagagcaggtcatcaccgggaccggcattgtgaaggatattgatatcacgaataaaaaagtgacgatttctcacgaagccatcccggaaattggctggcccgcgatgaccatgcgttttacttttatgcaggccgacgcgagtattactgccttaaaagtcggcagccacgtgaatttctcgtttgttcagcagggcaatctctctttactaaagagcattaaatag

SEQ ID NO: 125762 - DNA, 1404 bp, Enterobacter cloacae
atgacgctattttcaaacctgcccggcgatgaaggattacccggtaataaacgcgccagggtgatggccgccatcatgaccaccacgctgatgggcgtctttgacggcaccatgatcaacatcgcgctcccctccatggctagggcaatgcaggtgcccgcgaacgttgcggtgtggtttgccaacggctatctgctgtcagcggccatgacgctggccatcttcgcggcgctggcggcgcgcgttggctatcgcccggtgtttcttgccgggctcgccacctttacgctcacctcgctcggctgcgcgctggcaacaacgccggaaatgttaaccgggatgcgaattctgcagggcatcggcggggcggcgaccctgagtattgccccggcgatcctgcggtccgtttttccgggccgactgctgggccgcattctggggctgcacgccctgcttatcgcctccagcacggcgattgccccggtactcggtggaacaatactggacgccctgagctggcagtggcttttcgccattaacctcattccgggcagcatcgccctgctgctggcatggcgggccttgccgcgggaatcggttgctgacagaccgccctttgatgcgccgggcgccgtgctctccgccgtcctgttaggttccgcgatcatgctggccgacagccttcagcatgtgacggagcacattaacctgcaggccgtcttctggggcgttctcgcgctggttagcgccctcgcctttacctggcggattcggcgcgcgcaacatccgttactgccgccggtgatgttcagaaacgggcgcttcaccctcgccgcgctgacctcgctggcctcgtttgtgagccaggggatcacgtttgtcgcgctgccgttcctgtttcagagcgtgtatggctacagcccggtggtgtcggcgctgctgttcaccccgtggccgattggcatcgtgctgatcgcgccacacgcgggtcgctgggcggatacgatctccgcaccgctcatctcgaccctcgggctgatggtctttgtcggcgggctggtcctgctggccacgttgccggagaatccttccgtgtggaatatctgtctgcgcagtctggtatgcgggatggggtttggctgcttccagagccccaataaccgggaaatgctcgctaacgtggcgcgggaacatgccagctatgcctccggcgtgttgtcgatcgtcagaacattcggccagtgtctcggcgccgccgtggtgggggttctgctgggagcggcggcaggatgggaccatcaacatgctatccaggttgcactgtggttagccgtcatcgcctcgacgggttcggtggtatttagcctgagcaggctgcgccctgcggttcgggcatccgcgtaa

SEQ ID NO: 125763 - DNA, 231 bp, Enterobacter cloacae
atgtttctactcataccatgcgctcttgcaatcctcatgtttgccaacacaagtgcgattccttctttaggcaacaaaggtataacagccatattaaccatccatctactgtgggtatgtggccgcgtatcgtacacttttgcgatggtaaaaaagatatctgtttccagagaaatgacgaaaaaatatccgactaaggtattaatcgcattaaaaatcaaagaaatgtag

SEQ ID NO: 125764 - DNA, 894 bp, Enterobacter cloacae
atggacatagacctgctcctgacgctggacgccctgcttcaggacaggaacatcacccatgcggccgcgcggctgggcatcagccagcccgcgctctctgcacgtctcgcgcgtctgcgcacgctgtttggcgaaccgctgtttattccctccccgcatggacgcggggtattgcccacgccgcgcgcggaagcgctcaggccgcaggtggcaggcgtgctgcgcggcatcagcgcgatgtttgcgcccaccgcgtttgacgcgcaaaccagcaaccggacatttgttattgcgctgcatgaaaacccggcgctgatgctcggcaccgcgctgcttaaccaggtgggtaccgatgctcccggtattcgcctgcgcttcgccctgcccgagatggccgaactgccgcagcagctggagaacggcgatgtggatctctacatcggcgtgagcgcgggcgcccatgacgggtgggtaaggcgcaaactcctcgacgacgcgtttgccaccgcccagcgaaaaggccatccgcgcggaacgggtgcgttagatctggagatctactgcgcgctttcccatctggtggtgtcgtcggcgggcgatccgtttaccggatttgtcgaccaaaccctcgccgggctgggctatcagcgacacgttgccatgtccacccagagctacgctatggcgcctgcgctggttgccggtaccgacctggtgtgcaccctgccggaacggatgctgaagcagtttgccagcacgctggatctctttgcaccaccgctgccgctccagcccattaccatcaacatgtactggcacccgaaaaacagccaggatccggcgaatgcctggctacgcgagcagctgctgcgggccgccggacgtcaggtgtga

SEQ ID NO: 125765 - DNA, 1488 bp, Enterobacter cloacae
atggaaaaccagattaacgatctccgcagcgccatcgccttactgcagcgccacgaagggcagtacattgaaaccgatcgtcccgtcgaccccaacgcggaactggcgggcgtctaccgccatattggcgcaggcggcacggtcaaacgtccgacccgcacgggcccggcgatgatgttcaacagcgtgaagggctatccgcactcccgcatcctggtgggcatgcacgccagccgcgagcgcgcggcgctccttctgggctgcgagccctctgaactggcaaagcacgtcggccaggcggtgaaaaagccggttgcgccggttgtcgttccggcctcgcaggccccctgccaggagcaggtcttttacgctgacgatcctgacttcgacctgcgcaagctgctgccggccccaaccaacacgccgattgatgcgggtccgttcttctgtctggggctggtgctggcaagcgatccggaagacagctcgctgacggatgtcaccatccaccgcctctgcgttcaggagcgcgacgagctttccatgttccttgccgccgggcgccatatcgaagtcttccgcaaaaaagcggaggaggcaggaaaaccgctgccggtgacgatcaacatgggtctcgaccccgccatctacatcggcgcgtgctttgaggcccctaccacgccgtttggctacaacgagctgggcgtcgccggggcgctgcgccagcagccggttgagctggtacagggcgtggcggtcaaagagaaagccatcgcgcgggcggaaattatcatcgaaggtgaactgctgccgggcgtgcgcgtgagagaggatcagcataccaataccggccacgcgatgccggagttcccgggctactgcggcgaggcgaatccctccctgccggtgatcaaagtgaaagccgtgaccatgcgcaaccacgcgatcctgcaaacgctggtgggaccgggggaagaacataccacgctggccggactgccgaccgaggccagcatccgcaatgccgtagaggaggctattccgggcttcctgcaaaacgtctatgcccataccgcgggcggcggcaagttcctcgggatattgcaggtgaaaaaacgccagccgtcagacgaaggacgtcagggccaggcggcgcttatcgccttagccacctattcggagctgaagaacattattctggtcgacgaagacgtggatattttcgacagcgacgacatcctgtgggcgatgaccacccgcatgcagggcgatgtcagcgtcacccatattcctgggatccgcggccaccagctggatccgtcccagtcgccggattacagcacctcgattcgcggaaacggcatctcctgcaagacgatcttcgactgcacggtgccgtgggcgctgaaggatcgcttcgaacgggcgccgtttatggaagtggatccacgtccgtgggcaccggagttgtttgccgataagaaataa

SEQ ID NO: 125766 - DNA, 426 bp, Enterobacter cloacae
atgcagacgccggtgcaggcagaatttccggcggtgctcggttccctgacgccgctggccggctggctggaagcgcggctgagcgcgcttcccgtagatgacgagtggcgtttcgcgctcgatctcgccgtctgtgaggtggcgacgaatatcatccggcacgcgctgcatgaggatgccacgcgcgcattcagcgtacggttcgacatccgcgacagcgacgtctgcattgtttttaccgatgcgggcgacgcgttcccgctggcgcggcttgaggccgccaggcgaaatcgtttttgtgaaatctcgccgctgctggagagcggcagggggctgatgctcattttgctgagcgtcgatcgtttctcggtggagcgcgcggcgggtgaaaatattgccacgcttgaaaagaaaatcagcgtatga

SEQ ID NO: 125767 - DNA, 339 bp, Enterobacter cloacae
atgattattaacactgaacgactaccgcatgccaacatcctcacgcccgcagtccggcggctggatgcctccgttgccgcgacgtttaaagcgtccgtgacggaagaaattggcgacgatcgcaaggctttgattgtcgacttcagcaaagtggattttatcgacagcagcgggctgggaatgctggtgtcgttgtttaagctgatgaacgggaaaggcgacatggcgctgtgctctctgaaccccgggatcatgaacatgttcaccctgacccgcatggaccgcatattccgcatctatccggacaaaagcagcgcgcttgcgcagctggggcagtag

SEQ ID NO: 125768 - DNA, 1215 bp, Enterobacter cloacae
atgtcggcgctgcacgtgttaatcgttgaagattcgctgatttatcgtcggttactctcccgaatgctcacccagtgggggtatatcgtgagcgaggcggaaaatggcgtcgccgcgctggaaatactgtccagccagccgatcagcatggtgataagcgactgggacatgccggaaatggacggactcacgctctgtcagaccatccgcaaccgtcagtttggccactacgtctatgtcattctgctcacggcacgcgaaaatgccggggatttaacgcagggctttgatgccggagccgatgattttttaagcaagccggtcgagcaggatgaactgcgggcacgtcttcacgccggggtccgtattttaacgctggaagcgaccctcgcggcgcacaacaagcgcctgagtgaagcgttgcatcagattgaacaggatcttgaactcgcggcgcgcgttcagcactccgtgctgccttcgcaccgcttacgctttgggaactacttttccgactggcttttcttgccgtctgcgtgggtctcaggcgatgtgttcaatatttttccactcgattctcacattgggttctattgcgtggatgtgtccggtcacggcgtgggggcagcgatgatgtccctcgcggtggcgcgtcagttcttacatggccgggtggtagaccgttttttgtttaccgatcagggcggcattcagtcgcctgcggaggtgatcaggatcctgaacagccgcttttgcagtgaagagagcgacattaccagctatttcaccattatctacggggtgatcgatcccgagagcggacgaggagtgttgtgtcaggccgggcatcctactcccgtcattgtgaacgcagacagcgccgtcacgtccgtgggcaacggcggcccgccggtcgggctgatgcctgacctcagctgggaggacgtcgcgtttaccctcaatccgggggatcgcttatgcttattcagtgacggtattacggagtgtgagaacgtcagcggcgagcagtttggcccgcagcgtctcgaacgctggcttcatgaccatgcccgacttccggttgacctgctcctggcgcggttcggtgaccacctgaccggctggcgcaacgcaaatcgtgatgaaccgaccgccttaaccgatgacgtttcactgctcgtgatcgagcgtcagggagaacagaatgattattaa

SEQ ID NO: 125769 - DNA, 900 bp, Enterobacter cloacae
atgcgcgaaaaatggcttctggcgggcgtgctgctcgccgcgatccccgccgcagaggcggcgaaaagcagtgaaaatgaatccctgcgcgataagaacggtgaacctgttcaggctggcgtctttaccagccgctgggggcgcctgttctcgggtaacgacaagaaattctcaggtgcgctgagctttagctcgggactgaaagagcagtggatgagcattcctaacagttcagacaccgccacggaaaagaaaaagattaaccagacgctgaatctcagccttcagtattccccctacagcttctggtttgccaacattacgtcccgactgccggtcagagacaccagccgctacaccgccgattttcgctacagcttcggctacgatgactggcacgccaacaccgtcagtctggtttacagcaactacggcgataaccatttctggacatcgggcaaccgacgacacacctatttcgaacagggcgccttcacgctggcctacaagttttcgctaccgaaaccggtcgaaaacacgctcctgattaataaaggggattccatcatttgccaggtcgggtacagctgggtgccgcgctactacgacctcagcagcgatgacatccgcaaaaataaaaacgtcatgctcggcggctgcggctacaccttcaaacaacatttcttcgttcgcgcgacggcattctggttcccggacagcagccagcagcagccctggaacggcgattacagctacagcttcggttatgccggctatacgccgggttcgttctccatccagtacgcgaactatgcgggaacgcgctatccggggcacggcaacgggaatgcaaaattcagggaagggaccgtgagcctcatctggttcttaccgctttag

SEQ ID NO: 125770 - DNA, 1218 bp, Enterobacter cloacae
atgagccatgttgcgccgtcggtagcgcaagaagatgacgctaaatcaacagcatggcggtatgccgttgcaggtgccagggacctgagaatcgactttatgcgcggcattgccctcgtcatgatggtcgtggcgcatacggaggtgatgtcggtatttaatatattctcctgggagcgttttgggttaacaaccggtgcagaaggttttgttattctctcagggtttatgcttggcatgctgaaccgcgcgcgtctgcaaaaagtggttttgctcacggtttcctgggggctttatctcagggcatggaaaatatatcgtgtaaatatcattatcatagtgtcgtttattcttctggcctatattccacatattaacgttttcgaggtcacccattttaccgaccgtttttcgggtgaaagctggtcgctttatccggttacgccgcaaataaaagagacctggttcaacattatcctctatttgcagattggccctcatcagacgcaaattctggggctgtatatctttttactgctactcagcccgctatttttggggatgctgcagaaaggaaaagtctggtggctgctggggctgtcgctgctggtgtacagcctgtggcagcgctggccgcttcggctgacgccgtcggaattcgaatttgccttcccgctgctcgcctggcagttcatctttgtgctgggcatggccagcggctggtataaagccgaactgctctctttcgcccggacgcctccggggaaaggggtggtagtggcgctggtcatggtgtcgctggtgctgggatttgtcgcccagaaccataccaacccgtttatgccgcccgcgctgctgatgcacgtcatcccgcctgacagcttcaattcgttttatcacacctgggcggcgaagaacgggctgggcccggtgagggtgttaaacgatatcgccctgatggtcaccgtctacctggtgctgacgtattgctggacgccgctcaatcgcctgctgggatggttcctgatcccgctcggccagcactcgctttatacctttattttgcatgtgtacgtggtgctgctggtgagccagttcatcaccttcgacttatggcgacatgcctggatagagaacacgttagtgcatgcggcggcactgggtattttgtggctgatggcaaaatacgacgtcggcgcacgctggatacctaactaa

SEQ ID NO: 125771 - DNA, 1818 bp, Enterobacter cloacae
atggatttttatttttcccgttttgaacatcgtcgtcctccggaaccgttaacaacaccgcgctgggtaatgttcacctggcaggtgttagcggtcgcggcgcttattctgggtgccaattatatttactggcgctggaccgcctccctgaatactgacgcattatggtatgccattccgctggtcctcgccgaaaccctggcgtggattggcaccgtgctgtttaccatcaatttgtggaaagaacaggatcctcctcagagtccgccgcccggcgaaattaacgaatgcctgtcgcctgaggaggccgtagagccccgtcccgtcaaggtggatctgttcattgccacctactccgaagacaccgagctggtcaggctgtccattcgcgacgccctgaagatggcgtacccgttcccgattgactaccgcatccacgtgcttgatgacggccgacgcccggagatgaaagccgtttgcgaagaagaaggcgttaactatatcactcgccagaccaacatcggctttaaggccggcaacctgcgcaacggccttgagcaaaccgacggcgattttattgttatctgcgacgccgacacccgggtatttcccaccctgctcagccatacgctgggctattttcgcgatccggacgtggcctgggtacagacgccgcagtggttcttcgatcttccggaaggagaaaacctgtcgcgctggggccagcgaaaagccggaaaagtgggctacggtctgggctggctgattcaaaagtgtgttggcccgatcacgattggccgcgacccgttttttaacgatccgcgcatgttctatgacgtgatcctgcggcggcgcaactgggcgaacgcggctttctgctgcggcgcagcgtccattcaccgtcgcgaggcggtcatgcaggccgcgctgagaagctatgtctggtccgtcgaagaggagatccatcgtcatacgcgcgacattcgcgatgaggagacccgggacgtgctgcagaatgcaatgcgtccgcacgtggcgtttgacaccgagcttaccccctacaaattccacgtctcggaagatatttacacctcggtgctgctgcacggtgacgccgcacgacgctggcgctcggttatgcatccgcgggttgagtcgaagatgctctctccgcaggatatgctcacctggatgatccagcgctttaagtacgccgccggttcgctggatattttgtttcatgacaacatcttcagccgtcgccgcttcaggctttcactcccccagacgctgatgtatgccaccaccttctggtcttacatggcctgcgtgtggaacacggtgtttttgatttcgcccattatctatctgtttaccggcattccgccggtgtccgcctggtcgacgccgttctatctccactttctccccttttttatcttctctgaactggcgtttatgttcggcacctgggggatctcggcctgggacggcagggcctcttacctctccttcttttccatgaacctgcgcgcgctcaatacggtgctgcggggcgaacagatcaaatttcacgtcacgccaaaagagcggcagacgggccgttttctctacctggtgaagccgcagattgccatcgtggtgctgaccctcgcagggcttatctggggcggtattcaggtggcgcgtgggcaggtggacgacccctccggctacgtcatcaatattttctggggaggggtgaacatcgccgccatgctgccgcttattttcgcggccatgtggacgcccgctgaagaggacgaggtcactcaatga

SEQ ID NO: 125772 - DNA, 1320 bp, Enterobacter cloacae
atgaggatacgtgatgccctgctgcccgcgcgcagctacctcaccattttgctcggcttcctgatcggctttgccattgtggtctgggtggagaaacagatgcctacgcgcgtggaaagcagcggcggcatcgcgctcagtaaagacttcccgccgctgcccacaacacgggcgctgacctatgacgaagccatctgggcgcgggtcgcctggcaatactacgtgaataatacccagccaaacgggctggcgaacgccagcgacggtgaaccctggctgagcctctggagcgtgggaagctacctctttgcgaccgctgccgcagagcagctcaatatcatatccgccgatgagtttgacgagagggtcagcaccgccgtgttcacgctggggcaactgccgctcaatgacaagggtctccccgccgcctattaccatgcggacacgctcaagatcctcggcaaacccgacgcctccgcaatcggtctgagccggctgctgacggcattacagaccctgctgtggcgctatccccagcacgcggcggccatccgcgatttgttgagcgtgtggcgcaccgcggcgatgattgaaaataacacccaaagccaggctgcggtgccgctccaccactggacgctggccgacgatgaacagcgggacacttttggctaccgtctctatgccagccatacgctgcgcctgattgacagcgcggcaggactcgcggtgaccaacccgccggaagggcaaaagatgatcgatctggatggcgtaatggtgcccgatgaagggcttcgcacgccctggggcaagcaaacctcgctgatcagtctcccctatctgttaaccggtcttgagctgggctttgatgcgcagagcgctgaaattgcgtggcggattatgcagatccagcagcggcgccacggcctgcgcgcgccaaaaccccccgtcagcacggattatgccgaacccgcgccggattacgttaacgatctgccggacaggcagccggttcaggcgcgtaacctgcgcgacgaggtgccggagaaagtggcgatgacctccacccgcaccgcgtttgcctggtatgccctgttccgcaacagctggagcgaagcgctgcgccagcaggttctgccgcttcaggtgccgggtaaaggctggcagcgcgggttaaatctcaacaacagcgtcaatgccgtcgtggacgccgataccaatgccattgtgctggaaagtctgtcttacatcgcgcatggccagatgctctgtctggcctgcctctacacatccccctcagcaggagcaacgccatga

SEQ ID NO: 125773 - DNA, 1548 bp, Enterobacter cloacae
atgaagccacgatccccgatccttttccacctgctcacgggaataacgatctgctggctggcgctatcgaccgtgcgtgcggacaccgagcttcctgcatcaggttactccccgcgcagcggcgagctgacggcccgggagatgaccatcgcgaaaaacgcctggcagtatttcgtcaccaactatcagcccacgacgggcctggtgaatgcggtcaacaaatatccctccaccaccatgtgggacagcgcctcctatctggccgccctgacggcggcgcgcgagctggggatcattgataaagcggaatttgaccgccggatgctgaagtttctcgccacgttaaacaccctggtactgttccgcaacgagctgcccaacaaggcctataacaccatcagcggccagaaggtggactacaccaacaagcccggcgaaattggcttctcggcgctggatatcgggcgaatgctggtctggctgaaaatcatcaaggagcgttacccggaatacggcaacagcattgataacgtggtgctcggctgggatttcagccacgcgatcgacccctgcggcacgctgtacggggcctatctggagaacggccagccgaagtacgttcaggaaggtcgactgggctatgaagagtacggcgcggccggtttccagctgtgggggtttaatacctgcaaagccagccgtccgcagccttacgagctggccgagatctactgcgtgctggtcccgtacgatacgcgcgacccgcgtaacacgtcgcagcataactacgtggtgacggaatcctacctgctctacgggctggagttcggctttgataaaccgaccgaccgggataacgccccgcgcgactactccctgacgtggatgaaaaactttgccgaccgcgtttatcaggctcaggagaaccgctataccattaccggcgtcctgaccgcgcgctccgagcaccagctcgataaggccccttacttcgtctatgacaccgtcttcagcgacgggtacaactggaacaccattaccgataaaggccagttcgtccctaacgctgccgcgatttcgctgaaggcggcgctgggcatgtgggtgctgtggaactccccctataccgaccgcctgctgaacaccattgagaatgccaacgaagagggaaaaggctactacgaagggctgtatgaaaacggcgacgggccgatcaaagagttcaccgcgaacaataacggcatcatgctggaggccctgttgttcaaaaaagagggaaaactgctggccttcaacaccgacaacccgaagagcaaggattttgccccgtctctgtgggatcgaaagctgctcgatcagtttgaagagaacaacgcgctgcgcagccgcccgttccttgccagcaccccggccgtaaaaagctggtgcgaccggaccggcgtcacgcagcgcaccaaacccgcctgccaggcctgtcagtgcgcgtcatgcagcgtggacgagcccgttaaactgcctccggtgactgcgcaatgcttaaaaccatag

SEQ ID NO: 125774 - DNA, 1395 bp, Enterobacter cloacae
atgcttaaaaccatagccagagggcttgcgggattactccttgcaggcgcgatcgtctttgcgctgtttgcccatcagggcgcaggctggcgctggctcatcagtggcggctggcactccagcgcgcgcattgccgccctgacgccggaagagcagacgtgggcggcaatcgcctggcgctatttcgtcaataatacccagccgcaaaccgggctggtcaacggcagcgacaaacagccccgcgtcacgctctggcaaatgggcgatacgcttatcgccctgctggcggccaaagagctggggctgattgaggaggccgagtatgacgctcgcctgacgcggctgatgggcaccctaaaccgcctgatgctgaccgaggcccggacgccgggccgactctattccagccagacggcgacgccgatcgactttagcggcaagcccgttaaaaatggctggtccgcgcgcgatatggcgcgtctgatgctcgccctgcgcctcaccgcagagcgggaaccgcagtacagcgaatacctcgataaaatcatcctgcgctggaatttctgtccggtcatcgatcgtgaaggcgaactgtggtcatcttccctgcaaaacggccagccggtggtgcgcgaggagctgcgcctgggcgagagcgaatatgccgcaacggcgtttcagctgtgggggttttctccggagaaagcgtttacccccccggcgcaccatgtcatcatcgcccagcggcgcctggccgtcgatgcccgggatccgcgcaccacgtggcagccctccctgatcaccacccttccctatatgctgccgggcctggagtttggctgggagcccgaaggcgttgcggccgatcggcaaaagcacctgcgcaagcaggccgaaaacgtctggctgagccagaagagccgctgggagaccgataaaatcctgacggccagggcagatttctcgctcccgcaggcgccctggcatatccaggatacggtctggggaaatggctatgcctggaactctgtcggtgacgatggccgggactacacccgtttcgcgcaggtatcgaccaaggcggtttttgccctgtgggccctgtgggacaccccgtacaccgacgtgctgatggcggtgacaaagcatcttaacgatccgcaaaaaggctggtacgaaggccgccaggaagccacgggcgatactaacgctgcgctcaccctttccaccaatgccacggtgctggaagccctgttcttcaaacacaacgcgggccccctgtttgacgcccgccgggctaaaaaagagagctactttacgcgccgtgtggcagatgactatacgcccgtcgggcactgtctaccgggcgaaaacgcagtaaggaggacgccgtga

SEQ ID NO: 125775 - DNA, 426 bp, Enterobacter cloacae
gtgaaattttaccgcgatctgtttgaatccagtctgaaccgcgtctttccggataatgataaaacggcgtttttccagacgttctatgacgccttcgtccatatgtcacccgagacggagcagcatttttctcgcctgccggatagcgagggtcagcagactctgtttaagagtttcttcgccatgcttgcggtagacggcgcgttaatcgtgcctgattttctcgaacgcctggcacgggagcaaagtgacgacggtctccacctcccgccgcgttttttcgccctgtggcgcgaagcgatgttgaacaccgtgagcctgcgcgatccgcagtgtgacgatgagatcctgacggcctgggccatggcgatcgcgcccgggctggaatacctgcgccgacaggcagaactgcactaccgcgcgtag

SEQ ID NO: 125776 - DNA, 2667 bp, Enterobacter cloacae
atgagcgcattcacgtacgatcttaacgcgctgccggccgccgtcatgatttatgaccgcgaggaacgcctgcaggcctggaatcacaacgtggcccttttttatccggtcatcaccccgtggctgaaggtgggcacaacgctggcgtcgctggcggaacgctttatcgacgccgtttacaacgtcgaccctggccttcgccagacgctgcgcgagtcgatcgtgcgcaactgtcggcaggataaacactgcgaagtgcggcaggcaggccagcggcggatcttcgtccagcaccagcgccttgcggacggcggcattgtcagcctgcacagcgatgtcacggagctggatgaagcgcagcgggcgcgtcatcagctgcatgacgattttctgctgacggcagaatccatccatatcggaatctgggactggcaggtgtctggcgacacgctccaggtcaacgataccctgcttgccatgctgggccagtcgcgcacccagtggcgatatccggtgcgttttctgctcaatcaggtccacgagaacgatcgcgctgcgctgcgcaaggcgctgcacgcgtcgaagcaggatcatcgtccggtctttgaatgtgaaattcgcgtgcatcaccctaccgaaggtctgcgctggatgctgctctccggccaggtggtcacgctctccattgagggaaacgccgagcgcgtgattggcacgctgcaggatattacgcgccgcaaggaggctgaaattcaggcgttcgcctcggccattgaggcacaaaaagccaatgaggcaaaaagcgcgttcctggcgaatatgagccatgaaattcgcacccccatgaacggcattattggcatgacccagctgtgcctcgatacctctctcagtgccgatcagcgcgattacctgacgctggtgatgagttctgcccagtctttgctgcatatcatcaacgacattctcgacttttcccggattgaagccggcaaagtggagctggaggcggagcccgtcccggtccgccccttcattcagtcgcttattcgcccccacatgccgggggcgagcgaaaaaggcattgagctgctggtcgatattgcgcccgacgttcccgacgtgctgctggtcgacggcgcgcggctgcgccagatcctgaccaatctgctgggtaacgcgctgaaatttacccaccagggggaagttatcctgattgttgagcgcgcggatagcgcggatcgatggcgtttccgggtgtgcgacagcggcattggcataccggcagataagcagaaagccatttttgaagccttcagccaggcggataactcaaccacccgacgctatggcggtacggggctcgggctaaccatctctgcgcgactggtcgcggcgatgggcggcgaattaacggtctccagcgagccggggaaaggcagcgaattttccttcgtgctaccgcttgcggcccaggcgcctggcccggaggaacgccggcatagccatcgctttaacggggaacccgtgctggtggttgatgataacgcgaccaacctgcggctattggccgccatgcttagccagatggggctgaaacccacctgcgttaataacgccagcgaggccatcaaccgggttaaaaccggaacggcatggcccctgatcctgctggacgcgcagatgccggatatggacggcgtgtcgctggctctcgaactttcggtgctgccgcaggttgctgaaagccatatcatcatgctgagctccatgagccgacattttgatatcaatatgctgaagcggatcggtatccagaactacctgcacaaacctatcgcccagaatgaattgcatcaggcgattgccgcggcgtttgaacgtgcaccaaagacggtgagtgaaagcgcgcccgcgcccaccgtcgcgccggacacggccgggctcagggtcctgcttgcggaagataatctggtcaaccagaaggtcgccgcgcgcctgcttgagcggctcgggcacacctgtcagatcgtcgataatggcgtcgcactgctggaacgctggcgggcgggcgtgtgggacgttttgctgatcgatcttcagatgccagagatggacggtgaaaccgccattcgcctgctgcgtgaagaagaacgcgcccggcccggaccggcgcagcccaccgtcgccatgacggcacacgccatgcagggggataaagagcgctgtcttcagatggggttcgacggctacattgccaaacccatcagccaggagcgtctcgctgaggagattgctcgcgtgctcccgcgccacgatgacccttccgccttcccggatgaagcacgcctgctgaagcagtgcgctgacgaccctgctctggtccaggagctgctggccctgtttggcgaagggctggaggaggccatgaaggccatcaccctggctatcgacagcgacgatcgtgaagcgctgcgccgcgccgcccacaagctgcgaggagaagccgtcacgctggatttcgggcgactcgcccgtcagctgcaggcgctggagagcgaggtgcacacgctggaagggcaacagcttgcggcgctaaaccagcagcttcaaaaggaatcgctgcgcctgatagcgtggctcaacgcgcgcggggtaaacgcatga

SEQ ID NO: 125777 - DNA, 2175 bp, Enterobacter cloacae
atgaagactcgctactgcgcgctgctcgttgccctgttgaccacccatacggtggcgaacgctgcgccggtcagctggtctctggccggagaatggcaggttcaggatgccaatgacaccgcacatcctgccgcatcaggctggcgcccgcttcaggtccccgccaactggtacagcgccgggtacgatcaccagggcgcgctgtggtacaagcacgcgttttccctgcccgtgcagccgcccgacgtaatgagcaccctggtgtttgacggcgtcgattacctggccgaggtcaccctgaacggccagccgctgggccagcatgagggctattttcagcgcttttcgctggatgccagtcaagcgttacaacgtcacaaccagctcgtggtcagggtggacagcccttacgaagatcccactaaggtctggccgctgcataaaacggtcatgaaggggatccttaaccagcatgacacccgtcccggcggggcctggtcggcgcaaggacaggacgccaactcgggcggcatctgggcaccggtgaggctgcatcttagccggggcgccacccttgatgagaccatcctgcgaccagactggtcacagggtctgatgcaccccgcgctgaaagcagatattcgctatcgcgcgctcggtcagggcccggcgaccgtgcggctcaccgccacgcccgccaacttcagcggcaggcgctatcaggctgactttccggttaccctcgaaagcggcgcccattccgtgcaggtgacgctgcccatgccgaaggcaaaactgtggtggcccgtcggcacggggaaaccccacctgtataccattcgcgtggcattgcgggatgagaacggcctgatggacacggcggtcacccgaacagggctgcgcaagatcgtcgaacagcccgacaataagggctggctcattaacgacaaacgccttttcattaagggcagtaattacatcggatccccctggctcagcaccatgacgcgagaaaaataccgtcgcgatcttcgtctggtggaagccatgaacgccaacgccatacgcgtgcacggacacgttgccggacgtgcgttgtatgacgtggccgatgagatgggcatgatgatctggcaggatgttccgctgcagtggggctacaacaacagtgcggctttcacggaaaatgcggttcgacagacgcgggagatgatcgaacagtttggcaattcccccgccatcatcgtctggggcgggcataacgaaccgccgtggaattcgccgtggatggaaaaacgcttcccggactggaataaagatctgaatcgcgcgctcacgcagcaggtagcggatacgcttgccgaagatacctcgcgcatcgtgcaccgcttttccgccgttgaggagcattactgggcgggctggtactttggtaccgtacgcgacctgcttgctccggccaaaacggggatcatcaccgagttcggcgcgcaggcacttccccgcttgtcgacgctaaaaaccatcatcccggcggcgtcgctctggcccaaaacgaccgccgctgacgatcccggctggaccgtctggaaataccataattttcagcccttccagacctttaagtttgccggtatttcgcgtggggacaacattcaggcgatgatccgcaatactcaggcgtaccagtcgcagctggtggccacggcggcagagagctaccgtcgacagcgctaccagccggtgacggccctgttccacttcatgtttgtagaaacctggccctccatcaactggggcgtggtggactacctgcgtaagcctaaagccgggttttacgccttaaaacgcgcctaccagcctgttttgccgtccattgaacccgtcacggcgcagtggcaatccggggcggcggcgaccgtgcgtctgtgggccatcaacgacacctggaaaccgtgccgcgaatgccgtcttagctggcgcatcacccagcgcgataaggtgctggcaaatggcacgacgacgatgacgatcgcagcagactcgggaacgatggtaaaagcggtcacggccacgcccgtgggccaggacgacgtgtcgattcggtttacgattgaaaacagcgcgggaaaaattgtcggcgaaaatcagcgcacggagtccgtcataaagtaa

SEQ ID NO: 125778 - DNA, 519 bp, Enterobacter cloacae
atgttaattatttttagtgggctaaccggcagcggtaaaagcaccgttgcaaaaatagtttcccaaaggctgggagcggtctacctgcggattgataccgttgagcaggccattagctcagtttctgaacccggtcagaaaacgggtccggagggctattttgccctctatggtttagcaagtgagaatcttaagctgggctccaccgttgtgaccgattccgttaatgatattaaccttgtgcgagatgctttccgcaatattgctctgtcgttgaatgtccctttcctggaagttgaaattgtctgctcagacgaaaaagaacatcgttatcgcgtagagaacagaatatctgatatcccgggactcacgcctcctgactgggaaagggtaaaaaaccgtgagtatgaaccctgggagagagaacatctcatattggataccgctgcgttatcagcggcagagtgtgcagataaaatcctggaaatagggcataagattgcgctaaaccgatcttaa

SEQ ID NO: 125779 - DNA, 978 bp, Enterobacter cloacae
atggcgagaagatcgaagaagagcgaaccggaaacgctgcgtaaacagctcttagcactaattactgatttcgagcataagttgctagaggaatctttaagggaacaggtacttacccttgttcccgcgaaccatttgttacgcgatttaggcagttctctgttgaatgaagaaaattgcaattcagcacgagatcgcatcttagcatacttactgaaatacccccgagccatcattcacggcgatgagttaatggttgtcgcaggtataagtgaatatgctcgcagaatccgtgaattgcgtgttcagttcggctggtcagttttaagtggaacgacacttaaagagatgattgaacagcaagaaatcacccttgaagagctcaaaattacatctacaaattgcctcaaaacagacgtttatgctttggtagcaacggggcaggatagagaggctgcactacgttggaatgaagcaaatgtacttcgccgcagcaaaatctcaacgaaagacaaaatcctttcctatcttcgaaaaaatgtaggccgccctgttaccggtgaagagctgcgttatcttgcaaacgatagtaaggaatgggctcgccgaacccgtgaattaagaacagaagatggatggcctattgctactaaaaactctggtcgtccagagctagaggtaggagcttatttacttgaagaggaccggcaggcggaagttcatgatcgtaaaattcctgatcccgttcgtgtaagtgttcttgagagagataaccactcatgtagaaactgtcattggtcgcacagtaaaaaaacggctaatgatcccagaacatttcttgagttgcatcatatagaacaccatgcccatggtggtgaaaacacgcttgctaaccttataacactctgtaacgtttgtcacgacgaagtccacaggaaaaagattccaaaggaagacttagttaagttgctacaataa

SEQ ID NO: 125780 - DNA, 1131 bp, Enterobacter cloacae
atgagtataatcaataaattaaaggtcatcgatttgttttgtggtgctggcgggttgtcctgcggcttcatgaaagatacaaatggcgctcatttcgaaagcattcttgcacttgataatgataaagctgcgataaagacctataacgcgaactttggtaatcatggaattgttgcgaacatcgacgagtggatcgctaacaatccgatacccaaggccgacattgtcataggtgggccgccatgccaaggtttcagcttgttgaataaaaaccgcgaaggtgaccatcgccgtgcactttgggagccttatatggatatcattgaacgatcatcagcttcagtttttgtcatggaaaacgttcctggattactgtcgagtgatgagtttgtagatatctctgctcgagcagagagcatgggatttgtactgctgaatccttgcgtgcttaataccgctgattatggcgttcctcagacccgtaagcgtgctattgcaattgggataaagaaacaacgttttaatctcaatcttattcctagttttccaccttcaccgtctcatcaaaatccggaaaaaccgggtgtactccctgcctggttaacggtaaaagatttcatcgatgatctccctaagccagtaggtacagaaatccgagatgttaaacctccattagatcttcattttggtagaaatccgacggcactttcgcaagagcgctatcgtgccgttccgctaggaggtaacagatttgacttacaaaaaaacaggcctgatattacccccgcatgttggataaagaaaacatctggcggcacagacctatttggtcggctgtggtgggaacgtccatctgtaaccattcgaactgaattttttaagccggagaaaggacgctatcttcacccagaggaacaccgtccaatcacgcatcgtgaagctgcgcgattaatgagttttccggataattttgtttttaagggaacgaaaacagaaattgctcgtcagattggtaatgctgttccacctgtttttgcccaaaaaatcgcttcatatgttatcaagttaatggaatgcagaattaaagatggcgagaagatcgaagaagagcgaaccggaaacgctgcgtaa

SEQ ID NO: 125781 - DNA, 891 bp, Enterobacter cloacae
atgaagaaaatctgggtacttggcgatgcggtagtggatttgctgcccgatggagaaggtcgattattgcagtgtcccggcggcgcgccggcgaacgtcgcggtcggtattgcccggctgggcggccagagtgcctttatcggcagggttggcgacgatcctttcgggcgctttatggcgaaaacgctcgctgacgagcgggtcgacgtaaagtggatgcgtcttgacccggcgcaccgcacctcaacggtggtggtcgatctcgacgaccacggcgagcgctcgtttaccttcatggtgcgcccgagcgccgatctgtttctcgaacccgacgacctgccgacgttcagcgccggggagtggctgcacgtctgctccatcgccttaagcgccgagccgagccggactgcgacgtttcaggcgatggccgccattcgtgaggcggacggttacgtcagcttcgaccccaatattcgcccggacctctggccggatgagaacgcactgcatggctgcctggagcaggccctgcaaagcgccgacgtggtgaaactttcggtagaagagctggcctttttcaccggcagcgcggaggtcaacgttggtctggaggtgctgatgcagcgctgcccggcgcgtctggtgctggttacccagggaaaagcgggcgtaaccgcgtggcatgaaggtagcgtaaaacactacccggcaacgcctgtgcagtgcgtcgatacgaccggtgcgggcgatgcctttgtggcggggctgctctacgggctagccgccggacaggacctgacgccggttattgcgctcgcccagcgctgcggcgcgctggccaccaccgccaaaggggcgatgaccgcgttgccctggcagcacgacctgtaa

SEQ ID NO: 125782 - DNA, 960 bp, Enterobacter cloacae
atggcgctaaaaatcaggatggccgttgcgatcgctaccctcgctctatcgttgtctttgcaggcgaaaacgcccgagaactttatctataccagctccggcgggctcgacgcggcgttcccgctcgttgtgcgaagcgatatcggcggcgtacagatcgtctacaactggcgcgcgcttgagcctgagaaggatcgctacgatttctcgcgcattgaacgggatctcgcgcgtcttaaggctgccaggaaaaagctttttatccagattcaggaccgtttctttgaggcggacgcgcgctacgtgccggattatctgatgcacgataagcaatacggaggcgggattgcactgcagttcgataaccccggcgaagggaagccagtcggttcaggctgggtggcgcgtcagtgggatcccgcggtgcgccagcgctaccaggcgctgctggccgccctcgcgaaacgctttgatggcgaggtatatggcgtaaacctgcctgaaaccgccatcgatcttgacgaaaaaaatccgcccgccggatttacctgcgacagttattttgcgggagaaatggaaaacctggcctttgcgcgcaaggcttttcagaaatcacacgtggtgcaatacgtgaacttctggccgtgcgaatgggataatgaccgcaactacatggggcgtctttttgcgtatgccagcgccaacaatgtcggcctcggtgggccggacattgttcccaaccgcaaggcgcatatgaagaatgcctatcctttcttccataaaaataaacagacgctgccgcttatcgccatggcggttcaggaaccgaccctgacctataagaaccctgagaccggcaagcccttcaccaaagcagaatttgatcggttcgcggaaaattatctcggggcggatattattttctggagcacggcctccccctggctaaaggctaagtaa

SEQ ID NO: 125783 - DNA, 522 bp, Enterobacter cloacae
atggaaaatataagttttcaagatattgataaatcagttgaaattttaaaaaacaatatgattaaatatcattataatattgcaacaccgcttcctcaagaaatacaggaatttattcaaagcgacgtgcctcccgcagactggaatgaaataaagaaaaatatacacaaagacataaaaacattatttgacgaagtggaggaggttaaatatttttatacaaaaattgatggtttagaatttaatgcagcgacgatatatgggttcagtcagattgctgatggggaaatgctgtggtcaaatatctatacaatgaacttttataatagagataatgaaatattcattgatccggacttaaaagataacattgttattggtgaagatagcatgtcatactttttatataatatggaatgtaaaacctttgaaattagagataagattgcccctggcgttctagaatcattcattgaattcaacggcattctgaagtatataattagaacgacagaactttga

SEQ ID NO: 125784 - DNA, 1146 bp, Enterobacter cloacae
atgttcagattatgtgagatctatgactttgagcgagatgctactcttttggacttcgaaaatatagtgagtccaaagcggggcttggaattggcatgttattactatgtgttagactacagcgcgtataagtcaaggttatattttgatatacctaatagaaaatggaatggcgataggcattttggtgagaaatttaaaaggcaacctttaacgtactatgatccgatttatgatgatttagaaagggagttgttgctcggtcgaatagttgctgtagatacagataaacattggacttggtataataaccctttttcttttgatgataacggtgaaatagtttacgagccgtttatgcctggttcttgggaatgttcattccgtgattcagtgttgagcgcatatcatgtagtgctggagcgtaatcaacgtatcaaaccacgtcctacacagaaaatacagtatggcgcacctggatatgttgaacctgagcaacatgctcagtcagcaaagaccataaataacaagaatgtagggcgtctgttagccgctggcggcgtttataatggtaacgttgagggatttagaaagactgctgaacaactgggtggagaagctttagaaggttataaaggcgttatgaccgatactaacattggaatgggtatagctgctgcatcaattcttttggtaaaaaatcctgcgatggctgaagaactaacaggatttttagggaaaacaaaaaatacaaaagtcttcttacagaatgtaaaagttgaacaaataaattacttacgcagaccacgtgatgaatatttatcacttagaaaagaatttgataatacagtcagaaaaaattttatgaaaagcttatcagtcgaaccaggtattgatcattactttaatacttctcaaattgaattaatggcacatggaggtgttcctgattcctggcaggttcatcataaattacctcttgatgatgggggcgacaacagttttggaaatttgatactaatacaaacaaagccatatcataatgcattaactggggcacaaaaatccgttactaaagatttgatgccaggtcaaagcattgatacattatggcctatgccaaatggaacatttttcagtaaatag

SEQ ID NO: 125785 - DNA, 1710 bp, Enterobacter cloacae
atgagcactttactcactgcacaatctttacgcgttgatacggcgtttggcacgctcttcgactcactctcctttacgctgaaaaaaggcgaccgcattggcctgctgggcgacaacggctgcggtaaaagtacgctgctgaaggtgctggacggcacggattcccctgctgccggaacggtagcgctggccgggcattgcctgatggcgcgcgtggagcaacatctcccggacgctattttaccgctcaccatgctggatgccgtcctggcccagctgcccgtagcggaacgggacagcctgcgctggaaagccgaaacgctgctggcaggcatgggctttacgccgcaggatatgatgctgtactccgccacgctgagcggcgggcagcacacccgcctgctgctggcccgggcgctgattcacgagccggacctgctcctgctggatgaacccagcaaccaccttgacctgccgaccatgctctggctggagcactttttacagacctggtcgggcagctttgtgctggtctcgcatgacagacagctgctggatgccgtcaccaacggcagctggatcctgcgcgataaaacactgcactactttgcccttccctgcacggcggcacgtcaggcgctggaagccaaagatgagaccgacgcgcagcgccacaaggcggagcaaaaggagatcgaccgcgtgaccgccagcgccaaacgtctggcgacctggggtaaggtttacgataacgaagacctggcccgcaaagccaaacagatggaaaaacaggtcgaacggctcaaagagagccagaccgcgctcacggcgggcagcccgtggacgttaaccctgcgcggcgacgcgctgcgggctgaccgtctgctggagatggaaaacctcggcgtcccgcccgcgcctgggctaccgccgctgtttaacatcgaaacggcgcggctgaaaagcggcgatcgcgtggcgattgtcggtcgtaacggctgcggtaaatcgtcgttgatgaagcttatctggcgacatttttccgatgaaccggcggacagcgggctgaaaatccatccgcgcgtctcgccgggctactacgaccaaacgttgcatcagctgccggacaacgccacgctgctcgacgcgctggagccttttgcaccggatccgcagaaccgcaaaatggcgctcatcagcgccgggttcccgtggtcccgccatgggcagaaagtcagcacgctcagcggcggcgaacgctcgcgcctgctgttcgtgggcctgacgcttgcccgctacagcctgctgatgctggatgagcccaccaaccacctggacatggaaggcaaagaggcgctggcgcacacccttcaacagttcgaaggcggcgtcctgctggtcagccatgaccgtcagttaattagccaaagctgcaaccgtttctggctgattgaggacggtacgctgagcgaatggcacgatgcagaagcggtgtttgagcggctgcgtgaacgcgcggggctggtgacagccactgcgcccgctgtcgccgcgacggttcacccctcgccgcatgacgatctgcttgagcggctgatcgcgctggaaacgctgctggaagacgatctggcgcgcaagccaaagcatcaaaagccgcagctccaggcgcaatggcgtaaagagattgaggagatagaagcccagctgtaa

SEQ ID NO: 125786 - DNA, 1620 bp, Enterobacter cloacae
atgcaaaccccatttcgtctgccgctgctgacggcgctgattctgacgaccaccgccgcctggtccgcggatgcgcctgttaaaggcggcacgctgatttatctggagcaacaggcgcacaccaacctctatccgcctgccggcggcttctacccgaacggcggcattctgaaccagatcaccgacaaactgacgtggcaaaacccaaagacgctgcaggtcgaaccgtgggtggccgaaagctggaccaccaacgccgataaaaccgaatacaccttcaaaattcgcccggggatcaccttctccgacggcacgccgctggacgccaacgccgtagcaaaaaactttgatacctacggcttaggcaacaaggcgcagcgcctgccggtgtcagaagtgatcaataactacgatcgcagcgaagtggtcgacccgctgaccgtgaagttctacttcaaaaaaccgtcaccggggttcctgcagggcacggccacgattggctcgggcctggtctcgctcagcacgctgaagcgcaactttgaagagctgggtgacgcccggcatatcatcggctccggcccgtttgtggtgaaggacgagaagctgggtcgcgaagtgacgctggaagcgcgtaaggactaccagtgggggccaaaaaatctggcgcaacaggggccagccaatcttgatggcatcaagtttatcgtgactcaggaagacagcgtgcgcgtcggcgccctgctggccggtcaggccgactttattcgccaggtgcaggcgtatgacgaaaagcaggcgacagaccagggctataaaatctacgccgccccaacgcgcggggtgaacgacagcatcagcttccgcccggataacccgctggtctccgatattcgcgtccgccaggcgctgctgcatgccaccaatgcaaaacaggtggttgagaccctcttctcggctaactatccgcaggcgaagtcggtgattgccgattccgccgctggctttgtcgatctcagcgacaaattgtcctttgacccggctaaatctaaccagctgctggacgaggcgggctggaaagcgggcagcgacggcatccgcgccaaagacggccagcggctggcgctgacggtatatgaatccctgccgcagccgcaaaataaagaggtgctgcagctggttgcccagcagtggcgtcaggtgggcgtggcgctgagcgtgaaagccggtgacgcaggcagccgcacgctggataaccttgatccgctgaagaccccgttaaccgtctccgaagtgggccgcgccgatcctgacgtggtgaaaagcatgttctaccccgctaaccgcgacgcgctgctgcaaaaaggcggctccagtgacaaggtcaaaagcttccgtgacgacaagctgaatgcgctgctggtggatatctccgccgaagtcgacccgcaaaaacgcctgcagctgaccggcgatgcccagcgctacctgctggataacgcctacgtcattccgattttcgaggagccgcaggtctttgccggtgcgccgtggctgaaaggcgtcagttttgaagcggtcggccgcccgtcgttctacggcgcgtggcttgagaaacactga

SEQ ID NO: 125787 - DNA, 945 bp, Enterobacter cloacae
atgcgccacgcacttcttcaacgctttgggcacgggctgctggtgttgtgggccgcctttaccctctcgttcgtgttgctccaggtgctgccgggcgacgcggtgctgattaaatttcagaaccccgacctgggcttgagcccggcgcaaatcgaggagatgcgcgtggcctacggcgcggacagcccgctgtggcagcaatacggccacacgctgctggcgatgctgcgcggggatttcggctactcgttacaggcaggcgtgccggtcagcgagctgattgccagcaatctgccggataccctgagcctcgccctgcccgcctttttactcgcggtcctgctggcgtttgcgctggcctttgcgtcgcgcctgccgggtctgcgctggctaagtaataccctacagtcgctgccggtcctgtttatctccttaccgacgttctggctggggattgccctcatccagctcttttctttccagctgcggctgataccggtgattaacccgacgccgctgcaggggctgatcctgccgatcgtgaccgtcgcgatcccgatctccgccccgctggcgcaaatcctgatgcgcagcctggaccaggtggcgacgcagccgtttgtcgccgtggcccgcgccaaagggctgagtgaaaccgccgtcctgtggcgtcacgtcaccggcaacgcgctgctgccggtactcaatattgccgggctgctgctgggcgagctgattgccggagcactgatcaccgaaaccgtatttggccgcagcgggctcgggcagctaacccagcaggcggtaaataaccaggacatcgccgtgcttcaggcggtggtgatgatttccgccctcggctttgtcctgatcaatctgctggtggacctgctgatgccgctgctggatccccgtctgcaaaccgttaccggaggtgcatcatga

SEQ ID NO: 125788 - DNA, 852 bp, Enterobacter cloacae
atgagcctggtcgattacgctgccgcggcgcgaaaactcgttcccggctggcagggcgtcgcgtggcagccgggactgtggctggcgtgggcggtgattattctcgcggtttttgccgccgtggcgcccggcctgttaacccactacagcccgattgagggcatcgccggagcgcaacgtctggcgccgcaggcgggccactggctcggcaccgatcagcttggccgcgatgtttacacccgtattgtgtacggtgcgtcccactccctgagcgcggcgctcgctgccgtcacgatggggctggtggtgggcaccggtctcggggtgatcgccggggcgttcgcaggacgcgtcgagtctttcctgatgcgttttgtcgacgtgctgttgtccattccgtctctgctgctctcgctgacggtcattattctgctcgggtttggcaccgttaacgccgccattgccgtcggcgtggcttctattgccagcttcgcccgcctcgcgcgcggtgaagtggtgcgcatccgccatacggattatgtcgaggcggcgttcggcagcggcgggacgttcctggcggtgctgtggcgacacatcctgcccaacgccttaaccgccgtccttgcctttgccacgctgcagtttggtcaggccattctggccctctccacgctgagctttctcggctacggcaccccgccgcccgtaccggaatggggcttattgatcgccgaaggccgtaactatctctctaccgcctggtggctaaccaccttccccggcgtggtcgtcatcgccgtcgtgctggccaccaaccgtatcagccagcagttcagcggaggcctgaaatga

SEQ ID NO: 125789 - DNA, 1608 bp, Enterobacter cloacae
atgaccgtactctcggtagaaaacctgaccatcagctaccgtaccgcgcgccagtggcgcgaggtggtgcataacgtcagcttcgcccttcggcggggggaaatgctggcctttgtcggcgaatccggttccggcaaaacgaccacggcgcaggcgatcattggcctgctggcggataacgcccgtcgggatgcggggaaaatcgtgctcaacggcgaggagattagccggtggtcagcgaagcgtctcgatacccttcgcggcgcgcgaatcagcctggttccgcaggatccgggtaattcactcaatccggtaaagacgatcggcgcgcaggtcggggaaattattcagctgcaccagaagatgactcacgcccaacgcgacgagcaggtgctcgccctgctgaaaaaggtcggcctgagccaccccgaacagcgcatgaagcagtatccgcatcagctctccggcgggatgaaacagcgcgtgctgattgccatcgccattgccctgagcccggacgtcatcattgccgatgagcccaccagcgcgctggacgtgacggtgcaaaaacgcattctcgacctgctggatatcctgcgccgggaatcgggcaccgccgttctgtttgtcacccacgatctggccctggcagcccagcgcgcggacaggctgctggtgtttcgcaacggtgaggttcaggagcacggcgacaccgccgatatcgtccgcacgccgcagcacgcctacacccgtcagctgctgagcgatcttcagggccagcgcctgaccatcgccccggtagccggtctcccgctcgcgtcaccggccattcgcgcccgcgccatcagcaaacggttctcgctgggtaaaggtcatcagcttcaggcgctggatcgggtgacgtttgacgtcagacgcggcagcacgcatgcgctggtcggtgaatccggctccgggaaaaccaccctcgcccgtattttgctgggttttgaacaggcggataacggacaggtcattattgatgacattgatgccaccgacctcagccgcgaggcccgccgtcagctgcgccagaagatccagtttgtttaccagaacccgttcgcctctctcgacccgcgtcagacgctgttcgagatcatcgaagagcccctgaagaacttttctcgcctcgccaaggcggagcgaaaggcccgggtggagaccgtggcgcagcgggttgccctgcccgtcgaactcctgacccgcaccgccagagagctttcaggcgggcagcgccagcgcgtggccatcgcccgggcgttgatcctggagccgaccattctggtgctggacgaagccacctccgcgctggacgtcaccgtccaggcgcagatcctggcgctgcttcagcagctgcagcagcagttggggttgacctacctgttcatcacgcacgatctctctaccgttcgccggatcgcccacagcgtcacggtgctgcgcagcggtcaggtggtcgaacacggtgacgtcgagaccttattcacgtcaccgcagaacgactatacccgcgagctgattgccgccattccccatttttcacccgctacggaggagttcgcatga

SEQ ID NO: 125790 - DNA, 990 bp, Enterobacter cloacae
atgacgcgaaaacgcctgggatttttcacccgcctgcttgacgacgccacgccgaaagagcgctatcgactggctacagaacagatccgccacgccgaacgccacggttttgacagcgcctggattgcccagcaccacttccacgaaagtgaaggcggcctgccgtcgccgctgctgtttctggcccacgtggcggcgcataccgaaaccattcggctgggcacggccatcatcaccctgccgatggaaaacccgctgcgcgtggcggaagatgcggcggtgctggatttactcgccgatggacgtctcgaagtcggttttggttcgggcggcacgccgacctctttcctgccgttcggactgacgtttgaacaacgcggcgcggcctttgccgaccatttacatgtgatccagagcgcctggcgcggggattcgcttacccatccggataaccacctctacccgccagcgccacagctggctgacaggatctggattgccaccttttccgtcgacggcgccgttcgcgccgcacgggccggacacgggttaatgctctcccgcacgcagccgcgtccggcagaccagttggatctcacgctcgacgcgatccagaacccgattgtggatgcctaccttgaggccctgcctgccggtatcgcaccgcgtattctggcctcccgtacggcattcgtcgccgacagcgatgactatgcgctgaaggttgcgacgccgggtctcaccagacaggcccagcagcatcgcgctgccggacacgcggttaagggtgacaccgtcaccgattttcgtcgccagttcgacgcccacatcggttcgcccgagatggtgctgcgttcgctgcaggccgattccgtcctccggcgcgccacggacatctcattccaggtccattcggtcgagcccacccatcgcgacaccctgcgctctatcgaactgatcgccgaacatattgccccccacatcctttga

SEQ ID NO: 125791 - DNA, 1092 bp, Enterobacter cloacae
atgtcattaagtcaggacattctcgccgagctggcggaaatcaaacccggttcccctctggcagaggcgcgcgccacgcgggacgccgccacgcgccacgcccagggcagctacgaaatcttatttactcagcaggatagcgattttgcgctggacgagcgctttgccgtcgcggcaaaagttgcgaggtggcacaacgcggaggcgctggccgcgcactatgcggggtttggcctggcagacccgacctcagaccgtctgaccccggcgctcaatttcgcgcgcctgctgaccttctcccccgtcgaagccacgccgacatcgttaagggcgctgacccaggcgggttggagcaaggaaggcatcgtgacgctggcgcagcttatcgcctttgtcagctttcagagccgactgattgccggcctgcggctgctgaacgacaggcctgtcgccacaagcgatgcgccggtggcggcaggcgtctggcacacgaacgccaccacggccaccgggaaggcggctcccgtcgccttcacccagcaggagctgggctgggagccgtggatcgccgccaaaccgctggcggattttcgtgatgacgaggttgcgatcctggcgaagtttggccacaccgattccgactatttccgcctgctggggcgcaacctgccggtgcttgaacagcgcacgctaacggataaagggattttttatacgccgggggggttgccgcgcgccgagcgcgagctggcggcaacggtcgccagtaaaatcaacggctgcatttactgcgcatctgtccatgcgcggaaagccagccagctgtctaaggatgacgcggcggtagaggccctgctggccgtgcgtccgggacagtccctgagcgaggggcagtctgcgcgctggcaggcggagattaattttgcggcagcgctgtcggtaaccccgcctgccgccacgccgctgcaccttgccgcgctggaaaaagaggggctggacaccttagcccagcttgatctggtgcagtccgccgcgttcttcgcctgggccaaccgcctgatgctgaccctgggcgagccctggctagcctga

SEQ ID NO: 125792 - DNA, 507 bp, Enterobacter cloacae
atgaaaaggatattgttatcattcgttatgttgctggtgggatgtagttcggctgctaatcaagaacgtagtgcacaagacgctactgaatcattttataaatcctatctttccgtattcggcagcgatgaagccaggccttatcctgccgacgaactgcgtaaatatgtttctgctgatactattgctcgtatcaatgctattcaggaaatctctgaacaagagttaatagagtctgactattttacgtatacacaagattactcccgtgaatggatacctgcgttacgagtggaaaacgccagaccatttttaaacggtgaagtagtccacgtcattgaaggggcgggtaacgggagaagcatccatcttgaggtatttcttcgtcgtgaagatgatgcatggaaaatttaccgcgttcgtgacgtaacgaataatcacgagcacccaattttcgatgctggcgcgattacacgcgctaaagcagcggcagaaagcacaccgtaa

SEQ ID NO: 125793 - DNA, 945 bp, Enterobacter cloacae
atgaataaaacagaacaattggttggcctgcctgcgtatgcagaaagtcgccttgcaaacgatccgccgcttcgggctgtgcgtgcctttgaggccatcgcccggctgggcagcgtcacgctggccgcgcaggagctggacatttctccgtcggccgtcagccatcagctcagggtgctcgaagggtacctgcaaatgccgctgacggagcgtcaggggcgcaggctggtgctgagccagcacgggcgtgaatactaccgctcgatccgtgcggcgtttaacgtgctgcgccaggcgacggagcacctggcggagcaggcgcaaacgcgtcaggtcaccatcagcctgatcccgctttttggtatggggtggtttatcccgcgcttgcctgcgtttatgcgcgccaacccgcagaccgagatcaacgtggtgtatgccaaccatcgtaactatctgagcgacgcatcggatatgtcgattcgttttggcaacggccagtgggcgggctatcagagtgaaaagctgatttccggacagatggtgccggtgtgcagccgcgcgtttttgcgcattcacggccatatcgacacgcctgagcaactgctgcagatgccgctgctgcacgatgaggagcgcacgacgtgggcgcagtggtttgtacagcagggggtgaagcgtcccgttcgccgcagcggtccaatgtttgaggacggtctgctgacgctggcgggcgtacaggcgggtctggggtgtgcgctgatgcgggagccgctgattgcgccgtatcttgagagcggcgagctggtgaagatctttgacctaccgattgatgacggacgcgactactacctctgcgtgcgctcagattcagagatgaccgaggacggcaagctgctgcaaaactggctgcggcgggcagcgggcggggagtcgtctggcgggtaa

SEQ ID NO: 125794 - DNA, 915 bp, Enterobacter cloacae
atgctgggaagcatctacgcgctgatcgcgctgggctataccatggtgtatggcattttgcgcattattaactttgctcacggcgatattctgatggtcggcgcgctcaccacgctctccgccattaacgccctgaataccaccttcccgcatatgccgcagctgttgcagctcggcgttgccctgatgattgccatggccgtctgcgccctgctggcgatggccgtggaacgctttgcctaccgtcgactgcgcaacgcgccgcgcctcgcgccgctgatctcgggtatcggcgtttcggtcctgctgcaaaccgtggcgatgattatctggacgcgcaacccgctgatgttcccgcagatcctgccgatggaccctatcgccgtcacgtccggcagcgaagcgcatcctcctgccatcgtcaccgtcaccggtatcgtcaccgttgtcctggcgctggcggtgatgaccgggctctggctactggtggaatatacccgtctggggcgcggcatgcgcgccgtggcggaaaacccgcgcgtggccacgctgatgggggttaacccaaacgccattattaccctgacgtttgccattggcggcgtatttgccgcgctggcaggcgtgatgatggccagcaactacggtaacgccagcttctcgatgggctttttgcccgggatcaaggcctttaccgccgccgtgctggggggcattggcaacattcggggcgccatgattggcggcatcctgctcggcattatcgaagcgctgggcgcaggctacctgggtgaactgacccacggcgtatttggcagcaactatcaggatgtctttgcctttatggtgctgatcctggtgctggtcttccgtccggctggcctgctgggcgagcgcgtggcgaacagggcgtaa

SEQ ID NO: 125795 - DNA, 1107 bp, Enterobacter cloacae
atgacaacacttcaactccagaccccggcgacgacgcgcaaattctggtcaggcatgagcctgttctgcttcgcgctgctgattgcgcctgtggtggccacgcagctaggcggcaactactgggtgcgcgttatcgacttcgccctgctctacatcatgctggcgctcgggcttaatattgtggtcggctataccggcctgctggacatgggctttatcgccttttacgcggtcggcgcctacctcgcggcactgatggcctccccgcacctgctggaggtgtttccgatcctcggcgtctggttcccggacgggctgcacacctcgtatctgctcattatcccgctggccgccctcgtcgcggccgtctgcgggatgttactcggtgcgcccacgctcaagctgcgcggggactacctggcgatagtgacccttggctttggcgaaattatccgcatcctgatgcgtaacctcgaccgtccggtgaacatcaccaacggcgcaaagggcataaccggagtggatacgctgaacctgttcggcctgaagtttagcggcgtataccactggtttggtttcaaagtacccgcgctgtggctgtggtactacctgctgatgctggtgattatcgcgatcgtcttcgtctgcctgcgcctgcagcattcccgtatcggccgcgcctggcacgccatccgcgaggatgaagatgtggcgcgcgcgatgggcatcaacgtgcgtaactataagctgctcgcctttgcgatgggcgcctcctttggcggcgtggcgggtgcgcttttcggcgcgtttcagggctttgtctccccggaatccttcacgttacaggaatcgattgccgtactggcgatggtggtgctgggcggtatggggcacattccgggcgtgatcctgggcgcggtactgcttaccgccctgccggaactgctgcgcagccaggcagcgccggtgcagcaggcgctgttcggtacggtgctgattgaccctgaagtgctgcgccagctgttttacggcctggcgctgatgctggtgatgctggtgcgcccgtccggcatctggccggtacgccacaaggaggtgaaggcatga

SEQ ID NO: 125796 - DNA, 768 bp, Enterobacter cloacae
atgagtctgttaaccgtacgcaacatgagaaaacgcttcggcgggctgactgccgtggatgacgtttcgattaccgtgaacagaggcgagatctacgggctgatcggccccaacggcgcgggaaaaaccacctgctttaacctcatcaccggcctttatccggcggacagcggcgaattttcgattgccgataagccctacttcccgaagcagatagagaaagtgaccgccgccgggattgcccgcaccttccagaacgtgcgcctcttcaacgagatgtcggtgctggaaaacgtgatggtgggccgccacgtgcgcacccgtaacggcctgtgggccgcgctgagccgccacaaacgcgcccgcgaggaagagaagcagacccgcgagctggcctggcactggctggactataccggcattgcgcagttcgcccactatcgcgcctgcgacctggcctatggtcatcagcgtcgccttgaaatcgcccgcgcgctggcaacggatccgctgctgctggcgctggatgaacccgctgccgggatgaacgcggcggaaaaagtggcgctcggcgagctgctcatccgcattcgcgatgacggcaaaaccctgctgatgattgagcatgacgtcaagctggtgatgggcatctgcgaccgcctgacggtgcttgattacggcaaaacgctcgccagcggcacgccggaaagcgtgcggcgcgacccggcagtggtcgccgcctggcttggaggtaacgcccatgtctga

SEQ ID NO: 125797 - DNA, 720 bp, Enterobacter cloacae
atgtctgaattactgaaggtggaacgtctggacgtgcattacggcggcattcaggccgtacgcgatgtctcctttaccctgcgcgagggcgaacaggctacgctgatcggcgcgaacggcgcggggaaaagctccaccgtgcgcgccattaccgggctggaaagctttagcggcagcattgacttcagcggtaaagctgtacgtaaacagagcccggagaccctgcttcgcgacgggctggtgatggtcccggagggccgcgggatcttctcccgcatgacggtgctggaaaacctgcagatgggcgcctggctcaggcgtgacactgtcaccgtcaggcgcgagatgaacgaaattttcgagcgcttcccgcgtttgggcgaacgccagcatcagcttgccgggctgctgtccggcggcgagcaacagctgctggcccttaaccgcgccctgctcagccgcccgcgcctgctgatcctcgacgagccgtcaatgggccttgccccgaagatggtcgagaacatttttgccgttattgccgggctgcgcgagcgcggcgtcgccctgctgcttatcgaacaaaacgcccggctcgcgctggaggtgaccgacagcgcgtgggtgatggacagcggcagcattgttcatcatggcgaatcgaaagcgctgctcaacgacgaccagattgcacagatttatttgggcgaaatgcccgtttaa

SEQ ID NO: 125798 - DNA, 1158 bp, Enterobacter cloacae
atgaaaacagtaaaaatcagtgcgctcagcgccgctattctgctcggcagctttgcctcaacgtccgcgtgggccgctgacggtgaaaccgtggtcatcggtctggcaggcccgctgaccggcccgtctgcccgtatcgggaaagatctggagaacggcgcgcagctggctatcgatgacatcaacaagcagcacccgaccatcggcggcaaagcggtgaccttcaaactgcagtccgaagacgatcagtccgacccgcgcaccgccgtagccgtcgcgcagcgtctggtggatagcggcgtggcaggcgtggtcggtcactggaataccggcaccagcattccggcggcccgcatttatcacgatgcgggtatcgcccaggtggcgccggtcgcaaccggtcatgcctatacccaacagggttttgacaccagcttccgcgtgatgggccacgacgatgacggcggtcagctcgccggtcagtacgcggttaacaccctgaaagccaaacgcattgcggtgatcgacgaccgtaccgccttcggtcagggtctggcagaccagtttattaaatcgctggaagcgcagggcgtgaaaattgtcgatcgtcagtacgtggatgacaaaacggtcgatttcagcgccgtactgaccgccatccgcagtaaaaacgccgatctgatcttcttcggcggcgtcgacagccaggccgcaccgctggcgcgccgcatcaaacagctgggcatgaacgccacgctgatgggcgcaggcggattcgtcagccagacgttcctcaagctggcgcagaaagaaggcgaaggcgttgtggcgctggagccgggtctgcccgttgaccagatgccgggtggtaaagcgttcgagcaggcgtaccagtcccgctaccacacccatatcgaactgcacgccccgttcgcctatgacgccacccgcgtgctggtggcggcgatggaaaaagcagactccgttgagccgtccgactatctgcccgccctgcgcgccatcagctattccggcgttaccggacagatcgcgtttgataaagagggcaacctgaaatcgccgtcgttcacggtctataaggttgtcgacggcaaatggcagccgcagaccgtgctgggcggcgcaaaagcgaagtaa

SEQ ID NO: 125799 - DNA, 483 bp, Enterobacter cloacae
atgagtgataataacgagctgggcattctcgcccgccgcaaaattgaagccgaaattattaagccaatttatgaaatcctggtgcgcgagatagggaaagcccgcgcccaggcggtgattggtgaggccattgagcaggccgcgattgatgctggcaaagggtttgccagcaaagaacccaacggcgcgaacatcaagagctttatcgccctgcagtatctgtgggagaaagataatgccctggaggtgaaggtgattgacgccgacgaccagcagtacaactacaacgtgacccgctgtcgctacgcggagatgtaccacgagatggggctgggcgaaattggtcacctgctctcctgcgcgcgcgatgaaaaattcatcgtgggctatgcgcccgacgtagagctaacccgcaccacgaccattatgcagggcggcgcgtgctgtgatttccgctaccgctgcagtaaggacaagccatga

SEQ ID NO: 125800 - DNA, 1227 bp, Enterobacter cloacae
atgatccgcgtcaacgccgaacggctgtggtcaacgcttgagatgatggcgcagatcggcggcacgcccgccggtggcgtcacccgtctggcactgagcgaggaagatcgcgttgcgcgtcatctgcttcgcgactgggcgctggacgccggttttacctgtgacgtcgacagcatgggcaatatgtttatccgtcgtgcggggaaaaatccgcagcttgccccggtcttgaccggttcgcacgtggatacgcagccgctgggggggaactacgacggggtttacggcgtgctggccgggctagagctgctgcgaacgctcaacgaccatcacattgagacggaacgtgacgttgtgctggtcaactggaccaacgaagaaggcgcgcgcttcgcgccagccatgctctcttcaggggtctggacggggcaatttagcgaagcgtacgcccatgcccgcgcggatagcaacggtatcaccgtgggtgaagccctggaaagcatcggctaccggggtgaagcccctgcccgcgcgtttccggttcacgcctgctacgagctgcacatcgagcagggcccgattctggaggacgaaggtctggatatcgggctcgtccgcgcggcaatgggccagcgctggtttaccctgacgctggacgggtttgccgcccacgcgggcaccacgccgatgcacagccgacgcgacgcgctgaccgccttcgcggagctggcgctgaaggtggaggagattggctatcggcatgcgccggacggacgggcgacgatcggtatggcgcaggttacgccaaactcgcgcaacgtcgtgccgtctcgggtggtctgcagcgtggagtttcgccatccggcgctgacggcgctggatgccatggaggcggcgctgcataaggtggctgaaagcctgagcctgcgcggggtggcggctgtcgttgagcgcatctttgactacgcgcccatcgcgtttgatgccgaatgtctggcccgcacggagaaggccgtggcggaactgggctactcggcgaaaccgatggtctccggcgcgggacacgacacctgctatgtgagcaaaattgcccctgccagcatgatttttatcccctgcgtgaagggcatcagccataacgaagcggaaaggatcctgccggagtggtcggaaaaaggggcgaacgtgctgttgtacagcgtgttggccgcggcccaggaaaaataa

SEQ ID NO: 125801 - DNA, 1488 bp, Enterobacter cloacae
atgtttcgtcagtggttagcgttagtgattatcgtgctggtgtatatcccggtggcgattgacgcgacggtgctgcacgtagcggcgccgacattgagcatgacgctgggcgccagcggcaatgaattattgtggatcatcgatatttactcgctggtgatggcgggaatggtgctgccgatgggcgccctgggtgaccgcatcggttttaaacggttgttgatgatcggcagtacgctgtttggcctgtcatcgctggcggcagcgtttgccccctcagcagggtggctgatcgcggcgcgcgcctcgctggcgattggtgcggccatgatcattcctgccactctggcggggatccgcacgctctttaccgacgcgaaagatcgcaacatcgcgctcggcgtctgggcggcggtcggttccggcggggcagcgtttggcccgctgattggcggtatgctgctggagcatttttactggggatcggtgtttttgatcaacgtaccgattgtgctggtggtggtgtcgctggccgcgcgttttgtcccccgtcagcagggccgaccggagcagccgctgaatatcagccatgccatcatgctgattgtggcgattttgctgctggtctacagcgccaaaaccgcgcttaagggcgctctggcaccgtggctggtggcgtgtaccctgctgacgggtgccgtgatgctgtttatttttgtgcgcatccagctgcgcgcccgcgtgccgatgatcgacatgcgcctgttctgtcaccgcatcattttaagcggcgtggtaatggcgatgacggcgatgatcgccctggtgggctttgaattgctgatggcgcaggagctgcagtttgtccatggctttacgccgttcgaggcgggcatgtttatgctcccggtaatggtggccagcgggttcagcggaccgattgccggtgtgctggtgggccgtctggggctacgcattgtcgctgcgggtggcatggggctgagcgcggtcagctttatcggcctgtcgacgctcgacttcagcacgcagcagtggcaggcgtgggggctgatggtgctgctcggcttcagtgccgccagcgcgctgctggcctcgacctcggccattatggcggccgcgccgaaagagaaggcggctgccgccggagccattgaaaccatgtcctatgagctgggggccgggctggggatcgccatttttggcctgctgttgacccgcagcttctcggcgtcgattgcgctgccgcaggggctgcatgcctcgctcgtcgataaagcctcgtcatcgattggtgaagcgatgaaggtggcgcaggaactgacgccgtccctcgcggagccggtgattgaggcggcgaaaagtgcgtttattacttcccacagcgtggcgctggggagtgcgggcggaatgctgctgttgctggcagtggggatctggttcagcctggcgaaggtgccgaaggggtaa

SEQ ID NO: 125802 - DNA, 2595 bp, Enterobacter cloacae
atgttagatgattacactcagcaccggaaagcccgccaggaggcgggtattccggcgaaaccgttaacagcggaacagacagcggcgctgatccagcgtttacttcacgatgcgccgacacatcacccgcaattaatcgatttattaacccactgcgtcccaccgggtgtcgatcctgcggcaaagttaaaagctgaatttttatttaaggtggctttgcaggactaccgtgttaacggcctctctcccgaagcggccaccacgctgctgggtaccatgcagggcggctataatgtccagccgttgattgcgcttcttgatcatccggatctggcaccgctggccgcacagcagctctcttcgaccatcctcatttttgacaaattcagccagcttgaaaccaaagcgatggccggtaacgtccatgcgaaagcggtgcttcacgcgtgggcgaatgccgaatggtttacccgccgcccggcgatggctgaaaaaatcaccctgaaggtgtttaaggtgcccggtgagaccaatactgacgatttgtctccggcgccggaggcgtggtcacggccggatattccgatgcatgcgctctccatgctcagtaacgcccgggaaggggttgagccggatgaacccggcgcgcgcgggccgctgcgccagctggcagaattaaaagcggctggctggccgctggtctatgttggtgacgttgtgggaacgggatcgtcacgtaaatccgccaccaactccatcttatggcacatcgggaacgatattcctttcgtgccgaataaacgcaacggcgggtttgtgtttggcggcaagattgcccccattttctttaatacgctcgaagattccggtgccttgccggtagagatggatgtctccacgctgacgaccgggatgctgatcgatctttatccctggaaaggcgaaattcgtgagaccgaaagccagcgtctggtgacgacctttacgcttaaaaccgaggtgctgctggatgaagtgcgtgccggcgggcggatcccgttgattatcggtcgcagcctgacggcgaaagcgcgggaatcgctgaagctcgcgccttcagatgtcttccgtaagcctgcggcgcctgcgccttccaccgccggttttacgctggcccagaagatggttggtaaagcctgcggcgtcgcggggatccgtcccgggcagtattgcgagccaaagatttcgacagtcggttcacaggataccaccggcgggatgacgcgtgatgagctgaccgatctggcgtgcctgacgttttcagccgatctggtgatgcagtctttttgccacacctctgcgtatccaaagccggtggatgttcggctgcatgaaacgctgccgcagtttatcacccgtcgtaacggggtcgcgctgaaaccgggggacggcattatccactcctggcttaaccgcatgctgctgccggatacggtgggcaccggtgccgactcccatacccgcttcccgctggggatctccttcccgggcggctccggactggtggcgttcgccgcggcaacgggcattatgccgctggatatgccggaatcggtgctggttcgctttacgggcgagatgcagaaagggatcaccctgcgcgacctggttcacgccattccgctttacgccagaaagcagggcctgttgacggtcgagaaaaagaataagcgcaatattttctcgggccggatccttgaaattgaagggctggaaacactgagtgcagagcaggcgtttgagctggctgacgcctccgctgaacggtctgctgccgcttgcgtgatgcgcctgtcggaggacaaggtcgcacaatacctgcgttccaacgcggccctgctgcgctggatggttaagcagggatatgagaacgccgacacgcttgaacgacgcatcgctgaaatcgaggcgtggctggctaacccgtcgctgctttcggccgatcctgatgcggaatatgccgcagtcattgagattgatctcaatgaaatcaccgaaccggtggtctgcgcgccaaacgatccggatgatgctcgcttactttctgaggtggccaacacgccaatagaggaggtctttattggctcctgcatgaccaacatcggtcatttccgcgctgcgggtgaaatcctggccgatgccggtgaaagccaggcgcggctgtggatcgcgcctccgaccaaaatggatgcccggcagctttcccgtgagggctattttagccagtttataaagtcgggagcgcgaatcgagcccgcgggctgctccctctgcatggggaaccaggcgagggtgcgcgaagggagccacgtggtatcgacgtcaacccgaaatttcccgcatcgtctgggaacgaatgccagcgttttccttgcctcggcagaattaagcagcgtcgcggccatcctgggtaaaatgcccaccgttgacgagtattttcgctataccgataaacttcacggcgcgcatgaaaatatctatcgttatctcagttttgacaccctgaccgaatatcaaatcacagagcgtgataatattccggttgttagcgtgtag

SEQ ID NO: 125803 - DNA, 549 bp, Enterobacter cloacae
atgattgaacaacgcctcaagcagctcagtagcgtctataccgtggttcttgtgccgggtctgagagacagcgatgaacatcactggcaaagctgctggggccgacgttttcctttctggaagcgaattcagcagaaaaactggttcgagcccgatattgaaaactgggtctccgccattacccgcgagctggcagcgtgtcagctgcccgccatcctcgtcggccatagctttggcgcgctggcgtcatgccggctgctgcaaacgcggcgggtaaacgtcgccggggtggtgatggtcgcaccggcagagcccgcgtttttcggccttgaagaggccattcagcctgcgccattaccggttccctgcctgatgtttgccagcagaaacgatcccctgatgcgcttcacccgcgcgcagttctgggctgcctgttggaaggggcagttaatcgatatcggcgaggccggacatattaatgccgaatctggccacggtgaatggccttacggactcgaacggctaacagaattttgtgaacaactttag

SEQ ID NO: 125804 - DNA, 876 bp, Enterobacter cloacae
atgactacttcgcttgccagatgtaatgcgccagacgttcagcaccccttcgcggagctggcggccgaggccctgtaccgtgaaattcgcttgaccccgaaaccgggtctggtagatcgcgtcaacagcggggcgcatcgcgatatgaattacgcgctgtttatggccagtatcgcggccattgccccgtggttcaccgcgttctttaacgtcggcagggagacggcccgtcttgccgggccgcaaacgctgcgggcaataaggccggtcggtctggcctgcgaacaggcgatgttcaacgccaccggcggggtgaacacccataaaggcggcatcttctctctggggctgttgtgtgccgcggcagggcgtctgacgcaaaggcaggaaagcctcacgcagcgcagcctgtgcgatgagagcagggcgatttgcgctggcatcgttgatcgggagctgaaaaatcgcggcgtggcgaaaacgaagggcgagcagcagttccaggcatacggtttaaccggtgcccgaggggaagctgaaagcggttttgccaccgtccgccacgccggactacctcactttgaaatggcactgcgccagggagcctctgaggatgacgcgttactgagaatgttgctcgggctgatggcggcgaatccggataccaatcttgtttcacgggggggaataaaagggctgaattatgccagacgctattccagacgaattttagcggtgaaacatctgacgccggagaaacgcgttaatgccttaaccaatatggacgttcagtttattcgccggaatttaagcccgggcgggagcgcagatcttatcgccgtcggatggttattgtcgcagtttccgtgcgaataa

SEQ ID NO: 125805 - DNA, 540 bp, Enterobacter cloacae
atgacggataacgcatcgaacgcccctgtttcgctggaacaggttctgacatcaaaagagcagcgcgcacgccgacagcaggcgtggctgtttcagtcggatcataccgtggtatccgtcacgctggtctggccgggggcggtgaaggataccggtctggcccgacgagtgatggccgttgcgaatgaggcgctcggagagctattccgcacgcatcagtggacggtctgtcgccagcagactctgcagccggtcaccgggccggaagcgctctggtcggtggcggccccggcctggatgatcaagcacgtcaccgcgcatctcgaagataaccatcctctgggacgcctgtgggatatcgacgtgctgtgtccgaaaacgggactgctgaaaagaagcgccatccagcaaccgatgcgcagatgctttatctgtcatgaacctgctcacgtttgttcccgcatgcgacgtcattcgctggccgagctcacgcgcgtaatcgaggcgttaaccgatgactacttcgcttgccagatgtaa

SEQ ID NO: 125806 - DNA, 1521 bp, Enterobacter cloacae
atgaaaaatctcacagaaaccctgcaccacattcccggcacgcgtcgtgaatacgtcgccttcagcggcgctaacgcgacgacgccgtatctttctgatacacagcaaaaatatcagcgcaaactttttgccagcgtggacgaggtgctggaccgttgcgatttgcatgacggcatgaccgtctccttccatcacgcgttccgcgaaggcgacaaggtgatcaactatgtgatggataagctggctcagcgcggtctgaaagggatcacgctcgcgtccagctcgttaatgtcgtgcaatgccccgcttattgaacatattcgcagtggcgtgattggcaaaatctacacctccggcatgcgtggcgagctggcggatgcgatttcacacgggctgatggatgagccggtacagatccactcccacggcgggcgggtgaacctgattcagaagggtgaaattgccattgatgtcgcctttctggcggtgtcctgcagcgatgaatatggcaatgccagcggcaacggcggcacatcgcagtgcggctcgctcggttacgctatggtcgacgcgcaatatgccaaaaaggtggtcttgctcaccgaaaccctgaagccgttccccaacctgccggccagtatcgttcaggaccgggttgactatgtggtgcagattgagagcgtcggcgacccggcaaaaatcagcgtaggcgccgccagggtgaccagtaatccacgtgaactaatgattgcccgctctgctgccgatgtaatcgaacactccggctacttccgcaacggcttttccattcagaccggttcaggtgcggcgtccaccgcctgtacgcggtttatggaggcccggatgcgtaaacacaatattgtcgcccggttcgcgctcggcgggatcaccggcagcattgtcgatctgcatcaaaaggggctcattgaaaagatcctcgatacgcaaagctttgacggtgctgcggccgcttccatgaccgtcaatcctggccatgtggaaatctccaccaacgtctatgcgaacccggctgcaaaagccgcctgctgcgacagggtggacgtggttatcctcagcgcgctggaggtggacacccggttcaacgtcaacgtgctgaccggttccgacggggtgatgcgcggcgcgtcgggcgggcattgcgacgtcgccgcggcggcaaatctcaccatcgtggttgccccgctgatccgcagccgaattcctaccgttgtcaggcaggtcaccaccctggtgacgccgggcgaaagcattgacgttctggttaccgatcacggtattgccgttaacccggcgcgcccggaggtccgcgaacgcttgattcacgccgggctgcccgtcgtcgacattgaggtgctgtatcagaaggcgttgctcatctcgggtgagcctaagccggtggcgtttaccgaccggatcgttggcgtggtgcgctaccgcgacggcagcgtgattgatgtggttcaccaggtgaaggagtga

SEQ ID NO: 125807 - DNA, 876 bp, Enterobacter cloacae
atgaaaaagttacgtcgcagtatgttatttattcccggttcaagtgctgccatgttgtcgacggcatttatctataaaccagactccattatgtttgacctggaagatgccgttgcgctgaaagaaaaagacagcgcgcgtcttctggtatttcacgcgctgcaacacccgatgtacaacgatattgaaaccgttgtcagaattaacccgcttaataccccttttggtttaaaggatctggaagccgccgtcagggcaggggtggatgttattcgtctgccgaaaaccgacacaccggaagatatttatcagctcgaacgtgaaatcgtccgcattgaagaaagctgcgggcgtcctgttggctcaacgaaattaatggcggcaatcgaatccgccgtcggcgtcattaatgccgttgccattgcgaaatcctccgaccgtttaatggggattgcgctcgccgcctttgactacgtgatggatatgcaaaccgagcggggcgacggaacagagctgttttatgcgcggtgcgcggtattacatgccgcgcgcggggcagggatcgacgctttcgacgtggtctacgccgatgtcaatgacgaggccggtttcctgaaagaagtggatctcatccgccggatgggcttcaacggaaaatcgctgattaatccgcgacaaattgaaattcttcacaacgcctacgcgcccacgcaggaagaagtggattacgcccagcgcgtgattgctgccgcagaagagggcgaacgcaacggactcggggtgatctcactgaacggcaaaatgatcgacgcgccgattatcaaccatgcccgggttgttatcgaacgcaaaaatgcctctggcattcgtcagtaa

SEQ ID NO: 125808 - DNA, 291 bp, Enterobacter cloacae
atgaaaattgtgcaagccgcgatggcgggaacgctggagtccagcgacctcatggttaaggtcagccccgatgagagcgggctggacgtggtcatccagagcgaagtgtataagcaattcggcgaccgaattgcagaggtggtccatgaaaccctggctgcgttcaacatcgaacaggggcagatcattattgatgataaaggcgcgctggactgcgtgatccgcgcccgcgtgcaggctgcactgctcagagggacagcccgggaagacattgcatgggaaacgttataa

SEQ ID NO: 125809 - DNA, 1068 bp, Enterobacter cloacae
atgtacaccgccagaacacccgagtttgaggttattaacgccggtaacgcccagtcccgggaagaggttgtccgcttcctggcccgcaacggtttaggtattgatgacgatattgcgcaatttattgttgcccgctatcagcgccatcttgtcgcctgcaccggcattgcgggtaacacgttgaagtgcatcgcagtggatgccgggtggcggggcacgtcgttaatcctgacgttaatccatgaggccgaacttcaggcggcacagaacggtgaacatcaactctttctctttacctgtccggataacgtgaagtcatttcgcggatgcgggttttatccgctggtgacggtcgagaaccgtgcgtcattaatggagaatacgccggtgggtattcatcgttattgcagccagctgcgccgccatcatttcgtgccggggaaaaatattggcgcgattgtgatgaacgccaatccgttcaccctcggccaccaatatcttatcgagcatgcggcgagccggtgcgacgcgttacatgttttcgtggtccaggaagatgtctcggcattttcgtttaaagaacggttcgcgatggtcagggacggatcgcagcacctgccgaatgtcaccgttcatccggggtcggcgtatattatttcgcgcgggacattcccgagctatttcctgaaagataagcaggtcatcgataaaacctacgcggcaattgacctcatgctgttcagaaattacatcgcccccgcgttgaatattaaccatcgtttcgtgggtaccgagccgttctgtccgttaaccgccgaatataaccgggcgatgcaccgctggctggaagaagaaacgagcacagcggcccgtattagcgtacacgaaatagaaagaagaacggacggtaataatgtgccggtatcggcttcagccgttcgtcgtttattaaaagaaaacaacatcgctgccgccagccgcatggtgcctgccaccacgcgcgcgtttctgaataacggaatacagcatcagccctgtttatccgagccgctgacggcagcggtttaa

SEQ ID NO: 125810 - DNA, 864 bp, Enterobacter cloacae
atgaaactagcaagttatattcatcagggccgtaaaagctacggaatgtatactgagtcgggctttatcgacctgggtaataaaattggccatcaatatgcaaccctgaaagatctccttcaatgggatgcgattgatgtcgccagacaatatctcgattgcccggtggatattaggcctgaagacgtgacctttttgcccgttatagaagcgcccggaaaaattttctgcgttggcatgaattacgctgaaaaaagaaaagagtttgctgagacgaataatgcccccacgctgtttatccgttttcctgattcgcaaaccgggcatgcgcggccggtgataaaaccggttctctccagcgagttcgattatgaaggcgagctggccgtaattatcggtaaacccggtagccaaattgacgtcagtaacgcgctcagccacgtcgcgggatacagctgctatatggacggctccgtgcgcgactggcagcacgcctggttcaccgccggtaaaaactggacgcaaaccggcgccttcggcccgtacatgaccacggcggacgagatccccgatcctcacgccctgaccattcacacctggctgaacggcatgctggttcagaatgactccacaggcagcatgatccacaaagtggcggatcttatcgcctacatcagcacgtttacctctctcagcgccggcgacgtcattattaccggttcgccaggcggcgtcggcaaaaagcgcaatccacctctgtttctgcacgacggcgatcgcgttgaagtggagatcgaaaacgttggccggctggtcaataccattgtggaagcccagccgcagccacaagcgttagctgtctaa

SEQ ID NO: 125811 - DNA, 1245 bp, Enterobacter cloacae
atggcgttcacgcatgctaacaataccctgaaagcgcccgatcctgtaaaagccagcgcgcatattcgcgtaattctggcactcgcattatccgggcttgcagaacttgcttctctgttttttattcagccactgcttccaacgctggccgtggaatataatgttccggtcagccaggtgagtattatcttatccgcagaaacggccttgctggcaattgggttgctgtttaccgggacgttatccgatcattatggcaggaagcggttaattatcgtctccctcctgctgggcggcattctgacgctgctctgcccgctggtagaatcctgggcgatgctggtggcgctgcgtgcggtgattggtctggcgctgagcggcatcgcggcggcagcaaccgcctacatcagtgaggaggtcgcaccggtggcagctggcatcgtgacgggctattttgtcttcggtaactcgatgggtggcatgtccggccgtattgttgccagccagctgatcgaccacgtttccattaatgtcatcttttacggctttgccgtcagcctgattgcggttgctattctggtgaaattcctgctgccagattccaaaaattttacccctacccagaacctgaacgtgatgcgaatggtgaaaggggcagcatcgcatttcaaaaataaaaatctggcgctggcgtttgtcatcagctttattatcttcggcgcatttacctcactgtataactatctggccttcttcctgaaaggtgaaccgttccatatttcaccggcaaatgcaggcctgctctcctttagcttcgccctgagtttctttacggcaccgcaggcaggccgcttatcggcaaaatatggcgcaatgaaagtcctgcgcgtgttgttcctgatcatggcgttcggcatgctgctgacgctcacgtcgaacgttgtcacctttattgttggcgcagtgatttttaccggctgtttcttcggctgccattctatcggcttaagctgggtcagtaaaaatgccactcatgcaagaggtcaggccgtcgcgctctatttattcttctactacatgggcggttcggtgattggttttatcaacggttttgtcttccattcaatgggctggcagggaatgaccggatttattctggcattacttggcgttggcgtagtcgtggctacgtatctggcatctggtaataagcaggttctggttccagcgcagtcagccgagtaa

SEQ ID NO: 125812 - DNA, 1089 bp, Enterobacter cloacae
atgttaaagatcccttgcgtattaatgcgtggcggtacgtcaaaaggccccgttattttggccagcgacctgcctgaggaaaccgaagcgcgcgacgcggtgttactcagcttgatgggcgcaggtcatgaacttgaaattgatggcattggcggtggaagtccgcaaaccagtaaggtggccatcgtcagtccttccgacagcccggacgctgatgtggattatttattcgcacaggtgatggtgaatgaacgtcgcgtcgataccacgccaaactgcggcaatatgctctgcgcggtggggccctttgcgatagaaaaagggctggtgaaggcgcaaagcccggtgacaacggtgcgtatccgcaatctgaacaccggaacactggtcgacgccgaggtgcaaacgccggattatcgcgttgtgtatgaaggcgatacccagattgacggagttccgggtactgccgcgcccattggtttaaccttcctgaattcagcgggttccaaaacaggaaaattgcttccgaccgacagcgttacaaacgtattcgacggtattgacgttacctgtattgatatggcgatgccgatggtattgattgaggcctcggcactggggaaaacaggaggggagtcacccgcggaactggatgccgatgcggcgtttaaagcaaggctggagagcctgcgtcgtcaggcgggtgaggcgatgggcttaggggatgtgtcaaacaaagtgatccctaaaccggttctcctcagccgggcgcgcaacggcggaacgcttcaggtgcggtatttcatgccacacacctgccataaatccctggccattaccggctcgattggtatttcgaccgcgacgcttatagaaggctccgtcgccgctaaaattgtcgctggtcgtccaaaagagcgctttaccaatattattgatattgaacacccaagtggaaaaatatccgtgtcattgttgagggacgggaacaatatcgaaaatacccgagctgcggtaattcgtacttcccgtaagctatttgaaggtgtcgtctgcgtacctgaaaaaatgctctctgaagttgattag

SEQ ID NO: 125813 - DNA, 930 bp, Enterobacter cloacae
atgcaacatgaattacaaggaatacaagcgtttgtaaaaattgcagaaatcggatgttttacaaaagtgtcgcaatttcttcacatttcacaaccggcgttaacacgaagaattcaaaaactggaagaaagtttgggtaccacgctatttgagcgttcaacgcgtagcgtcaagctcacgacggtgggaagagaatttttacctaaggcaaagaatttaatcgatttttatgaaagctcagtcctgagtattaaagagatggcgacgcatcaggccggggttattacggtttcctgtattcctactgccgccttctattttctaccttcagtgatacgagattataacaatgactatccaaacatccggatccgcatccttgagcacagtgccagcgattgtctcgaagcggttttaaatggcgacgcagatttcggcataaatatgataaacatcacacatccgaatatcgattttgccccgctggtaaacgaaccctttgttctggcatgccgccgcgacaatgaactggcgaaaaaaccgctggtgacctgggacgatctggcaggcatgaagctgattggagtcaggcgttccagcgggaaccgttcgcttatcgatcaggcttttgaaaagatggactggaagccgaactggttttacgaagtgcgtcacctgtcaacgtcactggggatggtagaggcgggtctcggggtgtctgttgtgccgagtctggcgatgccgaccgatgaacatcatgtccttgttagtcgcccgctgattgaacccgtcatccggcgaacgctggggctagtacaacgccgggaaaaccctctcagcccggcggcggaaaaattcagagagctgcttgtacagctatggtcagcggaaaacaacagcccgtggatcggcaagtttactcagctgtaa

SEQ ID NO: 125814 - DNA, 426 bp, Enterobacter cloacae
atgaaaatactctgcttttttctttttgccctgtctcccttcgcggtcgcagatagcctatcttcaccaggccaggctgcgcttaaattcaatcaatggtatatcgctcagctgaatcaggacaaaccgccagtgctgaatccagacattatgaatgagtacgttgcctctgggacaattgatgcaattaaggagatgtactcaggagacagtaacgaaaaagacatgcccgatgctgatatgttcattaaagcgcaggactgggatgaggactgggatcagataaccgttctgcattctgattttgatgccgtttgcaccaacgtttatgtcgcattcggtcagaaacaagatcacgttgtcgcagattgtctcgttcaggaaaaaggaaaatggaaagttcgttcggccacgctgattaagtaa

SEQ ID NO: 125815 - DNA, 642 bp, Enterobacter cloacae
atgaccagaagagttgattatcagattgaaaaatatctcctgaccgaagctgccgaaccggagcgcctgacgcgccagtgggcagaggttctggaggagtgtcgtgagcaaaaggccggtgcagaggagcggctgcgcctcgcgttgcttaatgtggattacgtcaccagcttcgaactgcccttcaggctgcttctcacccgtgcgccccagttgattgatgccgtcaggaaagagcttcagctcagtcagaaaaatgttctgtttaacggcaagcgctttggctgcgtctacagccttaaacgggatctggacggcatacctgacgagtttacctatcacctgaagacgcggatccagcgcagtgacgccacgggcgcaacggaagcgtcttaccgacaaattgcccagcaggtgaaagcgccaaaggagcgcctcaaactggcgctggacaacgggctgtctgtaaccgcgctcgacgggcttttctggtttggcattcagcgcatcgcggctgatgtacaacggttacgcaaaacagggatgcggatcgtgacgtccaacgccgaggtgttcgatacgcttaccaaaacaacccggcaggtcccggtctatcgcctggaagggattgaaattacttaa

SEQ ID NO: 125816 - DNA, 540 bp, Enterobacter cloacae
gtgaaaattaacgtcatcggtaccagcgggagcggaaaaagcacgctggcgaagcagattgcgaccgcgctgtctattccctgtatcgagatggacagactctactggcaggctaactggcagggaactccggacgacgagtttcaggcaaagctggcgcaggcgctacaggcttcgccagactgggtgctcgacggtaactacaaccgcacgcgaccgctgaaatggcgcgatgtcgatgtggtggtctgggtggattatgggtttacccgcaccctctggcaggccgtcacccgagcaataaagcgagcctggcataaacacgagctttggccgggaacgggaaacaaagagagtttccggcgcgcgttcttcagcagagaatccattatcatctggacgatcaaaacctggcgtaataaccgtacgcgctatgaagccgacctgcaaaacccgcaatatagccatattcgcttcgtccgcattacccgtcgggagcaggtggaatcgctgattgcctccttaaagtcttattcttag

SEQ ID NO: 125817 - DNA, 1536 bp, Enterobacter cloacae
atgaggcgtaacacccccgttacacaaaacgagtatttgcttaacgccggttcgacgttaatgtccactaccgatataaaaagtcatattacctatgctaactccgcttttatagaagccagcggatataaagaagagcatcttctgggggagccgcataacctcatccgccatcccgacatgcctgccgaagcgtttggcgacatgtggtttaccctccagcagggcgagacctggacaggtctggtgaagaaccgtcgtcataatggcgatcactactgggtgcgggccaacgtgacgccggtctggcagggggaatccctgaccggctatatttcggtgcgcaatatcccctcacgggaagagatcgcggccagtgaaaaactgtatgcaaaagtgcgtaataacgaattaaaacatcatcgtttttataaaggactgttcgttcggcgcggtttattttcctttttgtcgctctttaaatgtctcagtaccggaaaacgaattcagcttggtattactgtgacagcattactttcctgcctggcgatgtatttattccgcgatcgtctcgttcaggccaccgctctggtgctgcttttttctgcgctgtcctgttatctccatgcgcagatcgcccggccggtaaaatccattgttcaacagatgcagcgcgtggtttcaggacgtaaaacggactattaccattttgacaggatcgatgatatcgggctgatgatgcgcctggtgaatcagtctggtttaaacctgaactcgctggttgatgatgtcggggcgcaaatcagcggtattggcaccatcagccagcaggtcgcgaaagaaggtgcggcgctgcagacgcgctctgaggaaaccgccgatttcttgcagcaaaccgcatctgcggtggaagagatcgccagcgccgtgaagcagacggccgaaaccgcgaacgaggcgattcagatggcggatcgcacccgcgacagcgcccactgcggtgaagcgatgatgaaagagaccatcggtatgatgcagtccgtttcgcaggataacggccagatcgtcgatattatcagcgttatcgatcgtattgccttccagaccaatattcttgcgctgaatgccgccgtggaagcggcgcgcgcgggtgaagccggccgcggctttgccgtggtcgcggctgaggtgcgcaatcttgcgcagcactccgcgacggcggcgaaagagatcaaagcgctgatcgagaaaaacgttgccagcgtcaacgctggcgtggagaaggtgggacaaaccgaatcacagctgacggttatgatcgacaacgtgctgcgggtctcctccctgattaaggagatcggccacgctacgcaggagcaaacccaggcgctgacgctcatcaacgcctccctctcccgtatcggcgcaatgacccagagcaatacggggatggtggataacgtcactcacgccgcgaatcacctgacgcagcggacgacgcgcctgaagcaggcaattgccgtttttggcggttag

SEQ ID NO: 125818 - DNA, 915 bp, Enterobacter cloacae
atgctaaaagataatttcaacgatctgctctcctttatggtggtggcccgcgagcgcagctttacgcgcgcagcggcgcagctgggcgtctcgcaatcggcactgagccatgcgatgcgcaagcttgaagcgcgattagacgttcgcctgttaacccgcacaacccgcagcgtggttccgacacccgcgggtgagcagcttttttcgcgcctcagcccgcatctgctggagatcgaacaggaactcacggcgcttcgcagcagccgcgacaaacccgcaggcgctatccgcatcgtcgccggcgagcacgcgatggacgctgtgctctggccggtactgaaggcttttatgctgcaatatcctgacattaacgtcgaagtgacggtcgacaatggcctgacagatatcgtcgatggccgcttcgacgcgggggttcgcctgggtgaacaggtggcaaaagacatgattgcggtgcggattgcgccggacatgcgcatggcggtcgtcggctccccggattacctggctcgttttggcgtgccgctcgtgccggagcagctgggtgaacaccgctgtatcaatctccgcctgcccacccgagggggattgtatgactgggaatttgagcgcgacgggcgcgagcttcgcgtgcgggttgacggacagcttacgctcaataacctgtcgcagcgcatcgacgccgcggagaatggtctcggattagcctacgtgcccgagtcctcggttctggacgctctgaatcagggacggctggtcagggtccttgaatcgtggtgccccacgtttgaaggataccacctctattatccgagccgtcggcagcacacaaccgcgttcaggttacttctcgatgccctgcagcagcaaaaatttataccatctggtaataattaa

SEQ ID NO: 125819 - DNA, 669 bp, Enterobacter cloacae
atgcttgatttggatcacttagaaaaagcccaaagggttagccttaccatgcaggttgaacacagtttgaaaggggcgttaattacaggctctctcaaaccaagagcacgactgattacgaaagagattgctgataaattaggcaccagtattacgccggtccgcgaagcgctgttgcgcctggtctcctcaggcgcgcttcacgccacgcccgcacaggcattcctggtccctgaagtgacgctggagcgttataacgagattaacgccatcagaaaacagcttgagccaatggcggtcgccgcagcatgccagaaggtgtcagacggcaagctggaggcgttgcgcaaaatgtcagaggctttccatgatgccatgcgcaatggaaacgttcagcaggcattgcatgcgaatcgtatcttcaggtttacgctttatcagtatgcggaaatgcctacgcttaatgccttaattgaacagctatgggtccgcatcgggccctgcatgaactacctgcatcacgaacttaacgacatcaaaacggcaacgtatcactatgacgagcttctttcggcccttgagcggagagatgttgatgcgagccagaaggcgattgataagttgattgatgaagcagattctcttttacagcgacaatattttaactga

SEQ ID NO: 125820 - DNA, 756 bp, Enterobacter cloacae
gtgctgggctacagcggctggcaggagtatgaactctcggacggcagcggcctggtgaagctgggcgaaaatccgtctcatccttcctggtcgctgggcgtactgggtatgccgggctttaccgcctatatggggctgctggatatcgggcaaccgaaagcgggtgaaacgctggtggtggcggcggcgaccggcccggttggcgcgacggttgggcagatcggcaaaatcaaaggttgccgggtggtcggcgtcgccggtggcgcagagaaatgccgccatgccgttgaggtgctcgggtttgacctgtgtctggatcaccacgccgcggattttgccgaccagctcaagcaggcctgcccgaacggcattgatgtctactatgaaaacgttggcgggaaagtgtttgacgccgtgctgcccctgctgaacacctccgcgcgcgtgccggtgtgtggcctggtgagcggctacaacgcgacgggcttgcctgacgggccggaccgcctgccgcttctgatggcgacccttctcaagaaacgcattcggatgcagggctttatcatcggccaggactatggacatcgcatccatgagttccaggaagagatggggcgctgggtgcaggagggaaaaatccactatcgcgaacaggtcacggacgggctggaaaacgcccccgaggcgctcattggcctgctggaaggacgaaacttcggcaaagtcgtgattcgcgtcgcgagtgacaataaataa

SEQ ID NO: 125821 - DNA, 450 bp, Enterobacter cloacae
atgaaaatagtctctattacgctggcagcgctggtgctttattctgcacctgcctggtccgcttttcaggagcgggaatataatacctggtatatgaaaaatgcggtgctttacgatatgacgcagacctcagaaggttttcccgtcatggtgagcgtatcccagcctgggaaaaaatccgctaatttgctggtgtcatatattacggaaggccgctgtggtgagaataacctgccgcttaatgtgaatggtaaagtgctgcccgccaaatataattgtgttcaaataggaaagaacagaattgaacatttttcagtggtggatgcggaaagcgtcaatggcatggtgacgcatctgaaatctgatttcactattctcctgcaaaacgatatcaaaatttgggcagcaaatatcaaagcgccaaaatacgggctaaccccgcgcttttaa

SEQ ID NO: 125822 - DNA, 276 bp, Enterobacter cloacae
atgtggtttctgctgatcaatatgctgacgttggtcatgtatggcgccgataaaatagcggcgcggaaaggcatgcgcagggttccggaagccacgctgctggtatttggcgtaacgggcggctggcctggcgcgattgtgggccaacagctctttcgccataaaacacaaaagcagccgtttaaaacctactttttcttaagcattgtcgttagcatcgccgtgatggcggcggtttaccatttctcgcctgtttcttctttatggccgttttga

SEQ ID NO: 125823 - DNA, 1524 bp, Enterobacter cloacae
atgcgccatgcacctatctccatagctgcagccacggcaatttttgtgctgggcgtttttatcatcaatatccaggtctggtactcggcgcgggctgacagccttgccggggcgcactacgtcgtcaggaatatgcacgttattcttacagaagcgcatcatgcgacccaggttgcaatgcggcttgctgagaatgagtgtgatgctgaaggacagtatcggctcggcactgaagcggcattacaaccccatctgagaacgatcgttattctgaaaaaagatgtggtatggtgctcctccttgccgggaaaccgcgtgttgttggttaacggctcagcgctgcctgaagcgccattgctacttgttccatcgaaaagtacggtcaacggcctgccggttctcttataccagacaaatcatgccggcagccgaatcatggtgagcatcagcgacagccatatccgggatgcgctgaatatgccactacgtggcgtggcgtattcgctgctggtcggcaatcgtcgtttaggccaatcaggcgatgtcttgacggcagcccattcaaacaacgatgttctgacggtaaaagccgctgattatgccttcgcgattcaatttaacgctccgcctctttttagcctgacgcgattattcgaccaggccggtggagtggtgttatttctactgctcgtttcctctctttctgcttatcttctgcagcgatatctgtctaaggatatttcaccggaagaatcgctgcgtaccgccatctacagaaatgaaattattccctattaccagcccgtcgtgagcggaaaagagggcaccttgcgcggtgtagaggtgctggcaagatggaagcatccgcaatccgggtttatttctccctcgtcatttattcctcttgctgagaaaacagggctaataattccactaacccaaagcttaatgcgtcaggttgcaacgcagatgaatgctatttctacgctgctgccggaaggatttcatgtcgggattaacttcagtgcgtctcatatcgttgcctctaccttttttgaagagtgtctgaattacaagcgcagctttgttcaacaggatcttaatctcgttgtggaggtgaccgagcgtgaacctctccacgtagatgaacatctcgttaagaccctgaatgcgctacatgaaatagggtttgccattgccctggatgattttggaacgggatattccggcctgtcctacctgcaggacctgcacattgattacatcaaaatcgaccaaagctttgttgccagggttaatgagaatgaggattccaccctgatcctggattcggtactggaactggcaaaaaaactgtcaatccgtattgtggcggaaggggttgaaacccaggaacagcttgattacctcatgcgcaataacatcacgtttttacagggctacttcttctacaaacccgttccttttaaggagttgataaaaattctgttatcgaagccaaaggttaaagtgagggtggagtga

SEQ ID NO: 125824 - DNA, 387 bp, Enterobacter cloacae
atgaagtacccaggcgcagcggcctggcaaatgggtgacagcccggaactggcgaacgcgcttgcggacctgattaaaaaagggctcaaaacggccacctgcggatcttttgcctcgtactcgcaggatgtctctgctccacggataggaagctacaacataatccttgatggtcagaatgtcccggtctgtgtgatccggctggtttccatgcgactggtgcgtttttgcgatgttaatgaggaattcgctcgcaaagagggtgaaggtgatttaagccttgaatactggcggaaagagcatcagcgatttttcttccgcgaaggccatttttctgaagatatggaactgatcgcagaagaatttgaattggttgaggtgctgtaa

SEQ ID NO: 125825 - DNA, 516 bp, Enterobacter cloacae
atgaatatagaaacggtccgcttaatcctggaaccctttaatgattcacattatgaaggcttaagggtaatggatagtgatgctgaggtgatgcgctatatcaataagggtatcgttaaaacgcccgaagaaacctgggaggacatcagaaaggtgcaggctcgctgggataagtatcacttctcgtggtgggctatcagagagaaatctactggtgcgatcgttggtgcggcatgcctccagcacctggcgaacgtggagggggcaccattagagattggctggcgcctcgtgcctgaacacaatggcaaaggctatgctacagaggcagcgaaagcgatcgttgattacgctgtagaacgggtgggagcatcttatctggtggccgtggccgatccagaaaatatcgcatcgcagcgtgtaatgaaaaggttaggtatgtcttataaagccatagagcggcattacgatacggaatgcgttgtgtacgagcttaacatgagtaagcctgcttaa

SEQ ID NO: 125826 - DNA, 735 bp, Enterobacter cloacae
ttgagcttagatttaaaaatgataaaaacttctactcttttcctttgtactttcttattttcaagtatggcttttgcagaaaattactacatacctctactttataacttatcgactaggtttgatttcaatccagttaagggggctgttaaatccttagatactgatgttgaggagaatggaaaaatcacttataaaatctccatcagactgaataaaaatggttgtgttgatagcttaaaccttgataatgtttcttctgggcatgaaaccattctaaaatatacaaatggaagtcttattggccatagagatggcaagcctttctcaatacaacttgatgaaaaatgtcacattttgagtgaaaatgaaaatggtgacgagttgcgttacactctttacccgaatggattaattaaagacacctattttttaggcaaaaaaatatctgaacatttttatgatgaagacgataatttgacgcgctctgaattttatagttcagaaagcgttatgtctaaaaatgaaatatcttatgttgataaaaaaagaaagcctcttgattataaactaataaactcatcagttttctcggaggggtatacagcaaccagctcttgtcattataacgaaatgcttgtgcctgaaatatgtaatgccacagtacagaacgcaggtaatccggcaccgaaaccagtttcaatgacagcacatacgaaagttgaattctactag

SEQ ID NO: 125827 - DNA, 2124 bp, Enterobacter cloacae
atgctcaatatatcgtgggaccctgtgttaatcgctatctcttatctggtggcctttatcgcctcctttgtggcgctggacagtgccggaaagattcccctttccagccgaaaggctgccctgttctggcgcattgccgggggtatgacgctggggatcggcatctggtcgatgcactttatcggcatgctgtcgatgcagatgccgatgatgatgcgctatgacctctggttaacccttgcgtctctgggcgtcgcgattattgcgtcgaccacggcccttgatattgccgtcgcgggaaaaaaacgttcttcgtttcgaccgatcgttgccacggctatcctgagcgcaggcgtggtatctatgcactatatcggtatggctgccctgatgctggatggcagcattatctgggatcgccgtattgtggggttgtcggtggtcattgccgtggtggcgtccggcacggcgctgtggctggctttccgcctgcgagacaaaggggtttttatcgagcgccttctcgccgccctggtcatgggcgccgccatttgtgcgatgcactataccggcatgagcgctgcgcattacccggaaatgtcgcataccctccccggcgggatcggcgagctggggttatccatctgggtttctgtcaccacgctctgcctgcttggcgtgatgttaattatttcccttatcgattctcaccgtcgcaccggccggctgacggataatcttcgacaactcaatcggcagcttgagctccaggcgcgctttgatgcgctcaccggactcgcgaatcgccatcagatggatctccgcatgcaggactgcctgcgcagcgcgttgctgagcaacaggcaatttgccgttattttcctgaacgtcgatcacttcaaacgcgtcaacgatacctggggtcacagcgtcggcgatgagttattgatcaccgtcgcacagcgcatcacttcccggctctcgcgtgagatgaccctggcaaggctgggaggagacgcttttatcctgctggtgccggaatgtgacgacgacaaactcaacgccctgctcgcgtcgctgctcgaggatgtgcgacgtcctctttcgatctgtggtcatacgcttaacacgacaatgagtgcgggcgtcagcctctatcctcaggatggcgaaacgctgcatgaactgaaactcaaagcagatgcagccctgcatcacgtcaaagacgacggccgcaacggctgggcgcgttacagaaccgagatgtcgacagcaatcccggcaaaacccggttttcttcaggagctctctcaggcgcttgagcgcgatcagtttgaactgtggtaccagccaacctggtatgcgcaagagaagactatccatggttttgaagccctgttgcgctggcggcaccctgagcaaggcgttgtgctgcctggtctgtttatcccctcgctggagcaaaccggcttaattattccggtgggcaactgggccattgaagcggcatgtcgacagctgcatttctggactgaacaagggttcagccagtggacgttatcgctcaacttatcccccgtccagttcgagcagccagacattttccacatcgtatcgtcgatgctggaaaaatataacttgtccccgtccaggctgatccttgaggtcacggagagcaccgcgctgaaaaatctcgaccgcagcattgagttgctcaacgcttttaatcatgcggggatcaccgtctcgattgatgattttggtacgggctactccaacctgctgatgctgagcgtgctgccggcaaaagagctcaagattgacaaaagctttgtaacgtcgatgctggaaaatgaaaaaacctacaagctggttgaaaccatcatgagtatcgcccgcaccatggagatgaacgtggtggcagaagggattgaaacggaagaacagcaggcggttctcacccgtctcggctgcgactacctgcagggttacctcttctcccgccccttacctgccgaacaggtgccgtggttgcttctgcagataaactcagaaaggcaaattatcccccttaataaaattcaaacggacgccgcatttatttcacaaaaaaaccatgcctga

SEQ ID NO: 125828 - DNA, 1236 bp, Enterobacter cloacae
atgtcgcaaaacggttttgaagcgctgaacgttattaaaacacccgtgtggcttatttcacccgtttcggaagagatcgtttttgcgaacgtggtcgcaacgcagcttatgggagataagacgctcgatcagctgcgtaaaggcatctattccgcgaatgcacaagctctcctgtcgatgtatgtacctgaactgaaaaccgagcaggagatcgtcgaaatctggacaataagaagccgggatgggcaggatacgccgttaagctgtcgtctctcgcttgcccgttacgccccctggggagatgtgattgtcttcgaggggatcgcccaacatatcctctcaggactgaaggccagccgctccgcaacctaccggcgaaaaaaacaggggttttacgcccgtttttttcagaccaacagcgcgccgatgctgttaatcgatcctgcccgcgatggtcagattgttgatgccaacctggctgcgctcaatttttacggttactcgcatgatggtatgtgcagcaagcatacctgggaaatcaataccctggggcgagacgtgatgcccattatgactgcgattgccgcgctgcccggcggccataagccgctcaactttgttcaccgccttgccgatggttccacccgccatgttcagacgtatgccggacccattgagatctacggtgacaagctgatgctgtgcatcatccacgatatcaccgagcaaaaaagactggagcaagagctggaacatgccgcgttacgtgactccatgaccgggttactcaaccgacgccagttctacgcgattaccgaccccaacaatctcaataatcgacctgcccagcagcagtttagcctgctgctggttgacaccgatcacttcaaaaacatcaacgacctgtttggtcatttgaagggcgatgaggtgcttattgccctctcccgaacgctggaagcctgtagtcgggagaacgacatggtgttccgctgggggggcgaagagttcgtcatcctgctgccgcatacctctctcgacaccgcgttgcagattgccgagtcgatccgtgcagccgttgcccgcattacgattccgggcttaccacggtttaccgtcagcattggcgtggcgcgacataacccgggggagacgattgatgagctgtttaagcgtgtagacgatgcgctgtatcgcgctaaaaatgatgggcgcaataaagtccttgcagcatga

SEQ ID NO: 125829 - DNA, 1617 bp, Enterobacter cloacae
atgaagcatcctgtttcgcgtctttttgccgcactgtgcctgtgcggactctcttcactctcatacgctgctgatgtgccacagggcacggtgctggcgcaaaaacaggagctggtcagacacattaaagacgaaccggcttcgctcgatcccgcaaaagcggtggggttgccagagattcaggtgattcgcgatcttttcgaagggctggtaaatcagaatgagaaaggggaactgactccgggcgtggcgacgcgctggcagagcaacgataaccgaatctggacgttcaccctgcgcgataacgcaaaatggtctgacggtacgccggttaccgcgcaggattttgtctacagctggcagcgtctggttgatccgaaaacgacctctccgtttgcctggtttgcggcgctggcaggcatcagcaacgcgcaggccattattgatggtaaagcggcgccagataccctgggcgtgacggcggtggatgccagaacgttgcgcgtccagctggataaaccgctactgtggtttagcaacctaacggcaaacttcgccttctatccggtgcaaaaagccaatgttgaaagcgggaaagagtggacgcgtccgggagcgctggtcggtaacggggcctacgttctgaacgcgcgcgtggtgaatgaaaaactggttgtcgtgccgaacacccactactgggacaatgcgaaaactgtcctgcaaaaagtgacctttattccgattaatcaggaatcgtccgccacgaaacgctatctggcaggggatatcgatattaccgaatcgttcccgaaaaacatgtatcagaagctcctgaaggatattcctggccaggtgtatacgccgcctcagctcgggacctattactacgcgtttaacacacaaaagggcccgaccgccgatgccagggtccgtcttgcgctgagcatgactatcgatcgccgcattatggcggataaggtactgggtaccggcgagaaaccggcctggcatttcacccctgacgtgacggcgggcttcacgcctgaaccttcaccgtttgagcagatgtcccagcaggagctgaacgctcaggccaaaaccttgctccaggccgcaggctacggccctcagcgtccgctgaagctgaacctgctgtacaacacgtcggaaaaccaccagaaaatcgccattgcggtggcgtccatgtggaagaaaaacctcggtgtggatgtcaagctgcaaaatcaggagtggaaaacctacatcgacagccgcaacaccggcaattttgatgtgatccgcgcgtcatgggtgggggattacaacgagccctcgaccttcctgtccctgctgacctctacccacagcggcaatatctcgcgtttcaacgacccggcttacgataaaattatccaccaggcgacgctcgaaaccacggcgaaagcgcgtaatacggactacaacatggcggagaaaatcctcatggagaaagcgccgatcgcgcctatttaccagtacaccaacggtcgtcttattaagccgtgggtgaaagggtatccgattaataaccctgaagacgtggcgtatagccggacgatgtatattgagaagcactga

SEQ ID NO: 125830 - DNA, 666 bp, Enterobacter cloacae
atgaagcctgaagctgttgtattcgatcttgatggggtcatcaccgatacggcgcatctgcactttctcgcctggcgttcggtcgcgcaggagatcggcatcactatcgatgaggtgtttaacgaggagctgaagggaattagccgcatggaatccctgcagcggatcctgcgacacggtgggaaagagggggcgtttgacgacaaacaatgcctggcgctggcggggaagaaaaatgcgctctacgtcgcatcgctgtcgtcgttgaccgaggcgtcactgctgccgggcatccgggaggtgctggcggacattcgggcggcgaaggtcaaaattgggctcgcctccgtttccctcaacgctcctggaatactgcatgccctgggtattcatcgcgcctttgatttttgcgccgatgcctcccgtatcgtctgttcaaaaccggacccggagatcttcctcgccgcgtgtgcaggcctggacgtccgccccgaggcggccattggggtcgaagatgcgcccgcgggcgtggcggcgatcaacgcggcgggcatgctgtcggtcgggattggctcaggcctggcccatgcgggactacagcttcattcgacgcaggaactgacctggaaatgcctgaccgatttctgggcctcccgggcgtattga

SEQ ID NO: 125831 - DNA, 882 bp, Enterobacter cloacae
atgccattcaataataaaaacatacttattactttcctatccctctgctcatttcagacttatgccgcacaatgcacagcggaaactttcgctaaaaacaaattgaacaacctcatcctcctgaaccagcagacaagaaccgaaatccctaagtcagtcgaaatcactgttgatagccctgatgggtatatccgcgcatcggctcaaagcaactttgatcaatgcggtgaactcactggcagcagtgttaaagaggtcaaaacctcaccgggaccgaaaaatgttttcacgactaccaatgaaattcagttaaacagaacggaatttggctggcgcattcagttggatgcgaacggcgtaatagtcgataacaacagtcagaaggccacacaattatatcggcagacgctggaggggatgtaccagctgaacaacaatggacttatcagccacgtggttaatcgttcgattattgcggccacaaaaccaggagataaagataaaaccacagtgggcgcaatagactacgtattcaattcatcagggttgctggcaagggtggtaagcaaaggaagtttggcgatagataactatacaactgtatacagctatgatgacaatgatcgcctgatcaaaaccgagtccccctcaaccatagaagagtatacctacgataacgagggccgtgatctgtccctgagcaagacccagacgtatttcaccattgaaaaaaacctgacaacgtgtgaggagtggaactcgcatggagaatgcacacgcgccaatatggataccacgattgtcccagccgatcggacgggtaaacagtatgtggaaaaacataaggccgtgatgacgacgaaatatgaatactggaactga

SEQ ID NO: 125832 - DNA, 228 bp, Enterobacter cloacae
atgtggtgtgagatgaaaatcataatattcgttgttttacttattgccagttttatcctcgtcccggacagctggattaatgatgttatcatgcaacatatccagatatcaggcgatggtgaagaagccatgaataactatgatttcacagcaattctgatcaattttggcctgtctgcaatgatagcgtttgtactgatgatgcttattaaagtgctgaaaaaatga

SEQ ID NO: 125833 - DNA, 162 bp, Enterobacter cloacae
atgaaccagggtggcaggtacgcacgtaacaacaaagtgagcatttttactctatgctatttagactgttcgtatgccattgccttacccgtacttgatctgctctcagatctggtgataaacggccgcattttaccggctatttttcttcagaaagtatga

SEQ ID NO: 125834 - DNA, 942 bp, Enterobacter cloacae
atgaacaacgccacttacgttctcaaatataccgagtacctcatcaaaaaatgtcgttcatttttaatgacggacctgtactttcatactgtgaggctcaagaaaacatcggggaagcaccctgacattaaatcacccacgacgttgagtgaaaaaatatgtcatcgtctggtctatgaccacaataacgtctataccctgcttgccgataaactcgccgttcgggaatacgtaatctccagaacaacgcgtgcgaaaacggtgccattacttggcgtgtacagcaaggtgtcccagattgatttttcgacgctccctgaaaaatttgtccttaagtgcaaccatgacagtggcagcacaataatatgtacgaacaaagcgcaatttaacatcagggaagcgtgtaaaaaactcagtctcgcgttaaagaaaaatatgtactacaccacgcgcgaatggcagtacaaaaacattacgccaaaaatactttgcgaaccgtatgtcgatctcttcgatgatgcagacaggaacacagcgcccgaaatgctaaggatccattgctttcatggcgttgcccactatgttgaagcggattttacggatgacagcggcaaaggtttcatcaacgtttacgacaggtactggaacttacaaccctttcagatggaatatccgaatacaccgttggcgccaggcgaaccggccttgttccgacaagcgttgctggcatcccaggagctggcggatggcattgactactgccgcgttgacctcatgctaaaaaaagatgaaatctatttcagtgaaataaccttaagcccgagacgcggtaaactgtcgattaccccgcaggaatgggatgctaagctaggaaaaatatggcatttaccgccggcaggcacatttgacctgccgctgacgctcacgagtcgggccaggtga

SEQ ID NO: 125835 - DNA, 456 bp, Enterobacter cloacae
ttgtgcattgcgggctgcaaattaccactgtttcttaaagattttatgaagttggctgaaataatgaacatggaactttctaaatatttttctcctaaaaaactgggtatatatttcctgtttctgctgcagtcgtggggattactttatacctggctgatgctggtacacagagtggatgagaaagtcgcctcgacgctgctctcttcaccccttatctatggctgcatcgcattgtcagtggtttctctggtcatacaaaataaagccggcgcgttcattgagcttcttatcatcgccttctggctgatggtgatttttgtttatctcattattacgttcaccgtgctgttaaacgcgatgcccgatattgaggatctgatcttttactatgaatgttatttgatcattttttttggtggagcaccgctgtacctcattatgagaatgatctga

SEQ ID NO: 125836 - DNA, 987 bp, Enterobacter cloacae
atggaacaacgccgtttttccggcaaaggccactggtatcatgaaacccagtcaaaccacgcgcagacggatgttctgcccctggtacccgaagccgctaacgtcgacgatcgttttttgctcgatttagccctgcctgatgagattgtcgccgcctgttctggctggcttacccctgccagagccttatgccaccagctgtttccgctctcaattcccgtgaaccgactgcatacgctcagcgcttacgatcgactcagtaccgcgctaacggtcgctcaggcctgcggcgttcagcggctctgtaaccactacgccgccctcctcgccccgcttcccggcccggactcctcgcgcgaaagcaaccgccgcctggcacaaatcacccagtatgcccgccagctcgccagctcacctgatgtcattgatgataaagcccggaaccagcttgatgaggtgggcctgtccacgtacgacatcgtggtgattaaccagattatcggctttatcggttttcaggcgcgcgtggtcgcgatttttcaggccctgttgggacatcctgttcgctggttgccgggacatcatattcagccgcacacgatccccgcgagccacgatgcgtggatgccgcttttacccgtcgtcgaactgcgctacgcgaatgcgcatcagctggagtccctctcccgctggcaggccgaacccgcgctcgaggcgttgacgccggtgctttgtcatgagccgacgctgctcgacctgaccggagaaatcctgttaaacagccgcgcggagatcccgcagacgtcacccgcactttcggcagcggtcgaactgctgacccgctcgccggaccgcttcagcgccgcgcagtttaccccgctcacggatcaaggactccagggcgaatatgccatcacgctgcttacccaaagtgcgtttgatggctggcttaatcgtctgaaagtggcgtttggtaaagaggaataa

SEQ ID NO: 125837 - DNA, 2676 bp, Enterobacter cloacae
atgtcgttaaccctacgcgaagccagtaaggacacattacaggcagaaaataaaacctggcattactacagcctgccgctggctgccagaacgcttggggacatttcgcgtttacccaagtccttgaaagttttacttgaaaatctcttgcgctggcaggacggtgaatccgtcacgctcgatgatatccaggcgctggcagggtggcttgagaaggcccatgccgacagagaaatcgcctaccgcccggcaagggtgctgatgcaggactttaccggtgttccggccgtggttgatttagccgcgatgcgcgaagccgtgaagcgtctcggcggagatacggcaaaggttaacccgctttcccccgttgacctcgtcattgaccactccgtgaccgttgaccacttcggtgatgacgatgcctttggtgaaaacgttcgtctcgagatggagcgtaaccacgagcgctacgtcttcctgaagtggggacagcaggcgttcagccgttttagcgtggtcccgccaggcaccggcatttgtcaccaggtaaaccttgaatatctgggtaaagccgtctggagcgaattgcaggataaagagtgggtggcttatccggacacgctggtgggcacggattcacataccaccatgatcaacggtctgggcgtgctgggctggggcgtcggcggtattgaagcggaagccgccatgctcggccagccggtatccatgcttattccggatgtggtgggcttcaagctgaccggaaagctctctgaaggcattaccgccaccgacctggtgctgaccgtcacccagatgctgcgcaagcatggtgtggtaggcaagtttgtcgaattctacggtgacggactggattcgctgccgctggccgaccgcgccaccattgccaatatggcgccggaatacggtgccacctgcggctttttccccattgacgacgtcacgctggagtacatgcgcctcagcggccgcagcgaagagcaggtcgcgctggtggaagcgtacaccaaagcgcagggcatgtggcgcaatccgggcgatgagcctgttttcaccagcacgcttgaactcgatatgggaagcgtcgaagcgagcctcgcggggccgaaacgcccgcaggacagggttgcgctgaccgacgtgccgaaagcgtttgccgacagcaatgccctggaagtgaacgtggcgcagaaagaccatcgtcccgtcgactatgttctgaacggacatcagtatcagcttccggacggtgcagttgtgattgccgcgattacctcctgcaccaatacttccaaccccagcgtattaatggcggccggtctgctggctaagaaggcggtagagcttgggctaaaacctcagccgtgggttaaggcctcgctggcgccgggctccaaagtggtgtcggattacctggctcaggccaaactgacgccgtacctggacgagctgggcttcaacctcgtgggctacggctgtacgacctgtattggtaattccgggccactgcctgaacctatcgaaacggcgatcaagcagggtgacctgacggtcggcgccgtcctttcaggtaaccgaaactttgaagggcgcattcacccgctggtgaaaaccaactggcttgcttcgccgccgctggtggtggcttatgccctggccgggaacatgaatatcaacctggtgaccgatccgattggtcacgatcgtaagaatgatcctgtctatctgaaagatatctggccttcctcgcgtgaaatcgcgctggccgttgagaaggtctctaccgagatgttccgcaaagagtacgcggaagtctttgaaggcacgccggaatggaaagccatcaacgttgcaggttcggatacctatggctggcaggatgactcgacctatattcgtctgtcgccgttctttgatgagatgcaggccgagccggcgccgcttaaggatatccatggcgcgcgtatcctggccatgctgggggattccgtcacgacggatcatatctctccggcggggagcatcaaagccgatagcccggcaggccgctatctgcaaagccggggggtggaacgccgcgattttaactcctacggctcgcgccgcggtaaccatgaagtcatgatgcgcgggacctttgccaacatccgcattcgtaacgaaatggtgcctggcgtggaagggggcatgacgcgccatctgccggggacggaagtcgtgtcgatttatgatgcggcggtcaaataccaacaggaagggacgccgctggcggtgattgccgggaaagagtacggttccggctccagccgcgactgggcggcgaaaggcccgcgcctgcttggcgttcgggtggtcatcgccgaatcgttcgaacgtattcaccgttcgaatctgatcggcatggggatcctgccgcttgagttcccgcagggcgtgacgcgtaaaacgctgggcctgaccggggaagagcagattgatattagcggcctgcaaaacctgcagccgggtaaaacggtgccggtaacgttaacgcgggcagacgggaaaaccgaggtgctggattgtcggtgccgtattgacacggcaaccgagctgacctactaccagaacgacggcattttacattacgtgattcgtaagatgctggattga

SEQ ID NO: 125838 - DNA, 210 bp, Enterobacter cloacae
atggaagagaatatcgccgttggcaaacgggatcatttcggtatcacccgcacgtttatgccccgcaccggtttcaaaatggccgcgccaccgttcctgagtgtggtcataaacgtgcagaataacctcgacaagtcctctttgcggacaattaagacgcaggaaagtagaagagaaattcagggacagcgcgtggaagggaatcaataa

SEQ ID NO: 125839 - DNA, 540 bp, Enterobacter cloacae
atgaagcagtttcttgattttttaccgctcgcggtgtttttcgctgtctataagttgtacgacatttttgctgcaacaaaagcgttaatcgtcgtgaccgccgttgtgctgatctacagttggattcgctatcgcaaagtcgaaaaaatggcgcttatcacgttcgttttagtagcggtgttcggtggattgaccattgccttgcatgatgttgaatttattaagtggaaggtgactgttatttatgcgttgtttgcagcagcgctattgttcagtcaatggttcatgaaaaagccccttatccagagcatgttaggtaaagaactcacgcttccgcaggtggtctggtcgcgtctgaataccgcctgggcaatcttctttattctttgcggtctcgctaacatctatattgccttctggctgccgcaggatatctgggtcaactttaaggtctttggcctgaccgcgctgacgcttatcttcacgctgttaagcggcgtatacatctatcgtcatatgccgcaggacgacaaccactga

SEQ ID NO: 125840 - DNA, 954 bp, Enterobacter cloacae
atgcacagcgaaaccccggtagtcagtgttattcgacgttcctcgcgcctgatggtgcgagagttaggttttatgggttctaccctggcctcaacgaattactcgccttcggccgtccatactctggtcgaaattgccctacgaaaagagatgacggcgagtcagctggtacagctgctgggcctggaaaagtccagcgtcagccggatgctggctcgcctgattgccgcaggcgaactcgaggaggtcatttctaccgaggatgcgagagcaaagagcctcaggctgaccgcgaaaggtcacgagacggtcagcaaaattaattccttcagcaatgagcgcgtggtcacagcaataaagcgtcttgctcctgcccagcagctgaccatttctgagggtctctccctttatgccaacgcgctgctggcgtgtcgggaggtgggcaacgatatgcagcccgatgagctgaagatagtgcaggggtatatcccgggcatgattggccgtatcgcggagatgcatggcagttattattcgcgggagcataattttggtcgcttcttcgaggccaaagtggcttcggggctggctgagtttagtgaaagactggagaagccctgtaaccagatttggctggcagtgctcaacgacaaaattgtcggctcggtggcgatcgatggcgaggatctggcgccgggtgaagcccatcttcgctggtttattcttgatgatggctgccgggggcacggcgtggggaaaaaactgctgaatgaagccatgcggttttgcgacagcgccggtttttcagctgtgcacctctggacgttcaataagctgaccgccgccaggcgtctgtacgagtcgtatgggtttacgctggtaaaagagtgggaaggcgatcagtggggaagccttattacagagcagcagtttacccggcacagaggcgcgtag

SEQ ID NO: 125841 - DNA, 168 bp, Enterobacter cloacae
atgattaatttcatacgctttccacactataaaacatatgcacgttacaattgggaagtcaagaacaggctccccaatggtaggcgaccgtacatcaaatattatttatataagccccgcttttgcggggcttatcgtatcatcaatgtggtcaataagtgggcatag

SEQ ID NO: 125842 - DNA, 1020 bp, Enterobacter cloacae
atgatgctcaatcgtcaggttcagaataacaatataacgtttgctttttctttactgagcactgtcataacattcaatagtaaacaaggactttttgatataaataaaacactcgagtctgtgttaatccagatacttaacaaaacatataatttatctttaaataacttaaatatagaaaaacataatcaccctgctgttgacttaggcgatatcagtagcggtttagctattcaggtcacttccgacggttcaaaagataaatttgtcaaaaccatggatatgttagtgaaacatgacttgcacaatatatacaatgaagtttggatgttaataatttctaacgatcctatacaacatcatacaaaaaaaggattcataactcatgtcagaaatttatccgaccttgcaaaatccatttgcgaaaaacccagccctgaatttgattacttatacaatatatgtgaaaaagagtttggagtttactttccgggaagaaacgcttctatattaaaaccaacgcagatagccagcattaatcctaacattaacattgataagtttattagcaccaatggaatagacctcgtctatgagtatgccaacattacaattgaagatattagagacgatttgatactattaaaaaacacaatatctcaacttaatgaagaacaacgctggtttctctttagggctttagagcacacaataaagaatgaaaacgggaaatatattgaaacgtgtaaaatacctaaaagcataatttatagcggcaaaagccaaagtgaaagattagctatatgggaaattatagactccctcatacatatgaatctggcttattacgatgaagaggattataatttgcagactcccgtctttggcatttacttcaaaaaaggaaaatatgaggatttcgattatttcccggctctctcaacctttataaaaaaaacgtcacaactacacaaccttgaaaaattaatagttaactgtgatttttcgtttatcgtatag

SEQ ID NO: 125843 - DNA, 843 bp, Enterobacter cloacae
atgattacgggaatggatattcaggccggggcgaaaatagccccggcgtttatgctcaagctggataacgaggatatcacgcaggattttagtgatcgccttatcagtctgaccatgaccgacaatcgcggattcgaggccgaccagctcgatatcgagctcgatgacactgacggccagatagctttgccaccgcgcggcgcaacgttgacgctgtggttaggctggcaggattccgcgctgataaaaaaagggacgttcacggtcgacgaaatcgagcacaggggcgcgcctgattcgctgaccatccgggggcgcagcgccgattttcgcgggacgctgaactcgcgccgggaacagtcatggcatgacaccacgctcgggcaaattgtcgagacgattgcggcacgcaataagctgatggccagcgtggccgacacgctgaaagccgtcgccgtgcctcacattgaccagtcgcaggaatcggacgcggtgtttctttcccgcctggctgaccggtacggtgcggcggtttcggtaaaagcggggaaactgttattcctgaaagcggggagtggtaagacggccagcggaaagcccattccgcagatgacgcttgagcgcggcgacggcgatcgtcatcagtttgccattgctgaccgggaagcctacaccggcgttacggcaaaatggctgcacactaaagacccgaaaccgcaaaagcagaaggtgaagctcaggcgtaagcccaaagtgaagcacctccgcgcgctgcagcacccgaaagcgacaaaagccccggcaaagactaaagctaaaagagtagcaagcgcgcgagggtga

SEQ ID NO: 125844 - DNA, 732 bp, Enterobacter cloacae
atgtacatagacaactcagcactgacattacgaaattttttcatcagcctcaaagaccaaaatactaacataatagtaaaaaatgccttattggtagcgtttgagttagaacatactaaagataatcaaattttattatgggataagatctctaaacttatgagcttgcctaaaaaaatagaggatgcattgcaagattatttccctgatgatgaaattaccgcaccaaactggagaccctgtgttgataagttctttgcacaattaagccttgtcgaacctcttccaaatgccacacaaagaatatctgacgctgcattaaatgatttaggcatgatctctttattattcaaaactaaggggcaaattggaaaaatcaaagatgagcaattaattgagataaagcaacaattgttagaattgaaggattcgataatcaattctgatttctcaatagagcttaaaaaagaaatattacattatgttaataatatgataagggcttttgacgattatgaaataacaggtattgaaccaataatttctgcaacagaggcaactatgggacatgcttgcatgtctgagtcatttaaccaagtcgtgaccacgacagaggaaggctctaaacttaagaacattttgaaaaagacaatctcatcaattaatagtgttgaaggccttgtcagtcttggagctaacggcgttaccctcctggagttccttgataaataa

SEQ ID NO: 125845 - DNA, 1185 bp, Enterobacter cloacae
atgacattaatggcaggcatttcgccaggcgctgccgaatggctcacgcgcgcaaaaatgatgcgccaggagcagttcagcaagctggcacagctgggcgtgcttgtgcacggcattagccaactggtgcacatgttacagtgcgagcgcggggcgtccaacgtctggctctgctcacagggcaagctgtacgctcccgaatgcaaagccagccgggcgctggtggatgaaaacctcgcagccctttacggcattcttgacacacagtcgccgattccgggaagtgccgtctgtgaacgcatcggcggcgcgctcctgagcctggatacgcttcccgcgctgcgtgacggtgtgattcagcagacggtaacggcaccccagacgatggaacactactcccgcatgcttcgccatctgctcagtatcgtgccgcagcttaatgacagcattgacgatccgcaaatcgcaggacgttttgtcgcgctttatagcctgatgcagggcaaagagctggcgggacaggagcgggcgctgggggcgattggcttcacgcagggttttttcgatgatgtgactcgtcagaggctggttgaccgcattgacgggcagcaggcctgctttgagatctttctgtcacacagctccgctgacgttcagaccaccttttcaatgcactgtcagcccgatcgtgaaacggagcagctccggcgcgtggcctgtacccgccagcccgccgccgataacggccttaccgcgctggcctggtttgctctgcaaaccgcgcgccttgagcatctgcgcacgctggaggagacgatcatcgccgatctgatggtcgcggtggacgaatgcattcaccgtgacgatgagtacgcgccccccggcgatgaacaggatgacccgccgatccgctatccggaaaaaccgttgcttaccctggttcgccagcaggcgcgcgagatagagaagctctcacgtcagcttgcgtcgctgcgcgatacgctagaagagcgcaaaatcattgataaagcgaagagcgtgctgatgacccaccagaatatgagtgaggaacaggcctggacggcgctgcgcaaaatggcgatggacaagaaccaaaggatggtggatatcgcccgcgcgctgctcatggtgaagagtgtatggcaggtaacaccaaaggagtag

SEQ ID NO: 125846 - DNA, 381 bp, Enterobacter cloacae
atgaaaataactaatcgactgaaaaagaaggtactagtcctggatggcatagataatgactttttagattctggcgaagaaatagcatgccctgaatgcgtgggagtaataatctattctatcgtaaactcatatgaatttgactcgctctctgaagaggtaaaagactttttggttaagaaaatgagaggtgtgaagtttgttagtgaacctaagaagtatatctacgatgaaagccaattatatgtttcgaaaaacacatgttcaaagtgtgtaaaggcgttttctactgtattaacgtataaagaagtgcagccagcccgataccgggtatatcttgtggggctttttgaaggtgatttgaaacagatcgaactttaa

SEQ ID NO: 125847 - DNA, 477 bp, Enterobacter cloacae
atgttagaaatgaattttgatgttaatagtggctttgtcgctattaacaattaccccctcgagttaaaggatgttgagacttttaaaaattccgaattttacacgctattctctccgttaaatacaataggctcttattatttctctattgataatatcgagtggaaagatcaaactttcatattagaactgaggccttctgtgttttctttttctccctccatattccttaccagtaagaatggaaatttttataaaactttatgggattgggataaaagagccaatttgcgtaatttatctgaagaagaacagcgcttgacagcatgggtagagagtgaaataacctcacgccctaaacttaaaattagcacgcctccatacggaactcagtggcatcatgagtggggaagcattattgtacagtctaatgaaagaagcttcgactgtggaatttatatcgaatggaatgtttga

SEQ ID NO: 125848 - DNA, 483 bp, Enterobacter cloacae
atgaacaataaaaacatacaaatagttaatctactgatttcgcatagtcaaatattgttacgatcccgagactatgatgagaaactgagtcagtgggggaaaggaaatatttcacaaggtgctgtacttcataaggattatgtaatatttgatccattgccagatgatgcattcggcgcaaacgtgaatattaaagtagaacaatctttcaatttagatgagaattctcagcgctgcatcgttgtgccattttatgttacggaacaacataaattacaaatagcttcagcaactgaaaaatttgatttaagcttaggattaaatgataaaatttattcactgttttatgaagtttgtgaaggagatgaaatttattataatttcacgctcgtaccgacaaaagaaactgtagcagctaagtttttgctagacgatccctggggtggaataaaaaatcttcctcttaaagaaggtgttttttaa

SEQ ID NO: 125849 - DNA, 432 bp, Enterobacter cloacae
atgaaagtaaaatacaaagagggtgacatctttgtcattccgatgagtaatgggaaatttgctatttgccagattgtatttgctccaaaagaaaagtttaagcaagcaataggtttctgcattatatcaatacagaatacggaggagcttgaagataacagttcactgagacctttatcttttgaaaagtttggcaaagagatgaaggttgttttcactggcaatcagaatattagcaaaggcatttggaaaattattggccacgctaatcttactgaagaaaaaaaagaattaaaaatatttaattatgctggcggcttatatgatggggaggtcgaaatcaggcgtttatctgttgctgaatatccaaattacacaataatgggggtttcaggctttgagcttgtcgacaatgttctgataaatatttga

SEQ ID NO: 125850 - DNA, 357 bp, Enterobacter cloacae
atggaaaagcaagatttaattgatcagttaaatgaagttgaaaagattatacacacgtctttaccttctgaatataagcgctttatgattgagaacgtcaaagatagctactcttatgaaattcaacgagcaaatggtggccagctttatgttttcaattgttttgacttgcttgaaagaaataatacatacacaattgaatcggtggagcctgacgttttattgattggtcaagatggtgatttgggatactttttgaatttgcgtaaaggtactgatgagatttattctttagatcttggagcgttaggaagtctggacatggataaagaaagtaatagcatatttaggctataa

SEQ ID NO: 125851 - DNA, 519 bp, Enterobacter cloacae
atgaatattaataaagatgaagaactccttgtgataataaagaacgaaggaagattttattggttcgtggcctttaaagaaatgtgggttttagacagagcaaaatgggtagaagattttgtgaaaagtgggatggaaataaacctacaggatatccataaggaaagatataacataccagttgtaaatgaagaaaacgcaaagatattcattgatggtttaattaaagatgcttatttatataataaggatgatatagctgcggagttttataataggctttcgcaaaaaaccacctggtgggatatatatgatctaatgccagatttgtttatagactttgataataaaagactatattcccaatatctcgaaagtatgcattatcacaaatatgttcctgatgattggcaaggtgaacttgttgatttctgtagtgatggatcgttacctcaagatgaaatgttatggataaaaaatgagacagatcataggagcattgtaatctctaaagggtaa

SEQ ID NO: 125852 - DNA, 987 bp, Enterobacter cloacae
atgatttttgaaatgtttatacataaaattgaacacttcactaatgcgagagcagagattgaaagttttggaaaatatatctattttcaggatgaaccggaccttttccccgtttgttttaaaaaagtaaatgggaagcatgtagagttgagtcgttggcaaacttgctttcctaaagttatgtttcagcgtgcgttaaacaagttaggcctaagtgaagatggtaagtatgcatttgaagttttcctttctcgattaggttatctttttcaaatagataaccgacagcgtatagataaagatatctttatcttgttttatatctatcaactattttctttaaaagataacgaagaagattacgctataaaagcaaaaagcttttttttaagatttttgtgttttgaaatgggcatggatgatgactcttataatttgctatgcattactaaagatgggatttgtataaatacttctcagcatggtaatgtctcaatattgtctttgcttgagcaattttatgtacaatttaaaaaaaagaaaaactttgaagatattaagtctataaaacattatcaatcatcagtgttgaattttttgtttgttgcgaacaacgatagaaatcacctgtcttttaatgataaaaactgctacctttgcgatcctgatagttttattaatacttatgagaaatctaaaaaaacaatttatagagccttggaacagtgttttgacaagtatcaatccacgaagaatttactaatatcaaatttcattctaatgaattattcgtattatattgttagaaataatttgacagatctaaaaagtttaagaagacatgtttcttcagatatgtttagacaaataatttcctctatagtgtacagaggtttttttgtgaatgaagacgagatatttaaggtggttggcaatgaatatgacatcagccttgaaaaaatgaagctcgaatgcgttttaatttaa

SEQ ID NO: 125853 - DNA, 1077 bp, Enterobacter cloacae
atgcccaataaacttttagcatccgcattgtgcgcggctttattggctggcgtcgttgaaacctctacggcacttgaattatcgcagtacaataagctcgatacggtaagtcgcatcgttaatgatagcgaagtgacggacattctcaggaaaacgctgggaaatcattaccaggcctttattgataactttgatgtcttcggtgaaccgcataccactccaggtggaggattgtttgttgagggctggctaaaggatctctaccaggaaaatgcctcagcgctggttatcaatcctgacggcaaaatcttcgcggcctgggtggttccagaatcaaacgttatccattaccagtcctctgataatagtcagccgattaatgccgatattcagcaatgggccgccaggttcaatacgatgcagtttgcagcgaacagccaatcgagacctgcgtttgacggggtttgggcaggcggggttggcaacgactcgacgttaaccctgcagttagctgaatcaggcaaccgtatcaccgggtcttattgctatatctcccagagaggaaaccgcatcgactgcccggaagatgatgagcgaaatcttagcggtacgatcgcgggaaaccgtgcgaacgttgagttcaactcatcgtttggcggcgcaggcggacgggctgttatggaaataaaggggagtgagatggaatggcgtttagttactcctcctcaaaaaggaaattattatgctccgcagcgttatacgttacgtaaagccgcttcggttcaaaacgctgaaaccagaaaactggacaccgaaaggttcgctatttctcttataaataagtgcggtcattttgatagcgaatgtgatcagatggtctatctcggcgtgcgcaaaagcgataacagtacgatctccttaaaggggaaaacgttacacgaccccgcaggtaaaataatcggctcaacctacaagaatggcgagatcgcttataccgtgacgtatgcacccgtgaaattggttgtcagcaaaggcagccatgttttagtcgaacaatcaggtcaatggcgtaaataa

SEQ ID NO: 125854 - DNA, 567 bp, Enterobacter cloacae
atgacgattaacgtgaaaaaacacacgccgacatttcttttttctgccctgatgtttacctgtctcggcagcaatgtggttttggctcaggtgattcctcccgttctgacaaaacgggatttttctgtgcagatcaaagaccagcctgtcgcattgggcgaccgatggtctcctgatagtgccggtaaaattgatgtgccgtgggaaggcaactttgtcggtgaggttccttttgacggaacgaactataaattctaccagcatcaaagggctgggttagaaatattcagttcaaatctctggtgggataaagctgaacgaagcgttgatgattatatcgtgtcgcagattacgctgactgccgaagacttcgcaacgccgcggggtgtccatgtgggttcaacaaccagagagctgaacaacgcatacggcaatggccttgttgaaaatgattccgggacccagtgggtttcctatgcgttgggtaaaaaagtactctcttttgagatgaatggcggcaacgttgtgaaaataacaatgaattacgataatggttcttcagagtaa

SEQ ID NO: 125855 - DNA, 417 bp, Enterobacter cloacae
atgttcatttccgggatgagtgcatcgcttaagactttatccgttacaacccttagtaatgcgccgttatcgtttaagatgaccaggcaaaatgaatatatcaatttctacaatgccgacgatatcaaactcgctgatgggacgaacataaccgcaattgagttacgtttaagcaaagataacgacggcatggcgcctttactgaatttttcaccctcctcaggtcaatgcataacgcttgataccgttaaaaagcgctatccgcagttgaggttaactgattatccgcgcggccgttcggagaacgaagtgaccagctatacagcccgaaaagatatgaatggacaaaaggtgagcttcagtttcaccgtgaaaaatcctcactgtctgggttctgtcgtcattagcgcagactaa

SEQ ID NO: 125856 - DNA, 435 bp, Enterobacter cloacae
gtgaaatggattggttgtatatttttcattttcatcactttggtttatatctggaatggaaaagacttattcagtaaaaaacaatggttccttgctgggttgatgttcgttctggtgctagtggttacggttgttattggttttacgttgaaatggctcgctcagtcaatgtcattattctccgtcgcaacggcgaaacactattcgattatcttttccatgtctttcctgtgcgtatggggactaaaagttaccgttgtgctgctctgcacgatcttttccgggattacaggagggcacaaaaaatacaatgctgaaaattatgaagcaatatcgtctataacacgcgtcgttgcgccttgcttacttatcgttgctaaaagcgtagtttccctggggagcgtccttatgttttcaggtttatggcttaaataa

SEQ ID NO: 125857 - DNA, 381 bp, Enterobacter cloacae
atgaataacatgacagctctaaattatgttgaaaaagcattaactttagcagaaaagagatatgctgaggtaaaacatctcaacccccactccccacttttacaaatgtacgattctattgtacaacaattaatatttctacgggatttaatcgaaggcaaggaaaaggataaagcaaaattatggaaaatgactttcggtatgtatgcagcaaaggagtttgataattctgatgagttgttttttgaaaggttgtcggatgcctggtttattgtggatcaaatccgccgagggttaaaggttagactgccgcatgaggttgatgccaattacaaaatgaaacaacataatcttaaaatgaaatatcctggtgaattttag

SEQ ID NO: 125858 - DNA, 504 bp, Enterobacter cloacae
atgtgctcccccatttttttaaataacaataacgggcgtacacaaaacaagctcgctcatttaaatagccatctatggtatttctggggaggtatggatcttctcgcaatattgctttattgcgtgaattcagttcgccagcacagaattccattcatttctgacgcaaaagcgtttagtgattcgttgcattattatgcaggtgatggtttcagcattttggtcatgcttttttttgtgcttgacttacttttattactctctttgtgtacttcggcctgtttattcttcaagcgaaagatcggagcggttaaacttgccctcgctcaggaattatttcgcttgatttcattcagatgttcggtctcattgttccctcttttagtaagtatgtttgatttttcaaacatctggttgaatgtaggtttatttgtcacatcagagtcactgaaaatctactctcttgttttttggatgatcaagagggaaaagcccctttcttga

SEQ ID NO: 125859 - DNA, 402 bp, Enterobacter cloacae
atgaaacagttactcagtgttgtagcaatcgcattaacggtgagtgcctgcgtatctcatcctgcacaatatcagtcgctttcggttacgctaaagaacaacgaaccctgctttgctattcccgctaactccgggttagacgcgcctgtcaccagccattcgcccaccataatgaaacgcgcgggaaatgaatggaaagcggtatcgccgccgtcaacgtttagccctgaagtgacgttaacgacccaacagtgtcaccagtggcaggggattgcgtggcaagccggagaatatgatgttgctctgaaggtgtcagggaaaaacgattcaattcgctatgcggcccgcttcaccttacaagaaggtccctcaggccagtttaagcttacgcagactgaatag

SEQ ID NO: 125860 - DNA, 543 bp, Enterobacter cloacae
atggcaagtttgcaggaaggaggcgcccgtcctctcaccattggcgaaatagcactggcgcgctcggtttttagtgacgcaataaagtattcagaagttaaagtccataataaaagctatttgccgtttaatatgcagtcgactgatgtcgcgatgacccccaatggtgagctctattttcgcgagccgcattatcgggatgacttctcaatagaggttccgcgatataaacactggtttattcacgaaatggtgcatgtattgcagcatcagattggaatgaatgttcgaacccgaggtgcattcagttgggcagcaagttataattattctctgccccccgataaaaaactatcggactttggtatggagcagcaggcttctatcatttcagatttttattatttgataaattacggcctgggtgatttccggaacattgctgggtttgagggaataatcggccccgacctgaaggataaatacctgcaggtattatcgttgtttattcaaaatcctaaagaccggcgggtatggttatga

SEQ ID NO: 125861 - DNA, 438 bp, Enterobacter cloacae
atggcaaaggatattaaggtgaaacgtttctgttttttcctcgtatttatgacctcttatgtgtgtgccgggaataactatcctgatttttatcatcagcaaacataccggcaggttttaaaagatttagttctggcgcgatgccttgcgcaggtggcagataaaggcagccagttttctgctgatgcggcccgcagtgcaagtgcattcattgagtggataccttttgatgccgaaaatggcactgataaagtggatgccctcatcggaaaatataaaaatcaaattaacgtttttcattcagagcgaaaacccgatgtcaaaggcgtaaccttaaactgtttacgtctttatcatagcgatgagctgaacaaactggttccgcaggtcatcttaggcgatcctgaacgtacctggattcaggataacccgcagtag

SEQ ID NO: 125862 - DNA, 759 bp, Enterobacter cloacae
atgagtaacctgctggcgtttcccatgtatgcggtggatcgcgccgacacccgcgcgctctggctggcggtaaaggggctgctggccgcgcgcggtgtgcccgtcgaagatgtccctggctggccggagtccgatctgctgacccactggcgacagcctgcgcttgtcctcagccagacctgcggttatccgctcgtcacgcagctttcggacgtgcaggtcgtcggctgttttcactacgcggccccgggctgcaaagggttccactaccgcagctttctggtggtgcgcgaggaggatcgccacctcacgctggcggattttcacggccgacgggcggtctgtaactctgcggactcgcagtccggctacaatgcgctgcgaaaaaaagtggcgcctctggtggctcaggagccgtttttcgcgcaaacgtccttcagcggcagccatcgccagtcgctgattgatgtcaaacgcggggcaggggatatcgcggccatcgactgtgtcacctgggcactgctgcagcgtcacgaaccggaaagcctgacgggtctggcggtcattgaccatacccctctgacgccagggctgccgctcattacctcgccccgcacctcgcctgagaccctgaacgcccttcgcgatgcgctccacgcgctggtgagttcgccggagcaccgggccgtttgcgacgcggtgctgatccgcggttttagcgtggtgacgcgtcaggcctacgcctcattgctggcgtga

SEQ ID NO: 125863 - DNA, 867 bp, Enterobacter cloacae
atgttcacgatttatgcgggctggtttgccacgctggcgttctggcaaacgctcggcctgctgcccgccacgctgctgctcatcgggtttaccgcctggtacatgtccctgcagcatgagctgatccacgggcatcccacccgttttgcctggcttaaccagctgttcggcacgctcccgctggcggtatggtacccgtatggcctctaccgggattcccatctggctcaccatcggtacgatagcctgacccatccggtggatgacccggagtcgtactatttcaccgaggcgagctgggcgcgcttttccccctggcagaagcgcctgatccgggcccggaatacctttgccggtcggcttctgctggcgccgctgctggatatcgtccagacgctgggcagcgccggggcggcgtttcgtcattttcacctgcgggcgatgacgatgtggctggttcacatcacgctgctggtggcgcttttcgcctggatgacgcacgtcggtttttcccccgtctggttcgtgctggcggtcagctatccggcgctggcgctgaccaaggtgcgatcgtttctcgaacatcgcgcagcggacgatccgctggcacgctccgtcattaacgaggccgggctgttctggcggatactgtttttaaatctcaactaccattcagtacatcatgatttaccgggcgtgccgtggtacgggctgaaggcgatctaccagcaaaaccgggaggcgtaccgggagcgaaaccgcggttttctcgtcaggggctacggtgaatggctgcgcaagttctgggccaggcccgtcgacgtcaccgttcaccccggaaaacaacaggaggagggatatgagtaa

SEQ ID NO: 125864 - DNA, 1599 bp, Enterobacter cloacae
atgcaaactgcacaaacgatcattaaaaattatcgccgaaaacgcgttatcgtctgcgtgacggttgcgctcctcacgctcatcctgacgctaggcattcgctttatctcccagcgcaacgttaaccaacagcggatcctcgattttaccagccataccgttcgcgcccttgataacgttctgctttccctggaaaaccaccgcaacgtgctgcagccgctggtggggcagccctgcctgcaggtgcaactggcgctgcggcagcaggcagccattttgcagacggtacgctccattgccctgatcgaagacggtatcctgtactgttcgagtattttcggcagccgcagcgagcctgtgcgtgacgtccttcaggagctccctgccagcacggcgaagctgattttatcgaccgaccagtggctgcttaagggcagccctgttttgatccagtggtatcccgtctctcaggacggtgaagatggcgtcgtcgagattatcaatatcgacctgatcgccagaatgatccttgagccccagcgtccgctcatcagtgacgtggtgctgacagtcggcaatcgctttttacgctacggtcaacgcgtcaccgacagcctgacgtttgatgaggaaagcgcccttttccagcagtcttcaacccaaaatcctttcacgattacggtcggcggacctggccccggagagttagccttaaaaagcctgcccgcccagctgccgctgggactgatgctcagcctgctgctgggctatctcgcctggctggcgacggcaaaccggatgagctttacgtgggagatcgatatgggcattgtggcgcgggaatttgagcttttctgccagccgctggtgaatgcccgcacccaggcgtgcactggcgtggagatcctgctgcgctggaataatccccgtcagggttggatcaccccggaggtgtttatccctctggcagaagaacataaccagattgtccccctgacccgctacgtcatcgctgaaacggtgcgccagataggctacttcccgtccagccccggttttcacatcggcattaacgtcgccgccagccatttccgccacgcagtattgatacaggatctgaaccgtctctggttcagcgcctgtccgcgccaacagctggtaattgaactcacggaacgggatgcgctgctggacgcggattatcgcatcgtgcgcgaactgcatcgcaaaggcgtgaagcttgctatcgacgatttcggcaccgggaacagctccctctcctggcttgaaaagctgcacccggacgtcctgaagattgatcagtcttttacgaccgccatcggcaccgatgccgtgaattcaacagtgacggatatgattattgcgctgggccagcggctgaatatcgaactggtggcggaaggggttgagacagaggagcaggcgcgctatttacgccgtcacggcgtacctgtgctgcagggatttttctatgcgcggccgatgccgctgcgggactttccagactggctggcgggaagtgctcccccgccagcgcgtcataacgggcacatcgtgcccttaatgccgctgcgttaa

SEQ ID NO: 125865 - DNA, 990 bp, Enterobacter cloacae
gtggtctggaaaaatccctggtatgacccctccctgaaacatcataccccgaacggttttcgtaatacccttcctgtcggacatcaacccggtgaccttgaccgttggcgtaaagcgcgcaaagaggccggtttaccgaagccgcccgcgctgggttatgacgatttcatccgccagtggtggcaaccggttgagcttgcggcatctcatgaagatggggtgtggtggctcggacacgcgagtgtgttgctgcagctggacggcaatatcatccttaccgatccggtgttttcacgacgtgcttctccgctgcctttcctgggaccccagcgcaaaacgcctcccgtactgtctgtcgagcaacttcatcagcttgatgcggttgtcatctcccataatcattacgatcaacttgatgacgcaaccattcgcagaatcctcaagcgctttcccgacgtctgttgtttcgttccgttgggcctggccgactggtttcgtcgccggggagcaaaacgcgtggtcgaactcgactggtggcagagtttcacctggcaggggatgacgctgaccgccgtgccagcacagcactggagcatgcgcacgccatggaaccgcaatcgttccttatggtgcggctgggtgatggaaggacggcatcaccgtttctggttcagcggtgataccggctattcgcctgagctgttgttgattcctgaacgcctgggccagatagatgccgccgcgttgccgattggtgcctatgccccacgatggttcatggctgttcatcatatggatccgcaatcagcggtggcattgtggcagcagctgggctcacctctggcgttccctattcactggggcgtgtttgaactggcagatgaagctttagatgaacctgtgcaggagttaactcacgcactcgataatttagcaccagttaaccattctttcagaatactgaaaattggtgaatatttatccttctaa

SEQ ID NO: 125866 - DNA, 492 bp, Enterobacter cloacae
atgaaaacaaagaatttactcctgtttatactcttaactgtggcccagtgcagtcatgctcaagaacaatacaattttgaagctgtaaaaccagcagtgattgaattctttaagcgcggggcaggaaatcctgatagttgcaatgtgttcaaagagcagcttgcaaaaaattttgaagataagcaaacaaggaaaatgatgattggtttctgtgacagcgacttagatacaaccaagccagtttcttttacggaaatgtcattacatcattctgaagggcatctctatgtttgcggtattctctctggtgagactcaactaggccgaaaaataggtgctcgttttattgctgccgaaccatatcatttggttctgggcttcaagtattcacgacgaccgatagcttacgcaactgatgataaatttctggtcgatgaagttcgatctcagattaaagcatttaatgaactttatgcaaaagcatgtaactga

SEQ ID NO: 125867 - DNA, 870 bp, Enterobacter cloacae
atgctggcgctgtgttatatcgggtttcgctttatccatttcggggcgctgatgctgatttttggcaacgcgctttacagcgtctggtttgcgccttcctctctccagcggctgatgtcccgacgtttccagctgcagcagaaagtggcggcttttgtgagcctggcggctgcactcctgatgtttatgcttcagggcgggcagatgggtaacggttggggcgatgtatttgccccacaggtctggtccggcgtaatgaggacacagtttggcggcgtctggctgtggcaaatgattctcgctgcgatgacggtcgctgcagcatggctcgcgccgctgaagggttcgcggctgctgctgctcgccatggggcagcttatcctgctggcgggggtagggcacgcggcgatgaacgacggtccgatgggggcgctgcagcgccttaatcacgcttttcacctgatctgtgctgctacctggcttggcggattactgcccctgctgttctgcatgcgtctggcgaaagggcgctggcagaatgccgccatctataccatgatgcgcttctcgcgcgtgggccattatgcggtcgcgggcgtgctgctcagcggagcgatcaatgcactcatgatactgggcgtccatattccctggcaggctgactacgtgcagtttttgttgttcaaatgtgcgctggtggcgttgatggtggtaattgcgctggcaaatcggtattttctggtgccacggtttcgtccggagaccgggcgagcacaacagatttttatcaggatgacacaggcagaagtggtgctgggggcgctggtactggcaacggtcagtctgttcgccacctgggaacccttctga

SEQ ID NO: 125868 - DNA, 372 bp, Enterobacter cloacae
atgggtttctccgcttcccgcgcggtatgcgcactggtttttctggcctctacaatgatgaccccctccgtgctggcgcatgcgcaccttaagcagccgatcccgacagcggacagcgtggtgagcgctccgcaggcacttacgctgaatttttcagaaggcatcgaaccgggatttagcggtgtggtggtgacggatgcgcaaaagcaggtcatcaaaacgggaaccgccacgcgcgacgaaaagaacaaggcgcagctcaccgttccgctggaccagacgctgacgccagggacgtaccaggtagactggcatgtcgtctcggtagacggtcataaaaccaaaggtagctatcactttagcgtgaaatag

SEQ ID NO: 125869 - DNA, 759 bp, Enterobacter cloacae
atgaagccagttttcagacctgtttgtctggcgggcgcgttgggaatggctgtggcaatcggtcaggcgcaggcggcagccaccattctgctctggccgatcgacccgtggcttgcggcagacgccaacgccacggagctgtggatccagaaccagggaaacagcgccaccacgatgcaggtgcgtattgtgcgctggaagcaggaggacggacacgaacgctacaccgcgcagcaggatgtggtcgccagcccgcccatcgtcaccattggcacaggcagcaagcagcttatccgtcttattaagcaggcccccgttcccgcaggcgtcgaacaagcctaccgcattatcgtggatgaaattcctcagcctgatgctaaagccgaacccgccatcggcctcaagttgcagatgcgttactccattccgctgtttgtgtatggccaggggatcccgacaataaaagagggggcgcatcacgcgctggtggagacccggaacctgagctggcgggtgacgcgagcggatgggcagccggtactggaggtccggaatcggggggatgtccatgtcaggctgagccaggtggcgctggagcagggagggcagaaacgcacggtcgcggagggattgctgggttacgtacttcccggcagcacccgcagctggccggtacccgcaggcgttcgtcagccagagcggatgagcgcgcagattaatgccagggacgcacaatggcagtcgacgcccgtcaactga

SEQ ID NO: 125870 - DNA, 2037 bp, Enterobacter cloacae
gtgagcatggatattagcgatttttaccagacattctttgatgaagccgacgaattgttggccgatatggagcaacacttgctcgatttggtgcccgaagcaccggattccgagcagctcaatgccatcttccgtgcggcgcattccattaaaggcggagccggaacgtttggatttaccatcctgcaggaaacgacccatttaatggaaaacctgcttgatgaagcacgacgcggtgagatgcagctcaataccgacattatcaacctgtttttggaaaccaaagatattatgcaggaacagctcgacgcctataaaagttcggcagagcctgatgccgccagctttgaatacatctgcaatgcgctgcgccagctcgcgctggaagccaaaggtgaggtttccgcagccgtggttcctgccgcaaaactgagcgttgtggatacggttgccgcgcaggcgtctgcccctgccgacgcaccggcgggcaaactgcgcgtggtactgtctcgcctgaaagagaatgaagttaacctgctggaagaagagctgggtaacctggcgaaattaagcaacgtggttaaaggcaaagacagcctggccgcgacgcttgatgacggtattggccaggacgatatcgtggcggtgctgtgctttgtgattgaagccgatcaaatcgccttcgaaaccgaaacggtcgcggttgacgttcctgcggctgtggaagaggtggctgttgtcgctcaggctgccgcaccggctgtggcgcctgcggctccggcgctcaaggcggtgccaaaagaggctgctgcaccgggccgtggtgaaaaacctgccgcgcgctccagcgagtcaaccagcatccgtgtcgccgttgagaaggttgatcagctgattaacctggtgggcgaactggtgatcacccagtcgatgctggcgcaacgttcaaacgaactcgacccggtcacccacggggatttgattaccagcatgggccagctgcagcgtaacgcccgcgatctgcaggaatcggtcatgtccatccgtatgatgccgatggaatatgtcttcagccgcttcccgcgtctggttcgcgatctcgccagcaagctgaacaagcagattgaactgaccctgatgggcagctcaaccgaactggataaaagcctgatcgagcgcatcattgacccgttaacgcacctggtgcgtaacagcctcgaccacggtattgaactgccggaaaaccgcattgccgcagggaaatccccggtcgggaatctgatcctgtctgcggaacatcagggcggaaacatctgcattgaagtgaccgatgacggcgccggtctgaaccgcgagcgcatcctggcaaaagcgatttcgcagggaatggcggtcaatgaaaacatgaccgacgaagaagtgggcatgctgatcttcgcaccgggcttctctaccgcagagcaggtgaccgacgtctccgggcgcggcgtgggcatggacgtggtgaaacgtaacatccaggagatgggcggccacgttgagatccagtccaaacagggttccggcacgaccattcgcatcctgctgccgctgacgctggcgatcctcgacggcatgtccgtcaaagtggcggacgaagtctttatcctcccgctgaacgccgtgatggaatccctccagccgcgtgaggaagatctgcatccgctggcgggcggcgagcgcgtactcgaggttcgcggtgagtacctgccgctggtggaactgtggaaagtgttcgaagtggacggggcgaagaccgaggccacgcagggtatcgtggtgatcctgcaaagcgcgggccgccgctacgcattgctggtcgatcagctgattggtcagcaccaggtggtggtgaagaacctcgaaagcaactaccgcaaagtgccgggtatttctgccgccaccattctgggtgatggtagcgtggcgctgatcgtcgacgtgtcggcgcttcagggattaaatcgtgaacaacgtgtggcgtacacagccgcctga

SEQ ID NO: 125871 - DNA, 678 bp, Enterobacter cloacae
atgcaatatgaagaacagcagcttatcaacggccttttcgagcgtcttaaacaggccggacaacaaaacagccaacgggatgcagatgcggagcgtcagatcgctgaatttgtcaggcagcagcctgcggccccctactatatggcgcagtcgattttgattcaggaagcggcgctgaaacgcctgcaggcccgtgttcaggagcttgaaagcgaattagccgcgcaaaaaagcaaaccctcgacgggcggcagcttcctcggcggcctgtttggtggcgggaaaagtaacccgcagcctgacaacagctggaatgcccagccgcaacagccgccggcgcaggattactctcgggcgccagcgcctgctactcgcggcggcggttttatggctggcgcgctccagacagccgctggcgtggccggtggcatagcgcttgccgagatgcttaccagcatgttccatcagtcgcggccggaagagatcgtgaacatcatcgaagagccgacaatgcccgtcggtggtgaaccgtttgtcggtaatcaatacggcgatgttaataacgtctctgacacccgtttcctcaaccagaacgatccgttcggcagtaataacgacatctggcagaacgacgatgtagatgacgactacagcaatgacgacgacagttttatttaa

SEQ ID NO: 125872 - DNA, 825 bp, Enterobacter cloacae
atggcagttatcaatactaacctgttgtccctgaccactcagaacaacctgaacaaatctcagtcttctctgggcactgctattgagcgtctgtcttcaggtctgcgtatcaacagcgcgaaagacgatgccgctggccaggcgattgcaaaccgcatgacctcccagatcaaggggatgaatcaggcagcacgtaacgccaacgacggtatctccatggcgcagactgctgaaggctccctgaacgaaatcaacaacaacctgcagcgcgttcgtgaactggctgttcaggcaagcaacggcaccaacagcacctctgacctggcttctctgcaggatgaagtaaccgctcgtctggctgaaatcaaccgcgttgcgggcaaaactgacttcaacggcatcaaactgctggatggttctgctggtgcagctggcgtagttaaaattcaggttggcgtgaacgacggcgacaccatcgatctggacctgagcggtgctaaagctgacaccaccaccctgggcgtgaacgctatcgacctgaaaagcgtacaacctaccgacctggcaactatcgacgcagctatcgctaaagttgataaagcacgttcaggcctgggtgctgtgcagaaccgcttcacttctgccatcaacaacctgaacaacacctctaacaacctgtctgctgctcagtcccgtatccaggacgctgactacgcaactgaagtttccaacatgtctcgcgcgcagatcctgcagcaggctggtacttctgttctgtctcaggcaaaccaggttccacagaccgttctgtctctgctgcgttaa

SEQ ID NO: 125873 - DNA, 513 bp, Enterobacter cloacae
gtgaacagagtatttctggttttttctgcaattttcctggcaggttgttctgccaaatacagcacaaataatattcaggagcgtacagagcacctgataaaagatgtcccggttgtgatatcccagccaactgatggcgtttatgagacacacacctattcaggttctggcaaagcaacggcagatgcagcaaaagcagcatttttacggcattccgataatgttattgtttttgctgactgcgatgatgttgcatgtcttaaaactaaccattcaatcaatcgcgggtattatgtggtaccgcagatactgcattgggaagatcgcgcaactgagtggtctggaatacctgacaagattgaagtaaaaatcacagtttataatgctgaatccaataatcgggttgcatcaaccattatcaatggcaaaagcaagtgggctaccttcggtggcgatcacccgcaggatctgttgccggagccgataaacaccttcgtctcaagcctctattaa

SEQ ID NO: 125874 - DNA, 390 bp, Enterobacter cloacae
atgggattcccgagcccggcagcagactacgttgaagaacgcatatcactcgacaagcgcatcataaccaggccatcggctacgtacttcatgcgtgcaggtgctacatactatcgcgaaggcatactcagcggggcgattctcgttgtcgacgcatcacttagcccgtgtgatggttcattgctggtttgtgctgatgaaggagagttcagaattaagcgatacagaacgcacccgcaaccccatcttgagaatctggaaaatggtaagcgagagagtctgccggataagaacgaagcatcagacacatcgcgtcaggtgttcggagtgataacgtacatcatcaacgatgcgcgttctggagagttcgatgactgcccggtgatgtga

SEQ ID NO: 125875 - DNA, 714 bp, Enterobacter cloacae
atggcacttttactgttggctgctaataacgcccaaagcgttctggctgccgggataagcgcgtccgcaacaaccatgacgctgaatactggtactggtgctcttttccctgcgccagtttccggtaccagtttcttcaagttaacgttgattgatgctgcaacaggtcagataagagagatcgtgcatgtcaccgccagaacaggagacacgcttacgattgtgagagcccaggagggcacgctggctcgcgcgtggtctgtaaacgacattgctgccaacatgatgactgctggcacgttgagctatattttcgataactacgcaacaattgccagtctcggaacagcagcagaaaggaacgtaggtaccggttctggtcaaatccccgacatgtcattttttgcaggaaccagtgctagtagcggatatcaatatttcccaaatgggaacttgatccagtggggtactatcggccttaactcttcaccctcaggaactactattggagtattccctatagcatttccctcaactggctaccagatagtcgtaacacatgacaacccactcgatggtacgcttgcgtatggagccgcaagcattattagcccgacacaatttagagtgaacgcatgcgcaattaacacgaacacatttaccctgaatccaggctatgcaatgacacttcgctggtttgctatcggaaaataa

SEQ ID NO: 125876 - DNA, 276 bp, Enterobacter cloacae
atgattaatttatctgtagcctttttccgcacaatcctctctggagttgcaacgctaactatttttctttctgcatttcttatcactcttgctattcaaatgtgggcgcaggaaggagtcccgccacttgagaacatcaagtttgttgtgatgttgttttttgtagttattatgcttttgacaatttctttatgcctgaaaatattcctggatatggtagttagcagcaggaattataaaattctaatcaaaggaaactcttcagtccaccaatga

SEQ ID NO: 125877 - DNA, 705 bp, Enterobacter cloacae
atgcttgaagatatcattaaatcatacttgtatacgcagtataaagacgatgatgacctccaggcattcgtcagcgcatataacgccatggctcaggaaatttattcatggatgattaacgctaatctgccgatttttgtcggtggttataatgttggtgatcagctgaaatggacagccagagggatatacggcgtgaagccaccagtgctggttagcggaaagcagagcacatttggcccattcaatgccgtaatgtttaatcagttgccttttaacggaagaaaggtagtcaaccagtcagagcaggttgttgtgtcagacgatcttttcaagcgcataatgacatggaatttctataaaggtgacggatattacttcacaatcccatggctgaagcgtcgcataatccgattcctgacgggcattgatggcatggatgttgttaatgatcagcgatggagtgtttcagttttattctctggttctggcgccagcatctctataatcaaaggataccgacgacttactaactcttccctttacaattcatttggatttaacaacagagttttcaatcagaaaactagcggcgtgataaagagtacgaaatatgaatatgcagaattattcaagcaggcctttgatagcggcctgctccacatgcctttttatcaacccgtttcagtcacaatagttggctag

SEQ ID NO: 125878 - DNA, 1419 bp, Enterobacter cloacae
atgagtgatttgtccgttagctatgacgcagtcgggcccgtgccgaaaacatccgaagaactgcgcgcagatttagtttccagagccactgagttatcaccgggcatcactacggaccttcctggatcgctgattgaggatatcgtcggtaccgacgttggcgcgctgcttattgctgatcagatccgcgtcgacctcataaactctgttggcccgctgaaagcgaatatgtacatgctgaacctcctggcgcagcaggcaggaattagcgcacaaaaaacggagggatcgactaccgttcctgtgacgtttagcggtccagcaggattcgtcataccgcaggggtttctggtcagcgacggcacttatacctaccagatcgctgatgcgacagtggtcctgtcttcaggcgtcagctcgatggtaacagctgttgcgacaaacaccggttcgtgggccgttccggtcggttctgttaaccagatcctcaccagtctgccgtctgacattgccctgacctgcaccaacccggttgccggcacccctggtggagcgcctgaaactaacttcgagtttcgcgagcgcgtctgggaagctcagatgtcgactgtgcagggatatcctggctttatccgccagaagttaaccgacctgagtgatgttcaggctcgtcttgtttccgtagttcagagcggtaatgcatggattgtgatgtgcggtggcggtgatatctatgaaatggccggggcaatttataagtcagctggcgatatcagcaggctcaagggagcagacctgaatgtcaccgggatcaccaatgcgaaccctggggttgtcacgactgacatcactcatggtttcagctcaggccaggtgattcgtatcgccggcgtaacagggatgagtggcgtcaataacgttgaccttaccattaccgtactgagcccccacactttctctattggcataaataccactgcctcaggggcatggacaggcggcggaattgtaactccgaacctgaggaataacgttgtaacgatcaacgactggcctgatgactaccttattccttttgtaattccgctgcagcagctggtaacgataaaatttgaatgggcaacagagagcgtgaattatctcacggatgcgactatcgcctcactggtgtctcaacctgtaatcaactacgtaaacgggatattcgctggcaagccgatgaacatcaacaacgtcaaggatgttttccttcaggccattaacggtacgctggacatgagcctgatctcaaccttgaacgttattgttactgtgaatggcattatcacagacgtggacgccgggacaaatatcatcagcggtgacccatacagttactggtatatagcctcaaatggggtgattgtcgacgggatataa

SEQ ID NO: 125879 - DNA, 333 bp, Enterobacter cloacae
atgagaacctacggaagagaagcgggcggcaagtgggtgctggtggtgccggatgaaaatggctttaacgactccatctatcttacgacgctgatccagaatctgaagctggcgccgcaggagtcgccgttttttgcaaacaacggaatcccggctcagagctcggtcattcagcaggtgctgcctacctactatgtcgacaggcttcaaaggcaatttagccagtatttttcatcgctgcagatagccatggtaagtgatgacccgcccgtatacaacatttcggcgataactaacgccggttctaaaattatcacaacggtgaacgtatga

SEQ ID NO: 125880 - DNA, 717 bp, Enterobacter cloacae
atgagtgttgaccagaagcttaatttcggccggaacatgaaccggttcgcggagcagaaatttaatgaggcgtttcaggcggccgggaaaatactgcctgccagcattgttgagcagaaaggaaatatggtcacggtagctttcgagctacatgacacgccatacgttttccctaatgtcacgatcccactcttcgggccgcagtacattcgatatccgatgcagccaggagataaagggattgttattcctgcagacacctatcttggcggcgtcagcgggcagggcggtggtatcgccgacctaaccccccccgccaaccttagcgccctggtatacctgccgataagcaacaccgaatgggaggccgtcgacgggaacgttgtcaccatttacgggcctgagggagtgaccattcgggatcagggtagcaacacgacgtttctgctgacgcctgacagcgtaacaatcgctgccgtggaccagttcaaggtcactgtcggcagcacggtgctaactcttacgcagggaatgtggagcatcaccggagagaccgggaatctgcaggactcaaccgccagtaccagcccggcgattatgcataccggttgggccgccctggttgcatggttgaatgctcatcagcattcaaacggtaatggcggttcaaacaccggagccccaatcacgactttcaacgggaatatcacgcaatga

SEQ ID NO: 125881 - DNA, 1020 bp, Enterobacter cloacae
atgcgctattacgaaattaacatttttgatggcgacaccttaattcagcaatattccagcctgaagaacggagtctataacccaggcgcgctgatggtcgaattcgacatcatgcgctttggtgaatcaacgccagcaggggaaacccatctcactgtgtggggcatcggccctaaagatatgcagcaggccagacagaacctatacggtaagcgaattcagatctttgccggaatgtcgaaggggttgccgctagcgggagtgtgggacaaaaagcttgccatagaggggaccattttccaggtgttcggcaactggcagggcacagagctacggcttgacttcatcattgttgcgggccctgttaacaccacggcccgcgggcagatggtgcctcttcaggtgaccatgccatggtctatggggcagaaactctccgttgcgctgacacaatgtgtcatgacgatggggggatttacaccgaacataagcatcagcgacaggctgacgctgaattacgatcgccccatgttttgcggctccctcactgagctggcaaaaaacctgagggcgttttcgctatcccgcatcaaagaccccggctatacgggggtggaaattgccgtggtcaatggcaacgaaatccgggtgtgggataacgactacgccaaccacccggatcagggttcaaaaaccagcgcgacggaaaggagcaaaaaccctgtccagataaatttcaatgacctgataggtcagccaacgtggatcagctttggtgtcgtcagcgtcatctgcgttatgcgagctgaccttcagaccggcgatcacatcctgatgccggaaaaggccaggccgatgattcaggcatcctcttactcgcagtttcgcgatgactcagcgtttaacggcgaatttgtcgttcagtcggtgaggttgctgggtaacagcaggcagccgacagcagaggcgtggatcacggtgattgaggcatacccggcggaggcggttaagacaaaatga

SEQ ID NO: 125882 - DNA, 276 bp, Enterobacter cloacae
atgagcaccgtcaattacccgtttaccgggcttgagaggaagagcatgacgttctcgccggttctcgacgggacggtatacacctgccagatgaaatggaacatcgccgcgcagcgctggtatttgctgatcaccaacagcgccggcaacccggtgctgaatactgccgttgttgggtcgacatcatcaggtggaataaacctcctgaatggggtgttcacatcgacgaccatgatctggcgtgaaaaaaacgggcagattgaggtaacgagctga

SEQ ID NO: 125883 - DNA, 717 bp, Enterobacter cloacae
atggcatttactcgcgaactctaccggcttggcttcgaaatatcccctgttatcctctgcaatggagttgcggaggctatccccggcggcatgctgccaatagtggcattaacccagagcgccagctttgtaaccgggctgatcggcggggcaatcagccttaccgatctggacaaatatttctgtcactggcggccagttcagggcgcaacgatggttgactatgacatcgctcgctatccgttcgctaaccagactgtcgcagctaacgcgcttcttgcacagccgctgagggtcagcctgatgatggatgcgccagtgaacgagaataccggcgccatgaccaagctggtaacgctgagcgcgctgcaggcggtgcttcaggcgcatgccaacctgggcgggacttacatcgtggccacgccgtcaatcatctacaacaactgcatcctgaaaactgttaaggacagctcaaccggtaatgatccgcttccgcagcggtcctggctctgggatttcgagcagccgctgattagcgaaactgcagctgatcaggcagtaaacagcttcctcagcaaaattgatggtggtgaccagaacaacagcagcgcatggacaaacactgtcagtgcactgggtaacacatcgcttggcggttcggttacagaggcgataacgggcgtgatcggcaagctgcagggggtatttggcatatga

SEQ ID NO: 125884 - DNA, 1821 bp, Enterobacter cloacae
atggtggctaagtctattgtcgatattgacgtaaatgacgacaagtttgtcgcgtttatggagaagttcaaagaatatcaggctgcacttgagggacttcctgaagcatggcgcgggctggcgcatggcgccactgatgccaccaaagagacggcgaaagcgaaaacagagggcgacctactggctaaagccttttctgagggggcaagcgcgattctgtcgataaacagcggccttgagcggcttaccgacagtctggacagggccaacaagagtcaggaagacttcaacaagaaaactcgctcatcaaaggggtttttgagtgacgccacgaaggacgcgaaatcgctggccgggcacataagggatgcaaccacaagcctgctgtcatggggtggtatcgtcggcctgttcactggcgtgcttggcgtcggcggtctcttcgggcttaaccgcctggcggccacaaccggatcccagcgtttcacctctctcgggatcgggacgagcatcggcgcgctggactccacagccattaactaccagaaagcactaggcaacccgacagggacgctgggggccatccgagacagccagatggatctgtcaaagcgctggcagtttcaggctctcgggatcaataaccccgaccaggacccggcgaaactcctgccgcagctgattcgcaatgcgcgtgacatttttgtcaaaaacggcagcaccctgcagggggccaacgcctatggcctgacgaactttttcagccttgacgacctgaatcgctttaaaaatatgagcgatgaagaaatcgatgcgatggagcgccgggcgcagaaggatgcgaagttactgcagatcaccgatcagcaggcgcggcagtggcaggacttcaacgtccagttggattacagcggacagagcatccgtaacacgtttgtgcgcgggcttggaccgctcacaccgcaactgagcaagctttctgacgcgctggctggtgccattgatactgtgctgcagtctccagagttgggtaaatggattgacgggctggcgggcggtattgagcgcttcgggaattacctggcatcgccagagttcaccaaggacgttgacagcttcatggctggcattgaaaagcttggggcgctcatcgggaaggtttacgactgggttgtgggtaaaaccgacatctcagtatcggatgtgacttccggatcctcaatactgagcgacaagaaggtcacggacccgaagactggacagacttacacgccgggttcagaagatgacccgcgggtgtggggatggctgaagggcgttaagagattcttctccagtggcgatgttaaacctgtcgacccaactcctgcggatgtctccgctaaaggacggacgatcgctgacaggttcaataacccgaccaatctgcgctgggctgaggggtacggtacgcacaacacgaagagcgggaaatttgctgtctttcctactctcgatgagggcgtgctggcatcggcgaaacagctgcaaatttatggcacccgcggcatcaacacagtcagcgaaatagcgaaaaaatgggcgccgtcgaacgagaacgacacagcggagtacatccggcatgtcgttaaaacgaccgggcttggcgctaacgacaggctgaacctcaacgaccctgcaattctggcaaaactcatctccgctatgtccacgaaagagggggccggaaaccgggttagcgagggcgcggttatccagatattcaacaacacaggcggcaatgccatcgtttcatcatcacagcttggagtgactggataa

SEQ ID NO: 125885 - DNA, 615 bp, Enterobacter cloacae
gtgggtctgattgtgaaaatagacaaaaagctcaacctggtaacaaacatcacccgggaagacgggtcaatcgtgtacctgcatgtgaccccgttcccgtatgaggtggtggaggagcattgcctgctgctgggcaacctctttaccaacttcatctcacaggtcggcggccttggcgcggcgcgcgttgccgcgatgatgctccgtaaaaagcttcagcgcgagcaggagttgagggaagaggctaaccagcaggcccagcaggcccagcaggctccaaccatcgtagacgaaatccagcgccttacttcagtggtgtggaatgacggcggtacatggaaaaccacatctttcgaagtcgcgatgaagcaggggattatctctcctgacgaataccgcgaagttgaaggtgaggtggttttttttatggtttcctctgccattcagaaagctcacctgatcgccccgacggtgggctcagtgatcggcatgttcggtgggcaactcgtatcatcgagcgttacggcgttccgcgattcgttgctgacgtcgaatcagcctaccgatacccagacccagagtgcccagccggaaacgtcatacataccctcctag

SEQ ID NO: 125886 - DNA, 438 bp, Enterobacter cloacae
atggcaaacccattagtaccgcagggattcctcaatcgtgtacgcggcgcggtgtcggtaactgacgtgccagcgctgaacatcaccgcctcttatcttggcaaggacgccatcagcatgcgtcctgatggccctgcgacggacattatcccgacgctgaccggcaccgtaggtagccaggcgccatatcagcaggtgaccgtcaccgtccatctgctgcgcacccagggcctgagtgacagctacaaaaaccgcttcgccaccgatacggcactgggcgaggttgtaatcaccccggacgcgaacacgctgagcaatttcaccgtgcttaacgcttatctggtgaacttcaacgaactgccgtttaccggtatggatgccgggtacgtggttaccatcagcggctacatcctggctaacgacaacatgtgggtctga

SEQ ID NO: 125887 - DNA, 1395 bp, Enterobacter cloacae
atggcaattgttaacattaacgtatcggtgaccaatccaccgaagccctctcagctgcttaaatccggcgcgatgatctccatgggcggaacgaccctggcggcaggagaatatcaactcctcactaccaaggacgatctcaaagcaatcacatccccgggcaaaactatcgcatcaatcgcgtgggctaccggcgttgtgacagtgacgctgtcagaggcgcatggctggaacgttggcaacactatcccgctggttgtctctggtgttactccagcagcttataaccgcgccgtaaccgccactgtgaccacttctaccgccttcacttatccgttggctacagacccaggaacggcaacagttatgggtacggtgaaaaccgtagcggcaaacgaaatcatcgagatgaacaccacgttctggtcccagggcaccacccgcgcggtctatgtgctggaactgggcgacgtgtctgttgctgctgctgttgctgctctggccgacttcatcgatgaggatatctctctgggcaacacctaccagaaattcttctcgtacctggtgccgcgcgaatgggatggagaaacgacgtttaaaaccctgacaggtctgtataccagcccggcgtcactggtttatttcttcgttaccaccacgatcgccacctattcggcctgggtcgccaccaaaaacaaatctgtgtttgcaggtgtggagtcgacaaacatcccggctggtgagttttccatggcgttcccgttccagtcatctctggcaaacgatcctggctcatcaaacatggtgccgccaatggcgtaccgctttggttacggggttacagaataccctgtagaaggaaatggcacgctgctgaagcagctccaggacaacagcatcaactacgtcggcaccgccgcggaaggtgggctgagcaacaaaatgctggtggctggccacatgctggacggcaatccgttcaactactggtattcagtggcgtggactgcaatcaacctcgagctcgatctggccaacgaaatcatcaacggttcaaacaccacggttaacccgctgtactacgagcagaacggcatagaccgcctgcaacgccgcgcgctgaagacgctgcgcaacggtatcagttacggcctgatcctggggcgtgtaattggtaccggactgacgcagcaggatttcaataccgagtacgagaaaggcacgtatgccgggaacgcggtgattaacgccgtgccgttcgcgaattacaccagcctgaatccgtccgattacgccgatggcaagtataacggcctgagcgccgtaatgacgccgcgccgcggcttcgaatccatcacgtttaacgtgaacgtaaccaactttgtaggggcgtaa

SEQ ID NO: 125888 - DNA, 942 bp, Enterobacter cloacae
atgccttccctgagtgagttgcagcagactgcaaaaacagagcttaacgccacgctgacgcagggtcttgatgacctgagccgctttcaggtggtcacgttcacgaagtatatccgcaaggtgctgcccctcgatggtttcgtcttctgggtgaaagcctctgttctgtcagacgaccccagcagcgagccggatacagttgacgttaagggctatctgcacctgacgaccgaaaccattcaggacgatgagcagttatacgaccggaacgtcgtaacgtttaccgcgcaggcggacatcgacccgttcaacgatatcggatctgatgtcctgtatatcggcgagttctttggccttcagttttccttctcccggcgcaccgggctgaacgaaccggccaacctctaccactacacaggggaggcaatcttcccctacatgcgttcgcagatcatcaactctgcagatgacatcgatctggctgatgtggtggtttcgagttcattgccggtatggctgacgctgagccagtacatgccaatgttcccggccatgctgtcgacgcagaacctgtctccgccgtatgcaacggtgaagtgcagcaacaccgcgccgattgccgggagcttttacctcgatgagcagcagaaccagtatcagctggtttccgaggatgtgacgatctccatcactggcctgcgcaatgccggagttgaagatttcctgaggtacgtacagcagtacacgctcggcgatgacgcggaaatgggcgtgatgaatatcccggtcgttcaggacgagcgcgtcacgcagaacgagctgaacatcatcgccatgagaaaaaccatcaagttcaaagtcaactattaccagcagcgcatgcggaatgtcgcgcgcaggctgatcacgtcagcgattccgtccatttacccggagaaataa

SEQ ID NO: 125889 - DNA, 435 bp, Enterobacter cloacae
atgatcaccttccacctgggggtgattgatgtcccgtatgaggacgaaaacaccacgaccggagacgtcgccgagtatctggaggaaaagtaccagatcatgcagacgtttttcgacaggtacagcaaagacatcgctgacctgatggcgaatgacatggccgcgtcgcttgaaaacatgatggccggcgcgccgccagccaaagaccctctggcagagtcgatgtcccggatccatgacctgtttgtcgccttcctcgacaacaccgaaatgaacggattgccgggcgtgcctacgcgccgcgcgctggagggtatatccaagcgattcaaaaacaaaaaagggccaccgcgtccgtcattcattgataccggaacctatcaggccgcgatgcgcgcctgggtaagcggggtgctgaatgccttccctgagtga

SEQ ID NO: 125890 - DNA, 429 bp, Enterobacter cloacae
atgacaacgagcctgtcgggatttatcgaattcgttcgaactgacatgggcgtgaccgccgcgcaggttcccgacgactcgccgtctttcaccctagcgtatggcggcgcggttgagtgggtaaaccctgatatcgcgtgcgtcacgccgaatctgtacaccgttgccgtgtacaacctgggcgcgtctttccttgtcaactacggtaccgaatcggtattcgccgagttcaggaaagagtatggcctgaataatttcaaggctggcgtaattactggcgtcggggataactcaaccagcgctcagcgcctggttccggacttcttcaaagacctgtcgctggctgacctgcagatgttgcaggacccgtgggggcgccggtacctgatgattgcccagcagttcggcagcctgtgggggctgtcatga

SEQ ID NO: 125891 - DNA, 483 bp, Enterobacter cloacae
atgaaactctatatcgctaacaccaccaagcagcgccagattttcgcctatcgcaagctcgagaccggccgccttattcagatcccgattaaccacggcgaccagatgatggtactggatggcacaactgaagagattgaagcggtggtgcagcaccatcaggtttatggtctggttgactcgacaaaaatcgaccagagccaggcgtttgtcggcctgtgctacagcctgaacaagcctgtatcagcgtcggtaatcgaaaaagcaatccgcgataacgatattcacctgacccgtggcgcccacggccgccgccaggcatccgtagcggctttggacagctctctgcgcgaaagcggtaccggctattccggcgagatggaagtcagcgctgagcaagcgaaaggccgcgaagacagcgaagacaccccaacggttaacgaaacaatcgtgactgaaaaatccgggagcaagaaaaaatga

SEQ ID NO: 125892 - DNA, 1032 bp, Enterobacter cloacae
atggctgcaattacccccagctacaccatcgtcaatccgtcgtacatcgcgccggagatgatcattggttaccagcaggcgtcaggtgcgtttgaaaccatcgccagcggtaacccgcaagtccgtctcggcgtaggcgatcagtacgtctacatgcgccgtctggacattcgcacccagaccacttccagccagtccggtaacggtaaccagctgccgagcgtggcgctggatgcgaagatgatttccaccccaacctatctgttccgctgccgtggtatctacgatcaccatgacatggctgctgccggtaactggaactttgcactgccggaagctcagcgcctgggcatgcgtcagggcattttccagcagctgcgttctgctctgctgtacggaatgaaccctgctggcggtgaaggcctgctgaacaccgctggcgcgactactgagtctctgcctccggacagcaacggcaacaccactgtgctgacctatgaccacggccagatggcggtatatctgctgggacacgtacaggccgcactgacccgcaccatgcagctgggccgccagcagcgcgtcgttatcctggggccgcagcgcgtcctcggcgccatggagattcagcagatcgttcagctgacttcttatcagcgtcctggtggtggtactgacaccgtcggcggcacggtgaaagaagtgctgaaaggcgcaaacgtccaggttgactgggtgtatgacgacactctgatcggcgcaggcgctggtggtacagacgcggtggtaatcaccatccctgaggtcgaagtgccaatggtcaactcgactgtgaacactaacgaattcgccaagttgactccgtctcttgccgcgaacgcgctgatgtttaccgacatggccgcgccgcgtgagattccgacgccgatcgctggtggtgccatcgatgttctgtccgaaatgcgttctaccgcaggctgggcagttcgtccggaagcaatcaccatcctgtccatggcgtacagcgcctga

SEQ ID NO: 125893 - DNA, 861 bp, Enterobacter cloacae
atggctactttatctcttaacccgatggcaaccacgaacgcgctgggctccttcggtgtgcagtccgacggttatattcagggcgtggcgctcgatgacccggccaaccgctttaacctggcggcgggcaccgtggcggcaacggaaaccaaacccctgtggggcggcctgccggttgccgagcttctgcctggcaccagctcaagccctcgcggttcttatatccgtcgcgctgtgtctgttgccgagctggaaggcttcaccgtcttcaatcaggctcataacggtctgaccactcctcagtcaccggtcccgctgtacgcatcaggcatgagcgtttcgtactatcgcctgggctctaacatgcgcgtgccgctgaaagcctctgcacaggttgttgcgctgggcacttccggcgcgtcggttaaaacgccgctggcctgggattttgtgaacaaccagatcaccaccgcggcggcggccggtttcaccggttctgatattgcgacaactgcagtgacctatgccaatggtgtggcgacagcggtaaccgattcagctcatggcctgactgctggtcagtacgtgaaaatcagcggcgttgttcctgcggcgtacaacggcactgtggtcgtgctgtctgttccgagctcaacgaccttcacctatgccccggcaactgcaccaggcggcgctgcaacaacgcagggcaccatcggcgcagttacgctttccgacatcacgctgccggtaaaagtgctcgccatcgaatcaggcaactccaagactgtcagctatgacagcgcgactggtttcctgacctggaacaacaccgacagctgcgcgctggtcttactttaa

SEQ ID NO: 125894 - DNA, 1605 bp, Enterobacter cloacae
gtggctatttttggcagcgggataatgttccgtcagggtaagttcgtcttcctgatccagcgctcggatgatggcacatggtgccagcctggcggaacggtagagccgggcgagctgcccattgatgccgcgcgccgcgaggtgctggaagaggtgggctatcagtacgatggcccgctcactccacacagcgtatacggcgattatctgacgtttcgcgctgaggtgccggagaggttcgaggcgaagcttaacgacgaatcgctggccgccggatggttccacattgacgatctgcccaagccgcttcatcagcccttcgctgagatgctggcgcagcaggcgctcaatgaaaccgaagtggccgcgctaatcgctgacgggacgctaagcagcccgcaattctttatcaacatgtggatgttcgccatccgggtaaccggaacaggggttacctggcgctctgcagatcaacagatggccttccgtaacccggacgactatctcaccccagagtttctccagcgagttgccggtgtaccgcttatctggctgcacccggagaaaaacaagctcgatagcgatgaatttgcgaagcgtgttatcggcaccctgacgaacagttgggttgcagataatggcgaagtctgggctattgcccgggtgtacgacgctgaagccgccgaaattatggcgacacaacagttgagtacctcgccaaccgtcacgtacagcgaagcgcaggactcaatcatcaaaatcgacggtcagcctctattggtggaaggttccccggtattgctcgaccacgttgcaatttgtgaacagggcgtatgggacaagctccttgcccctactggtgttaaatctgattccattccaaacgaggctgaaaagatggacaaagaggaattgaaggccctaatgcgtgagtgcttggcagacatgcagaaagaaaaggccgactccgacgcgaaagaaaaagctgacgcagaagagcgcgaagctaaagagaaagctgacgctgaggaaaaagaaaaagcggatgcagctgaagctgaagaaaaggctgccaaagaaaaagcagacgccgacgccaaagagaaggccgacgcggaagaggctgaacgcatgcagaaagaaaaggctgactctcagctgcgccaggagatcgccgacctgcgctcccgcatcccaaccgagttgagcgatgaagagcgcaacgaagtcgccgacgcacaggtgaaggccgatagcgtgttctcctgcttcggcaagcgcgctccggtgccgctgtctggtgaaaagccgctggcatatcgccgccgcctgatgatccagttgcaggagcattctcctgacttcaaatccgtcgacctgtcctctatcgctgactcagccctgctgagcgtggccgaaaagaccatctacgccgacgcgcagaaatcagcaagcctgtctgttggccctggcatgctgcgcgaaattaaacgcgctgatgcgaccggtcgccagatcagcaccttcgaaggcgatcctgctgccacctgggctccgttccagtccggcaagcgtcaggtcaccagtttcaacaaccaggcttaa

SEQ ID NO: 125895 - DNA, 825 bp, Enterobacter cloacae
atgaacactttcaccagaacagtgagagatgcggtgaagttctttctccgcaacggctactcgtcccgggaagagctggaacgctggcaggcgattatccgccaggccgccgaaagcgaaacagccgatgactacatggcgatggtcacccgcaacctgacgaaggcatacgacatgcaggtgggccgcgctggcgcgctgaagcgccatcatggcatatcccggttcacgctcaactaccttgagccgaagctgaggacggagctcgacaggcggatcctcgccagcgccgacctaatccagctcaaccgccaaaaagccatcgacaccacgttgtcacggtttagcggctgggccagcagcatcccttcagccgacagcattgcgctgaccggcattcagggaacgatgcgggagacggcagcgcacattcagaaggccgcagagaaggtggactatgaagcgcgccgggtgatgatcgaccagaaccataagctgatagccaacatcgacaacgtgatcgcaacgagcaataacgcgattgcagcgatatggcacagccactggcggcggccgggttatgacttccgcgaggaccacaaggaacgcgatcagctttattacctgatccgcggaaactgggcgcaaaaaaacgggtacgtgaaatccgggcctgccggttacctcgacgaaatcacccagcctggcgaagaggttttttgccagtgctacgtgacctacatctacaacatccgaagcattccagaatacatgctgacccagaaggggcagaagttcatggagtcgatgaagaaagcagcatag

SEQ ID NO: 125896 - DNA, 1422 bp, Enterobacter cloacae
atgaacgaagacgatttcgaaatcggcagctgctctcactcagagttgatggcattgctggacagcgacgacatccagcccggctccacggctggctatcagacctgcaaaacggtttacctctaccacccactgggcggtaagatggtcgatcgcccgattaaaatggcgatgaacgagccgcgcaccgtgcatgttgcccagtcctatggtcttgagcagcgcctgcgcgacgcgttcgaacgcgaatggaaagcgatgggcgctaaccagcacatcgccaacgccgcgcgcatcgcccgaatttatggcgtatcagcgatcgcaatgctggtggataaccaggaaccgaatgaatcgctggattaccgcacgctgtacaagcacaacgtcagctttaacatcctggacccgcttaacaccgcgggcagcatcgtattgaatcaggacccgaacgcccaggacttccagaaagtcgacggcattcgggtggcgggcaagccgtatcacaaatcacgctgtgtcgtcgtgcagaacgaggatccgatttaccttgcctacaacccggcggcgttcggctttaccgggcgcagcgtataccagcgcgcgctctacccgctgaagtctttcatccagaccatgcgcacagacgacatggttgcggtgaaaggcggcctgctggtgacgaaaatcaaggggccaagctccgtcgtcaacaacatgatgcagaagctcagcggcatcaagcgcatgatgcttaagcgcgggaaaacaggggaagtcctgcagatcggcgaactcgacaacatcgagtcaatcgacctgagcaacctggaaaagcctctcgactccgcacgtaagcatattctggagaacacggccgccgccgccgacatgccagcgatcatcctcaactccgagacgttcgcccagggcttcggtgaaggcacggaagatgcccgcgccgtggcggtgtacatcgacaacatccgcgagtggcttgacccgctttacgcgttcttcatccgcgtatgccagtaccgcgcctggagcattgaattcttccagtcgctacgtgctgacttcccggagctgaaaaacacctacagcctgtatttctcgagctggataaacaacttcgaatatcgctggccgtcctccctgaaagagccggaaagcgagaaggtgaaggtcgacgagatacgctttaaggctatcgtcagcatgctggaaacggtgcttccgcagctcacggcggatccggaaaaccgcgcgacgctgatcgagtgggcgtgcgaaaacgccaatgccaacgagagcctattccctcagcggcttaaccttgattacgactcgctgaaagataacccaccgccggagccgccgaaagctgaagagcctggcggcgggatgatgctatga

SEQ ID NO: 125897 - DNA, 1332 bp, Enterobacter cloacae
atggccgacatttacctcccgacgctgcatgacgggcagttaaaggtctggtccgattcctgggaaggtcagctgcatgcggtccggtgtggccgccgctggggtaagaccttcatgctgtccagcgctgccgtgacctacgctacagcgccgtttaagcgcccgggcatggacattgagctcggcggccgcgtcggtatcttcactgcggagtatcgccagtatcaggagatctacgacaagctcgaagaaatcctgctgccgctgaagaaaagctttagccgtcaggagaagcgcctgctgctgaaaaatggcgggaagatcgacttctgggtcaccaatgacaacaaactcgctggccgtggacgtgagtacgaaatcatcctgatagacgaggcggcgtttaccaagtcgccggagatgctgagggagatctggccgaagtcgattaagccaacgctgctgacgacgaaaggccgggcctacgtgttttcaacgccggacggggtggacgaagagaacttcttctacgccatctgccacgataaaagccttggctttattgagcatcacgcgccgacatcttccaacccgttcgttccgccggaagaactggagaaggagaaggccaacaacgacccgcgcgtgttccgccaggagtttctggccgagtttgtagactggtccgccgcttcgctgttcgacgtccgcaaatggttcgagggtgagaatcaggatcagcctgttgattaccctgagatgtgccaggccgtcttcgctgtcatggataccgccgtcaaaggtggctctgagcatgacggtacggcggtggtgtattacgccgtcgacacccggcccgggattcagcgactcaccattctcgactgggatgtggtgcagattgacggcgcgctgctggaaacgtggatgccgtcggtattcgaccggctcaacgagctttccgggcagtgtgttgccattaacggcagcctgggcgtgttcatcgaagacgccggcatgggcagcatcctcctgcagaaaggcgaaagcctgggatggccggtcaacaaaatagagtccgccctgaccagcaaaggaaaggacgagcgcgccattatggcctccggttaccactaccgcggcctggcaaaaatatcccgacacgcctacgagaagacagccgtcttcaagggcgagacagcaaaccatctgcataagcaggtttcccgattccaccttgccgacaagaaagcgcataagcgcgccgatgacctgctcgatgattacacctacgggctgatcatcgccttcggcagcggcgacgcaatctga

SEQ ID NO: 125898 - DNA, 1044 bp, Enterobacter cloacae
atggcaaaaccggactggggagcactgcaagaccagttcctcgccgagcatgccagaacaggtatttcccccaaagactggtgccaggctcagggactgaattacgcatctgcgaaacgctacatcaaggtaacctcgtatggtgcgaaatcgcagaaagaagctgcgaaaaaaaatgcgaattcgcaaaagggaaagggcgagaaagagaccgtaaagccagagcctgaagtgcaaaaaaaaactgcacaagagcgctcagttgctccgttgtcagcaccagatgatttcggactttctgaccaacagatgatatttgcgcagcatgtcgtcgaagggaaaactcgcgtcgaggcatatcgcctggccggttatacgggtacgggaaatgctgcctatgtgacagccagccagctcctcagaaaccctaaggtttcacgctatgtgcatcacctgcgcaatgagcgacagagacgatacgcagcagagcttgatgatgtgatcgggcagctgacagcaatcatcaacgcggaccctaacgagatagctcagtatcgacgtgttaactgccggtactgctgggggagcgagcacaaatatcagtggcgggatattgccgagcaacttgtcgctgagcgcaaagctgaggctgacggtgcgcatcccccggatacatcgggaggtattggatttgtcgataacggcgacccaaacccagaatgcccgcgctgtaatggcgaaggtgtgggagagccattctttgccgatacacgggatctggaaggtgatgctcgctatttgctgcagggtgtgaagcttggcaaattcggtattgaaatcctgactgctgacaaagacagcgctcgaaaagagctgtcccgactaatcctcttgcggaatacaagcgagcgtcaatcgctgctcgatgtagagcgtctcgagttgcagaacgagaaactacgtcacgaaattagtgccctgagagacggcgacaaagataacgcgatcgtcgtacacaacaccctgcagatacctggaagatga

SEQ ID NO: 125899 - DNA, 318 bp, Enterobacter cloacae
atgcaaaagagcagatcgcactggacgcatcgggagcctcggaagatatcaaggttgctgttgcgaacgatgactgtgctcgccgtcctgttcctgatggcgcagttaagcggatgcaacaatacgcggacagtttacgtcagggtgccggtggtgccgctcccggcaaacctgacagctgagacgccttacccggcaatcccggatccgatgtcatggaggcaaagcctggacttgaatgtcagcctgctgtctgctctggggcagtgcaatcgcgacaaggccgacatccgggaagcggaggcgaagaggcagtag

SEQ ID NO: 125900 - DNA, 633 bp, Enterobacter cloacae
atgcgtaagccatcccgccgtaagtgcaaagtatgcggtgaatacttcgtgccgaaattccacgacatccggatccgctggtgctgcccggagcacggcgcaatcctcgcgatggaagagcgtcaaaaggagaaggtgaaagccgcggctaagcgcatcaaggagagcaaagataaagagcgcgcggaacgccgggatctgaaagcgagaaaggtggcgctaaaaacgaaaccgcagtggagatcggaagcgcaggcggcattcaaccggtatgtccgtctgagggatgccggtaagccatgcatcagctgcggcaggctgccggagcagaagtttggtggaacgatggactgcggccactaccgcacccgcggcgcagctgcgcacctggctttcaaccttcacaataccgctgcccagtgtgtctattgcaaccgggatcgggacggcgcgcaaaaagcatttgaacagggccttattgagcgcatcggtgccgaaaaagtcgaggcgataaacaacgataactctgtccgccgattcgacatcccatacctgcagcgcatcaaatccatcttcacccgtaaagcccgcgcggtggaaaaacgccgggcccgccgacaggaggccgcatga

SEQ ID NO: 125901 - DNA, 171 bp, Enterobacter cloacae
atgtctactccactttcccgcgtcatcaccaatgaaatcttccgcgttccggcgcgccgccagagcaagccagcggttaagccgtccgacgtcccgaccctgaaagactacaccgcccgtctggtggatcagaaatggctgcgcctagcggcacggaggagccatgcgtaa

SEQ ID NO: 125902 - DNA, 456 bp, Enterobacter cloacae
atgactcttccagtagacggcatcaaactccatcgcggcaacttcgcggccataggtcagcagattcagccattgctggatgccggccaatgcttccgcctgcaggttaagccgtggcgcgagaaacgcagcctgtcgcagaacgcgctcagccacatgtggtacacggaaattagcgagtacctcatcgcccgcggcaagaccttcgccacgcctgagtgggtcaaggacgcgatgaagcacacctatctcggatacgaaagcaaagaccgggtagacgtcgtgtccggagaggtcaccaccgtccaatccctccgccataccgccgatcttgaaaccggcgagatgtacatcttcctgtgcaaagtcgaagcctgggcgatgaatattggatgccacctgaccattccgcagagctgtgaataccagcagctgcgcgataagcaggaggcctga

SEQ ID NO: 125903 - DNA, 1038 bp, Enterobacter cloacae
atgagcgacatcgacaaacatgccgtccaagcagttgccgatttgaaagctggttacaccctcggtcacgctgatgtggcaatcctgaatgaactggcgcgtattgcgctggcatcgctcgaagcggaggctgtgtgcgttatcgaccagtccaatcttgattatctcaaatctggcgctgatgcagatgtatggccagcatccagaaaagagatgggtgatgtgcttctgtatcgcaccgcccctccagcgccagcaaaagcagaacccgtagcgtggctgtggtcacacagaaaacacccgagtgaagtttctctcattaggccggaagatgatgagagggctgaaggtgcccactggtccggttggagttgtcaggcgctttatgcagcaccgccagcgccggtatctgtgccggatggatacaggttgcagccaatttctgaatatgacgcaatgtgcgccgccatgcttcagggtgcagatggtaccctcaccaatgaaggtaccataccagtcacgcaatttaagccggtagcagacctgtacggcttaacctcaccaactggcggtgaaacatcgttcactttcgacgctgttgaagcgcgcgattttattgatggcgggtggtcatgtcaggagtacgtggaacttggacgctatcaggaagcgctaacggaccattccgagggtgatctcgacatggttcgaccggtaatgtttatcgacggtaatctcttgccgggtgatgcagaaaagctgaaggcggcgattgaagaattcaaccattccggtgaacccaccattatgatcgctggcaactctccggtgattccggatggttgggttctggtgccgattgagcctacagaagacatgatcgtcaatgggttcgaatcagagcctgatgagagcttcagtgacgagaaggagtgggaagcatacgacgccatgagtgggtgccagcaagcagcgcaccgggcgaaactttgctgggaggcgatgatttcagcagcgccaaagccaactgtgcggtaa

SEQ ID NO: 125904 - DNA, 345 bp, Enterobacter cloacae
atgaccataacaatccgtgagcaggtactggccgccctgcgcaacaacccagggctgaacaacgccaaactggcagcgcttatcggcatggacaccaaaaagatatccgggacggttagcacgctgctggccgatgggctgatcagctgcgaaggcaaatacggccagcgcctttacagtctgaccagctatggaatgcgcttcgcccctgacacgataccgggcatgaaacagggcaagtcgaagttaattcagcggacggacacaaacgtgatctgccaggagtgccggaacagtccggcgatgaagcgagtattgatggtttgggggagggtaggggtatga

SEQ ID NO: 125905 - DNA, 771 bp, Enterobacter cloacae
atgcaactgatggcagcaattcagaaccgtgacggcgaggcgtttgcccggatgtccggtagttacgaccccaaaaacgtaatcaacatcgaagctgagaacctggtcgattcgctgtttcgccaactgaagcagatcttcccggcggcatctcagaccaacctgaagaccgacgctgacgagaagacggcaaagcgtcagtggatcgcggcgttctccgaaaacggcatcagaaccagagagcagctatcggctggcgttcggcatgcccgagcaagcgccacgccgttctggccgtctcctgggcagttcatcaagtggtgcaaagatagcggcacggtgcttggcattggcctggctgacgtgatgaatgagttccatcggtatagccgcgaaaaagggctgcataccggcggagcagaagctttcccgtggtctcatgacgtcatgtactggattgttaccgacacgcgcagagccatgtaccagcgccagctgagcgaagctgaaactgaaaaatacgcgtcaaaaaaacttgaggaatgggcgctgaaagttgctggtggggaaaaaataccgtctcccgtcctggcgctcgagaattctgatgaagtgatcccgacgaatcacgtgagccgtcaggccggttatcacccggaaggaaaaagcttcgggtgcatgccaaacgcagcgactctcggggctctgaccccagcccaatggctctgggaagagtatcagcgcgggaaagatagagggcttatccaatga

SEQ ID NO: 125906 - DNA, 795 bp, Enterobacter cloacae
atgtcattaatggtcagagtgatggggatgaaagtagggaacccattgcgcaagcttgttctcctgaagttagctgacaacgccagcgacgcaggtgagtgctggccgtcataccaatacatagctgatcagtgtgaaatcagccgccgaacagtaatgactcatatcgaagccctctgcgactgtaggttgctcaaaaaggagacaaggaaggggccaaaaggaaattccagcaatgtctacatcctcaatcttgatggtgcggcagattcactagggggtgcggcagattcactagggggtgcggcagattcactagggggtgcggcagattcactagggggtgcggcagattcactagggggtgcggcagattcactagggggtgcggcagattcactagggggtagtgaaggagattcacccggaatcagtcactcttttgaaccagtcaaagaacctaactctctctctgggcgcgatggttttgtgagcgaagcagcgaagaccagaatgggtctgccaacaggtagcggaattcctttccccgctcaattcaaaccctctgcagagcatatctccatggctgccgagaaaggggtaagcatcgaaaccgagctgctcaacttccgtgactaccacacagcgcgaggcacaaccctgattgactggaattcagccttccgtgtctggatccgaaacgcccgcgttaaccccctggcatcaaagcgcagccgcagtgagccagaaaccccgcactggaatagccgtgaaggctgggaggacttcctgtga

SEQ ID NO: 125907 - DNA, 222 bp, Enterobacter cloacae
atggaaaccttaacgacacgcaacaaagcggaggcacgacgaattgagagctgggtgcagcggcaaatcgcagatcttgggacaaccaagatcgctgaagtagctggcgtgaacaaatcaaccgtaagccggtggcgggagaacctggtgccgagcatgtcgctgctgctggccatcctgatttctaacagggatggagtgaagggagattttgaagcatga

SEQ ID NO: 125908 - DNA, 843 bp, Enterobacter cloacae
atgagcaaatttggatgtgatatgagcaggcaacttaccgttttcgatgaaacatcacccatgacttttgatgacttcgccagggaaaatggagttacctactggctcgcatcagatttggctatgatgcttggttacaatgggatggatcaaatcctcaaagccattaataaggccacgtcagtatgcgtgaatctcgacattcccgtgtatgacaactttatccagatgccatctgaaaatgcggtcaatgattttaagctcacaaggtttgcatgctatctgactgttatgaatggtgacattggaaacagtaaagtcgctaatgcacaagcatattttgctgggctagcagctgagatacaagcggcgtaccataaccatgacgccgtcaaccgtgtatatttacgtggcgaaatcacatcacgagaaaaaactcttagccacgtagcccataagcatggggttgtagattatggactgttccagaatgccggttatcggggcatgtataacatgaacttacgacaactgaaggccaagaaaggtctttctgacaaagatggcaccatgcttgattttatgggaagtgaagagttggcggctaatatattccgcatcacgcaaactgaagccagaatcaggaaccagaaccttcagggtcagggccagttagaaaatgctgctgagatcgttggtagatcggttcgcaatgtaatgatatccaacaccggtacagcacctgaaaatattaagctttcccaggacaaaatccagaaagttagaagcagcattaaaaaaacacacaaggcgcttgtaaagcacgacaaaaacaagccttaa

SEQ ID NO: 125909 - DNA, 174 bp, Enterobacter cloacae
atggataatcaggataatgagttaagaaaggttgttcaggaacttgctgatgaagaaggcatcagcttttccgatgccctagatgtttcgattaaagcgctgcgttatgaggtagagcgcagaaaatcgtttaacggtgaagctgcttgtgatggctctgcaattacttcttag

SEQ ID NO: 125910 - DNA, 279 bp, Enterobacter cloacae
atggcaagatatattgttcgagttgagttgcgcggcgctgattctgaagactatgaaaatcttcatgaaaagatgaaagcaaagggttattcgcgtgagatacaggatggtaatggcacttggtttaacctcccaacagctgaatatacaaccgtaaaaacatcaactgcatataacgttagagaggaagtcagaggtatagctagtagtgtaaagcaaagctattacgtactggtttccgaagccgcagacacctcttggtacttggctaagaagtaa

SEQ ID NO: 125911 - DNA, 198 bp, Enterobacter cloacae
ttgcccgggcgaaatttcgccttcgcggcgctggttatgaagatgttctctcacctgaatttgaccgttgggatggatattccgttattgtgccaggcgaacttcaatggtctgatgatgatggctcgctacctgacatttctttcgaaaatctccctgaagcaacagaatgtccattttgcaaacgacagccagtaa

SEQ ID NO: 125912 - DNA, 510 bp, Enterobacter cloacae
atgctttcaattcagaggttaaaggaattgtttcactacgatgcagagacagggattttcaccaggctcaaaacagcaggtggaatggttcctggaactatagccggatcattaaatccctttggctatcttcgtatctcaatcgaccacgaaagatatttgtgccaccggcttgcatggttttattcctatggttcatggcccgagcacgaaatagaccacataaacggcataagaactgacaacaggttatgcaacctcagggacgttcctcactgcattaatcagctaaataagctctctccaaaaaacaacacaagcggcgtcaaaggcgtttattggaataagaaagataaacgctggcacgcacgctgctctatcgacggcaaaaaataccaccttggcaatttcaccgaccttaatgaggccagggccgttgtcgttgcagcaagagagcgcatgcacggcaagcatgccgttcatgaagaaagaaaaccggagaatctatga

SEQ ID NO: 125913 - DNA, 285 bp, Enterobacter cloacae
atgaacgcatacctcacttacgaccgcatcgaagatcggcgctgggttgaacagcaactcacagacgagaaagaaaagtggatcgacgaccgggcacagcaaatcatcgacatgatgccaaaagagccgtccggcctcttccacttctcggtcccgattgactccagcccatacgaaggacttcgcagcgatgacgctggtaaggcctacaacgatttcatttcggcagttgcttatgcccaggcggaatacgactgggaacaccggaccggctgcccgttctga

SEQ ID NO: 125914 - DNA, 306 bp, Enterobacter cloacae
atgaacggcggcaatcacacacgggccaacactgaagacttgctgattgctacccgcggcgccgggctggaacgaaagcatgccgggattaaacaggttgtctacagcccgctcggcgcgcacagcgaaaagccatgggaagttcggcgccggctggagcttctttacggcgatgtacctcgcatcgaactgtttagccgaagcgcagcgccaggctggcaccactggggaaaccagtgcgacaccgccgcggttgaattgctacccggctgcgtcatcgacgtcgtgaaaacggaggccgcatga

SEQ ID NO: 125915 - DNA, 222 bp, Enterobacter cloacae
atggctgacatcatcgacaccgcagcagagattgaagagcttcagcgtaacgctgccctttccgctcaccggatcaaccataacgccgtatcagctgagcgttgtgaagaatgcgaagaaccaattcccgagccgcggcgcgctgccgttcccggctgccagacatgcgcggagtgccagagcgtcatcgaattgaggaataagcagagggggatccagtga

SEQ ID NO: 125916 - DNA, 735 bp, Enterobacter cloacae
atgatttttaacggcgagatggttcgcgccatcctcgacggccggaagacgcagacgcggcgcatcatgaaagttcagccgtctgatggattccacccaacacataacggttacgatctggatttaaacgcccactggtacacgcctggcatggtcgataaaaacggatacctgcagcctgcaaagaaagatgtgtttggcgttgctgatgagaatgaaggctatacctgcccgttcggtgccgtcggcgatcgcatctgggtgcgggagccgtggggcgtagtgagtcatgaactggatgaggacggtcgcattcaaccatggagccctgaccgtcctgccacagccattcacgaaatgccgtttggtaatggttactacactggtcacgctatttacgcagcagatggagagtttacttggggtgacgacgatggctatgaagatggccgttcgtgctggaagccatctatccacatgcctcgcgcagcctgtcgcattctgctggaagttaccggcgttcgggtggagcgattgcaggccattacccttggggatatctgtaaggaaatcggctgcggtctttacgacttccgccctgccacttatggctttcaggtgtgggaagatctgtggaagtcgatctacggggaagaaaactggcaggcgaacccatgggtctgggtaatcgaatttaaggtggttcccaatgttcaggataatccagagggttaa

SEQ ID NO: 125917 - DNA, 657 bp, Enterobacter cloacae
atgattgagaatttttcagaaggggaaaagcgctggcgcctaacgctgatcgagcgtcttccaagggagagcggcaagaacaggaaaggtaagttcatctgcgaatgcggaaatgagaccgtcgcagttatcagcagggttaaatctggccttacgaaatcttgcggctgcctgagccgggaggtttccgtcaggctcagaactaagcatggccagcatggttctgaaacttatggaacgtggtgcgcaatgctgtctcggtgcgaaaaccccagcaacgtaaattacaaaaattacggaggtcgtgggattactgtttgtgaccgctggcatgaattcagcgagttctttgctgatatgggtgaaagaccacgcggaatgaccatcgataggattgacaataatcttgggtatttccccgggaactgtcgatgggccactaagtctgatcagaccaagaatcagaggaaaaggagtggctgcacatcaaattgcaaaggggttagccttaccaagcatggtcgatgggaggcgcacatctcaattgatgggaaaagaacctctcttggaagattcgacaccgaggaggaggcgtccgccgctcatcaattagcccgagctaaaagagatgagaaacatgcagagtctgatttctaa

SEQ ID NO: 125918 - DNA, 231 bp, Enterobacter cloacae
atgagaaacatgcagagtctgatttctaacctaccgatttctgatgattattactctgatcgccacggcgcaccctgcaaaatcatccgcgctacccacgaagtcatccactacatccgcaacggtcgcacctgcatcgccagcatgggccgctttcagcatgaattcgagccgctgaccaaagcacagactaagcggatagccgaagaaatcgaaacagcaaacacctga

SEQ ID NO: 125919 - DNA, 378 bp, Enterobacter cloacae
atgaaaaaaggtttactgctcctggctgttctggcgctgtcagcgtgtgatgtgaatgatgcggatgtggccagccgcaacgtcagcaaagccgcggacaatttcgaagctcagcgtcgctttgttttttataacggcattaccggcgaatttatgctggagatcaccggactttgctccaaagacaataccagcaccgatcgtaccctgggcgtcatctgcaagaccgggccgggcgtctacaaaaagcacatgctcggcctatcagataacgtgacctggttcatggaagatctgagcggcacgaacgccagcgtgaaccattatcgcgtcaccttcaaaccttccgtaatcatccctgacatcgatatccgctaa

SEQ ID NO: 125920 - DNA, 801 bp, Enterobacter cloacae
atgccttcactgcgggataccttgctgattttttccgacctggatggctcgttgctggatattcatacctatgactggcaacccgccatgccctggctggacaggctgcaggataaccagattccgatcattctctgcagcagcaaaaccgcggcagagatgctggatattcagcaggatctggggctggaaggcctgccgtttattgccgagaacggcgcggtgattcagcctgacgtgcgctgggacaatatccagcgtcagattagagggatgacgcaccgggatattcgtccgcggatcgagcagattcgcctgcagacgggctttaaactcaccacctttgacgatgtggatgagcacgttattagcgagtggaccggactgacgcgctaccgttcgacgcttgcccgcaagcacgaagcctccgtcacgctgatctggcgcgataccgacgagaacttgcttcagtttgaagaggaactggcgcacagcggcctgcaatgcctgcagggggcgcgcttctggcatattctggacgcccgctgcggtaaagacgtggcggttaactggctgattgaacggtatcgcgagcaggaagacattgaacccaccacgctagggctcggcgacggtcccaacgatgcgccgctgctcgacagcatggacttcgcggtggtgatcaaggggattaaccgccagggcatcacgctacgggacgataatcccgcgcgggtctatcacacccaacagcccgggcctgcgggctggcaggaggggctggatcatttcctgtcctga

SEQ ID NO: 125921 - DNA, 1701 bp, Enterobacter cloacae
gtgcagcgcgatacctttgttgtaagacaaacttttttgcaatggctgcataagcgtagcaatccggggcggattgttaatctctgttttctgatcgttctggtgttttccacgctcctgacctggcgtgaggtggtggtgctggaagaagcgtacatctccagccagcgcaaccatctggatacggtggccagttcgctggacaggcagttacagaacagcgttgacaggatgctgttattccgccagggcatgcatgatgcaatcgagacgccgctggcctttgatgtcctacaggacgcggtgtcacgctttaacaccgtccgcatgctccccacctggcagctcgccgttgataaaaagcgcacccttcccatcaacggggtctcggatgcgttcgtggataaaaccacgcttctgaaccgggacgctgagcgcatcagtcatgaaatttctgccgcgctcgaagtggggtatctgctcaggctggcgtcatcgagagcgcaaacggaagcgcgggtgatctacgtctcccgcgccggatttttcctttccacggatacgccggatcgggcgggtgatattaccgcccgctattataatctggtcacgcagtcctggtttacccagcagtcagaacgtaacaaccgcgcccgcgccgtgcgctggtttatctccacgccttcatcctggaccggggatgaacgcacgatcaccgccagcgttcccatctatttcgatcattactggtacggcgtcgtggcgatggattttacattagacacgatgcagcgtttgctgaccgacgcgacggaagaccggacggagggggagtatcagctgtacgatacccggcttaatatgattgctacctcagcccacgcgggaagcccggttaaccagtttgacgaacgcgaaacggcgcagattgcccaggcgattgagcacgataccggcggcggtatccgcctcgggagccggtttatcacctgggagcggctcgatcatttcgatggcgtcgtcctgcggatccacaccctgcacgaaggggtgcaggacgacttcggcagtatcagcattgtgctggcgctgctgtgggcgctctttaccgccatgctgttgatctcgtggctggtgatccgtcggatggtgagtaacatgtatacgcttcagcactcgctccagtggcaggcctggcacgatccgctgacccgattgaataatcgcggcgcgctgttcgaccgcgcaaaattgctggcggaaacctgtcgtcagcagtcgctgccgttctcggtgattcagatcgatctcgactattttaaaaacatcaacgaccgtttcggccatcaggccggtgataaggtgctttcccatacggcaggcgtgattgccagcgcgttacgcaagaatgacgtggccggacgcgtcggtggcgaagagttttgtgttgtccttcccggtcttggtctggaggaggcgagaggcgtcgccgaacgcattcgttgccgaatcaacagtaaggagatcctggtgaagaagagcacaaccctgcgcatcagcgcgtcactgggcgtcagcagcgcggatgaaacgggcaattacgattttgaacagctgcagtccgtggcggacgcccggctgtatcaggccaagcagagcgggcgtaaccgggtcgtgtggcgggatcaggacaggaaatga

SEQ ID NO: 125922 - DNA, 894 bp, Enterobacter cloacae
gtggctggactgatttactcttttgcacagctcgaggcatttaccgccgtggccgagaatgggagcctcagtaaagccgcggtggcgctgaagaaggaccgcacgacgcttcgcgatctggttgattttcttgaggatgggttgggctatgcgctgtttattcgcgacggccgcaccctgcggctcacgcccgaaggggaacagcttcagcgccaggcgcacctcctgatgcggcaggtaaaagcctttgaggcgtttgccagagaggtgccgcacggtgcgacgcaggacctgacgctggtctacgatcctttcacgcccagagcctttctgcacggggtgattgctgaaatggcggtgcgaaaaatccgcctgagccttatctgcgcctcgcgggatgaatcggaacggctgctggcgaataacgacgcggatctggccatctgccaggcgcgcaaccgcagcgtgggcaacgacatggagtggcgggccctgggtgccatcgagatggatttttatgccgccagcgggctgtttgcggacagtgcttcccctctgtcgctgctcgatctctccctggtacctcaggtcgtcatgcaccccgcctcggacgagccggtggcgcgccgcctgcagatttccgggcataccctctttaccaatgagccggagatgctgcgcggtctgctggagcgcggctgcggctggggattcttaccgacgcattttcacgccgggcagtggcaaaacgtaaaaaggctgcacaccgaagtgggcagccaggggattggtcagacgatggtcaccatctggaagccggggagcgacaagcgcagcacaatcgctgaaacgctgtcgctcttgccggacgtatggaagcactcagcgctgtga

SEQ ID NO: 125923 - DNA, 789 bp, Enterobacter cloacae
atgaaacgcacgtctcgctataccgccagcgcgctggtgctgatgttactgagcgtcaatgcctttgcccaggacgtgaaggtcatgatttccggcggtttcaaagccgccctggaaaagctggcgccggagtatgaacgccagaccggggataaaattgtggtcatccccggcccctcaatgggcaatacgccgcaggcgatcccaaaccggctcgcgcgcggcgagaaggccgacgtggtgattatggtgggcgatgcgctggagaagctcgaaaaggccagccagacccggccgggttcgcgaacggaacttgcggactctcccgttggcatggtggtaaaaaaaggagcggatataccggacatcagcagcgacgcgaaactgcgtgaaacgctgctgcaggccagctccatcgcctactctgacagcgccagcggcaggtacgtcagccaggggcttttcaaaaagctgggcattgaaaaggaggtcgccgataaagcgacaatggtcgagcgcattccggtcgcctcggaagtggcaaaaggaaaatacgccgtcggtttccagcaggttagcgagctgttgccggttcagggcgtcacctttgtcgggaaaatccctgacaatgtgcaatacatcacgcgcttcgcgggtgcggtcactcgtcacgctgaacatcctgacgaggggaaagcgctgttgacctatctcgcctcaccgccctcacgcgccgtcatcgagaagacggggatgatccccgttacgtccggcgatactgctcggtga

SEQ ID NO: 125924 - DNA, 402 bp, Enterobacter cloacae
atgacagcacgcgaagccgtttttccctccggtcgtcaggcgctctatgagcgtaatcgctattcaccggccatcaaatccaacggtttcttgttcgtttcggggcaggtgggtagtcgcgaggatggttcgcctgaacccgatccgagagcgcaggtcaggctggccttcgataatcttaatgctgtcctcgcggctgcgggctgcacgttcgctgacgtggttgacgtgaccctctttgtcgtcgatcccgagtcaaacctcgacgctatctggagtatcctgccagaatattggggggacgcgccttatcctaccttgaccgggatcggcgtgacgtggctgtacggatttaagtttgagattaaggtgattgccaggctggatgcgattcagagttaa

SEQ ID NO: 125925 - DNA, 609 bp, Enterobacter cloacae
atgattaagcttgttggcatgatggattcaccttatgtacggcgcgtggcgatctcccttgagctttatggggttgagtttgaaagccagccgctgtcagtctttagcaccttcgacgcattctcccggatcaaccccgcggtaaaagccccgacgctggttctggataacggaatacgtctgacggattcttcgctgattctgaattattttgaggctcaggccgcccctgagcggagactcctgcccgtcgcgccggatgcgcaggcaaacgatcttcagacgctgggctttattctcgccgccgctgaaaaagcggtgcaaaatgtgtatgaacacaacctgcgcccggtagaaaagcagcacgtttcatgggtcgaacgcattacaatccagctgctggcggcctgcagggaatggaataccttactggaggggcgtcccgccaccgccgttcccgatcaggttaccgtcacgagcacggttgtctggacttttattcagtcgatgatcccgcaggtcgttaacgcagcggattttagaacgattcaggcgtttgccgaatcattcgaatcgcagtcggccttcaaaaaatatccgttcaattaa

SEQ ID NO: 125926 - DNA, 336 bp, Enterobacter cloacae
atgaacgctctgtttgtctacggcacgctgcgcccgggccattctaatgcgcatatccttgaaaacatcggcggtgaatggctggccggtttcgtctccggtacgttctacgaacgcggctggggtgcggcggcggactttcccgggattgtcctccactccgatggaccgcgcgtcgaaggctatctgtttatctctgataacctttccgcacactggcaaatgctggatgagtttgaagacggctatgaccgggttgaggtcacggtgaccaccactgaaggcaagcaggttcaagcctggatttatcagctacagccacattctgagtcataa

SEQ ID NO: 125927 - DNA, 981 bp, Enterobacter cloacae
atgacgcaaaacaacaatagccaggtcagtcaaaatcatgaccctgagcaaattgatttacttgatttaatgctgcaactttggcgtggaaagtggatgatagcaacctttgttattgtttttattgcccttgctgtcggatatttgtttgttgctaaagaaaagtggacctcaagtgcaattattgcgcaacccgatgcggctcagatagcaccctattcaaatgcattgaacatcctttatggtaccgcagcaccttcaatgctggatactcaaacgcgcgctattgaacgttttaatgcatcgctttcagcgttatctcaggcgctggacaatcagtcagagcctgaaaaacttactatcgagcctgctgttaaagggcaagcgctgccattaagcgtcacctataccagtacatcagcagaagcggctcaaaagcagctagcgcagtacattcagcaagtcgatgagcagaccgcaaaagaactagcccttgatcttaaggacaatattaaggagcagatcaaaaccctgaatgattcactgcaaaaccaggagaaggtcgcgcaggaacaaaaagatctgcgtatcaaacagattgctgaggcactgaaaaacgctgaggcagcgaaaattacttcgccacagctccagcaaacccaggatgtcacacaggaaacattattcctgcttggcagcgaagggcttaaatcgatgattgacaacgaagcatcgcgcccactggttttccccaccgcctattatcagaccaagcgaaatctgctggacatccagaatctgaacgtaaacccggacacaatccacgtctatcgttacgttatgaagccggatctgcctgtccgccgtgacagcccgaaaaaagctatgattctggttctcgccgtgctacttggcggaatgattggttcaggtgtggtactggggcgtaacgccttacgaaactacaaaccaaaagcctga

SEQ ID NO: 125928 - DNA, 1065 bp, Enterobacter cloacae
atgatcgcaaaaagaattccgggggttgaggtattaagagtctttgctatatttatggtggttttgatacattcaactccggagtatacgaatggttcgggaacgaacttggctgcactaatcctacagtcagtatcacgtgcaggatttatctctttttttctaattagcggttatttcgcccttaacgaaaaaatagttagcttgaagaagtattattacaacagagttgttactatagttatcccgtttttattctatgcttatattcattacttcatggtgcattatgactttggccgagccgctaatgctctgtcaggtttcttttcaataaccactctggcggattttctacatgcggttattatcgggccagcttttaatggttcaatgtttgtttcgctacacttctggtttatctactggatagtgggtgcctatgccgtggttccctttgttggttatgttattcagcgtatagagccatcttcaaggctcaagtctatcgcttttttgcttggtgttagctggttgcatctctatgttaatcgctatttcccaaatgctaacattatctctattccttttattgctgatggttggttcgtttattttctaataggtgggcttctgtacggtttggaactcaataagtatagaaaatatgcattcgtgtgttgcgctattggttatgtgttgactgttttcttgacttggttcaatttttccatgttgagtatttatcaagcaccttatggtattgacattaacatggtgctttgcgtatgcggattctttataattttccaaacgcttcgcgaaagttttttaacgacgtgggttgcgaaagcatcgaaatacacctatgggatttatttgactcatgtatttatgatgtattttgtaagcggctatacgaaaacggctacgagcagtgttattgcaaattctgtgttgacggctgtggttgcttttacactggcgttaattttttgcttcattttcgataacctatttatttttaaattgatcagaaaattgaagttaagtaatacttattaa

SEQ ID NO: 125929 - DNA, 1428 bp, Enterobacter cloacae
atgttgaattccaaacttgtgattaaaaacagtaatgttgcgtttggaacaagcggagcacgaggtctggttgtcgatttcacacctgaagtctgtgctgcatttgcacacgcatttattgatgtcatggcgcgcgattttacctttgatactgttgctttagctattgataatcgcccgagcagttatgctatggctaaggcctgcgctcaggcgattattgctaaagggttaagagcggtttattacggagtgatcccaacgcccgcgttggctaatcaatcactccaggatagggtcccagccatcatggttaccggcagccatatccccttcgatcgcaacgggttaaaattttaccgtccagatggtgaaatcaccaaagccgatgagctcagtattctgcagtgcgagtccgcttttcgcctcgaactaccattacttgaattgacaacgtcgtcgctggccgccgataactacatagcgcgttacacctccctgtttgctgctgatacgctggcaggaaagcgagtaggtatttatgagcactccagcgctggtcgagagctttatgccaaaatatttacccagcttggggccgaagttatcagcattggccgcagcgatgaatttgtaccaatcgacaccgaagctgtttctgaggaagataaagagaaagcccgtgaatgggcgagtgagcttaatctcgacgctatcttttcaaccgatggcgatggcgatcgccctcttgtggctgatgagcagggggaatggctgcgcggtgatatcctgggtctgctatgtgctaaggcgctgggtattgacgcactcgctatcccggttagttgtaatacggcaatagctaaatccggcttgtttaagcatatcgagctaacaaagattggttcaccttatgttattgccgcttttgccgggctaagcatagactatgatcgcatcgctggctttgaagctaatggtggttttttattgggtagcgacatcacatttggtgatacgacgatttccgcactgccgacacgtgatgccgttctgcctttcctgatggtttttgccagcagcgttaccgcgaaagtactgatgtcggatctgttacacaatctcccacagcgttttactcattcagaccgcatccagaacttcgctacggcgctgagcaaagaaatcatcgctaaagccttacatgacccgctcgactttgtacattctcttggttttaacctcggaattaaagtcgtcgattccacggatggtcttcgactcactctcagtgatgattctgtaatacatttgcgcccatcgggcaatgcacctgagctacgctgttatgctgaaagttgcagtgttttttccgctgtagcattggttgaaaatatacttgatcagctaaaaaaactatctatctaa

SEQ ID NO: 125930 - DNA, 1422 bp, Enterobacter cloacae
atgaaaatattgcctgttgttatggctggaggttcaggaacacgtctctggccgctttcacgctccctgtatccaaaacaatttttgtcattagttgatgatgcttcattgttgcagagtacactcttgcgactcgaaaacctcgattgcaccacgcctcttattatcagtaataacgagcaccgatttatcgtcgctgaacaattgcgccaggcaggaattgttgactttgatattattcttgaacccatggggcgcaacactgcaccggctattgctctggccgcactccatgctttaagagatggcgatgatcctattatgctggtgcttgccgccgatcatgttattcaaaacgttgatgcgttttgcagtagtgttactttggctcagaggcaagcggtggatggaaaaatggtgacctttggcattgttcccacgcatgctgaaacgggctatggatacattcgacagggtaaggaagtgctcgagtcggtctttgaagtcgatgcttttgttgagaaacctgatcagtctactgctgaagcttatctatgtgacggccactatctttggaacagtggaatgttcatgttcaaagcaagtgtctatttgtcagaactggaaaaattccgtccggacatactcagtgtctgtaagaaggcaatgtcaggtgcctcgtctgatcttgattttatccggcttgaagactcggtttttgccgcctgtccggatgaatcaattgattatgctgtgatggaaaagactagccatagtgttgttgtgccaatggatgctcaatggtgcgatgttggttcctggagttcgctgtgggatatttctaccaaagatgacaatggtaatgtgacccatggtgatgtgatctatcacaatagcaacaataactatgtctatgctgaaaattcgctggtcgccacaattgggacggatgatcttgtgattgttcaaactaaagacgcattgctgattgcgaagcaggatcaagtacagaatatcaaaaaagtcgtcgatgtccttaaacgtgaaaaacgtagcgagcatatttcacaccgcgaagagtatcgtccttgggggcgttacgattccgttgatcagggggggcgctatcaggttaaacgcattaccgttaagccgggtgagcgtctctcgacacaaatgcattaccatcgcgcagagcattgggtggtcgttgctggtacagcgaaggtgactcggggtgatgacgttttcctggtatcggaaaatgaatcaacgtttattccggttggggtcgtccatactctggaaaaccctggtaaggtgccgttagaagtcattgaaatccagtccgggacctatcttggcagtgatgatatcgttcgattcgatgataaatatggacgcattaaggataataaataa

SEQ ID NO: 125931 - DNA, 1107 bp, Enterobacter cloacae
gtgcgaattctcgaggtaagtaagttatatccccccttctggggtgggattgagacggttgtgtacgatatatcaacggtattaaaacaagaaggttacgacgttgatgtattatgcgtttcggaaaaaaatcagtcttctgaagaagttatcgatagcgttaaggtttatcgctgtgccagtattgcccatttggcaagtacttatttatccttcgaatttattaaagtctggaggaaaattagaaataactatgatgttatacatgttcacttaccgaatccacttgctcttctcgcttttttcttatttaaaccccataaagaatgtaaaattatcgtccactggcacagcgatatagtaaaacaaaaatatttgaaaattccttttatccctttgcaaaacgatttgcttgctcgctgtaataaaatcatcgcaaccagccaagtttatgccgacgcttcagaagatctcacaaaatacctttataaagttgaagttattccgatcggtattgacgaagataaaatggtcgcttcacctgacgctgtcgaacagattaaacagcgctatgccggcaaatttgtgatcttctctttgggtcgacacgtctactacaaaggttttgagtatcttattgaagcggctagactaatggacgaaaactacattatcttgctgggtggacagggcgagttaacccctgaattgaaagcgagaattaaagagcataaccttgaagatgtcgttaagttgctggggcggatctccgctcatgaactgccagcatactttagcgcagctgatgtgttctgtctgccatctgttgaacgctccgaagcttacggtgtcgtgcaacttgaggcgatggcttgtggtacaccagtaatctcaaccgatattaaaggctctggtgtcgcatgggtcaataaacatggtctgactggcctggtggtcccggtgaagaatgcacatgcgttagctagtagttttaattatttgcgtgagcatccaattaatagaaaccaagttcatgagtattttacacagcattatactaggtcaaaaatggttaattatttcatcaaggtcgtagagggagcataa

SEQ ID NO: 125932 - DNA, 1131 bp, Enterobacter cloacae
atgatcaaagaaaaattactgtatatctcaatgtctctggaaaagtctaattatggcggaagcattgtatctcgagcaaatttaaaagctctgaaaaccaacgaacgtctagagattaaagagatcgcgatcgtcaggaaagaggagggtgcttacgaatgggaaatgctggcgaagaattcaaaaatacagacggctctcaacaatttacgcggctacgctggtaggctcaatgctgaaattttcagcagaattaaaggaattattcatgagtatcagccaactacgttatatcttgattcaagcctgctgggtagcgtggccgaatggtgtaagagcgcgtacccaactatcaagattttaacctttttccacaatgcggaagtggatttcgaaaaagatcgccttaagagcggcaaaattcagtttctaccgtcgctattctcaaccgtatccgctgaaaaaaaagcagtcaaatatagtgatctattgattacgctgcatgaggcggactcggatcgtctctttcgtctttacaaaagaaaagcagacttttgcgtacccgtctgcattgtagatgaacaaattgccgatgcggtgctgtatggttctgaagccacacagtcgagggtgtttaccgttggttttatcggaactgcgttctatgctaataccgaggccgcacaatatatctctcagcatatcgcacctgcatttattgacgatagacaaatacagtttgtgatcgctggaaacggatttgaagcgtatgctacaaagcttgataagcctaaccttaaaacttacggttacgttgagtcgttagcggatttttatcagagtgttgatgtgattttatccccgatctccattgggggaggtatgaaagtaaaagttgctgaggcgcttaaatataataaaaaggttatcgcatcatctttcaccttgattggctatgaacagtcactcgagagtccggatatcatcagctgtaacagcttgtccgaatataaggtcgcaattaaaaaattaagaaacatgcaaactacagcatctacaacaaggaagcttttccttcaatattactctgatagtgcatgcgcagagtattttaaaaagatatttcaataa

SEQ ID NO: 125933 - DNA, 1320 bp, Enterobacter cloacae
atgaataccaatatgaatggaattgaaataagcgctccgggtagaggaaagtatgtatttgcatcaatgtgcttaatgataattctcctgtcgatgaccctgaacgatttaccggtgcaggcgtttttaggcatgctgggtgccagtccaatgtgggcagcgtcagcggttatctttatactatttcttattcaaaataaatttcgtctgtacttagataagtacagccgactttttatgttctattttttgctgacgttttgcatctcgcttatccagtgtgtctggtactatatcgttgaaggtactatattaaattcttacggagtgtctgtactcagtaagcatatctttgcctcttcttattattttttctattttttgactgtttattgtgcaggctatgttctacgctccgtaagcggaacgtttttgagcaaaacggttattttaatcgcgtttattatgacattgattattgttatagaattcgttgcgcctgatgtacttgcaccgttccaccttagcatggaaggctatggtgtgggatcgcgacagcggttgctctcgcccgaaccgtcaatagccgcttttacgtttaatatatttttactgctggcgattaccctcagcaaagttaacctggtcagactcattctttggggggcgctgctagcgggtaacatgttgattggctcaaagtcctcattggtgctgatcatgtttggcggactgctggtattctatttcaacatgacgttaattcagaaattaaaatcactgtttgcactcataccgattgcagggatagtcatttatactattattcatacagtgcttcctgcgttgatggttgatattgaaaatttcaccagcgttagcacacggctgatcacctcgctatgggccgtctgtagtttattctactatccccttggtgaggggtatggtacctacactgcatggttcgtgcacccactagaggcagcgatcagcataggcaagaatctggctccgttttcgcttaatctgtccgaaattaatgatatgatcgatacaggtaattatctttcggcaaaatcaggtattctcttttcagttattcatagcggctttatggctgtcattttctactttattgtttttagaaatgcttttctggacgttcaggagactaatgcaggttactaccaaaaaatattgctgcggataacgctttggtactcgctgctatcaattttgttcgctgttaatatagaggttttatatgcgtttctattgccttttattgtcgtaaattatctaaaaacaaattcatag

SEQ ID NO: 125934 - DNA, 816 bp, Enterobacter cloacae
atgaaagttaatattattgttgctctttattacccccactattatgaaaaagtgagaaaagagatcttctctatttttgctaatgagcattttcatattttatttgtagataatagtggtaagctgatccctgaaaatgagcctgcagcgaatgtacagtggctcaagggcagcaatgtagccggagaattctctgcatgggatgaaggctacactcttcttacgggtgatggaacaatagacaatgatgatatcattttgtttatgaatgatactttctgtcaccatcgcttctttaccttctatgatagaatgctctaccgcaaggcggttgcacactgtaccgtgaatggtttctatggcgagttaaacagtaccagaacagcatttaccatcaatcagttgccgttaaccgcatggatctcttcctacgtatttctgagtcgaagagaaaatatcgataagcttatgcctttaaataatgtacagacaatagatgatcaagaatttgtacagatcaacgacggtcttaaacagcgtagggtcaatgtgtctttcttctcggaaaatctcaatcagcatcttagccattggcttttccctataaacagaaatggttggtacaatgcgggtaaaagctctccagcaattctactatttaagctcaaagccattataaatgaaaagctgttgagccataaggcactgataaatggtctcactgtaaacgatatctatcagggtaaactaaacagaatttataactcgctgcgcaacaggctctacactttttgcaagcgccataaattagtataa

SEQ ID NO: 125935 - DNA, 1263 bp, Enterobacter cloacae
atgagcataattaagaatagcatctggaacttggtgggatacgtaatcccgtcgcttgtcgctatacccgctctgggctatatggcacacaaactagggcctgaactttttggtatctacaccatcgcaatcgcggtggtaggatatgcaggcattttcgatatgggattgactcgcgcaattacccgggaaattgctatttatcgaaataacagcactgaacggaaaaaaatcattgccagcgctaccgtattcctattggcgctaagtacgctaggaggatgtctggtactgatcttctctgcttctatagtgcattttctcaacataacagctgctgattttgtcgatatcaacaactcctttaagttactggcactgacaatcccgatatttttactgaatcagctatggatagccattcttgagggcgatgaaaagtttaaagcagttaatattcaaaagtcatttagcagcacattcattgctggaatgcctgcgctatttgtcatctttgatggaacgcttctctcagcgatagcagggctgcttatttctcgcatcatttcgttgctgatagcctttctgctggtacgtaacgaaatagttcagtcaggaatgcgcctcgacctcgtcacttttaaacggctaattttttttggcggctggatcacggtcagtaacattatcagtccagcgatggtctattttgatcgttttatcatttcaaatatgttgggcgccaggcatgttgcttactactctggaccttcggaagccattgcccgtttggggatcttgcctgccgcagtaggcagggcaatcttcccaaaattaagctgcgcgggacataaagatgaattaaaaaggaatatgacagtctcctggctactgatgtttgccgtctgcgcgccggtagtgattatcggaatagtatttgcagaaaacattttacatctgtggttaggcacaagctacgcggcacattcaaagaatattttgattatcttactggtaggtttcttgtttaacgcgcttgctcaggttccctttacggcaatccagtctgcaggtaaagctaaaattactgctttgctccactgtgttgagattataccctactttgtaatgctctatttttttgtacagcattatgggctgattggtgttgcatttgcctggagtattagggtcatcgtggactggataattctgacgattattagccaaagcttgctgaaacgacaactgtgcacaatttaa

SEQ ID NO: 125936 - DNA, 558 bp, Enterobacter cloacae
atgaacgtgattaaaaccgctattcctgacgtgctgatttttgaaccgaaggtatttggcgacgatcgtggcttcttttacgaaagttttaaccatcgtgtttttgaagagacagtaggccgccaggtagagtttgtccaggataatcattcgaaatccagtaaaggggttctacgcggactgcactatcagttggctccgcacgcgcagggtaagctggttcgttgtattataggcgaagtctttgatattgcagtagatatccgtaaatcgtcaacaaccttcggtcagtggataggagtaaatctctctgctgaaaacaaacgccagctctggatcccagaaggttttgcacacggttttctggtgctgagcgagacggcggagtttgtctacaagaccacggactattaccagccgcagttggagcgcgccgtaagctacaacgatccgcaactcaacattcagtggccgtttaatgtcaatctcaagctctcgcccaaggacgaagccgctccacagctgaattctattccggtgaatgagctttttatatga

SEQ ID NO: 125937 - DNA, 147 bp, Enterobacter cloacae
atgccgtcagggaagaagatgtccgaacgcgtgaatttgataatttggtttatgctagtacaaacaatttacaattcatatggtgaccgctcagaatttgacaacacagacttattaaatacttactccgtgaaaaaaaacgggtaa

SEQ ID NO: 125938 - DNA, 501 bp, Enterobacter cloacae
atgatgaataaaattttggtaagcgcgtgcctgatgggcttcagggtccgttataacggaagtgaaaaagcgcgaatgaacgagcaactcgctcgctggcaactggaacaacgtctggttatccactgcccagagcttgctgccgggctgcctgtaccgcgtcctccggcagagattatattcgctgatggcaaagacgtgatgcacgggcaagccagaattatggaaaataccgggcaggatgtgaccgaacattatcagcttgcagcctggctcgcgctacgcgctgctcaggcgtcggggtgtagcgctgcattgttaaccgatggcagcccaacgtgcggcagtgagtttatttatgacggatcgtttcgcggtatacagaaagcggggatgggggttgcggcgtcgttgctcgctgagaatgggatcgccgtgttctcagagaagcaaatcgacgaactcattgcctggattgaggagagagaaggcaaaaaataa

SEQ ID NO: 125939 - DNA, 1074 bp, Enterobacter cloacae
atgaactatttaaatacaacagctatcgctgtttttggttttgtgttcgctggttcaatgaatactgcatatgctgcggaagtaaacgtaaaccttgacgataacgtcaataatccaggtgctcacattcaaattcagggtaccgataaaaccgcctataaccttgatcacatcgaggggagtaacattaagcaagacgggcaaatctataaccttcagggcgatattgacagagcaaatacagctattaataaagcacaagatacagctaacaccgctcaagatggcgtaaacgctaacactcaagctaacgctatccttaatcagaaagtcgacgataacaaagcagatcaaacaatcattgataacaaacagaatatattgattgataacactaataataaagcagatgcggctttacaaggcgttattactaacggtcaagcaatcattgatacaaacacaagagtagataaagctgaactcaccgctaccaatgcgaacaacaaagcagacgctaacactcaagcgctggcaggtaaggtagataaaagcattttcaacgccgatcaggatagacaagatcacgcccttcagcatgcctctgacaaagcgactcaggcatttaatacgggcgcttatgcgcaatctttagcggttgatgcacaaacggtagccgctgctaacaaagctgctgttgctaacgttcagtcacgccagcaaacgcaggaaacgacgattcagaatcacagcgcacaattagcgaatcatgaatcacgtattactgcgttagagagtcaaaataacgcgaagttctcttctctggagaatcagcagaatgaggatcgcaaggaatatcgtgctggtatcgctggcgctgcttctcttgctggtttgcattacgttgatacagataacgcggttgccgtcggtgctgccaacttcaaagatgcgcaaggttacgcagtcggttaccgtcataagttcgctgagaatatagccgctaccctctctacatcaggtacatccaacggtgatgaaattgttgcggcgtccgcatcttacggatggtga

SEQ ID NO: 125940 - DNA, 147 bp, Enterobacter cloacae
atgaataagcctgtctctgatgctgcggaatatctgctttcgaaaggctggaagccaaataagggttcatggcacaagggtagctatattatgcagctggttgtcgaaaaagagagagttgtaaacgcacaattatcaaaaatgtga

SEQ ID NO: 125941 - DNA, 2181 bp, Enterobacter cloacae
atgtcgtcttctaaatcagacaaatatagtgctgcgacaccgcagaataacgaaatggatctcattcagttgcttgctgagatgttcgatcaccgggtaatgatcgcgtgcgttacgcttctgtttacggtatgtgcggggatctacgccttcagcgtcacgccggtttatcaggccgatgccctggtgcaggtcgaagcgaagcagggcaacgcgctgctcaagaacctgacctcgctcagatccgatctctcacccgatgtcgctccagaacttttactccttaaatcacggatggtcctcggacagaccgttgatcggttagggctgacctacgaggttaataggcgcttgttccccgtcattggggctttctgggagcacgttcacgggcgcaaccccgctgaaatcacgattggctcgctgaatattccgtctgtggagggggatccacaaacgcttttactcactgttctcgagcaagggcgatatcgtcttgagggacaaacgcttgaggcagaaggcattgttggaaaagcgctacttaaagagggcgtctctcttctggtgacctccctcaatgcggcaccgggaacccagtttaccctcaacatcgttaccaggcttgaggcgatcaacgccattcagagcagactgacggttgtggagtcgtcgaaacagagtggaatgatcgccttaacgttaacgggtgacgatcccggcaagaccgctacggtacttaatacgattgccgaaaattttctcagccagaacattgcgcgccaggaagctaaagattcccgtagcctcacgttcttacaggatcagttacctaaaatcagtcgcgaactggatgaagccgaggcgcgactgaatgcttatcgagagcaaagcgattcggtcgatttatctcttgaggcaaagtcggttcttgatcaggtggttaacgtggaaaatcagcttaacgagctgacgtttcgcgaggcagaagtatcccagctgttcaaaaagggccatcccacctaccgtgctttactggagaaaaaacaaacgcttgagcgggaacgcgcgcgcctgtatagccgcgtctcctccatgccatccacgcagcaggaaatattacgcctgagtcgtgatgttgaatccgggcgcgccgtatacatgcagttgctgacgcgtcagcaagagctgagcatctcgcgctccagcgctatcgggaatgtgcggatcatagacccggcggtgacgcagccggcccctgtcaaaccgcgcaaagccctcatcattctgtttggtatgatgatagggctgctcctctctgccggaacggttttagtgcgttccgccttcaagcggggcattacgtcgtcagaacaactggaagagttcgggatgccgctgctggtaacgcttccgcgctcggtatggttatggaaaaaaacgcacctgcgcaggagaaacctgtttacttcccactggaagcacaggatatccaacgtgcctttcctgcccattgaccgtccggctgatacgtttgtcgaggcgatgcgtgggctgcgcaccagtttgcattttaccatgatggataccgcaaaccgggttgtcgtggtgtctggccccacgcaggactgcggaaagacgctggtcagtacttcactggcgtcgattgtggcacaggccggacagcgggtgctgtttgttgatgcggatatgcgcaaagggtatgtccacaatgtgttcaggctgaacaatcatcgggggttgtcctgcgtgctcgacggaaccgttgagtggcaggaggcggttcaacgctttgagaaaggcggttttgatgtactgacctgcggaccccaacctacgcatcccgttgacctgctcatgagtgaacgcttccaggatgtgatggcgcagattgaaaagcggtatgacatcgtgattatcgacactccacctgtgcttgccgtgacggatgctttgctgatcgccagagcagctgccactacgctgctggtcgcccgctttggtaaaaccagcgtgaaagagatcgagaccagccttaagcgtatggaacggatgaacgtaaaggtgaatggcgtgatccttaatgacattgtgaaatcggcggcgctctattacaactcggggtatagcgcttacgactatggctatacccgggagtaa

SEQ ID NO: 125942 - DNA, 1050 bp, Enterobacter cloacae
gtgtcagataagaaagttatttcggcggaagaggcaaattatcagcttgataagcgcgtggaaatttttccgctgacgccggagtggattgaaaaactgcgcccgcccgtgtcgaaatctcaggcaaatcctaatctggacaagcagatcaaaaactgggaataccgtattggtgcaggcgacattctgacggtcaccgtctgggatcaccctgaattaacaacgcccgcaggacaatatcgtagcgcgagcgatacaggcaactgggtcaacgctgacggtacgctcttttatccctatgtcggtaaactgcgggtggcaggaaaaacggtttcacaggtacgtgaagagattacggctcgactggatagcgtcattgagagcccgcaggtggacgtcagcgtagcctccttccgttcacaaaaagcctacgtcaccggagaggtggaaaaatcgggtcaacagccgataaccaatattccgctgacggtgatggatgcgattaacgccgcgggtgggctctcggcggatgccgactggcgtaacgtcgtgctcacacacaatggacaggacgcccacctctcactctatgccctgatgcagcatggcgatttgacccaaaataagctgctttatcctggcgatatcctgtttgttccccggaacgacgcgctgaaagtgttcgtaatgggcgaggtggtgaaacagagcacccttaagatggatcgtagcggcatgacgttggccgaggccctgggcaatgccggggggcttaaccaaaatatggccgatgcaaccggcatttttgttattcgccaggtatcgaaaaaaggtgacaccgacaaaatcgccaatatctatcagctgaatgcggaagatgcttcagccatggtgctgggtacggaattccagcttgagccgtatgacattgtctacgtcaccacggcaccgctatcgcgctggaatcgcgtgatctcccaactggtgcccaccatcagcggcgtacatgacctgaccgaaaccgttcgtaacatcagatcgtggccgtag

SEQ ID NO: 125943 - DNA, 1395 bp, Enterobacter cloacae
atgaaaactttcccggacgattttttatggggtggcgcggttgccgcgaatcaggtagagggtgcgtatctggaggaggggaaagggctgtccacctctgacgttcagccgcagggtgtcttcggcccggtagttgagcgcgtccctggggacagcggcatcaaggatgtcgccatcgacttctatcatcgctacccggaagacatcaagctgttcgccgagatgggctttagctgcctgcgcgtctccattgcctggacccgcatttttccgaacggtgacgagcagcagccgaacgaggcggggctggcgttttacgaccggttgtttgacgagctggccgcgcacaacatcacgccgctggtgacgctgtcgcactatgaaatgccgtgggggctggtgaagcagtacggcgggtggggcagccgtcagactatcggcttctttgagcgctatgcccgtaccgtgtttgcgcgctacaaagagaaggtcaagctgtggctgaccttcaacgagatcaatatgtctctgcacgcgccgatgaccggcgtcggtctgccggaaaccagcagcaaaggggaggtgtaccaggcgatccaccaccagctggtggccagcgcgctggcggtgaaggcctgccatgagattatcccggatgccagaatcggcaacatgctgctgggcggcctgatgtatccgctgacctgcaagccggaagatgttctggagacgctgcaggaaaaccgcgcgtggcaattctttggcgacgtgcagtgccgtggcgcctacccgggctatatgcagcgcttcttccgcgacaacggcattcagctagaggtcactgacgccgaccgcgaggcgctgaaatctaccgtcgattttatctccttcagctactacatgacgggctgcgtcaccgcggatgaagccctcaaccagcaggcgcgcggcaacatcctgagcatggtgccaaacccgcatctggccagttccgaatggggctggcagattgaccccatcggcctgcgtactctgctaaacgtgctctgggatcgctatcagaagccgctgtttatcgtggaaaatggcctcggggcgaaggataaaccggacgcagacggcgtggtgaaggacgactaccgcatcagctaccttaacgaccatctggtgcaggtgcgtgaagccattgaagacggcgttgaggtgatgggctacaccagctgggggcccatcgatctggtaagcgcatcaaaagctgaactctctaagcgctacggctttatttacgtcgatcgcgatgacagcgggaaaggcacgctggcgcgcagccgtaagaaaagtttctactggtataaagaggttattgcgacaaaaggcgcttcgctgaaagtttaa

SEQ ID NO: 125944 - DNA, 1854 bp, Enterobacter cloacae
atggaataccaggcgttagcgaaggatattctcggccacgttggcggaaaagagaacatcgtcagtcttgtgcactgtgcgacccggcttcgcttcaaactgaaagagaatcaacgggcggatgcggaagggctcaagaaaaacccgggcgtgatcatggtggtcgaaagcggcggccagtttcaggtggtgattggcaaccacgttcacgacgtctggcaggcggtgcgcaatgaagcaggcctgaccgacgatgcccctgtcgtggaagagaagggcgaaaaggggaacctgctgggccgcctgattgacatcgtctccgggatctttaccccgtttatcggcattctggccgcgtccggtattctgaaggggctgctggcgctggccgtggtctgcggctggctcacgaccgagagcggcacgtataaaatctggtttgccgccagcgatgcgctgtttttcttcttcccgctggtgctgggctataccgccgggaaaaagttcggcggcaacccgtttattaccatggtgatcggcggggcgctcacccatccggtgatgattgcggcatttaacgccagccagcagccgggggcggtatcggaagcctttttgggcatccccgtcacgtggttcaactacagcgcgtcggtgatcccgattattctcgccgcgtgggtcagctgctggctggaaaaacagagcaccaggctgctgccttcctcgatgaaaaacttcttcgcgccgctgatctgtctgggcgtgaccgtgccgctgactttcctcgttatcgggccgctggcgacctggctgagccagatgctggcgaacggctatcagactatttacgttctggcaccgtggctggcgggcgcggcgatgggcgcgctgtggcaggtctgcgttatttttggcctgcactgggggctggtgccgctgatgatcaacaacctggcggtgctggggcatgactcaatgctgcccatgcttttgcctgcggtgtttggccaggtgggggcggcgctgggcatttttctgcgtacccgcgatgcgcgtcagaaaatgctggccggttcatccgtgacggcaggtatttttggtatcaccgaacccgcagtgtatggcgtaaacctgccgctgcgccgtccgtttatctttggctgcgtggctggcgctatcggtggggcgattgtcggcttcagtgacacccacgtttactccttcggcttcgccaatatctttaccatcgcccagatgattccgccgggcggcgtggacgccacgctgtggggaggcattatcggcacggtggtggcgctggtgctgagctgcggcctgacgctgctcgccggtatgccaggaaacaccgcgccagagaatgtggtctccgcgggcgaaaacgatgtgctatcgccgatgaccggtaccgttcttgctctcgaccaggtgccggataccacgtttgccagcggcctgctgggcagcggcgccgcgattattccctccgataacaaagtggttgccccgtttgccggtgtggtggcttcgctgttccagaccaaacacgccatcggcctgctcagtaacagcgggattgaagtgttgatccacgtgggtatcgacaccgtgaagctcgacggcaggccgtttaccgcccatgtgaaggtcggtgacaaggtgcagcccggcgatctgctgctggagtttgaccgacaggcgattatcgatgccggatacgacctggcgaccccgattattatcagtaacagcgacgagtatcgcgaggtggcgaccgtggcggcaacgtccgtcattgccggtgcgccgttactcagcgtcagtcatcaataa

SEQ ID NO: 125945 - DNA, 834 bp, Enterobacter cloacae
atgaaaatcgccaagatactcaataataacgtggtggttgttcaggatgagcgcgggcgcgaacaggtggtgatgggccgtgggctggcctttcagaagcgcgtcggagaagcgctggataccgcgcgggttgaaaaggtgtttgcgttacaaagcgatgaactggtgcgtcggctcggcgagctgctgagtcagattccgctggaggtgatgaccacctgcgaccgcatcatcgggctggcggcgcagcggctgggcaagctgcaggagagcttgtatatcaccctcaccgatcactgctactttgcgattgagcggcagaagaacgggttggccatcaaaaacgtgctgctgtgggatattaaacggctgtatccgaaggagttcgaattagggcaggaggcgcgggccattatcgccagacgccttaacgtcgaactggaggaggatgaggccggttttatcgcgctgcatctggtcaccgcgcagcttaacagcgaaatgccggaggtgatgcacgtgacgcgggtgatgcaggagatcctgcagctggtgaagtatcagctgcagcttgagtatgacgaagagtcgctcagctaccagcgtttcgtcacccacctgaagttttttgcccagcggatgctcagccgcaccgtggtggaagatgacgatgtctcgctgcatacggcagtcaaagacaactacgcgaaggcgtggaaatgcgccgagaaaattgcgcagcacctgaacaaaagctaccagcgtgagctgacaaccgaagaaattatgttcctcgccattcatatcgagcgggtgagaaaagaggggcgttaa

SEQ ID NO: 125946 - DNA, 1347 bp, Enterobacter cloacae
atggcatataaaaataaactctatgcgttcgccttattggcgatatccccgctgtcgatggcgcaagactggaacggtacggtattagggttggaagctccgccggagcctgtgctgggcgaaatgctcggcatacgtaaaatccttaacgataacggttttacctataacctcggatacctgaatgaaattggctggaacggcggtggcggatataaccacgactcccacgtggcctatattgaccagttcgcgctgaccttcaaccaggatctggagcgctggaccggtatcccggacgcgcgtatcgaggggaacatcgtcaaccgcaaccacaatgacgatctcaccaccaaacgcgtgcaggacccgcgcgtcaacttcaacgatctgacccaggagagctggggcgggcagtcgattacccgtctgggctggctgacctttgcccgcagctttgacgaccggcgtctgacctggcgcatcgggatgatgaacaaggtgcagaccttcgatcaaattatcccctgtgatttccagctgctgtcccagtgtggcgggaagtcagccaactcgctgacctggaacaactggaacgtgcatacctggggcaccacgcttgcctataaactcacgccgacgctgaccttaaaaggcggcgtgatggagcagaatccgcaggccgccagccgcagccatgcctggagctggtcgacgaagggcagcaaaggggtcttactgccggttgaaatcgaagcgcgtccgctgattaacggcctgccgggcgcgtacaacctgggcgtggtgtttaccaacgcgccgcaaaccgatctctatcgcggcaaatccggcggggcgggcgcgacggacccggacggattcgatacccacaaccggacctggttcatgtacgccgggctgaaccagcagcttacgcagcatcaggatgacccgaatcgcgggttgagctcctcgttcagcatgagccttgcggatcagagcactaactacatgcatcaggtttatgccgcctcgctgcgctaccgcggactgtttgatgcgcgaccggaagactggattggctttggcttaacctggattgatatgagcagccagtacgcccgcaaccagcgttacctgaacagcctgagcggcgtgagcgactacaacaatccggcctggcacccggtgccgggccattccctgaacggcgagttttactaccgctttcgtccggtgtcatggcttgaactgcagccgggcattcagtactggcaccatcccggcggggtcagtcgcacccaggatgcctgggtcaccgagctgaaaacggtggtgaccttctga

SEQ ID NO: 125947 - DNA, 798 bp, Enterobacter cloacae
atgccaaccgttatcgataaaacgccaattcacgacgatgctatcggatggtcaagaggggcaattcgctatacgcgcggcgaagtcgatccgcctcaccagcattcgcagggacaacttttgtttgccatcaaaggagtcatgctggtcgaaaccggcagccaacgctgggtcataccgccgcagcgcgcgctgtggatccctccctttcaggagcatacctacagcgtgttatccgcaacggagcttcgcgcggtctggtttagcccggcactgatttcgcaatgcgaaccttttaagcggaaagacgaggttcacgtgattatggccacagcgttgttcaaagagctgattgccgggctgttcagcgcggaataccggccggcaagccagcgcagcatggccgttttgctgctcgacatcctcagcgagacgcagcagatttcagccgaactgccgatgcccgtggatgagcgcttacatcgcgtggcctgtgacctcattgccaacaatctctgggatctctctctggaaaggctggcggaacgggccgcgatgtctgaacgcacattttcacgtgcgtttatcaacgataccggctttagcttccgggcttggcgacagcgcgcaaggatttgtgcctcgctggatctcctcgccaacggatacccggttaagcaggtggcctggatgctggggttttccggcccggcggcatttgcggcggcgtttcgcgccattgttggggcaacgccgggtgactttctgcctgaacagaagcgcttcccagcgatatag

SEQ ID NO: 125948 - DNA, 705 bp, Enterobacter cloacae
atgcacatccattttattattcatgaacatttcgaggcgccaggcgcctatgaaatctgggggaaaagtcgcggctgcagtctgagctacaccagagtgtatcagggcgatccgttacctgaggaactggggggcacagacctgcttatcatcatgggaggcccgcagtcacccgccaccacgcgtgaggaatgcccctggtttgatgcgcaggcggaaaaggcactcatcagccgcgcgatagaggcaggtaaaacggtgataggcgtttgtctgggctcacagcttatcggcgaagcgctgggcgccgcgttttgccacagcccggaaaaagagatcggcaaatttcccgtcaggctcacagatgcaggcaaggcgaacccgctgtttgagaattttggccacgagctgagcgtcggtcactggcataacgacatgccagggttgacgccacaggctaaggtgctcgcttacagcgagggctgtccccgtcagatcgtgcaatatggcgaacgggtttacggttttcagtgccatatggagctgacgccggaggtggtagagttgctgattgagcattcgcagaatgacctccgccgcgcgggtgaattccgttttgtcgaaacggcggaaaaactccgctcgcatgattatcgcgaaatgaaccaggtgctgtttgcttttctcgataagctgaccgcctga

SEQ ID NO: 125949 - DNA, 126 bp, Enterobacter cloacae
atggcgtcagttaaccgcacgtgcttcagggatatcattgaaaaatacatccagataacgatctggatcacaatcattaacaaaacggatgtaagcgttttcatgactgtgagcttcttcacgtag

SEQ ID NO: 125950 - DNA, 1971 bp, Enterobacter cloacae
atgtttaggttgaatcccttcgtcaggggaggactttgtgcgtccgcaatgtccctggccctgcctgttatcgcagcggaatccggcgacacaatggttgtcacggcttccgcgaccgagcaaaacctgaaagacgcaccggcaagcatcagcgtgattacccaggaagatttgcagcgcaaacccgttcaaaatctgaaagatgtgttacgggatgtgccgggcgtgcagctcacgagcgaaggggacaaccgtaaaggggtaagtattcgcgggctggacagcagctacacgctgatcctgatcgacggcaagcgcgtcaattcccgtaacgcagtgttccgccataatgatttcgacctcaactgggtgccggttgacgccatcgaacgaatcgaagtggtgcgtgggccgatgtcctcgctttatggctccgatgcgctgggcggcgtggtgaacattatcactaaaaaaatcggccagaaatggacgggcaccctgagcgctgattccacaattcaggaacatcgcgatcgtggtgatacgtacgacggccagttctataccagcggtccgctggtggacggcctgctggggctgaaagcctacggtagcctcgcaaagcgtgagaaagacggtcagcagaaatcttctaccacggcgagcggtgaaacaccgcgcattgaaggcttcaccagccgcgatgcgaatgtggagttcgcctggacgccgtctgaaaatcacgactttacggcgggctacggtttcgaccgtcaggatcgtgactcggattccctcgacaaaaaccgccttgaacgtcagaactactctctcagccacaacggccgctggggcatcggcaacagcgagctgaaggtttacggcgagaaggtggataacaaaaacccgggcaacagcaatccgatcacctccgagagcaacgcggtagacgggaaatacgtgctgccgctgggcgacatcaaccagctgatgaccttcggcggcgaatggcgtcacgataagctgaaggatccggtcaacctgacgggcggctccagcagcagtacgtcgacaagccagtatgccctgttcctggaggacgagtggcgtatttttgaacctctggcgctgaccaccggcatccgtatggacgaccatgatacctacggcgaccactggagcccgcgcgcctatctggtctacaacgcgaccgataccgtcacggtgaaagggggctgggcgaccgcgtttaaagcgccgtcactgctgcagctgagcccggactgggtcaccggatcgtgccgcggtgcctgtgagattgtcggtaacccggatctgaagccggaaaccagcgagagcttcgagttcggtctgtactacagcggggaagagggctggttagagggcgtgcaggccagcgtgaccaccttccagaataacgtcgatgaccgcatcagcatcagccgtacggccaatgcgaaacaggcgcagagctaccctaactacgttggcctgaatgcggacggtgagccgatattccgctactacaacgtcaacaaggcgcgcatccgcggggtggagaccgagctgaaattcccgctggcggacgactggaaagtgacgctgaactacacctacaacgacggtcgtgatatcagcaacggcggcaacaagccgctgtccgatctgccgttccacaccgccaacgggaccgttgactggaaggcgacgcaggactggtcgttctatgttcagggcaactacaccggtgagaaacgcgcgctgaccagcagcgacccaacgccgggtggctatgttatctggaataccggcgccgcgtggcaggcgacgaaaagcgtgaagctgcgcgcgggcgtgcagaacctgctggacaaagatctgagccgcgacgattacagctacacggaagatggccgtcgctactttgtcggcgtggattataagttctga

SEQ ID NO: 125951 - DNA, 1182 bp, Enterobacter cloacae
atgcataacacccctgcggctgcctcgccaaagccctttgacttgacctcagcggccttcctgattgttgcctttttcacgggcattgccggtgcattacagacgccgacgctgagcttatttctgaccaatgaggttcatgttcgtccggcgctggttggcttcttttttaccggaagcgccatcatcggcatccttgtcagtcagtttctggcggggcgatccgacagaaaaggcgatcgtaaaagcctgatcgttttctgctgcctgctgggggtcatggcctgcgttctgtttgcctggaaccgcaactacttcattctgcttttcgtcggggtattcctgagcagctttggctcgacggctaacccacagctgtttgcgcttgcccgcgaacacgccgaccataccggacgtgaagcggtgatgttcagctctgtcctgcgtgcacaggtgtcgctggcgtgggtgattggcccgccgctggcctacgcgctggcgatgggttttggctttacggtgatgtacctgagcgcggcagtcgcgtttgtggcgtgcggcgcgctggtgtggttcttcctgccgtccatgcgcaaagagcccaaggtggcaacgggtgtgctggaagcgccgcgccgtaaccgccgcgatgccctgctcctgttcgcgatctgcacgctgatgtggggcaccaacagcctgtatatcatcaatatgccgctgtttatcattaatgaactgcacctgccggagaagctggcggggatcatgatgggcaccgcagccgggcttgagatcccgaccatgctcatcgcaggctattacgccaggcgcttcgggaaacgttttttaatgcgcatcgccgccgtcgccggtctgctgttctatctcggcatgctgacggtacatacgcctgggctattgctggcgttacagctgctgaacgctatctatattggtattctcgccgggataggcatgctttatttccaggatctgatgccgggccaggcaggctccgccaccaccctttatactaataccacccgcgtgggctggattattgccggttcaatggccggtgtcgtggccgaaatctggaactatcacacggtgttctggattgcgctggtgatgtgtacgctgacgattggctgcctggcgaggattaaagacgtttaa

SEQ ID NO: 125952 - DNA, 1188 bp, Enterobacter cloacae
atgcaatcccggtttgccacgctccgccagatcccaaaaggtgtctgggtggtcggtggagtaagtatgttgatggatatctcttcggagatcattcacagcctgctgccattgtttatggtcacgacgctgggcgccagcgtgattttcattggtttgattgaaggcctggctgaggccactgcgctgtttatcaaggtgttttccggcgccatcagtgactatctgggcaagcgtaaagggctggcggttctgggctacggtcttggcgcgttgagtaaaccgttgttcgctatcgcctcttcttcaggcatgattctgggggcacgcttaatcgaccgggtcgggaaggggatccggggagcgccgcgcgatgcgctggttgctgacgttacgccgccggaacttcgcggcgcggcctttgggctgcgtcagtcgatggacaccatcggcgcatttctcgggccgctgctggcagtaggattgatgctgctgtggaacgatgattttcgcacgattttctggatcgcggtgatccccggcgtgctcgccgtggcgctgcttttcttcggcctgcatgagccgaaagcgcccgtcgaacataaacgcacgaaccccatcaaaaaagagaacctcaggcgtctcgggaaaggctgctggtgggtgattggtctgggggccatctttacgctcgcacgcttcagtgaagcctttcttgtcctgcgcgcacagcagtcgggggtgccgctggcgctgatcccgctggtgatggtggccatgaatctgctctatttcctctctgcctatccgtttggcaagttatcggaccggatgagccacacccggctactgcagtggggtctggtgatgctgattggagcagatattgtgctggcgctgagcacccactgggctggaatgcttctgggcgttgcgctttggggagtgcatatgggtatgacgcaggggctgctggcggcaatgatcgcaaaaatggcgcctgcggatctgcgcggtaccgcctacggcatttttagtctggtcagcggcgtgggattgttagtcgccagtctgggggcaggagccatctgggaaacgtttggggcggaatatacgttttatgccggggcggtgatttgtctggtaacgcttgtatacctgcgcaaaacgccggacgaggcgaaataa

SEQ ID NO: 125953 - DNA, 1059 bp, Enterobacter cloacae
atgaaaaaaccaaccttcactaccgatgaggatcgctggcaggccgtgctggcccgcgatccgctcgctgacgatcagtttgtcttcgccgtgcagacgaccggtattttctgccgtccgtcatgccgcgcccgccacgcgctgcgtaaaaatgtccgcttttatcccgatgcccggcacgccgctcaggcgggctttcgtccgtgcaagcgctgcatgccggacaagcgcgatccgcaggcgcaaaagctggcaaaagtggaacacgcctgccggcttctggagcaggatcctgcgctaactctggagaggctggcggagcaggttgccatgagtcctttccatttccaccgcctgtttaaatccgtgaccggcatgacgccaaaagcctggcagcaagcggcgcggggtcagcgtctgcgcaccgcgcttgcgcagggagacaaaattaccgatgccgtgctggcagcgggatttcccgacagcagcagctattatcgtaaagccaacgatgcgttgggcatgacggcgaagcagtaccgtaaaggagaggtggccgttcggtatgccatcgatgactgttcgttaggacgctgtctggtcgccgaaagcgagcgggggatctgcgcgattctgctgggtgacaccgatgctgaattaaccgcagagcttgccacgcaatttccaaaagcaacgcacgcgccgcgggacgacgccttcgtacagcggatccaccaggtcattgccagtattgataaccgcgacgtaccgcttgcgctgccgctggatattcgcggtaccgcgttccagcagcgcgtctggcaggcccttcgcgcaattccctgcggtgaaacggcaagttaccagcaggtggcgcaggcgattggtcagcccagtgcggtacgcgccgtcgccggagcctgtgcggccaacacgctggcgattgtgatcccctgtcatcgcgcggttcgcaacgacggcgcactgtctggctatcgctggggggcggcgcgaaaagcgctcttactgaaacgtgaggcgaaacgccgggagggataa

SEQ ID NO: 125954 - DNA, 1200 bp, Enterobacter cloacae
atgattaacgtggagatgttatccaccggcgacgaagtgctgcatggacaaattattgataccaatgctgcctggcttgccgatcttttctttgagcaaggattaccgttaacgcgccgcaatacggtgggcgacaatctggagtcactggtcgctgttctgcgcgagcgcagtgaacagtgcgacgtgctgattgtgaacggcgggctcggccccaccagtgacgatctcagtgccctggccgccgcgaccgcaaaaggcgaagggctggtgctgcatgaggcgtggctctcgcagatggcgcgttttttctccgaacgtggccgcgtcatggcccccagcaaccgcaaacaggctgaaattcccgccagtgctgaactggtcgataacccggtcggtaccgcgtgcgggtttgccatgcagctgaaccgctgcctgatgttcttcacgccgggcgtgccctcagaatttaaagtgatggtcgagcagcagatcctgccgcgccttcgccagcgttttaccctgccggaacccccgctgtgcctgcgtctgaccacttttggccgttcggaaagcgatctggctcagagcctcgatcacctctcactcccgccgggcgtgtctatgggctatcgatcctccatgccgatcattgagcttaagctgaccggaccggccacccagaaagaggcgatgctggcgctgtggcctgaggtgcagcgcgtagcgggtgaaagcctgatctttgaaggcacggaagggctaccggcgcagattgcgaagcatctgcagtcgcgtcagctgagtgtgaccttaagcgagcagttcaccggtggcctgctggcgctgcagctctcgcgcgtcaacgcgccgctgctggccagcgaagtggtgccgttccagcaggagactctcgcgcaaaccgcccgctgggcgtccgagagaagggtgaagcattttgccggtctggcgctgtttgtcggcgggctggatgaggaatacctcaacttcgcgctggcgacgcccgagggcacccatgccctgcgggtaaaaatgagcattacccgccacagcctgacggtgcgtcaggaggtgtgcgccatgatggcgctgaacatgctgcgccgctggctgaatggcaaagaggtggccagcgagcacggctggattaacgtggttgaatcgctgttcgtggagtaa

SEQ ID NO: 125955 - DNA, 1362 bp, Enterobacter cloacae
atgagttttaccgactggccgtggcggcactggcgtgcgcaatttgccgataaaccggccctgaggctgaacgacgaggtgctcagctggcaacagctgtgcgcgcgcatcgacagccttgcggcgggctttcaccgtcagggcgtggaggagggcgacggcgtgctgctgctggcccataaccacccgcacaccctgctggcgtggctggcgctgctccagtgcggggcgcgtattcttcccgttaatccgcagctgccgcgcccgctgctggacgtgctgctcccgcagatgacgctgcgctttgcgctggtgctggacggcagctacgacggccttcctgccctgaacatgcgcgagaccgccgatgcgtatcgcgctgcgtggcaaccggcgcggctggcctccatgacgctgacctcaggctccacaggactgccgaaagcggcggtccatacctgcgaggcccatcttgccagcgcgcgcggcgttttgtcgctgatgccctacggtgaagatgacgactggctgctttcgctgccgctgtttcacgtttccggccaggggattttatggcgctggctgcaggccggcgcgcggttaaccgtgcgcgagaaacagcctctggagcaggcgttgtgcggctgcacccacgcctcgctggtgccaacccaactctggcgtctgcttaatgcccaccagcctgtcgtactgaaagcggtgctgctgggcggggcggccatccctgtggaattgaccgaacaggcgcgagagcaggatatacgcaccttctgcggctacggtctgaccgagtttgcctctaccgtctgtgcgaaagaggcggacggcgagccggacgtgggccgtgcgctgccgggcagagaggtgcaggtcgttaacggtgaagtctggatcagagcgcaaagcctggcctcaggctactggcgggatggcgaactgattccgctgaccaacgcgcagggatggttcgccacccgcgatcgcggcgaatggcatgacggccgtctgacgatcctcggccgcatggataacctcttttttagcggcggagaagggatccagccggaatcgctcgagcgcgttatcgccacgcacccgcaggttaaccaggtgtttatcgttccgctggacgacgctgagttcgggcaacgtccggtggcggtggtggagtgcgagccgggaacggatatcaccactttacccgactgggtcagggacaaggtggcgcgttttgagcaacccgtccgctggctgcttttgccgaccgaactcaaaaatggcggcattaaagtttcgcgccgcgcgttgcaggagtgggtgaacgcaacgctgaagggataa

SEQ ID NO: 125956 - DNA, 777 bp, Enterobacter cloacae
gtgatcctctctggcgtgcagcaggctggaaaaccaggctatccctggctggtctttttgcacggtttttccggcgattgccgcgagtggcagggtgttggtgagcggctttgcgattaccccaggctgtatctggatctgccgggacacggcggatccaggaatctgggcgtgacgggcttcgacgagatgagcgcgttgcttacccgaactttgattagttacaacatactgaaattctggctcgtcgggtactccctcggcggccgcattgcgatgttccatgcctgccagcagccgaaggggctgttgggcgtgacggtagaaggcggtcatccgggcctgcaggatgccgatgcgcgacaggcgcggctggcatcagaccgccgctgggcgacgcgttttcgcagcgaaccgctggaaaaggtattcgctgactggtaccaacagcccgtgtttgcctccctgacggacgcccagcgcgacgcgctgattaccctgcgcagccagaacaacggcgcggcgctggcgatgatgctcgaggcgacgtcgctggccgtgcagcccgacctgcgtaccgcgctcagcgcacgtgatttcacttttgattatctctatggcgaacgtgatgagaagtttgcggcccttgctgcggagctgaacgccgtctgccatgcaattcccaacgccggacacaacgcccaccgggaaaaccccgacgcggttgccgcgagtctggctcagatactgcgtcttcgaataaaggacactctatga

SEQ ID NO: 125957 - DNA, 1296 bp, Enterobacter cloacae
gtgaattcgattttcctcgcgctggagcaattgcgtacccagctttcgcaagcgttacccgcaacgcccggcatacgtcatttcgacgtctctttcccgttaaacgatgccttcgaccctctcgcctggcttggggcgcagcagtgctatccgcagttttactggcagcagcgtaacggcgatgaagagctggccgcgctgggggcggttatcaccttttcctctctggcgttagccacgcagtttttgcgcgagcaaaacgcggcaggtgatacccgcatctgcggcctgaacgcctttaatccggagcagggcagcctctttttaccgcgactgctctggcgacgtaccgccggcaccgctacgctgcgtctgcagctgtggagcgattattcacttcaggaagatgcccatgccgcgcgggattttttacagcagctccagccagccaggcctatccgtccgctggccgttcaggttgagcacgaaaaccatcagcctcaacgggccgaatggctgaaacttgtccgcagggcgaccgaaaccatcgcgcgcggtgattttgaaaaggttgtccttgcgagggccaccgatcttcagtttacacagcgcattaaccccgtcgcgctgatggcggccagccgcgccctcaatttacattgctatcacttctgcatggtattcgacgccagcaacgcgtttctcggctcgacgcccgagcgtctctggcggcgacgcggcacgctgctgcgcaccgaagcgctggcgggcaccgtcgccagccataccgatgataaaaaggcgcagcgtctgggcgagtggctgctgaacgacgataaaaaccagcgcgagaatatgctggtcgtggaagatatctgtcagcgtcttcagcactctacgcagacgcttgaggtactgcctgcccaggtggtacgcctgcgtaaggtgcagcatctgcgccgctgtatctggaccgagctcaaacaggccgacgacgagcagtgcctgcatatgctacagccgacggcggccgttgccggtttgccgcgacagcctgcgcgcgagtttattcagaaggttgagccctttaaccgcgagtggtacgccggttcggccgggtatttatcgcctgaccagagtgagttctgcgtggcgctgcgttcagcccgcgtccatgaggactcgctgcggctctacgccggggccggcattgtcagcggatctgacccggagcaggagtggcaggagattgaaaacaaagcggccgggttgcgctctctgctcctaagggattaa

SEQ ID NO: 125958 - DNA, 1332 bp, Enterobacter cloacae
atgaccacacatataacgttaaaaaccggcggcgacccgcgcacgctgccagattacgccgccctccgcgatgaactcagtaagctgactcatcctgctcgcccggatgtgaactggcaatatgtcgaaaaactcggtctctcactgttcgaacagaacggtgtggagttgcagactgcagcctggtacacccttgcccggactcatctgtcggggttagctggcctgaacgaagggttggcgattctggaggccctgattagccatcagtgggacgttttctggccgaagacattacatgctcgtatggaaattcttagcggcttgagccagcgcctgcagcagcgcatgcgtatgcttccactcaacaacagccatctcagtgagctttatagcgctgaagcgttgcttacccggctgggttcggtgctccagcgccttgaactgaagcaccttagccagttcgatacattacgaacgttggtacgttcgaatgctgaacggctggaaatccgtaatgacgcatcagatttgaatgcgattaagctgcccggtcgtgacttacctcaggagagggcggaatcggttggcgaagtgaaatgggtctatgttgtgcagccggaaaatcagccgaatgcagaggatcgtaggacagcccacggagctgccagagcatggaaaccctttgtcgccgggatgtgttctatgctggcgatcggcgtcgccgtggcgtggggagggggctttctgtccagacccgatcccttaacgacccaggccattgcctcgctggcgccgttacctgaagtgcttacacctgttcagcaagacgcgttagcacagcaaggtactttaccgtccacatttatcacagaaacgcagcagcagcttgcccgactggataagctgcctcctgactggaatatttcctacagccttcagctgttagcgcaactccagacagtgcggccggaggaggcgaagccgctcacctcacagtggcagcaaaaatttaacgcggcagcgttgcctgtcgacgctatgaacagttggtatgagggaatgatgaagcttcagcaactgagtcatcggctgagcagtctggatgagcaaaaaggaaaatatatcacggtgagtgagcttaaatcggtggttttttcgactatacagtcatttaaccaaacaataccggctgaagaacaactcagacgcctgtcacagcatccagatggagatgcgcttcctgaagccgaaaagacccaactggagttgcgcctaagacagcttgctgcgcgttacgctcaaataaaacaggaatcttctgctcagtga

SEQ ID NO: 125959 - DNA, 471 bp, Enterobacter cloacae
atgtcagtaaaatcacagttcctgaaaaagttgcaggcacgacaacctgcaccagttcctgccatcagcaagagtcaggctgatattgcagagtttcgccagcggatggctcagcttcaggagcaaatggacgcgtggctgacggatacgggactgaatgtggagccactgaccgtatccgttccggatctgctggtggagggcggggcttttgagatttccggtatcgttttgcgctatgacagccgggcggtcaactttatgccgatctttctgtatggacagggcgtcgctggttgtgtcgaggtgactttctgttccggagataaggtgatttctcaaggacgcctgttcatgcgggtggggagcgcaaatggctggatctttactccccctgatacctcatcccgatccggacaactatttgatgaaggtgtgtttttcggtctgattttagcgctgctgccatag

SEQ ID NO: 125960 - DNA, 546 bp, Enterobacter cloacae
gtgttacgtacaaattcaattaagacttcgcgctggctgctaccactgctgacattcagcctggcaggctgcggggtgacgcagagcgtcaccgatggcactaaatcggcgtttaacgccgtgttctacaaaaaaatcaaggtgctgcacctcgatttcaccgcacgtgaggcgctgaacaccgactcccgtgaaagtaactcgctgtctcagccggtggtgataagggtttaccagctcaaagaccgcaaaacctttgataagacggtgtatcagcagttgcttcaggatgatagcaccattctgaaagatgacatgctggccagtcgtgatgtcgtggtgaaaccgggtggcgatgcaaaccttgatatgccaatggaagaaaaggcgcagtttgtcgcggtggtagggctcttccgccatccggatatggacaacaacgcctggaagcaggttatcaaacgcagtgacctggatccggataaaccacgtatcctggaagcaggtgataactctctgacgctacagccgcttaaggaagactga

SEQ ID NO: 125961 - DNA, 1755 bp, Enterobacter cloacae
atggacgacttaaccctgcgttattacgacgctgaaatgcgctacctgctggaagccggtgaagagtttgcccgtgctcaccccgagcaggcggcaatgctcaatctcgataaagcgggcgcgcgcgacccgtatgttgaacgcctgttcgagggctttgccttcctgatggggcgcttgcgtgaaaagctcgatgacgacctgcctgaactgaccgaagggctggtcagcctgctgtggccgcattatctgcgcaccataccgtcgatgtcggtggtggagttcacccctgactggcgtgagatgaaagagccgatgcgtatcgtcaaaggcttcgaggtgaactcacggcccatcggtgagaagggaacacgctgccgctacaccaccaccagagagatgacccttcagccgctggcgctggagcaggcccgcctgtcgactgaccctgacgggcgttctgtcattagcctgcgttttaactgcagcctccttgccgactggagccgtgtcgatctcagccagatcccattttacttcaatgctgacgcaccgctggcctgcgccatgcatgaagcctttaccatgaacacggcccgtctctggctgcgcatgccgggtgacacggacagaagaccgatggacgggtatttcaccgcactggggtttggtgatgatgacaggctgtggccgaagggagacagcagtttcagcggctaccagttgctgctggagtatttcaccttccgcgagaaattcatgttcaccggcctgcgcgggctggagacagtggcctttccggctgagctcccatggtttgaaatcgacgtggtgctggcagaacgctgggagcatgatttcagctttaccgaaaagcatctgcgcctgaactgtgtgccggtgattaacctgttcccgctggaatctgacccgctgacgctaaactccctgcagaccgaatacatgctgcgcccgatgcgcgtgcaggatggccacaccgagatatatgcggtggattcggtgatgtcatcgagccagcatacctacgtgccattttcaagcttccgccacaagggcggaatgatgcgccatgaagccccggaatattactatcacacccgcgtgcgccgtggcccgtcggggttgcataacacctggcttatcctcggcggggaagcgtttgataaccacacggtgccggaggatgaaagcctgtcgctgacgctaaccggcaccaatggccaactacctcgcagagcgttgcaaagtaccgtgctcgatacagtgatgaaaaccacttcagccagtatcgccgtgcgtaacctgtgtgcgccgacgctgccttgttatcccccggcgcaggaccgtttccactggcgcgtgctgagccacctcggcagcgggttcctgtcgatgatggacaacgccgacgtgctgcgcggcaccctggcgctgtatgagtggaccgacagcgagatgaaccgccgtcgtctggaggcgattatcgatgtgaagcacagtgaaacggaacgctttgagcagggatatctggtgcgcggggtgcagattgaggtgacgcttgagagcaacggctttgccgggcgcggcgatatctgtctgttcggcgagatgctgagccgcttctttgcactgtacaccgatatctatctgtttaaccgcctgattattattctgcaaccgaccggagagcgcctggaatgggaagagaagcacaaccgccgcattcccggctga

SEQ ID NO: 125962 - DNA, 1437 bp, Enterobacter cloacae
atgggatggtctctgccagaggtgactgaaaaagagccagcaccatcatggtcaccgtggatctgtctgttgattatcatcctgggtctttttatcgggttgcttgtggctgtgctgaagtcaccaacaacaggcttaccttcattgagtagtggggcctggttaccacttacggcctggacatttgcgggcatttcggcagccatcgcggtctatagcttatgccaggaaacgctggcaatccgcgtctggaactggaatgagtggtgccgaaacacgcgtctgaaatggcgcttacgcgcgcatcagcatcttgtcattctcagtcatgttttcatcgctgcagatactggggtgctgtctcgtcttgcacatatagatacacaagaaggggacagtacggacacaccgcatttgacgctgttgccggacgctccccttacaccgggtatttcacgttttgagcagctacttcgtcatcttattgctcagataatgccttcgattcggcggcgatatccttccggcccactccagattattgttcagaccaacggtagcgacaaagaccgtgaatctcagtcattccatcgtatctggacagctggctctcccccctggaaagtcgagattcattttcaggacggtgactcatcctttgatgactggaatcagtttgtcgggtccacaaagagagccgtactggtgctggcgatgcactatcggctacccgatgatgttctgcctgaatttgccagcgcgttgtttatggtgcatccgtcgattgtaagtgaaggtgaaggaaaaaatgcgttacggcttttccgagcgatgccgctcaacacccgtacgcttgcaacagaactcagtgaattatgggatatggccctcactcctgccagcaagaaacacctcatctggtacagtggactgtcagatgcgccacggcagtcagtgagcagggtgctgaatgatctgtcggttcctctctacgatagcattggcactggcggtgtcattgactatgacacagcatatgtccggtatggcggtcttgctggctgggcaatgattggcgctgcggctgaaatggctgcttatggcccagccagccagtggcttcttctcgaaggtgaagatgatgcctgggcagtgacgctaggaaacaacgctcccgaagtcgggtatgatcatttcgttattcagccaccctttcccggagggtctgttctgatggcattattgctcaatgccgggctgtacagcctgatgatccgctacttcccttcaacggcattctcctggtcagggatcactcttcttctgctatcactgatagtgacattgcccgggctggccattttgctgagacgaatgacagcccgtcttcaacgcccggaatttatcagggttgcacgacacaccggaaaggaataa

SEQ ID NO: 125963 - DNA, 264 bp, Enterobacter cloacae
gtggggaaatttgccgtcgttttaggtgacgccactacgcatggtggcaaagtcatatccgcctcatccagtttcgatatatccggtaaaaatgccgcgctcttaaatgatagcgtatcctgccctgagcatggcacaaacaaaatcattgagtgcgatgtttctgcgtatgaagaaaatggacgtggaattgtattgcatggctgtaaaacacagtgcggtgcgagcgttatcgcaagcatgcaggatatggaggttggctga

SEQ ID NO: 125964 - DNA, 1935 bp, Enterobacter cloacae
atgagcaataaaaaagagccaattcgtgtacttgagtgtacgttcgatgataatgggcatccctcttggaactcattcccgtctcataaaaattgccaaatcagaggcgggtgtgatttaccaccacatttgcctggtattattatacttgtacacggtgttaactcgacaggagagtggtattcaattgcggagaataaactttgtgaaggtttgaataagaggctcggattaaatgggacagattataaactagtggccaataaatacctttctgacgataaaatagattctgaacctctagtgccccgagacttacctgaagttgatagaaataaatcccctgtcattcgcttttactgggggtattcctcgtttaaaggtaatgaagataaatatgttataccgttagccaataggaaaggcgttgattatcatcagttgaaaatgcaaggcgtttctcatgaaaatattctggctcaggggccatttttttggggcggcggtccattccagaatggtacaaataatctgcactctttatggagtgagaaaggatttaaagagagagtcgcaggtatcaaagtccagtggtttaatgaagacaaagatcgtttgttaaccaatgcaccaccgcgaaaatactacgcgcatgctgcaaaacgccttgcagacctggttgacagtattcgtaataaatatccaaaagatacagtaaccattatttctcatagccagggaactatggttgccatggctgcggtagcgatagccaggaatgcacctgacgcattatttgtacttaattctccctacgcattggatcataacgatcttaatggggcgtcacttccgacagatgaatgcatttcgccagaaggacggctgaatacgttatctgccatcattgataaggtggcttccagaaaaaatcatttatcaacactgggctatgaagggctttgtgtcggacagacggcagataaaaagaactggcgacctgatgtcactcttgctggtgaaggtggcaccagtcttgccgaacgagataaccacgggcgcacctacatctacttttgccctcatgatcgtgttatggggtcacgcccgttacgctctattggctggcagggattacccaatgattctcagcggcggccccatcctctgctgaaaaagcatcagggatatttatttcaacgcatgctggctcgcagtacttcatgtggcgaagctccaaatcccgtgacgccttttgcaaaactgccggatggaaaacctttctgggatcataaaggagacaagtatcaaagtagtcgtttcacctatccggatcctccagaatggcaaacagtttttattaatgctgaaaaggtacctgaacctatagatgctgcaaaattagctgattttgatgtatcacgcgttggagctgaacatgataatagacagatagatggttggggagaaattaatccggataaaaaacaaaaaaacgacaatacctatgataactacattaatctttatcctaatcaggatattgtgattggatttaaaaatgtgggtactgaatctgagccccgattggtgccagtgacccgtaaggaaacgtttgaagaaaaagatcttcgcctacgaacatatgtttctcagcccacggatcatagcactctgccaatgcatgccgattttatgtcacatgtagtggcttatgatttgccgattgggtattgcgattcaacctgggataaagcgttcatggctgatttgcggcgaaaagcggattggacgcagggtgaggatgcttatctcttcagtggaataccagacaaagtgcctgagcctgatttaattagtagggaaactgttgttgatgaatttgataaagagcaaagtaagctgccagcatatagggctgtaaataaagcataa

SEQ ID NO: 125965 - DNA, 912 bp, Enterobacter cloacae
atgagcggctctcagaaggtagaggagtcacgaacagttgaaacagatgcaccggctcaaattatttatcgcatagataaatatcgatacctgacgctggaaaactacatatcttgcgataagggtggacaggtttattacaatgacactcagcggggaataaaaacacacctgggatgggatatcgatttcaatgacttctcatatcgactttggaatagcgtggcagcataccagggcaccattgttaatggtgcggacaatgggtatctggcatttcctggtgcatctaccagacagtattgtggtagcggaaggtcagagcgaggttgtcctgtgtttttcttcttttcagcagattatggaaaatcctttatctataaaatcatagccgaagaatacagaactccggagcgttttagtcaacttaaagttgtggtggcaaatgatggggtttatctaagggatgggtctcagacagagagtgtgtattctcatcctataggtcttcgcgatcttcatgcagtgaataaattaaggttttctgacggtactttaattagtgtttatgacgactggcaggaaaaatattatgaattagtaaaagaagaactgataagaaaaaaaatgccctatgcgaatgagtatggaccaaggtttcatatattcgactatataagaaccttaacgccacctaaaactcatgaggaaagcaatttgatggcagatgaattgtcagagattcgaatcaggattgaggatgaggtttatagtaacaggattgaattcccgaaagttgtaacgaaaagtattaatgctaaatattcatgtgataaaaatattaaagctaaaactactacgtatacactcgaatcaagcgggaagaaggaagtggtgaaaaatgagcaataa

SEQ ID NO: 125966 - DNA, 1515 bp, Enterobacter cloacae
ttgggtgaaaaagtaagtacctggttcgtgcaggtcagtctggcaaaaaagagagcgttgttagtactgttgattttggttcaggcgagtctgctgattgggcatctgctctaccagcgcggctatgtggaggataacgctgcacgtatccttcgcaatacggccatactccagtcccagcagtttgaaaccagccttaacgcgatgcgctaccagatgcgctttatcgggaatgcctttctgctcaaccatacggtcacgcctgaaaacgcgcagccattcctgcaaggggagctcaagcgcgcctggctggatggcgttgtcgtctttgatgaagacggtgattttctcagcagccgcgcgctatttccttttgagcgcgctctggacgcctctacgcttgcgcaggccagctttcggcagcaccctctgtttactgattttcgccgggatgaagttaccgaaagtttgttttactggcagagcaacggcacggataaaaacatgttgggcttcgtgatgttccgtgcagtgcgcgacgcacatggtcgctttcttggtggtgcgttgggtttcttcaatggtaacaccatgaacgatatgtttcgcaaaatggaagcgcagggcttcgatttaggtcagggtggggcgatggcggtccttgatcgtgacaatgcggtgcagcttgcccgtatgggggcgaatgacggttcgcaattgaacacctccgacccgcgcctcgcgaagctgctggaatacgcaagcgataccgcacaggtccaacgatatacctctccgattgatggcgttgaacgtatgggtgtatttcttaacctcaacgaacgcaaatgggtgctggccgtcgggctggccagaaaagacgtgctgcacggctggtattatcaggctctgtggacggcactggcgattctggttatctccattacgcagtggtttctgatgcattacatccacgtcaacgccctgcagcgggcgcgtttccagcaggaggcgcggctcgatccgctcaccgggctggcaaaccgtcgccagtttgatgagtggtctttgcgggcctgcaatcttgcccgtcggcatcagcaacccctgtgcctgatgagcatggatctggatttcttcaagcgtattaacgacacctggggccatgacggcggcgatgcggtgctgaagcatattggcaacgcgcttccggcactggtgagaggcagcgacattgtcgcccgcttcggcggggaagagtttgtcgtggcaatgccgcagacctctctggagacggccgctgagatcgccgagcgcgtacggatgagtcttgccagccagaacgtcgacttcaacgggcagacgatccgcttcaccgccagcatggggctcgtatgcatgacgccggatgaactggagattgaacatggcgtgcagtcagccctggcgcgagccgatcgtgagctttatcgtgcaaaacgtgaggggcgcaaccgggtctgcgtggcgagctag

SEQ ID NO: 125967 - DNA, 432 bp, Enterobacter cloacae
atgagccacatcaccatttaccacaaccccgcctgcggcacctcgcgcaacacgctggagatgatccgcaacagcggcgcggagccagagattattctctatctggaaactccaccgtcgcgcgatacgctgaccgccctgattgccgatatgggcatttcggtgcgcgatttgctgcgtaaaaacgtggagccctatgaacagctcggccttgccgacgataagttcaccgacgaccagcttatcgattttatgctgcaacacccgatcctgattaaccgtccgatcgtggtgacgccgctgggcacccgcctgtgccgcccgtctgaagtcgtcctcgacatcctgccggacgcgcagaaaggggcgtttacgaaagaagatggcgaagcggtggtggacgccagcgggaagaatatcctgaaaaaataa

SEQ ID NO: 125968 - DNA, 480 bp, Enterobacter cloacae
atgtctacacccgcacatctctggcttgaggacgagaacggctcgccaattgttggtagctgtatgatgcccacccgtcatggttccatagaactgaaatcgttctcccatggcgtaaccattccggttgacccaagttggggcaagctcaccggcacgcgcgtccatcgccctattacgataatcaaagaatttgatcagactaccccacttctttaccgagccgtgtgcgaagggcgagtgatgaagaaggggattattaagatgtaccgtattctggagtccggtatcgaggccgaatatttcaatatcgtgatggaaaacgttaagttcacgacagtggcacccttcctgacccctaacgggatgagcagcacccatcttgaaacactcgaattgcgttatgaagctatctcatggaagtacacggaggggaatatcatttaccgtgacacctggaacgatcgctgttgcgcctga

SEQ ID NO: 125969 - DNA, 831 bp, Enterobacter cloacae
atgaggcgtgcgtttgccacgctcctgctggcgctgctgctggcagggtgcgttacggaaaaggggattatcgataaaggtgcctacgagctggatacacgtcatcaggcgcaggcggcttacccgcgcatcaaggtgctggtgatccactacaccgcggatgattttgacagctcgctggccacgctgacggataaaaacgttagctctcactatttgatccctgccaaccccccggcgccggacggcaagccgcgcatctggcaactggttcccgagagcgagctggcctggcatgcgggcattagcttctggcgcggcaccaaccggattaatgatacgtccgtggggattgagctcgagaaccgcggctggcaaacgcgtgacggcgtgaaaacctttaccccgtttgcgcctgcgcagattgcagcgctgatcccgcttgccagggacattattgcccgctatgacattcagccgcagaacgtggttgcccatgccgacattgccccgcagcgtaaagacgatcccggcccgctgtttccgtggcagcagctggcgcagcaggggataggtgcctggcccgatcccgcgcgcgtggcgttctatcttaacgggcggccgcgctatcaggaggtcgagcgcggtgcgctgcttgatgtgctgaaacgctatggctacgaggtgccggacaacgccacggaacagcagcagaagagggtgatcagcgcgtttcagatgcacttccgccccgcgctgtggaacggcgtggctgacgtagaaaccctggccatcgccgaggcgcttttagagaagtacgggcaagggtag

SEQ ID NO: 125970 - DNA, 633 bp, Enterobacter cloacae
atgtctaccatctgtcttgcggctcagcgcagctacgtttccggggaggcggtctggttttcgtaccgcattccccgtctgagaaaaatcgcttctaacgcctttttaggaatagtaagcctctgcgtcatgctgatggcggggctgtacgcccacgtatactggcaactgcgccaccctgcgccggagccggtaaaaaaagtgaacgtggcgaagcccgagacgcagctttccgatatgcactacgtgtacgtgagcaagccgttcccgcatccgcacccgaaacccgtcccggtgcaggccgacgttcctgccatgcaggatctgccgattaacagcgacgacgccgactggcagcagatgcctgacggcacggtgccgcacgatacctcgcgggataccctccccggaacggaagcgcacgacgatgccgtctccccccgcacggagggtgacgacgcatcattaaccgaactgtttaagcaggcgttaaatgaacaagagaaggattattcgcaagggaaaatacccgcaccgccgattgacgaaacgcaggataatactcaggcgggcacattacataaagaaagttcccggtctccattaagtaaaaagggagaccggctggaatag

SEQ ID NO: 125971 - DNA, 1566 bp, Enterobacter cloacae
atgtatcagagtcattttaaatttaatcacccgccttttcgaaaaatcacccgcgcctcgggcgatttcttcgtgccgtatcaccaggatattttcaacctgctgaaagagaaaacccaacaggcggggattattgggctctttgctgatgatgccccgctgctgggccagttcagcgacgccctgaaatccgcaacccctgacgttattgccatcaacgcgtttccaaaactgagtgccagtagcctgctgtataaactcaacccgggaacgaaagagagcaaaaaccggcttcaggcggtggatgccatcctgcaccagtggcaggggggaaaaagcaggacgaaagtgctggtgattagccataccgatgccatgaaagagacctgtcgggaggtgctggctctgctgctgacgcgcgcgcaagagctggagtttcgtctgtccgtcgtactgatgggtgcagcggatcgggaagccgttctgatgcagcagtctgaactgcgtgaatatgcgcatacctgccacaccctgcgcccccttacctgccgggagtttctcagctacgttcaggcgcagtgtgaagcgcacgggtgtgagcactcgccgttgaccccggcgcgcgtgcgtaaaatgcatgcgctgaccaaagggaaaatcagcaagctgaacgagctggcgcacctgtcgatgctcgccgcctggaccgaacgtgcagaacaggttagcccgcgtcatctgcgcctggcggccggtgagatcctgcctgcgaaaaaacacggtatgcgcctggctaccgtggggctgttcgcctccgtgctgttcgctgcctgcggctggtatttgacctcctcgatcggagcaagacttccgattcaactgccggtgcccgcgagctggaaacagcagacgcccatcgagcaggcgccggtggtgccggctatcgacaacgaggtggttaatcagccggatgcgatgcatcagctctatctgatgtgggggtatgacgcctcggcggacgatgccctgtgccagaacgccgcgaaggtgaacctgatgtgtaagcagggaaatgcctcaccggacgcgctggcacaggaaggatatccgtgggtgagtgaactgaaaaccggcaaccaccttaactatgccgtggtcgcccgcgtcggggataactcactcgacctgctgatgaataaccgcacctggcaggtaagccgtcactggtttaaccagcatgccaccggcaattatacccagctccaccgcctgacgccggaaggcaaagacgccatcagcgccgccagcgatgcgaaggacatggggtggctggatcagcagctgagccaggcccttgccgagccggaaacccacgctcaaacctggacgacggagatgatgaaacgtacccgcgagttccagcaaaaaatgcatatgcgcgtcgacggtatcccgggtgaagagacgctgatgcagttgatgcgcgacactaacaccacgccgagcgtgctgcttcagaccccccatgccgcaccggacgcgaaaacgcaggagaagcattcctaa

SEQ ID NO: 125972 - DNA, 630 bp, Enterobacter cloacae
gtgaagacgagccgacgccagcgcggttttaccctgctggagatcatgattgcgctgaccatttttgcggtcatcagcaccctggcctggcaaattctcgacggcgcgatgcgcaccagttcggcaaccgatacccgcgcggcgaagcttaatcagcttcagcgtgcctggagcctgatggagcgcgattttttccagctgcaggcgcgggcgccgcgcaacgcgccggatctgtttttacaggatggcgatgccgtggaatttaccacgctgaacggcgtgagtggcacggtccagctggagcgcgtgcgctggcggctggaagaagggcgtctgtatcgcgacgtctggtcggtgattgacagcccggcggacgtcaaacccgatgaagtgcctatcgtcagcgaggtgaaagcgatgcaatggcggttttatcaccagggctggcaaaaaagctggggtgactctgcccatctgccagacggcgtggagcttacgctgaccatggaaaatggcgacacctggcgctgggtgtttaccacgccgggagagataccagaagcggtggcaccggcggcagaaaacgcgcctgccccgcaaaatgcgcctgcgccggacgtgaagccatga

SEQ ID NO: 125973 - DNA, 1143 bp, Enterobacter cloacae
atgaaacaggtcctttttgttcgtcccgacagccgtgaggacgggaaaatcatgtggtgtgagtcgggaagcgaacaggttacaaccctggacactccgcaggcgctgcatacccttgccgaccatcctcttgctgcgcgcgtgtgtctgctgctgcccgccagtgagatgatcttccgccactttacgctgccgaagaaaatggcgtcgcaggcgaccgccttctcgtggatggcggaggagactctgattggtgaggtggacgatctccactggacggtgctgaacaaaaaaggcgccgaggtggacgccgtggcgatagattccgcccgcctgcagcagtggctgacccgctttcacgaggcgggcctgaaggtcattcaggttctgcctgacgcctggctgctgccggtcacggcgggtggaagcacgctggttgcgcgggaagagaactactggttgcgcttgtcgccgcatatcgcctgtaacgttgaggttggcctgttgccgctgctgatgcaaaaagccggagagggcgaggtccgctgctacggggacatcccgccgggcattgaggttgacgaacagctggcggcagaacatccgctggtgctgatccagccgcagtggcgggcgtgccgcgtcaacgtgctgcacggtgcgttcagcgcgaaagcgaccagcgcgagggcggcgaaagggatgaaggccgccatcgcggtgatggggcttctctctctgggcctgctgctcggcccccgcatcaccctggcgtggatgctggcagatcgggaaaatcaggtgcagcaggagatggtcgagctttatcaacaccattttccgagtatgcgccaccagaccaaccttaagtaccattttggacagaacatcaagaagcagcctaaaggcatttttttgcagatggacgaactggaaaagatccgtcagtccgttccgtcgatggaaattacgctgtttgaatatgacgactcgcagggagccctgacattaagcgtgagtgcgcaaaacgagcaggcattacaggaattcattcatcaggccagcacgaattttgattttacgttacagcctatttcaaaggacgcgccgtatacggccatgattacagggaaatataaatga

SEQ ID NO: 125974 - DNA, 486 bp, Enterobacter cloacae
atgaaagcgcgaattgcacagtttacatctcgttatcaacaatacagcaccagagaaaaattcattttaaaaatagcggcgggagctttatgcagcgccgtcatctattacgcagggataattcccctggataacatgataaaaaatagccaggcgacgctggcgcgacaaattgaaacggtaaactggatgaaaacagaaattgataaaaatcatctgccggtgctacaggtgaaaaccgataatccacgcagcgtggtggagaatagcgcgcatgaaatcaacctgacgctgaccgatattcgtcaggatggtcagactctggcctttgtcgtgaaccgggtcaacgtgtatgaattaaaaaactggctgcgggagatgaacctcgcgtcaggcgtcaggctggagaaaatgaacctcacgcccgtggatcacctgagcgacgtgaaggccgaaatccagctgacctggaaaaaagtggcatga

SEQ ID NO: 125975 - DNA, 798 bp, Enterobacter cloacae
atgaacgggctgatactcgtccgggagagttatcccgtcgggtttgccgcgatgagcggcgtgttcggcgcgatcctggggagctttctcggcgttgtggtggatcgcgtgccggggatggtgctagaggaggagagccgcagcaacctgcttttcccggcgtcccactgtcccgtctgccagcatgctctgcgcgcatgggagaacatcccgctgctgagctggctggcgctgcggggacgctgtcgttgctgcaagtcgccgattccgctgcggttatttttactcgagctgttgacggcggtgttctttggcctcaccgcccggtggataccggacttagcatcccttttctcgctgtgggtgctggcggcctttctgctgccgctggcgatgattgacggacagcaccagctgctgcccgactgcctgacgcagccgctgctctgggccgggctgctgttccacgccttcagccacgggctgctcctgcgtgatgcgctgctcggcgcggtggcaggctatctttcgctctggctggtgtactgggcgtttcgtctgcttacccgtcgggaagggctgggctacggcgatttcaagctgctggcggcgctgggcgcctggtgcggctggcagtcactgcctgcgattgaattaattgccgcattaagtggcatagtgggctatttgctattaaataaatcgaataaaaataaccaaaccatcgctttcggaccttatctggcttttgctggaatagcgctctatacctgccagctatttgtgaatacctattaa

SEQ ID NO: 125976 - DNA, 2733 bp, Enterobacter cloacae
atgaaatttattaagcctaaatatctggcgctctttattgcagcggcaaccggttctgcattcgctgctgcgccaggtgcaccgaccatcggctccggcaatgacaaatttgcgctggtcgaggtggatcaggccgcgcaggattacaacagcctcgtcaaggtacataacgacggcgtggatgtgaaagtcgagtggaacgtgtggagcggcgacgcgccaacgtctgcaaaagtgctgctggatggtaaaaccgtgtggaccggcgcagctggtgcaagcggctcagccacctttaaagtgaaaaagggcggacgttatcaggagcaggtggaagtctgtaatgccagcggctgcaccaaaagcgccagcaagctgatcatcgtggcggacaccgacggcagccatctgctgccgctgaacgcgccgctgcaggagaacaacaaaacgttcgccaaacatactgataaagtggttgcggcgtatttccctgaatggggcgtttacgatcgtaacttcccggttgataaaatcccggcagcgaaccttaaccacatcctctatggcttcattccaatctgtggcggcgacggcatcaacgatggcctgaaaaccgttgaaggcggtaacagcttctccgtactgcagcgcgactgcgcgggtcgtccggactataccgtcgccattcacgatccgtgggctgcgctgcaaaaaccgcagtctggcgtctccaactgggacgacccgtacaaaggtaactttggccagctgatggcgctgaaaaaagcgcatccggacctgaaagtgctgccatccatcggtggctggacgctgtccgatccgttcttccacatgggcgacccggcaatccgtgcccgcttcgtctcctctgtgaaagatttcctgcagacctggaagttctttgacggtgtggatatcgactgggaattccctggcggcggcggcgtgagcgaacacctgggtaacccgcagcaggataaagcgacgtataccgccctgatgcatgacctgcgcaccatgctgaacgagctgtctgcacagactggccgtacctatgaactgaccagcgccatcggtgcgggccgcgataagatcgaagacgtggattacaccgctgctcagcagtacctcgaccacatcttcctgatgagctatgacttctacggcggctggagcaacaccgagctgggccaccaggccgcactgcgcgcgccgtcatggcgtccggacacaaactacaccaccgagaacggcgtggacgcgctgcttgctcagggcgtacagccaggcaagatcgtggtgggtgcgggcatgtatggccgcggctggactggcgtgcatggctacaccggtgacaatccattcacgggtaccgcaaccggtatggtgaaaggtacctgggaacctggcgtggtcgactaccgtcagatcgttaacgagtacaaaggcaagcctggctgggaatatggttacgacgcgaatgctgaagcgccatatgtcttcaataagtctaccggcgacctgatcacctatgaagatgcacgctctaccgccgctaaaggcaagtatgtgctgtcgaaaaacctgggtggactctttgcctggtctattgactctgataccggcgacatcctgaacgcgatgaacgaaagtctgctgggcggttctaccccggtcgatccggtcgtcaccaaccatgcgccaatcgcgtcttctgcggatcagaacgtctctggcccggcaaccgtcacgcttgatggttctgcttccagcgatccagacggcgatgcgattacctacaaatggacccaggtttctggcccatctgtaactctctccaacagcaccaaagcgaaagccaccttcaacgttgcggcagcgaccagcgaccagaccatggtgttccgcctgacggttacggatgctaaaggcctgagcaacgccattgatgtgcaggttgtgaacaaagcgccaaaagctaaccaggcgccagtcgtgaacgcaatggaggcagtgacgctgcaggcaggagaaacctatgctctgcacgcgcaggctgtggatccagacggtgatgcgatgaccttctcctggagcgtgccagcggatatgcatgcaaccggtaccgataccgcgaacgtgacgattactgcaccagacgttgccaccacgtctacctatacgctgagcgtagttgtaggcgacggcaaaaccagcgtgcagtctaacgtgcaggtaaccgtgaatccgaaaccggctgacgttacaccaccgtctgatgaggttacacctccgtctgatgacgtaacgccaccctctgatgaagttacgcctccgtctgatgacgtgaccccgccatctgacgaagggtctgcaaccggtagctgcgatgcgcctgtcgatgctaacgccagcaaatatgccgcgtgggatgccagcaaaatctacaacagtggcgataccgtgagcttcgaccatctggtgtggaaagcgaagtactggacgcaaggcaaccagcctggcttcggtgtggatgcctgggagctggtcagcaacgtgaagatgaactggcgttctgacctggtttataacggcggcgaaaccacaacctaccagggcaacgtttaccgtgccaaatggtggacccgcggtgacaacccggctaacagcgatgtatgggtgaaagaaggtccttcaacagactgcaaataa

SEQ ID NO: 125977 - DNA, 435 bp, Enterobacter cloacae
atgaaacgcgtgattatatttttactgctgtttagtcaaagcgtattcgcgaactgttgggataacgccggacattattatcatgtcgatccgtggttattgtatgcaattgccaaagtcgaatccggaatgaatccccacgcggtaggctggaaccacgacggcacgcgtgacgtcgggttgatgcagattaacagctcacacttcagtgagttagaacgtcagggtattgatgaaaatcagcttattaatgagccctgtacctccattatggtcggcgcctccatcctgtccgggatgataaacgtgtatggctataactgggaagcggtgggagcgtataacgccggattgaaaaaagaaaattatccgcagcgcatgcgttatgcccataaagtgtgggcgaagtatcagcaaataaaatcgggtaaataa

SEQ ID NO: 125978 - DNA, 957 bp, Enterobacter cloacae
atgtcttccatcgtcgatacacctttttcaaacctgccacagcctgcatcgggttggcagctcttcagtcatctggcttccggtaagctcacgccagggctggcgtggcaaaaccccgcctatcgacgtaaattcatgctacgttcgctggcgacgcctgtaagtaccgctcgcctgttgacgagccttgcaaaacagccgagcctgatgcaaatgctgcaggtgcagccaggactgccgtgccgtctgcatcgcccctggctgacggtgaatatggatcgccagcaggcccttgagtcccttaactggcactatcaaacgatgagccgccatatgccggcatcgctgctctcgggttatctgtcgaaaaagggcttcacgctgctcaccttaaccggtaaagatgaagagcaatttaccgtccgcctgtgcgccgatgcgtttctggataaagaaggggaagccaccctcgccttctgcgaccaccagaatacggtgctggccgagatgaccttcaccctgtgccagcttgagggaaaatcgacgctgtttatcggcggcctgcagggcgcaaaagcccacgttccccatgagctgatccagggtgcgacgaaggcctgccatggtctgttcccaaaacgtctgctggtcgaagccgccatgactctcggcaccgccttcccggtagaacagattgtcgccgtcagtaacgacacccatatttatcgcagctggcgctaccgcaagaaaaaagaggggaaactgttggccgattacgacagtttctggatctccatcggcggtgaaaagcaggatagcggcaacttcatgctgccactcgtcatgccgcgtaaaccgatggaagagattgcgagcaaaaaacgctccgaatatcgccgccgctacgcgctgctggacagcctgattcagcaggtgaaccaggcgactcaacgttaa

SEQ ID NO: 125979 - DNA, 1311 bp, Enterobacter cloacae
atgtcagttgaagcactaagcgctttcatcgctgagtacattgccggacgacggcaaacaaagctggaagcatttgataaagaggccgcaaaacgcagcgctgaagagagcgcgacgcttgcggcagaacgtcgggaactggagcttcgctatgaaccgaaagcctggctgacggatgccgcgaagcgagccggacaaattaacctcgtgacccatgcggcgaaatttacccacggggattcaaaaagtagcagtatttacagcgaggcagtggcgcaggaagggtatctcagcaccgctgcgttgtcaggtctggaaccggatgctgtgggaaacgccgcggcgctggacgtcgcgaaattgctgcaaacacgggttgacggtggtgattctctactggcaagcctgaaacgcggagatcgcgctgcgctggccgcttttaccgatgacgcaaaccaactggatgaatggattgcgggattttcccgtgcgttaacgtccggagaacccgcttcgcacaaattggctaagcagggctatttcccggtaggtgaaaattaccatctgctgagcccgttatttgccacctcgcttgttcacgccatgcatcagaaaatgattgccttccgttttggcgacgatgttaaagctatctggaaagcacgccgggaaaaaacctggcatcccactccgctgacgcttttcccggattcagcggaaatacactttggtggcaccaaaccgcaaaacatttcctatctcaacagcgtccgcggcgggcgtagctggcttctatcctgtcagccgccgcagtggaaaaaagcagacaagccgccgacgacgttacgttctattttcactttaggtggtcagtttgatcgacgtgcaaacagcactgttcaactgcttgtgtctttattggccagaaccggtgattacaccaatgtccgtattcgcgaagcgcgtgatgaatacattgatgcgcttatcgacctgctgtttgtggttgcgtcggaactacagcgtgatacatggcaaaactggacgctctcgtgcgaacgattagtcactcatcaacaactctggctcgatccctggcgcaccaaaaccgatgaggcttttcgtctcgagcgggataaagacgactggcaggtaagcgtcgcaacagattttgccctgtggcttaacgcgcgcctgagcaaggcattaaaggatgtggggtatgtggaacagcgtgaatggcaaacccgtgagcgtttacgcagcaacctgcgtgagatggaaaaaattatccgggaggcgctgaaatga

SEQ ID NO: 125980 - DNA, 2265 bp, Enterobacter cloacae
atgggaatttctgcgcttagcatctgcgccattctggcgataattccgttactctggttacctgaattgccgtcaccttacgccgtgtgggtcatggtggctggcgggctagcgcttgctgcatggcaaaacagtcgactgaagtatgcgggtatgacgctgttattgtgtgcctggggcattttggccgcgcaggagagcgtctggccgatgcagcatttaacaacgggggccgtgcaggctgaggtagagctcaccgcgaccgacggcgccactcagcatcagggaagcattctaagcgtcaatggcaagcgctggtgggcctctaccggcgtaacgctgtatggcaattatctgccgcagaacgcgtgtgccggtcagcgctggaccatgacgctcaggctcaggcctgcacacggcgaactcaacgacggcggttatgatgctcagcgcagcgcttttgcccgacatcaaacgctgagcgggcgcttcacccgtgcggagatcgtcgacgggcgctgcagcctgcgagcgcaatatctgatgtcgctgcaaaaccgactgtcggcttaccgatggggagcggttatcctggggcttgggatgggagaacgcctggaagtaccccgtgaaataaaagacctgatgcgggaaaccggcacgctgcatctgatggcgatttcgggtctgcatatcgcgctggcagcctctctcgtctggttacttgcacgtggattccagtttttattacccagccaccgcgtccactggcaaatgcctctccttgccgggttgttctttgctgctttctacgcctggcttaccggtttgcaaccgcctgcgctgaggacgatcatcgcccttgcggtgcttgctctgttgcggattactggccgtcaatggtctccctggcaggtttggagctgctgcatcgcggcgatactgattaacgatcccctggccgtactttcgcagagtctggctctgtcagcctttgccgtcgccgcgctgattttctggtttcagtggctgcctcttcccgactggaattggacacgacgtatgcggccgctactgaacctgatttatctgcaggtcgggatgttgctgctgctcatgccgttacaggttctgattttccatggcttcagcttctcctccctggtcgcgaatctctttgccgttcccctggtaacgtttgtctccgtcccgctgatcctgctcggtatgctactccatctgctgccgctggctgcggtagaaaatgccatctggtttgccgccgataagtcgcttgcgggactcttctggctactgatgcgcctgccagatggctggcagaatgtcgatcagcgctggcaagccctggcattactgccgtggttgagtattattgcctggcgttttcgtgcctggaaaaccgttcctgccgtttgtcttgcaggcagtgtcctgctgacatttcccctctggcgagtggaaaaaagcgagagctggacgctgcatatgctggacgtggggcaggggctgtccatggtgattgaaaggcagggaaaagccattctttatgataccgggctcgcctggccggacggagacagcgcgcagcggttaattattccctggcttcgctggcatcacctgcggccagacggggtgattctcagtcatgaacacctcgaccatgcaggaggcctcgcgtcgttgcaaaaagcatggccggatatatgggtaagaagcccgttacgcaggacgggacaccgcccttgttttcgtgggcagaaatgggaatggcagggattaaccttcaccgtccactggcctcctgaaaattacccggcccaggggaataaccattcctgtgtggtaaaggtggacgatggggagcaaagcgttctgctaacaggggacattgaagtgcaggcggaacaggctatgcttagccattactggcgtcatctgagggccacgctcatacaggtcccccatcatggcagcaatacctcgtcttcattgccgctggtacagcgggtggaaggacaaatcgccctggattctgcggcccgctataacgcatggcatttcccgtcggcaaaagtcgttcgacgttatcgaaaagaggggtatatctggcacgatacccctcattcaggacaaatatcggtgacattctcgcaacatcactggcaaatccggcgcttgcgagagcaaattttaccacgttggtatcatcagtggtttggcgcgcccgtcgataacgggtag

SEQ ID NO: 125981 - DNA, 1059 bp, Enterobacter cloacae
atgatgaagcgcaatattctggcagtggtaatccctgccctgctggtagccggtgcagccaacgctgcagaaatctataacaaagactctaataaactggatctttacgggaaagcggttggtctgcattacttctctgactatgctggcaacgacggcgaccagacttacgctcgtctgggcttcaaaggcgaaacgaaaatcaatgaccagctgaccggttatggccagtgggaatacaacttccagggtaacaactccgaaggcgccgatgctcagagcggtaacaaaacccgtctggcgttcgcaggtctgaaattcggtgatgcaggctccttcgactacggtcgtaactatggcctggtgtatgatgcaatcggcatcaccgatatgctgccagaatggggtggcgacactggcaagagcgataacttcttctccagccgtaatggtggtctggcgacttaccgtaacagcggcttcttcggcctggttgacggtctgaactttggcgttcagtatctgggcaaaaatgaccgtgatgatgcagtacgttctaacggtgacggctgggcaacctcagttagctatgatttcgaaggctttggcgttgtgggtgcatacggcgcagctgaccgtaccaacagccagcaaaagctggtctggggtaaaggcgataaagctgagcagtgggcaactggcctgaagtatgacgcaaacaacatctacctggcagcgctgtacggcgaaatgcacaacgccgcgcgtttgagcagcagcggtttcgctaacaaatctcaggacttctctgttgtcgctcagtatcagttcgacttcggtctgcgtccatccatcgcttactacaaatctaaagcgaaagatgttgaaggcattggtgatgaagatttcatcaactacatcgaagttggcgcgacttactacttcaacaaaaacatgtccacctatgttgactaccagatcaaccagctgaaagatgacaacaaactgggcatcaacaacgatgacactgtagcactgggtctcgtctaccagttctaa

SEQ ID NO: 125982 - DNA, 1293 bp, Enterobacter cloacae
atggctaatgcatcatacccgacaggcgtcgaaaaccacggcggttcgctccgcatctggtttctgtataaaggtaaacgtgtcagggaaaacctcggtgtccctgacactgcaaaaaatcgcaagatagctggtgagctgcgttcttcggtttgttttgcgataaggatggggaattttaactatgcagaaaaattcccaaactcaccgaaccttgcccggttcggtcaggatagaaaggaaattactgtgctggagcttaccgaaagatggtcagagctgaagagaatggagatcagctctaataccatgagtaggtacgaatccatcataaaaaacatgcttccgcgcatcggcgaaaataaaatggtttctgcggttaccactgaagatttgctgtatgtaaggaaggagttgctgacgggcttccatgtaatgaagaaggatcaccggacacaggtaaaaggccggaagtcttccacggtgaataattacatgatgctgatggccgagatcttccagtttggagctgataacggctacgcaaaggaaaacccgtttagcggaattaaccgtctcaggaaggcaaaagacgaaccagatccactcactacagacgagttcatcaggttcattcaggcatgcggccaccagcagatgcgaaatctctggaccgtcgccgtttatactggaatgaggcatggggaattatgtggtcttgcatgggaagacatcgatctcaccgcgggaaccattacggttaagcgtaaccttacccaaacgtatgagttcaccctgccaaaaaccgaggcaggcactgacagggtgatttatctcatacaaccagctattgatgccctcaggaatcaggcccaactgacgcgccttggccggcagcatgaggttgaagtgaatttgcgtgaatatggccagtcagtcatacatccatgcactttcgttttcagccctcaatgcgtcaagcgtgggtcccgaagaggatatcattatgcggttaattcgattaataaaatttgggccccgataatcaagcgcgccggcattcgttaccgcaacgcttaccagtcacggcatacctatgcgtgctggtcattatcagctggtgcaaacccaaactttatagcaactcaaatggggcataccgatgcacagatggtttacaaggtgtatggaaagtggatgtcagagaagagcggcgaacaggttactctgctcaacaaggcgctttcacacattgccccatcgctgccccaaagcatgatagtagcgcagtag

SEQ ID NO: 125983 - DNA, 258 bp, Enterobacter cloacae
atgcaaaccagtgctgaaatcgttcttctggtgccgaatgactgggttagcgaaaaggttctgattgcggttaccgggctcaagcccggaaccatcacccgtgccagaaaagaatcctggatgctgggccgcgagtacctgcacatttcaccagatggtaatcccaagccttcgagcgaatgcatgtacaacaggaaagccgttgatcagtggatcgaggcgcagaaaaaaaatcaaccaggtgcgaagacagcatga

SEQ ID NO: 125984 - DNA, 372 bp, Enterobacter cloacae
atgcacaaattcttcgtggagacagacaacctgaacactatcagcgattgcctgcagcagcttgttaacgcagaagaagcgcagctcagtattgaagagcaactggcgaaatcgaacagcagcagtgaatggagtacatggcgcaaaaaggcagagaacgctctgcggctgatcaaagggaagcgtcgcatcatcacagcccgtctggcagtcctgcgtcatgaggaaaaagaacgcaacaaagatctgcaccagcagcacaacgacttcctggttcaggctctgcgcgaaattgtaacgccctcctcttttgcgcgttgcgtgcgtctggctaaagagaaaatggaggagatccatgcaaaccagtgctga

SEQ ID NO: 125985 - DNA, 579 bp, Enterobacter cloacae
atgattgcttcagcctttactccggagccgacatcaacaggcatccgttttggtaaccgcgtcattggttattccgtcgctgttcgccagctcgacaatggcatctatgacaaacgaattccggatggattagatctgctggcttgcgtgatggaagcgattgaaagcggctggtttaccccgggcatcgagaaagaaatcatcatttggcgctggatgcttgttgccgtcttcattaccgaggagcaggcaaagaacggcacggttgaggttgccaacgattctggaggttttgacaccgcagttatctactcaggacaactcggttcaatcagtgtttatcccgcgccagagcggttcgcactcgcaagccatgtggaagggttagccattgagaaatacggtcaggaaatcggccagcagatggcgctgcgcatgtaccgggacatgttagatacggacgctgagaacgggcttcgactctcaaaaatgggccgggagggtttcaatctcctgcatgacagcttcattgaacagattcagaaagaaggtatgccagacatgccggtaatgcactga

SEQ ID NO: 125986 - DNA, 423 bp, Enterobacter cloacae
atgaacgataaacgcaccgtaagcacaattgatctggcattacagaaacacgatacgccagttggcccgctgttcgtggcagtacgccacggacgcattaaaaaatgcttcacccgcgacacagcgatccggtatctggcgttcttcatgacttctgaagcatttgaacgctcaggattcgagcagcgtcacccagatgtgcaggcagttcatcctcttaagccagaacttaactgttggcagcggggcggcgtaacccacgagtatttcatggcccaccagcgttgtattcgtcgtctacgtcgcatcctggcgcgtaagcgagaaatggagaagtggtgtgagaaatgggacgcgatgcatgaccggttcattaaagaggtcgatgcacttcaagccatcaagcctaaaggagtgtattga

SEQ ID NO: 125987 - DNA, 408 bp, Enterobacter cloacae
atggataaattaatcgagacatatcgccgccgaattttaaaagctgcgttattacgccaccagcgtaaaacaggcagtaactgccttgttataaagctcaataaaggcggcattaacacagtcgagttaacagagattttacttgatggattattacgaaaattcgaaaggctcgcgttcagtgagtacggaaatgtcgaaggcgtaaaagctattaagggaatttacagcagcgctgttgatgttaatggcagaggtgaattccttacggatagcggaaaggagttaatcgacgagctcatttctgagctggttgagttcgtcaaaaaacaaaaagtggaagctccgaaaacggagggtcatgaaatggagggatctgatggctcttacagcgatacgaattcctga

SEQ ID NO: 125988 - DNA, 387 bp, Enterobacter cloacae
atgcaaaacgctatcgcgattaatcagccaataaaaactcctcaaatgctgttcggttcagacaatattaatgactttggtaaccgcgttcagagctgcaggatggaaggtgactcaatgcagccaaccatcgaaccttgtgaggtagtcgctttcgttgattgcggtggccgtgcgcttacccctggcatttatgtttatacgatggacgtatttggtcgtccttgcctttttattaagagagtagagccattggtttgtggttcattgaaaattatttctgacaaccatcattacgaaaccttcaccctgaacaccgatgaacagaaagaaatcaaaattcacggtcgggtggtcgcttctttgactgtgaggcgcttcgtatga

SEQ ID NO: 125989 - DNA, 219 bp, Enterobacter cloacae
atgaataacgaaacagtaagtttgaataaggaagaaaccagcaaaacgattctaagctggtcacatgatgtgcggtgttgtgaacgttcgttatgtattcttttggaacaaatgaccagcattgaagaagaaagagaacatgctctaattactttagtcgcccaaacactggataaactaaacaagagcatagatgacttcgacacctataaactgtaa

SEQ ID NO: 125990 - DNA, 282 bp, Enterobacter cloacae
atggctattaactccctcttagttgacgcctcaatttcatcaactcaaaactcgtcaaaaaataaagtaagtgatggtcctttatcagcaacagcaaagctcgaagatctcgctgctgaaatcactgagaatacttcgttgttggaagttattcaccgcataaatgaattcacaccagaagccgataacgcgattgcttgtctgattcgctcaatgaataagacttgtgaaactgcttatgcgtatgtggagcaattcagcaatgaaggggaacctaaatga

SEQ ID NO: 125991 - DNA, 678 bp, Enterobacter cloacae
atgaaaactgcggaaaggattaatgaacttttgaggctcaaggggtggagtcaggctgaactggcaagacagttgggtgtaacagcccaatcagttcaatactggacaaccggcgagacttcaccaagaggcaagcggcttgccagactatcggaaattagcggtctgccccagtcatggttccttggtgaatctgagagtccgaaatttccaagtacgcataggaacgatacccatgccgatagcgttaggtttagtgtgcttgatgtcgagtttagttgcggtgacggctcaagtgttaagggcgacttcattgatgtagtcagatccattgaactcgatcctgaatacgctcgtcagttggttgggaataggcctttcaaaaatattgagataggtaatgccagaggcgacagcatgacgccaacaatatctccgggggatttgcttttcttggataaatcaataacttattttgatggtgatggcatttacgccttctgctttgatggtgaatgctatgttaagcgtcttcaaaaaatcggctccaaaatggtagttctttcagataactcaaactatcaaccttggagtattgagaaagaagcattcaacatgctttacatacaatcaaaggtaatttcttcagttcccttcaatataaatagattcggttaa

SEQ ID NO: 125992 - DNA, 294 bp, Enterobacter cloacae
atgcaacagtttgaaactctaaatttactgccttcggcgcatagccaggccgatgccgattggataaagcagcagttactgagcctggcgccagcagcacgtcaaaaagcaattcagcgttatgcagctgtgtatcaggaatcgttcgaagccgagcccgtttcataccgcaaggagaaccgggcaaggcatgaagcaaatatgcggcttcgcctgtttgtgagaaatcacggcagggctttacaggggtataccgccgaacctcccctggccggaacgccaacgcgttcctga

SEQ ID NO: 125993 - DNA, 1620 bp, Enterobacter cloacae
atgcagctgacgatcacaccgaattttgcgcaggaacgagcacttaaccagctgcgccgtaactggaaggatacagaaaccttcatggtgtactcgccgacaggcagcggtaaaacaggactggccgcctttatcgttgccgggttcgttagtcgtggcatgcgggtaatgttttgcgcgccttaccagatcctcataacccaaaccgcaaagcgttttgtggagtacgggttgccgggtgatgaaatcggctacgtctgggcggatcacccaaactacgatcctaccctcaaaatacaaatcgccagcgccgatacgcttattcgtcgcgtgtttcctgacaatatcgatctgctgattatcgacgaagcgcacctgcgaaaaaaacgcatcctgcaggatatcgaacgcctgcgcgaaaaaggcgtgaaagtgatcggcctgtcgggtacaccgttttccccgttcctgggcaaatactatgaccgactgattaagccaaccaccatcggcgagctgatccagcgcggcgacctgagcaaatacgaattttacgcgcccacaaagccggatctgaaaggggttaaaacctctccgtccctgcagtacggtaccgactacaacgaggcgcagctggcggagatcatgtgcggttcaacgctggtgggcgatatcgtccaaaactggctggagaacggccgggacctgccgacaatcgcgttctgcgtcaacgtagaccacgctaattttctgactattcagtttaaccaggctggcgtaaatgcagaggttatgactgcagatactcctgcggaagaacgccaaaccatcattcaccgcttcgaaactggcgccacaaaaatcatcgtcagtgtaggggtgctggttgccgggttcgacagcgatgttcgctgcatcatctacgccaggccaactaagagcgaaattcgctggctgcaggcgctcgggcgtggcttgcgcaccgctccgggtaaagagtcctgcctcatcttcgatcacagcggaaccgtgcaccgcctgggttatccggactctatcgaatatgacgatcttccgggtaaatcagacgggatggaggagggcgcgcgccgcccagccgaggaaagagcagaaaagctgcctcacgaatgctcgcaatgccacttcatgaagcctgctggcgtctatgtctgccctaaatgtggccacaagccgctggccggtgaggacattgataccgacaccgggcgaaaactcaaaaaacttgggggcgagcagcgccagccgacgaaagcagagaaacaagcctggtggagtcagatcaaattctatcagcgccagcgcgtatcgctggggaaaaagcctgtcagcgatgcctggtgtgctcacaccttccgcgaacgttttggcgaatggccgaacggactgagcgattacacgatggacatcacgccgacagtttcaaatttcattaagcacaagcggatcagcttcgccagacgaatcgaaaaagagcatctccagcaggcaaaggcagaagagctgcctacccaggaaagaattcagcaggcgcttaatcgcgtcagtgatatcagacagcagttaggaaaacgagcatga

SEQ ID NO: 125994 - DNA, 969 bp, Enterobacter cloacae
atgaaaacggtagaagcagcaaaaggccagtgggccatgatttttgagcattacggactgccgccgatcaccggtaaaaaccactttagagggaagtgcccgctgtgtgattcggttggcaaattccgcatcgacgaccgcgacggtgcaggaacatggatctgcacctgcggcagcggtacgggaatggacttggttaccaaaacccagggcaaaccatttaacgaggtttgccgcgaaatcgatgcacttatcggcaatacgttcaggcgtgacaaaattcccgaggctagcgacgcttccaagctgcggaaaaaggtgctcagtaattttgcaaaaatgtcacccctgcgcggtacatgcgccgctgaataccttaactcacggggtatttatcagcttccggctgagtccgtgcggcttaatcccaagcaacggcataacggacgggtgtaccagtctatttattcactggcaacagatgataaaggcgagctgtgttatctccatcagacgttattggatggtgcaaaaaaggctgacatcggggccagcgccaagcggcagaaatcactgcaggaagataactatcttgatcacgctcgctcagttgcgatccgtatgttcccggtcgccagcacgctgggcatcgcagaaggaatcgaaaccgccttgtctgctcatcaaatttacaaggtgaatacctgggccactatgacaagcggattcatgaagaaattccgtgttcctgcaggcgtgaagaatttgattatttttgcagatcgagacgtaaacagcgccactggattggctgcggccacggaatgcgcgcatgccaacttactggcaaaaaatgacctggaaaaaatcagcatctactacccggataacggggattttaacgacatgctcatgaacggcgatcaggttcgtgaggtggttttcttcaagaaaaaggcggctgcataa

SEQ ID NO: 125995 - DNA, 861 bp, Enterobacter cloacae
atgcgtactgataacaacgaacataaagcactattcaccatcccgacggcagcgcacagctccgccctcgcaaacatcaagcctcttcccgagcaacggagaatcaccgggcataagcagactgacgcttatctttgggtgctggaggttatccgcctgaacgaacccgcacatctgggcgcagccgaagccgcgctggagaaaattgaaatctccccaaaagaggccgaggaacgttacgcgcattatctgctggcgaatggtggcgatcctttccaggttgctttcggtaccatcggcatggataacccggcccgtagcattcagatcgcccgcgagaacattaaaaaggcggctgatgtgcgcgccatttttggcagttacgaagctgctatggatgatgtggaggctgagcgcgtgatcaagtcttccccgaaatttatcaacgattaccgttggggctggactcaggccgagaagaaagctggcagcattaacggcggacgtattaacgaaattgacgatcagcgccgggcatttgtcgatggttatcgtgatgttttgccagagccacacacgctttcggatgtcgtgcgtgaactgatttattgggattggctttactgggttcgcaacactgccgggaacgagctcgaacacgaatacggttactccggacaccacgaatcagtacatgaccgcgagcgctaccttgagaaattgctcgtaaccatcaaaccagttacacgagctgaggccgtggaagtctgccgctggttcatgaaaagcgaaaaatctgaatacatggacgacgacggcgcggcggttattcttaacctggtaggggagtgtgaagaatga

SEQ ID NO: 125996 - DNA, 783 bp, Enterobacter cloacae
atgaaactggaggcatcactaaaacactttagccctcagggaatgcacatcagcgacgacgtgaaaggaacctctccggatcgccttacaggaacagatgtaatggcggcgattggcaccaccagcagccgtgcgcgcttcggcctggcggcgttcttcggtaaagcgggaatcagcaaaacggatgaacagctcgcagttcaggcgctggcgcgatatgcgatggatgtcgccccgaagaatgttcgcaaagcagctggtgtgcagttcggatggtgtatgcagatgttggcacaatttgcctttgctgattactcccgttcggcggctaccagcgtgacatgtcacagttgcagcggtaccgggtttatctccgggagtgaggatgtggttaaacatcctggtattttcgacgccgacggtgccgaattggtggccccgaagattaaaaatgagctggtgaatagggtttgcggaacatgcggaggaaagaaagtgatccttgcccggtgcaggtgtggcggtaaaggcgaagtgttggaccgcaaagcgactaaggaccgcggcgcaccggttttcaaaacgtgtgaacgttgctctggtaatggcttctctgcaatctcctcggcgacggtacaccgtgccattctgaagcgtctcccggacctccatcaatcctcatggtcacgcaactggaaacccttctatgaaatgctggtggacactctgcgccagggggagcgtcacgcagcagtggaatttgagaaggcaacaacttattaa

SEQ ID NO: 125997 - DNA, 195 bp, Enterobacter cloacae
atgagcgcagatgaaaacttgttgagtaaaatccaggaagtacggacggtagaggatgtggagcaagtcaatttgggcctttctaaaggctgggtgattttaaagatcaccgagagttctacagtctgggaagatggcagcaaaagcagtcttgttacatatcacatgggcaagccgaaggcattgccggtctga

SEQ ID NO: 125998 - DNA, 396 bp, Enterobacter cloacae
atgtccgatcctgtttctggcactacggtagcggctggtggtctgatgggagccagcatgttcggactggcaaccggcatagattacggtgtggtgtttggcgcattcgctggtgcagtgttctacgtcgctacggcggttaatatcagccgccttaagctggtgggctacttcatcacctctttcatcttcggcgtcattggcgcgccactgcttggctcttacttctccaaatggacggggtatagcgacaggccacttgatgcgctgggcgcggtaatcgtagccgctattgctattaagctgctgaccttcgtcaacagtcaggatttgggtagcctgtttggaattctctcacgtttacgtggtggaggggccagcaatggtaacaagtga

SEQ ID NO: 125999 - DNA, 306 bp, Enterobacter cloacae
atggtaacaagtgatccgagtgcgatggcaaacgcaattatctctgctgtcatcgttattgcactgatgttctaccagcgcggcggggcgagacatcgccctctgatatcgctgatggcttatttcacggtgctggtatacgccagcgtccctttccgttacctgttcggcttgtaccatgaatcccactggtttgtggtgctggtcaacgtcctgatatgtgctgccattctctgggctcggggaaacgtggcgcgcctggttgatgtgctgaggcattcgcatgaccaaagacgaaatttttga

SEQ ID NO: 126000 - DNA, 543 bp, Enterobacter cloacae
atgaccaaagacgaaatttttgacgccattcttggtaaagagggcggttatgtaaatcaccctgacgataaaggcggtccaacaaactgggggatcacacaagcggtagctcgcgcccacggattcaccggagatatgcggaacctaacccgccagcaggcgctggacatcctgacggctgactactggacagggccacgctttgaccttgtttcagaggtatcaccatccatcgccgccgaactatgcgatacaggcgtaaacatgggcccatcggttcagaccaaatggtttcagcgctggctgaatgtgttcaacattcagggcacgctctatcccgatctgattgcagatggttttatcggtccgcgtactatcagcgcattaaaaagctatcttgcccggcgaggaatagagggggagttggttatgctccgtgctcttaattgtagccagggtcagcgttatctcgaactggcagaacagcgcagcgcgaacgagacatttgtttatggctgggtaaaggagcgggtggttatatga

SEQ ID NO: 126001 - DNA, 270 bp, Enterobacter cloacae
atgacgcttgagatgattaccggactcgttgttgcggtggttgctgctattgccgccgcgtttggtctaggtcattcacgcggcaccagcaaagcggaagccaaagcagaccagcagcgcaccgaagaaaaagccgcagccactgaagcagtagccgaacgccgggttgaagcaacgaaagaggccagcaatgtacagcaaactgttaaccatatgtctggcgacgatgttgatcgcgagctgcgggacaactggacccgtaaaggttga

SEQ ID NO: 126002 - DNA, 525 bp, Enterobacter cloacae
atgaataatccgtcagttattccggccttcgacttccgcgaaatggttttgccatccaacggaaaggtcatcacgacgtccatgaatatcgctcgctatttcggcaaggcgcataaaaacgttcttcgcaccatcaagcggctggagtctgattgctcccctgactttaaccagctcaattttgagcccgttgaatacctcgataagaaaggcgagatgcgcctgatgtacaacatcacgaaagatggctggatgatgcttgtaatgggtttcaccggaaagacggcgaccgcgattaaagagcaatacatcgccgcctttaactggatggccgagcagctaaaccgacgcatggcgatgggtgaagaaatgcagcaccgctacgccatcaaagaaacgcgctcaaagctgaaaggcacgatcggcagccggttgatgaacgagcggaagaaagagaagcgcgttcttgagatcgagcatgagcacatcatgcaggtaacacagccggaattacttattggctga

SEQ ID NO: 126003 - DNA, 495 bp, Enterobacter cloacae
atggctggaacggcggggcgttccgggcgccgcccaaagccaacggcgcgcaaggagctggccgggaaccccggtaagcgagccctgaataaagaagagccggtgttcacccccatcaagggcgtggcgccgccggactggtttgaagaagaggatctgccgctcgcggcgatcatgtgggaactgaccacaaaagagttgtgcggccagggcctgatatgcgttaccgatcttgccgtgctcgagcgctggtgcgttgcttatgaattctggcgccgcgcagtgaagaacatcgcgaaagatgggctttccattaacggcgcgatggggggcaagataaagaatcctgagcttaccgcgaagaaagaacaggaatcggagatgagttctaccggttcgatgctgggcctcgaccccagcagccgtcagcgtctgatcgggcttgccggtcagaagaaaccctcaaacccattcctgaagatgatcagctcatga

SEQ ID NO: 126004 - DNA, 1734 bp, Enterobacter cloacae
atgagccggaaatcgtatcccaacgttaacgccgcgaatcaatatgcccgcaacgttgtgcgggggaagatcccggcgtgccagtatgtcattcaggcctgccagcgccatatcgacgacatggcagccgaaaagagtaagaaattccggtaccgctttgacaaagatatggcggagaaggccgcgaagtttattcagctgctgccgcacaccaagggggaatgggcattcaagcggatgccgatcaccctggagccgtggcaactttttatcatctgctgtgcgtttggctgggtgcagaaggggacaaggcttcgccgtttccgggaggtttataccgagatcccccgcaagaatggcaagtcggcgatctctgccggcgtggcgctgtactgcttcacctgtgacaacgagttcggtgccgaggtctattctggcgccacgacagaaaagcaggcatgggaagtgttccggcctgcgcgcctgatgtgcaaacgcaccccgctgctggtggaggcgttcggcatcgaggtcaacgcttcaaacctgaaccggccggaagacggcgcccgcttcgagccgctgatcggtaaccccggcgacggggcctcgccacactgcgcgatagtcgacgaatatcacgagcacccgaccgatgcgctctacaccacaatgctgacaggtatgggtgcacgcaggcagccgctgatgtgggcgataaccaccgcgggttataacatcgaggggccttgctacgacaaacgtcgcgaagtgattgagatgctgaatggctctgtgcccaacgaggagctgttcggcgtggtttatacggtcgatgacggtgatgactggaccgacccgaaggtgctggagaaggcaaacccgaatatgggggtgtcggtctaccgtgactttctgctgagccagcaacagcgtgctatcaataatgcccgccaggcgggtgtgttcaagacgaagcaccttaatatctgggtcgctgcccgggccgcgttcttcaacctggtgtcctggcagaactgcgaagacaagacgctgacgctggagcagttcgagggccagccctgcatactggcgtttgacctggcgcgcaaactggatatgaacagcatgccgcggttgtttagccgggagattgacgggaaaacacattattactccgtggcgccgcggttctgggtgccgtatgacacggtttatagcgtcgaaaagaacgaggatcgccggactgccgaacgttttcagaaatgggtagagatggggttactgacggtaactgacggagcggaggtggattaccgctacatccttgaagaggccaaggctgcgaacaaacttaacccggttagcgagtcacctattgacccgttcggcgcaactggcctttcgcatgatttggctgatgaagggcttaaccccatcacgattgtccagaactacaccaacatgtctgacccgatgaaggagctggaagccgccattgagtcgggccgctttcatcacgacggcaacccgatcatgagttggtgtatcagtaacgtcgtcgggaagtatctgcctggtaacgacgatgtggttaaacccatcaaagagcagaatgaaaacaaaatcgacggcgcggttgcgctgattatggcgatcgggcgggcaatgctcaaagagcctggtgatttcctttcatctctcgattcagacgaagagttcttaattctatga

SEQ ID NO: 126005 - DNA, 162 bp, Enterobacter cloacae
atgaaatcacttatcacagatgtaatcgggctggccggttacggcctgctcacgtccggattttacctgcagttcgggttggctccggcactgatgttctccggcggactcctgctggtggcgggactggttatggccagaagggggaagcgtgctgcttga

SEQ ID NO: 126006 - DNA, 1152 bp, Enterobacter cloacae
atggaggggctattcagggcggaggtgtacgtaagccctgaaacggcgatgaagctggcggcggtgtatgcctgcatatacgttttgtcatcaaacctcgctcagatgccgctgcatgtcatgcgaaagcacaacggcaaggttgagccagcgcgggatcacccggctttttatctggttcacgatgagccgaacacctggcagaccagctataagtggcgcgaactgaagcaacgtcacatcctcggctggggcaatgggtacacctgggttaagcgcagccgccgcggtgaagtgacttccctcgattgctgcatgccgtgggaaacgaccctgattaataccggcgggcgctatacctacgggctctacaacgaagagggggcttttgccatcagccccgacgacatgatccacatccgggcgctggggaataaccagaaaatgggcctcagtccggtgatgcagcacgccgaaacaatcggcatgggcatgagcgggcagaagtatacggaaagcttcttcagcggaaatgcccgcccggccgggatcgtgtccgttaaaagcgcgctcaacaaagacagctggggctggcttaaagaacagtggcagaaggcgtcgcaggcgttacgcagtcaggaaaataaaaccatgctcttgcctgcggatctggattacaaggcgctgaccgtgtcgccgattgacgcccagatcatcgacatgtcaaagctcaaccgctcgatgattgccgggatctttaacgtgccggcgcacatgatcaacgacctggaaaaagccaccttcagcaacatcacgcagcaggccattcagtttgtccgctactcgatgatgccctgggtgacgaactgggagcaggagcttaaccgccgcctgtttacccgcgccgagctggccgccgggtattacgtccggtttaaccttactggcctgttacgcggcaccccgcaggaacgcgcacagttctaccactttgcgatcaccgatggctggatgagccgcaacgaagcccgcgctttcgaggatatgaatccggtcgacggcctggacgaaatgctcgtcagcgtcaacgccgccaatccggcggacgatttcaaaaccaccaaaaccgaaaaggaaaaaaccgatgagtga

SEQ ID NO: 126007 - DNA, 600 bp, Enterobacter cloacae
atgagtgaacgcgagactcgctgttacagcggtgaggtccgtgccgaacagctgggggagcagcccacgcggattatcggttacggatcggtgtttaacagccgctccgaacccctctggggtttccgcgagattattaagcccggcgctttcgatgatgtacttggcgacgatatccgcggactgtttaaccatgacccgaacttcatcctcgggcgcagcgcttccggaacgttgagcgtcagcgtcgatgataaagggcttcgctacgacatcgcggcccctgacacccagaccattcgcgatctggtgctggcaccgatgatgcgcggtgatatcacccagtcgtccttcgcattcaggatcgctcacgatggcgagcactggtaccaggacgatgagggcatcatcattcgcgagattaaccgcttttcgcggctctttgatgtcagtccggtgacctatccggcttatcaggatgccgattccggagttcgctccatgaaagcctggcaggaggcgcgcaacagcggcgcgctggcgcaagccattaaccaacgaacggcgcgcgagcgcatgctgactcttcttaatgcgtaa

SEQ ID NO: 126008 - DNA, 1221 bp, Enterobacter cloacae
atgaaattgcatgaactgaagcaaaaacgtaacaccatcgcccgtgaaatgcgtgcgatgcatgagggcatccctgaaaacacagcctggactgaggaacagcgcactcagtggaataaagcaaaacacgagctggatgcgctcgacgaacaaatcggccgcgaagaagagctgcgccgtcacgatcagacctacgttgacgagcaggagccggagcagcgtcagcgccagattaccccggagaagcaggcagatgagcgccgcgctgcggcatttgatcgccttctgcgccacggcttcggtgaactgactgccgaagagcgccaggccgttaaagaactgcgcgcgcagggcaccacccctgacgataagggcggctataccgtacctacgcagatgcgcaataccatcatcgatgcgatgaaagcctacggcgggatcgcgagcgttgcccagattctcaatacctcaaacggtcaggatattacttggtccacttctgacggtaccgctgaagagggcgaactgctcgctgaaaacagcgcagccactgaaggtgacgtgacgttcggcacggcgaccctgggtgccaaaaagctttcatccaaaatcattcgcgtctctaacgaactgctgcaggacagcggcgttgatatcgaggcatatctggcaggccgtattgcacagcgcatcgggcgcggtgaggctaaatatctcgttcagggaaccggtgccggcacgccacttcagcctaagggactggccgcttcagtaaccggcactactcagtcttcagcggcggcggcgttcaactggaaggatatgaattccctgattcactccctcgatccggcgtatcgtggcggtccttctttccgctgggctttcaatgacgcgacgctgcagagcatcgagcaaatggaagatacacagggccgtccactgtggctgccagatatcaccggcggatccccagcgaccgttctgggtattccgtatgttatcgatcaggccatcgacaatgcggccgccagcaaaaaattcatttatctgggggactttaaccgcttcgtggtgcgccgcgttgcttacatgacgctgaagcgtctggttgaacgctacgctgaatacgatcagaccgcgttcttggccttccaccgcttcgactgtgtgctggaagacaccgcagccattaaagcgctggtgggtaaagcgctgtaa

SEQ ID NO: 126009 - DNA, 324 bp, Enterobacter cloacae
atgcttttgacgcttccggaaataaaaaatcagcttcggctggaagacgactttaccgaagaggatgaactgttgacgttgttggggggcgcggttcagagtcgaacggaaacctttctgaatcgtaagctttacggtccaactgaaacggttcccgcggatgatcctgatggtcttaagctgcccgatgacgtcaagctgggtatgctgatgttagcgacacatttttatgaaaatcgcgcatcagtgtcagaagtcgaacagcttgaaatgccgcagtcctacaactggcttgtcggcccctaccggttcataccgctatga

SEQ ID NO: 126010 - DNA, 414 bp, Enterobacter cloacae
atgaaacttcgccaggcgcaaaccagcgcgacctacctgctgcccgatccgggtgagctggataaacgggtgctgctccggaaacgggtcgatgtgccagcggctgatctcggtacccgtcctgattaccccgtgtcttttccggtctgggcaaaggttgtccagaccagtgcaaccacttaccaggaaacggcacagaccgacaatacgatcacgcactacatcaccgttcgctggcgccgcgggatcaccagtgattttgaagtggtgcagggtgagcaggtgtaccgcgtcagacgggcccgcgatctgaacagtaagcggcgttatctgctgctcgagtgtaccgaactgggcactgagccagcgacaaccggaggaaacggtaatggcaactcccttttttcacgttga

SEQ ID NO: 126011 - DNA, 507 bp, Enterobacter cloacae
atggcaactcccttttttcacgttgatattcagcagcccaaagagatgcgtttcaaccgggcgcgcgtccgccgggccttcatccatatcggtcagcggcatatgcgtgacgcccgccgcctggtgatgaaacgggggcggtcggagcccggcgaaaaccccgggtaccagagcggccgtctggcgaaatccatcggctatatggtgcccagggccagcaagaaccggccggggtttatgacgcgtatcgcgccaaaccagcgaaacgggcagggtaaccggctcatcaccggcgacttctacccggcattcctgttctacggcgtgcggggcggcgctaaacgtcgacgcgggcaccatcggggcgcttccggggggagtggctggcggctggcaccacgtaacaatttcatggtcgaaacgctgcagagaaacagcccgtggacgcgttactacctggcgcgcgaactgcgcctctcactcaaaccggagaaacgtcgtcgatga

SEQ ID NO: 126012 - DNA, 561 bp, Enterobacter cloacae
atgaaactgactcccgttattgcaaccctgcgcgcccactgccctttatttcagaaccgggtggccggtgccgtgcaatttaaggatctgccggaggtcggcaagatgctgctgccggcggcgtatgttgtgccgggcgatgatttgccgggcgaacagaaaagccagaccgattactggcagacgctgcgtgagggcttctctgtaatcgtgtttgtcagcaacagccgggacgaacgcggccagtttgcttctttcgacgtggttcacgaggttcgccaggcgctcttcaaagcgctgcttggctggaacccggaagaacacggcaacccgatcacctatgacggcggcacgctgctggatgtaaaccgccacgagctgagctatcagttcgacttcgtagttgaaactgaactgacagaagacgacacccggcagcaggacgagctgagcgcgctggatgagttcaaaaccctgtctattgatgttgattttatcgatccgggccaggggccggacggtgagatcgaacaccacattgaaatcaaccttcccacctga

SEQ ID NO: 126013 - DNA, 183 bp, Enterobacter cloacae
atgtttgtaaaaccgaaaaacgggcggtctgtccatgaccctgcccggggcgaccttttgcctgaggaagggcgaaacgttgaagacagccagtactggtaccgtcgggaaatcgacggggatattgaaattgttcagccggtgaaaggcggcgaaccggaaaataaggcgagcactaaatga

SEQ ID NO: 126014 - DNA, 1497 bp, Enterobacter cloacae
atgactgtatcgatgaacaccatcccgtctgatctccgcgttccgctgttttatgcagagatggacaacagcgcggcgaatacggcccagaccagcgctccttcgctgctgattggtcatgctaatgctggcgccagcattgcaactaaccagctggttttcatgccgtcagccgattacgcggttcgtgtggctggtgctggtagccagctggcgcgcatggttgaggcgtatcgcaaaactgaccccttcggtgaactctgggttattgcggttccggagcctggcggaacggcagcaacggtcaccctgacggtaacaggatctgcgctggctgctggcgtggtttcgatttatatcggtaaccgccggattcaggcatcagtgagcgcgagcgacgcggtggcggcaattgccacgtctattgtcagcgccattaacgctgacgggcgaacgccatataccgctgcggcttctgcgggtgttgttaccctgacagcgcgccataaaggtacctgggcaaatgacatcccggtgacgctgaactactacggttttagcggtggcgaatccctgccgtctggcgtgaatatcgcgatcgccaccggcgtctctggcaccggcgcaccagtgctgaccggaactatcgcagcgatgggggatgaggccttcgattatatcggccatccgtttaacgacacggcgtccgttaacaccatcagccaggaaatgaatgataccagcggccgctggagctggttacgccagatttacggccacgtctacacggcaaaaattgccgtcgtgagcgatctgattactgtgggagacatgttcaatgacccacacctgacgatcgccgggtacgaaaaaacggttcagtcctgtgccgatgagctggccgccagccgcaccgcccgcgccgcagtattcctgcgaattgacccggcccgcccgacgcagaccggcgaactggtgggtatgctgccaccgccaaccggcaagcgcttcatcaggaccgagcagcaatccctgttaacgcacgggatcgcgacggcttacaccgaaggtggcgtgctgcgcattcagcgtgacatcaccacctataagaaaaacgcttacggcgttgccgataacagctacctggacagtgaaacgctgcataccagcgcatacgtactgcgtcgcctgaagacagtgatcaccagtaagtatgggcgccataagctggcgaacgacggtacccgctttggccccggccaggcaatcgtcaccccggcggtgatcaaaggggagttgctgtcgacgtaccggcagatggaacgcgaggggatcgtcgaaaactatgacctgttcaaagcgcacctgatcgttgagcgcgatgcaaatgatccgacccgcatcaacgtgctgtacccacctgactacgttaaccagctgcgtgtcttcgcgctgcttaaccagttccgtcttcagtatgcagaggagagcgcataa

SEQ ID NO: 126015 - DNA, 357 bp, Enterobacter cloacae
atgccgcgcattgctggtacctgttttatcaaagtcgacggtcttcagctgtcgccaaccgggggcattgaagtccccatgaaccttaaggtgcgtgatgacattgtcgatctcagcggtggggtggactttaaagaaacccaccgtgcgccttacaccaaatttaccgggaaagtccccaaagatttcccggtggacaaaatcacggaatctaccgaaatgacgatcacatcggaactggccaatggtcaggtctacgtgttgtcgcaagcctggcttcatggcgaagccaaccacaacccggaagaaggcacggttgatctcgaattccacggaacagagggaggttatcagtaa

SEQ ID NO: 126016 - DNA, 288 bp, Enterobacter cloacae
atgaaagagatccagcttacaaccgcagtgcgggcccacggcgaggatttgtttgtgctcgagcttcgcgagcctaccgggaaagacgttcgggaactgggctttccatacgtcaccaccggcgacgcgggcatcaaactcgatgccggcgtcattgctaaatatgtctcccggctggcgggtatcccgttgagttctgttgacgctatgtctcctgcagatctgaacagcatcagctgggaagtggctggttttttcctcgggacatcagcgcaggagaactcctga

SEQ ID NO: 126017 - DNA, 1782 bp, Enterobacter cloacae
atggctacatttgaactgaaagccctgatcaccggggtcgataagttatctcctgcgttgtcctcaatgcagaagaagattaaaggttttcagaagggcattaagtccagtgggctggcggatttctctgttggcgatctgattggtggcggggcgctcgccgctccatttattgccggagctaaagccgcgatagattttgagtcgcagatggcagatgtgaggaaggtggtggattttgacacccctaagcagtttgccgaaatgggagaggacatcttaaagatgtccgatcgcctgccaatggcggccagtgatattgcaaaactggttgctgctggcggtcaggcgggcattgcccggcaggatctcaggcaatttgctgaagacgccctgaaaatgggcgttgcgtttgaccagtcagccgaccagtcaggcgacatgatggcaaagtggcgaacctcgttcaaaatgacccagggcgaagttgtggcgctggcggataaaattaactatctgtccaacaatggcgctgcgaacgcacagcagatttccgacatcgttacccgaatcggcccgctgggatctatcgccggggttacatcgggtcaaatcgctgctcttggcgcgacaatggctggagtgggtgttgaacaggaggtagcggcaacaggtatcaagaatttcatgatcgcccttactgccggcaaaagtgccacgaaacagcagcaggctggcctgaaagagcttggcctgtcatcaacaaagctggctgcgtctatgcagaaagatgcgcagggaacgatgcttactgtgctgcagcaaatttccagactggataaaacccggcaggtagccgcatttaacgtcttatttggtaaggaatcaatgggggcaatagctcccctgctggcaaacctggacctgttgaagaaaaacttcaatatggttggcgacgcatcgcagtacaccggctcgatgcaaaaggaatatgaagcgcgcgcggcaaccacagctaaccaactgcaattactcagcaatcaggctactcatgccggcgttgccctggggaatgcgctgctgccgcaaatcaacgccagtgccagggggatgatgccgctcataaataaggtgacagattatatttcccggaatcctggcatggtcagagcgttgctgggcgccgctgttggttttgcaactcttcggctggcggcaatgggggccagcgcagctttaaaagtgatgtcgttcgttgccactgcttctccggttgggcttattgttcgtggcattgctcttgctgcagggctgattattgcgaactgggatgcaattggcccctattttaaaaaattatgggacacaatcggaccttacttcaatgcgggatgggagctatttaaaaaggttttcagctggactccccttggtatggtcatcaataactggggacccgttgttaaatggttccaggatatgtgggacaaattaaagcccatcatcgagtggtttagtgatggggccagtgataccgtcgctgcggctaatgctgcgcagtggggggcgggtggttatggtgcttatggcgcgggggtggcaagctcaggctacaacccctatcagattaagcaggcatctgctcaacctcaaggaaaggtgactgtccagtttgaaaatgctccgccaggaatgaaggtgactgagacccgagcgtctgggatagatgtaaaccatgatgtgggttataccagaataggtaggacaggaatgggtggctag

SEQ ID NO: 126018 - DNA, 1422 bp, Enterobacter cloacae
atggcgtggaaagaccgattgcaaagcgcctcgtttcgcggcgttccgttcaaagttgaggatgaagactctaccggcgggcgccgggttgaaacccacgaatatccaaatcgtgacaaaccctataccgaagacctcggaaaggtaacgtttcgcgcgaacattacagcttatgtgatcggggaggactgttacgaacagcgcgacgcgctgaaagaagcgctgaataaaccgggtcctggcacgctgattcatccatcttttggcgagatcagcgtctgtgttgatggcgagatcagggtcagcacaagcaagacagagggccgcatggttcgctttgacctccggttcgtggaggcaggtgaactggcttacccaacatcaggcgcggccaccgcccagatgcttgagtcctcatgctcggcgttcgacagctgcatcagtgatgcattcgacgggtttggcatggatggcatggctgactttgttcagcaggacgttattggccaggccaacggaatgattggctatgtctcagacgccatgaagatgatcgacgatggtgtttccgcgggagcgcgacttctccagggggatatctcggtgctgcttccccctccgtcatcagggaagggctttattgagtcgctgcaaaaaatgtggcgaacgggcaaccggctgtacggcaattccagtgacctgatcacaatggcaaaagctctttcagggatcagtcttggcaaagacctggcccccagaggggtgtggaaaaccgacagccagagcacaaggtcaaaaacagagcagagaaactatgttgcgagcgcgatccgtactacagccttaagcgaggcggtttacaccgtaacgagtctgcctgctccgtcagcggttacctctgccggctcttccggacaaagtcccgcgattgtggcgaatgtcactcacccggcactgaacaacgcgccggcgaacacagtcactcctgatgcaccgtcctgggatgaactcactgtagttcgcgacaccctgaaccaggcgattgttaaagagatggagaggacgactgacgatcgcgtattcacagccctgcgccgtctcaaatcagatctgaatgccgacctgacccagcgcctgaggcagacagacagaaccataactgtgctgccggctggaatagagcctgccgtcgttcttgcggcgcgtgtctatgacgacgccagccgtgccaccgaaattgtccagcgcaacggtattgcgcatcccggattcgtacctttgcgaccacttaaattgtcgacgcgccagctggcgtggcgggtcaaccaacaagccgatcaggatcatctctatacggttaagaccagcgactggctgcggtgggcgatcgcggtggagaaagcctgttcattaggattttag

SEQ ID NO: 126019 - DNA, 1524 bp, Enterobacter cloacae
atgtcccagtttaccgaagccgattcagcggttaatcgcctgagtgcagccgttacggcatttgaaaaagtattgaccgagccggaaggtactgtggtcgaaatgccaacaggcgcggctcagccaagcctggccgaaaggttaaagcgcgctattgatgccgttaccataaaaccagcccaggccgcaacgcaggcaactacagcggcccagcaagccctggcctcgcagcaggcagcagcccaaagcgcagcggatgctgcgaactcggccgccgccaccggatacgttgatgcgccgttcccggatgtctgggcaccgctgtccgatgaccttcgcctgctggctgggttcgcgccatcagacacaatcaccgtggccggcaccagttaccctttgcccacgaagtcgatgacgttcacccgctcaacgacggcgacgtacatcgataaatctggtgttctcaaaactgcagcgattaacgagcctcggtttgagactgaaggcctgctgatggaggggcaaagtaccaaccagattctcaatagcgaagatccttctaagtgggctggaacctccagcactattacgaaatcaaccctggcatctgatggaacatcccaggccgtaacaatgaaaggtgtgataaatggcacatcctcaattcctacaatcgtcacttcaaactcggtcgctcttgtagcgggtgaagctttaactgtttcatgtcgcgctaaaggcaattatggctatatccgcattgcattctcactggatggaagtactgccgccgcgacgctaatcgaagcgactacaggtgtggctctcagcccgccagctggcgtaactgttaccagtaaaatgggcagtgatggatacgtgaacgtaactgcaacaataactgcttctgttggtggtaattatgtcggggttattgctgcgcagaagttgtccgcagactccacgatcccgcttaatactgaatattatgttcagatgccgcaggccgaaaaaaatccagttgcgaccagttatattcctactggaactgctgcagcaacacgggctagtgacagcatttctttgcagccttctggaaatgttggatacaggacaattggcgatcagtttaataggaccatagcgtttgaaattgcaataaataaatatgtcacgccaacggttgggtatgcagagattgttaagacgctgggggcaaataacgacattattttaagggccgtcactgcgacaataaattcttatataggtggtagcggtccgagtatcgctgttacttaccccttcgcttctaaggtttatgcccagacaatcgaggcctcaaacgttaacaccatatattttgacggtaaaagcaacagtagaacgttgccaccaacaacaccaggctcaacgccgacagtgttaaacttcctgacgaataactgcctcgtttatcacatccgcaacttccgcatctggcaccgcctgttaacgccaacacaaatcagaggacttcgctga

SEQ ID NO: 126020 - DNA, 285 bp, Enterobacter cloacae
atgaaagatttatatctgcgcttcgctgacgccgacgaaatgcgcacacaattaatcgaggcggggtttgtggccgataaagagcagggcggtttatatcaccctgatatcagtctggatgtggtcggcatcatcactaccactatcggcgataccgagtcagtggaatatgtcaccgagcccggctatcacgttaatctgcgtgttattaacgacgatctcgacttgtccaagttggatggcttcgttgtgtccccgaaaacacctgctcgcgtctgggcctga

SEQ ID NO: 126021 - DNA, 1071 bp, Enterobacter cloacae
atggatgacaacgttaccctgagagtcaatggcaaggagtggggcggctggacgtcggtgaggatcggcgcgggcgttgaacggcttgcccgtgatttcagtgtcgaaattacccggcagtggcccggtgagaacggcgactctctccggccaaaagtgaagggtggtgatcgggtggaagttctgatcggtactgacttagtgattaccggctgggtagaagcaacccctgttcgttacgacgccagatctatcagtgttgggattagcggccgtagtctgaccgctgatctgattgactgcgccgcagaccctacgcaattcaacgggcaatcactggttcaggtagctgccgcactggcaaaaccgttcggtattgatgtcgtaaattccggtgcgcctgcgagcattattcccggcgtacagcctgatcatggtgaaacggtcatcgaggttctgaataaaatgctgggtcagcagcaggccctggcctatgacgatccaaaggggaggatggtgattgggagggtagggtcgacgcgggcatataccgcgctcgttctcggccagaacatcctctcctgtgataccgaaaaaagtatcagagaccgtttttcaacgtatcaggtatccgggcagcgcgcggggaatgatgacgacttcggcgcggccaccacaaccgctctccgggcgaaaacggaagacgccgcgatcgggcggtatcggccaatggctgttcagcagacaggtcaggcgacgggtgccagctgtatcgcgcgtgctgatttcgaagcgcgccagcgcgccgcccgaactgacgaaacaacctacaccgtatggggatggcgccagggtgatggctctctctggcaacctaatcagcgtgtaatcgtttttgaccccgtgtgtgggtttaacaatcgtgagctgctgatctctgaggtgtcgttcaccaaagacagcaacggcaccatcaccgaattgcgtgtcggtccgcctgatgcttacctgccggaacccgacgatcctaaacggcggaagaagaaaaaagctgcggaggcccctttctga

SEQ ID NO: 126022 - DNA, 543 bp, Enterobacter cloacae
atgcgtaactttcaacaattgcagcggcagctgcttaacctgattggccgcgcggtggtcggcagcgtaaaacctggttctaaatgtcaggccgtggatgttgagctaatcgcaggtgagcagaagggtggcattgagcatctggaaccatatggatttacctcacacgcgaacgaaggtgctgaggcactgattctgtttcctgacgccgatcgctcacatgccgtagcggttgttgtgtctgatcgtcgctatcgcatccggtcccttaaacctggcgaagtcgctatttatgacgaccaggggcagtcagtcacattaacccgcgccggcatcgtcgttgatggtgccggaaagccaatcaccttcaggaacgcgccgaaggcccggttcgaaatggacatcgaatcgacaggccagatcaaagaccattgcgacacaaatggcgccacgatggcggaaatgcgcattgcctataacggacataaacacaaagagaacggtaacaacacggacacaccggataaacaaatggggacgtaa

SEQ ID NO: 126023 - DNA, 420 bp, Enterobacter cloacae
atggacctgtggctaaacgtaaacggggtaagtgtctctgcgaatgctcctctcgatttactcacccgcgctgtcgtgatctccctcttcacctggcgccgcgcacagccggacgataatgcagatcagcccaatggctggtggggtgatacctggccggctgttcaaaatgatcgttacggttcgcggctctggctgctccagcggcagaagctgacgaatcagaccgcattggttgccaggacgtatatcaacgaagcgctgcaatggatgattgacgacggcgttgtttcaaagattgacctccttattcagcgtaccggcattaacgaactgggtaacagcatcacgctgtggcgctacaaccaacccacgacgatttcttttgatgatctatggagtgcgataacaaatggctga

SEQ ID NO: 126024 - DNA, 1059 bp, Enterobacter cloacae
atggctgacagcgaattccagcgcccgacgctggcagaaaatatcagcatgctccgcactgacctcttttcccgcctggacgtgagcgacaccatcaggcgcatggatgaagacgtgagggcgaaagtgtatgcggccgctctgcatactgtgtacggctatatcgattatctggcgctgaatatgctgccggataagtgcgatgaagcctggctggaaagacatgccgccatgaaacgctgcccccggaaacaacctacagcatcagccgggtttatgcgctgggatggtgtgacgaacggtatcaccatcaaggccgaagccgtgattcaacgcgacgacctgatccagtacacagccactgcagacgcgaccagcgcaggcggcgtactgcgcgtaccagtggtgtgcagcgttactggccgcgtgggcgaaattgacgatggagtggcgctgtatctggtcactccggttaatggcctgccgtctgctggcgtggctgattccattgccgggggatttgatattgaggatctggagacctggcgtgcccgtgtgctggagcgttactactggacgccattaggtggggcggacggtgattatattgtctgggccaaagaggtgccgggtatcacccgggcctggacctatcgccactggatgggggccggtacggttggtgtgatggtggccaatgatgatcccgttaacccgatccctgatgcagcaactgttgctgcggcaaaagctcatataactccacttgcgcctgttgcaggcgctgacctgtacacgttcgcgcccgtcgctcacagcgttgatttcagaatacggctgacacctgatacggtagaagtccgggcagcagtaacagcggaattacgctcgtttttgctgcgggatggctaccctgaaggcgagctggacatctccaggatgaacgaggcgatttcaatcgcgacgggtgagcacagccatgttctggtcaccccgacagccaacattacgatcgcgaaaaacgaactggccatactgggggcgctcacatggacgtaa

SEQ ID NO: 126025 - DNA, 582 bp, Enterobacter cloacae
atggacgtaaccgacgatgactacatcaacttgatgtcagcgctcttaccgcctggcccggcatggtctgttgccgatccggcaataacaggagcagccccttcattacggcgggcgcaccagcgcgccgatgatttgatgctggagatagatccacgcacaaccactgaactgattgaccgctgggaggcgtgctgcgggcttcctgacgagtgcatccctgcggggacgcaaaccctgctacagcgacagaacaggctggatgcaaaggtcaatttgatcggtggcatcaacgagacgttttatctcgaacagctggctgcccttggcaaaccaggggcgacgattacccggtacaacaaagggccgtttaaatgcacgtccagctgtaccgatgcggtttattccaccgaatggcgttactactggcaggtcaatatgcccgccgccacggatgccacctggatgacgtgttcagatgactgtgacacaccacttcgatactggggcgacacggtcgctgaatgcgtgatcagtaaactctgcccatcccacacctacgtacttttcaaatatccgtaa

SEQ ID NO: 126026 - DNA, 675 bp, Enterobacter cloacae
atgcatcgtattgacacacctactgcgcagaaggataagttcggcgcggggaagaacggctttacccgtggtaacccacagacagggacgccggctaccgatcttgatgatgattactttgatatgctgcaggaagagctggctggtattgttgaggcaactggcgaagcgttggccaagtcaaatcgcacccagattctcacggcgttaaaggcgctattcctgagtcgctcacatccatttgctgatatcaaaagtgatggtgctgcagctattgccgaggctctcacaaatctcggcctgaaggaggcggcaaaacgcgatgtgggtacgggggcaaatcagatccctgacatggcctctttcgcagggcttaaaggtagcaatggtcataaaaccctcccaggcggtgacctttttcagtggggaactattgttcttaaatcggcaccctcaggaacgacggttggaactttccctaaggcttttccagtagccggccagcagattttagttacccacgataaccctcagacaaatactttgtgctttggcgcagcccaaattatcaacaccacacagttcagggttaacgcagtggccattaacacagacacattcactatgtcaccaggctttgacctaaccttgcgctggttcgctatcgggagttaa

SEQ ID NO: 126027 - DNA, 495 bp, Enterobacter cloacae
atggatattgaaaatgtagttaacgaatcagaactggaacgcattctgttcagtatcagcatgcaggcgttctacggtgataattatccttcgctaccctcagatgcggttgaaattagccccgaagagcacatgcgcctcattgctggcatgaatgaccatgagcgtcgggtttacgttggcgaagatggtcaatttacgctatccggtcgcaagccatcacagtggcacacgtgggatgctgttgcccatgaatggtatctctctcctgaggatgctgcccgcatccacactgaagatgcagagcgtacaaaatctgcattacgcgctaaagcagaggcggaaatcacctggcggcagggggcggttgatgaaggaatggcaactgacgaagagaaggcctcactctcttcctggaataagtaccgcgtcctgcttatgcgcgtgaatacctctgcagcagaaattcagtggcctgaccttcccgaagtgtaa

SEQ ID NO: 126028 - DNA, 168 bp, Enterobacter cloacae
atgcgctaccggacccatccgaaaccgcaccaggaaaatctggcgaacggtcgaaaggaggcgataccgtcagataattacggagaggcttcagcattgtttggggtgatcgcgtacattatcaatgatgcgaggtcgggtgagttcgacaactgtccgctgatgtga

SEQ ID NO: 126029 - DNA, 1458 bp, Enterobacter cloacae
atgattattatcagagagaaaaaccaaatttccctaacagtaatgctttctttactttactgtatcggactaattatatctgacatcaattatttagatgattatggtagatatttattaggatactcaggtttatcagccaatgggcgtcctattgctgacttagctttaacaattataaatatggggtatccattgttagacctaacccctttatcattaatagcttcaatttttgtaatggcagtttccggggtcattattgcagatagattcttcagaaatgaaaagcctatcgtaaggtccttggttgcactattacttatagtaaaccctttctttattgaaaacttatcttttaaatacgacatattcccgatgtctttgagtgtattatcaatctcattggccttttgtcatacaaaaaatcgtttcataaatcttacatcgccagtgtttttagtatttatttcacttggattatatcaagccacgctaggaatgtttgtgatattttctattatcgaattagcagggtcaactttaaataatacaggaactcataaatctagatttattgaaactgcaacaagagcattgcaactctttatagcctacgtattatacaagttgattattgcgaatatatttattgatggtgattattctaccaaaatttctaaaaccattgctataaattctgatggttttaaaatccttgttgaaaatattcataaatataacagtttcattgggaattatatcgattcaatccctgttgcgatactttacttttatatgttattgctagtggtagctgtttatatagttgcaaaagaatcatggcgatcatctaaaagcattattaatataatcactctaatagtattacctttccttttttatttcttttcatatgcaactttcatttttttggaaaccgcatcagtaacttcgcgcgtaatggtatcatttagtggaactttaatagggttgtttttttatttcctcgtcgcaataaaaaaccagaaacttaaattattcgccttttttccattttttatgttcagctatgttttgatgacaagttatgttaacgcttcattagctcagaataaaaaagacttccgtatcattaactcaatatactatgatatttctcacctttcaccgcaagtaaaatacgttaatttcagtggggtggtaagtcctgcatctcaaaaggcgctatcattgctgagatttccagtcttaaaagatcttacaaagtcttatttaggcactgactggagtgcatatatgctaaattattatggggtaaatgtttctagaaaaaaattttcttcagaagaaattagtgaaatatgcagacagaaagctatctctacaactcctgactattcacttcacgttagcggtgaaaatatgattatttcatttgacactttatgcaaataa

SEQ ID NO: 126030 - DNA, 240 bp, Enterobacter cloacae
atgtttgttgaactggtttatgacaagcgaaatgtagaggggctcgaaggggccagagagatcatactggccgagctgacgaagcgggtgcaccggatttttccagatgcagaagtgaaggttaagccgatgcaggcgaacggcttaaacagcgatgccagcaaaagtgatcgcgaaaagctgaatcgcatgttggaagagatgtttgaagaagccgatatgtggttggtttcggattaa

SEQ ID NO: 126031 - DNA, 2613 bp, Enterobacter cloacae
atgacacaacagccacaagccaaataccgccacgactaccgtgcgccggattatctgattagcgaaatcgatctgacttttgacctggatgccactaaaaccgttgtcacggcggtgagtcaggtgacgcgccacagcgcaactgctgtgccgctgcgtctggatggcgaagacctgacgctggtctccctgcatattaatgatgaagcctggtcagactataaagaagaaaacaaccagctggtcatcgacaacctgccggaacagtttacgctgcgcatcgtgaatgaaatcagcccggccgccaacaccgcgctggaagggctttaccagtcaggcgtggcgctgtgtacccagtgtgaagcggaagggttccgccacattacctggtatctcgaccgcccggacgtcctcgcgcgcttcaccaccaaaatcatcgccgataaaaccctgtatcccttcctgctctccaacggcaaccgcgtaggcgaaggcgagctggagaatggccgtcactgggttcagtggcaggatccgttcccgaaaccgtgctacctgtttgcgctggtggcaggggacttcgacgtgctgcgcgacaccttcaaaacgcgctcaggccgcgaagtggcgctggagctgtttgttgaccgtggtaacctggaccgcgcgccgtgggcgatgacctcgctcatcaactccatgaagtgggacgaagagcgctttggcctcgaatatgacctcgacatctatatgatcgttgccgttgatttcttcaacatgggcgcaatggagaacaaaggcctgaacgtctttaactccaaatacgtgctggcgcgcaccgataccgccaccgataaagattatctcgatatcgaacgcgtcatcggccacgaatatttccacaactggaccggtaaccgcgtcacctgccgcgactggttccagctgagcctgaaagagggcctgaccgtcttccgtgaccaggagttcagctccgatctgggttcacgcgcggtgaaccgcatcaataacgtgcgtaccatgcgcggcctgcagtttgcggaagatgccagcccaatggcgcacccgatccgtccggataaagtcatcgaaatgaacaacttctacaccctgacggtgtatgagaaaggcgctgaaattatccgcatgatccatactctgctgggtgaagagaatttccagaaagggatgcagctctacttcgagcgtcatgacggcagcgcggccacctgcgacgattttgtgcaggcaatggaagatgcttctaatgtcgatctttcccacttccgccgctggtacagccaggccggtacgccagttgttaccgtcaaagacgactacaatccggaaaccgagcagtacacgctgaccatcagccagcgcacgccgccgacggcagagcaggaagagaaatacccgctgcatattccgttcagcattgagctgtacgataacgagggcaaagtcattccactgcagaagggcggccacccggtacaccacgtgctgaacgtgacccaggccgagcagacctttatcttcgataacgtctacttccagccggtgcctgcgctgctgtgtgaattctccgcgccggtgaagctggagtacaagtggagcgatcagcagctgacgttcctgatgcgtcacgcccgcaacgacttctcccgctgggatgcggcgcaaagcctgctggcgacctacatcaagatcaacgtaaaccgtcaccagcagggtcagccgctgtcgctgcctgttcacgtggctgacgcgttccgcgcgatcctgctggatgagaagattgacccggcgctggccgctgaaattctgaccctgccgtcagcaacggaaatcgcggagttgttcgagattatcgatccgatcgcgatcgtggcggtgcgtgaagcgctgacccgtacgctggctgctgaactggcggacgagttcctcgccatttataacgccaacaagcttgacgcttatcgcgttgagcatgcggacattggtaaacgttctctgcgtaacacctgcctgcgctatctggcgtttggtgaaaccgagctggcgaacaccctggtgagcaagcagtatcacgaggcggataacatgaccgacgtgctggccgcgctgggcgcaagcgttgccgccgaactgccgtgccgcgatgcgctgatgcaggagtatgacgacaagtggcatcaggatggtctggtaatggataagtggttcatcctgcaggcgaccagcccggcggccgatgcgctcagcaaggtgcgcagcctgctgaagcatcgttcctttaccctgagcaatccaaaccgtgtgcgctcgctgattggcgcgtttgccagcagcaacccggccgcattccacgccgaagacggcagcggttatcagttcatggtggaaatgctgaccgagctgaacagccgtaacccgcaggtggcgtcgcgtctgatagagccgctgatccgtctgaaacgctacgatgagaagcgtcaggcgaagatgcgtgccgcgcttgagcagctgaaagggctggaaaacctgtctggcgatctgtacgagaagattgctaaagcgttagcgtaa

SEQ ID NO: 126032 - DNA, 558 bp, Enterobacter cloacae
atgaaaaagcgcagtgtgatcgcaatagccgctctggcggcaatgagttttcaggttttagccgcaacgcctttcagcatcaccagtcaggatatttccggcgagcgccatttagcgcagccgcaggtattcgagggattcggctgccacggtggtaaccagtccccgcagctggcgtggacaaatccgcccgcgggtgcgaaaagttttgccattacggtctatgacccggatgcgcctaccggcagcggctggtggcactggacagtagccaacattcccgtgaagacaatgacgctgcccgctgatgccggtaacccaaatggcgaaaaattacctgctggcgctgtgcaggggcgtaatgatttcggttattctggattcggcggcgcatgtcccccagccggggacaagcctcaccgctatcagatgaccgtctgggcgctggacgtggataccctgcccgtcgacaacaatgcgagcggcgcgctggtcggctttatgctcaatagtcacgttctggcaaaggctcagttaaccgcaacctacagcagataa

SEQ ID NO: 126033 - DNA, 552 bp, Enterobacter cloacae
gtgagttacgccattctcgacaataatcgattttacgccgaaggactgcgctatgcgctgctgcgtcggggcgttcagttagaagtccagagcgatactgtacaatggcagccaacgctgcttacccgccgcgtgattgtcgtccgctgccgtttttccgtggcggcgacgcatcaggcgctgatcaacattttgctcaggctggaagccgcccgctggaaaggcagcctttatctggtctgcaacgaaaaggggtgggcgctggcgacgcatttacgcaagcgtttcagtacgctaacgctttatatcatcgacgaccggatcgccgttgccgatgcggcgtatttgctggcaaaagagccacgccgcgttcgaagcctggactgctgcctgaccgttccggaattcaacgtgctcgatctgatgctgaccgggttgccggtccgccacattgccatcgtgacgcacatgtcggagaaacaggtttcaacccataaatgcaacgcgctgaagaagctcaatgccaacaacctgcttcagttgctcctgtag

SEQ ID NO: 126034 - DNA, 1158 bp, Enterobacter cloacae
gtgattaagtgcctctttattttactgttcttaagcctgtgggccggccagacgctggcaggctctccctcgggacgaaataccagcgtagggatcagcttcgatcgcaccgcgccgcccgcccgttttgacatctggtttcatgaatcgggcggctttgacgccgccgatccgcaaaagtgggggcgcaataccctgacctgtcagtcccgtaccgataccacgaacggcgcctgcatgaactcaccggtctggttctcggcgaacccggccgcgccttatgccatcaatttagcgtttacccattctcttaccggcaagacggtgaatatcaaggtgtatggcgatcactacatgtttatcaacaataaagtgttcacctttgccagctttgtcacgggagggacgacggaaattgctaactggaacagagagccctacttcgatttctatatcgtgaaaagcgaactggataagctcgccctgccggggatctggaccgccacgctgaagcagaacctgcgccagtggggaagcgccgactgcggcggcaacttcaatgacgtgaatgtcggctgtcctggctatctcaccatcgccaaatggcaggcaaatattcgcattgaggtggtcgacccgggaaaccagcagatttatctgccagcctttccgcactccacgcccatcgttaacctcaacctgaccaacttcccggggcgccccgggggcagcgagatcaagggggaaaacacgctggatatgtgcctgtacgacggcaaaaacagcaccagcacccgcgcctatcttcgttttgaagatgacgggcttccctcagcgggacgtgccgaaggcgcgttttctatccggcggcgcggtggaagccagacggatgcgcgggaccgtctcgactatcaggtctccgttacccatcccgtcacaggcgcaaccgaaaccgtcgcgaacggtaaaaccgtagtctggcaaggcactaacgatccgcagtatctgcgtcaggtcgtgctgcccggcggacgcgagagcgtactgtgcattcctgcgccaattatcctgaaaacccccgcgttcgccgccagcagtaaaaacgcgggcgactataccggcacgctgcgcgtcatctatacgcccagcacgttataa

SEQ ID NO: 126035 - DNA, 753 bp, Enterobacter cloacae
atgttttttatatgcaataattcgttgttattcgatcctgaagcacatgcaataagtattgttgggcaacccgagtctgtattaacgctttcggctccggccgttcgtcttttacaggagtttattcgtcataaagggcgcgacctgagccgggaggagttgatcactcgcgtgtgggaggagttcggctttacgccgtcgggaaataacctcaataaggcggtaagtgaattacgcaaaagcttccacgccctgggcgacagccacgactatatcgtgaccgtgccccggtttggattccgctttgacgccgacgttatttttaagcccgcagagagcgttacgcccgaagtatctcagccgcccgttgagcagccgtcaggatataagcgtttatccaaaaagtggtggctggttttagcggtattaacgacgtcagtcgtggggtttagcctgttttttagccgacagcttgagataaccgtacccgcaacactcaaacccgttaaggaaaaaatagctggctgtcggctctgggtgatcaacgatcatggccgaccgctggtgttatcaaaattggccgagctgctgaagaaaaataacgtcgcgtgcgagcgcgaggagtacaacatttattatttcagcgcccgcttttcgcttgccgccgccgatgaggttttcatcggcgcctgcccggtgagtgaagccagcctgtgtaaaactattcgctataaaagcggggcggaagaatga

SEQ ID NO: 126036 - DNA, 477 bp, Enterobacter cloacae
atgaaaaacagacttctgttcggactgggtggcgcagtcgttggcggggcgtttgcgctctttatctacaccggcggagcctataagcgcgatgcgctggcctgcagcaccgagtttaattttacgcgcaatcaaggaaaggcaaatgaagtgaaggtcaatgccgttgcccagttctattttcatcgtaacggcaccggcctgaccacctacaaaggcgctgcaaaggctgaaggtaagagcctgatcgttgacagggacgtggattttacgtgggagcgacgggacgatgataaggtaattgtcctgagctacaccaagacctggcgtcgacacaatgacaacacccctgatgcccagtggggaagctttgccagcccgaccgcacgctactatctcacgatctctgaactctcgccttccgtatggctgattcaggaccggcgttaccccacctatatttgccggggtgattaa

SEQ ID NO: 126037 - DNA, 258 bp, Enterobacter cloacae
atgaatttatccagtcaggaacaacgtaccttacacgttctcgccaaaggtggacgtattgtgcacgtccgcgacagttctggccgcgtcacgtccgttgagtgctatacccgtgaagggctggtgctgagcgactgcacgctgaacgtcttcaaaaaactccgcgccaaaaagctgatccgctccgtgaacgggcagccttaccgcatcaacaccaccgggctgaacaacgttcgcgcccagctggataatcgctaa

SEQ ID NO: 126038 - DNA, 1434 bp, Enterobacter cloacae
atgaaaaatctctccgatcttcaggaactgcaggatttcttgcgtgcggcattatgcgatcccgcctccccgcagcagatggccatcagcggcagcgacgaagccttaagctggctgcagctttccgctgccgtgacggactgggcgcagcgctatcagcgtagccagcctgttgccggtacgccggtcgtcttgtacggacaccagcaggccgagttcgccgtggcgatttatagctgcctgctgcacaacattccgtacattccggtggactgcatttacccgcaggagcgcctgcgggagatctgccatctggccagcgccccttactattacgacgtcgcgacccggcagttcatcgccacgggtgaactgggcaaggtgctggaggagcaggatctggcctacatcatgtttacctccggcagcaccggcaagcctaaaggggtgcagattgggcgtgaaagcgtgtggcacttcatgaaatgggtcagcaatgacttttcgctgccggaaaaaccggtcctgatgaaccacgcggtgttcagttttgacctctccctgatccctttactggcaaatctggcgatgggtggacacatcgtgctgaacgccaaagacgatattcagaaagcgaactggctggagcgactgaaaagcaacgccgtctccgcctgggtttccaccccctcttttgcttaccagcagctgctttccccgcagttcaacagcgagtatttacctgaactcaacgtctttatcttcattggtgaagtgttgaataaagcgctggttaaacagcttcgccgccgcttcccgcaggccaaaatcatcaactcctatggcccaacggaagcgaccatcgcgaccaccgtggtcgagatcacggatgcgatcctgaacagcgacagcgccgtgctgccggtgggggtcatgatgcctgagagcagaatggaaatttccgccgagggcgagctgattatctggggtaaaaacgtcatgcgcggctacctcggcctgccgcaggagaacgcggcgaaattactgcatcgcgaaaatgaagcgtttcgcggctaccggaccggcgatctgggctatgaagcggggcttatctactgccagggacgcaacgacagccaggtcaaactgaatggctaccgtattgaaatcaacgaaattgaaaaccgcctgctggcgatgtccgggattaacgaagcggtggtgatgccactgatgaaaccctgcggcagcgtgctgcgcattgccgcgttctgcgtgacggaactggcgccggataccatcaaaacctcgctctcgaaggtagtcccccactatatggtgccgtcacaaattatcgtaaaagacgctttgccgctgaatcctaacggcaaaattgaccgcaagctgctggacgcttacgcccgcacaaattaa

SEQ ID NO: 126039 - DNA, 1035 bp, Enterobacter cloacae
atgaaaagagaaccgaccccacccgcccactgtacgtttgagccagaggactggctgcgtctggcgaaatgctggcatccggtcgcgcgcgcctgcgacgtcggtccggcgccggtcaaagcgacgctgctggatgaacagctggtgatttaccgcattaacgaccaggtcgtggttgcccgtgacgtgtgcccgcaccgcggcgtgccgctgacgctcggctttcacgacgagcacgggattatctgcccctatcatggcttacgctttggggaggacgggcgctgcaaccgtattccctccagccccgaccagcccgttccggcgaagctgaacctgattaactacgcggtcgaagagcggttcggactgatctggacctgcctggcctatgatccggaaaaccccgcgccgctgcccaccatgccgcactgggatgacaacggatttcagcagataaactgcccggcgtttgaggtgaacggctttgccggacgtcaggttgaaggttttctggacgtggcgcactttgcctggatccacaccgaaacctttgccgacccgaataatccgcttgtgcctgcctatcagccacaggagacgccgttcggcttcgtggcggattactggagcgccgtgagcaactatcccgccagttcccccgtgcaggctccggatgggttccagtggctgcgccattttgaaatgcacctgccgttcacagccaccctgacgattcattttccgggtgaatcgagactggtcattatgaacgccgcatcaccggtatcatcgcgcgtgacccgcatgttcgcccctattgcccgcaattttgacctgcatattccggtggaggacgtgcatgccttcaacctgcggatttttgaagaggatcgcctgatggtggaaacccagcgcccggaaaacctgccgctggacctgacgctggaagcgcatatccccgcggataaaagctcgattgcctaccgtcgggggctgaagaaaatgggctttggcgagtttttcctggtatga

SEQ ID NO: 126040 - DNA, 501 bp, Enterobacter cloacae
atgatcgcactgcacgacttcaatcatcttccccatgaacaggcgttagcgctgattcacccctgcgtggcgcttccccgctgggccgatgcgctggttcacgggcggccttacgccagccgggacgaattgttcagtacggcgaaatcgctgatgcaaaactgggacgaagcggcgctggcgcaagccctgagcgcccatccgcgcatcggggaaaaaccagcgggttcagcggcggaggcggcgctgtcgcgccaggagcagggggcggtgaatgaccgcgatgctgctcttgcccgggcgctgcgtgaaggcaacgcccgctacgaagcccgctttggacgcgtctttctgatccgcgcgaagggtcgcagcggcgaggagatattacaggccctgcacgcgcggctggagaacagcgacgcgcaggaaatccatgccgcgctggaacagctgcgggaaattacgctgctgcgcctggaaggagtcatccacgaatga

SEQ ID NO: 126041 - DNA, 324 bp, Enterobacter cloacae
atgagcacactcagcacccatattctcgatatttcgacgggcaagcccgcggagggcgtgacggttcatctgcaacaggacgggaagacgctggccacgggcgtgaccaacgcccaggggcgcatcgccgcgttcgttccctctctgcccgcgggccgctatcggctggtggcggagatcggggcgtggtttagcgataccggccggaagacgatctatccctgcgcgcacattgagtttgtcacgggagaaacggcagacgaacacttccatctgccgtttgtgattgcccccggcggatggtcaacctaccggggcagttga

SEQ ID NO: 126042 - DNA, 795 bp, Enterobacter cloacae
atgactacgcaaatcaccaccgccctgatcacgggtgcctcttccgggatcggtgccgtctatgccgatcgccttgccgcgcgcggtgccaacctggtcctggtcgcccgccgcgaggatcgcctgaaaaccctcgccgccgacctgcgcgcgcgctacggcgtggccgtcgatattctggtggccgatctcaccgatgaagccgggatccgcgcggtggaagaggaactgcgcagcaataccgccattgatacgctggttaacaacgcgggcaccgcgcagatggcgccgttcctcgcgggcgaggtggcgcagcatcaggccatcaataccctgaacaccacggcgctgatgcggctgacctacgccattctcccgcgactggcgcggaacaatcgcggcacgctgatcaatatcgcctcggtgttatcgctccatgtccgtgcgggcagcgcgctctacagcgccaccaaggcctgggtactgagctttacccgcggactgcaggaagaatttgccgacagcaacgtgcgcattcaggccgtgctgcccgccgcgaccgcgacggagatctggagccattctggcgtcacggtggacgatctgccggaaggatcggtgatgaccaccgacgatatggtggatgcgtcactggcgggtctggatcagggcgaaccgatcaccatcccgccgatgcatgacgtcagcctgtgggaccgctacgaagcggcacgcctcgagctgtttaacagcgcgcgcaccggcatcccggctccgcgctacgtaaagcagtag

SEQ ID NO: 126043 - DNA, 522 bp, Enterobacter cloacae
gtggacaatctcacgatcgaaatgttttcagagggaaaagactatgatttcagtgacttcgattgtggtgaaccctcgctaaatgtcttcctcacagaacatctggtgcgtcagcacaatgggcgtattttacgaggctatttgcttaaagatcgcgatggtccgcgagtcctgggctattacacgttgtctggtagttgctttgaaaaagcgatgctgccttctaagactcagcagcgtcggatcccttatagcaacgtaccgagcgtaacgctgggacgtctggcgatacataaagacttacaggggctggagtggggaacgacgctcgtcacgcatgcaatgcgggttgcctatctggcatcgcaggcggtgggcgtacacggaatatttgttgatgcactcaacgaccaggcaaaacaattttatctgaagcagggctttattccgctgacggatgaaaacagccattctcttttctttcctacaaaatctatcgaacgactgtttgagcaggcgtga

SEQ ID NO: 126044 - DNA, 321 bp, Enterobacter cloacae
atgaaccactctttcgctcgactcgtgacgggtctgggcctgattgtttctgtttttagcctcccggtttattcggctaccattgtgaacggtggcgttattcattttcgcggtgccattgttgcagacccctgtgaagttacgccgcagcagagacagtttgctatgtcctgtccggataataatcgtatgcaaacgcgcatggtcagttatgaagaggcgcttaatggcaaagtgtccgattcagatctgatgtcgctccgcatgaaataccttaaccctgaaaaaacgctcgcggttgtcgaaatccagtatcgatag

SEQ ID NO: 126045 - DNA, 954 bp, Enterobacter cloacae
atgcgtattagcacccagatgatgtatgagcagaacatgcgcgggatcaccgattcccagagcagatggctgagctacggtgagcagatgtccaccggtaagcgcgttaaccgtccttcggacgatcctatcgccgcgtcgcaggccatcgttctgtcacaatcgcagtcgcaaaacagccagttcgcgcttgcacgtaccttcgccacgcaaaaagtctcgctggaagataacgtgttaacgcaggtgaacaccgcgctctcaagcgtgcgcgagaagctcgtttatgcgtcgaacggcacattaagcgatgacgaccgcctttctctggcgaccgatattcaggggatccgcgatcagcttatgaacctggccaacacgacggatggtaatggtcgctttatctttgcgggatacaaaaccgagagtgcaccgtttgatgcggcgaccggggattataacggcggcgcagaggccatcacgcagcaggttgatacggcgcgaaatatgaccattagccataccgggcagcagattttcgaaagcattaccagtaatgcggaagagctgccgggcggtggatatggccagacgaacatgttcaaaatcctggattctgccatcgcgtcgctgaagacgccgattgagaacgatccggctgctgcaacggcgcaaagccaggtgattgccaatgcgcaaatcggcatcaaaaactcccagaacaatatcctgacggtcgttgcggatgtgggcaccaagatgaacgagctggaaaaactcgatacgctgggcgatgaccgcgcgctgggccagacgaagcagatgagcgatctggtggatgtcgactggaacgaagcgatttcttcttacaccatgcagcaggcggccttgcaggcgtcttataaagcgtttagcgatatgcagggcatgtctctgttccagctgaacaaataa

SEQ ID NO: 126046 - DNA, 810 bp, Enterobacter cloacae
atgtttttaattaatggccttgagcaagacacgctgccggcaagcgacagggcgacgcagtttggcgatggctgctttacgactgcgcgtattctggaaggtgacgtgtgcttgcttgatgcacacctccgccgtttacaagacgcctgccagacgttactgatcccttttacgcagtgggaaattcttgaacatgagatgcgtcagctggcgtcaggtaaaaccagcggtgtcttaaaggttatcattagccgaggcagcggtgggcgggggtacagcggtgccgcctgtcagcatccaacacgtattctctctgtttcagcttatcctgctcactatgcgcgctggcgtgaagagggcgtgacgttgacgctgagcccggtgcggctggggcgaaacccgatgcttgccggactaaaacatcttaaccgccttgaacaggtgcttattcgtactcatcttgaacagacggacgccgatgaggcgctagtccttgacagcgaagggttcattacggaatgctgtgcggctaatttactctggcggaagggccgtgaggtcttcaccccttcgctggcgcaggctggcgttaacggcatcatgcgccagttttgtttgcaacagctggcacatgcaggctttcgcgttgtcgaagtaaacgcgaaggaagaggcgctgctgtccgccgatgaagttgtgatctgcaatgcgttgatgcctgttttcgccgtccgtgcgtatgaccaacagcgctggtcttcgcgcgagctgttccagtttttagccccgatatgtgagcaaaccagatag

SEQ ID NO: 126047 - DNA, 1434 bp, Enterobacter cloacae
atgtttaagaatgcatttgctaacctgcaaaaggtcggtaaatcgctgatgctgccagtatccgtactgcctatcgcaggtatcctgctgggtgtcggttctgctaacttcagctggctgccagccgtagtgtcccatgtgatggccgaagcaggcggttctgtctttgctaacatgccactgatcttcgcgatcggtgtggctctgggcttcaccaataacgacggcgtatctgcgctggctgcagtggttgcttacggcatcatggtgaaaaccatggctgtggttgcgccgctggttctgcatttaccggcagaagagatcgccgcgaaacacctggcggacaccggtgttctgggcggtatcatttccggtgcgattgcagcgtacatgttcaaccgcttctatcgcatcaagctgcctgagtacctgggcttcttcgcgggcaagcgtttcgttccgatcatctctggtctggcagcgattttcactggcgtgatcctgtccttcatctggccaccaatcggctccgctatccagaccttctctcagtgggctgcttaccagaacccggttgtggcgtttggtatctacggcttcatcgagcgttgcctggtgccattcggtctgcaccacatctggaacgttccattccagatgcagattggtgaattcaccaacgcagcaggccaggtattccacggcgatatcccacgttacatggcgggtgacccaactgcaggtaaactgtctggtggcttcctgttcaaaatgtacggtctgccagcagcggcgattgctatctggcactctgctaagccagagaaccgtgcaaaagtgggcggtatcatgatctccgcagcgctgacctcgttcctgaccggtatcaccgagccgatcgagttctccttcatgttcgttgcgccgatcctgtacgttatccacgcgattctggcgggcctggcgttcccaatctgtattctgctgggtatgcgtgacggtacgtccttctctcatggtctgatcgacttcatcgttctgtccggtaacagcagcaaactgtggctgttcccaatcgtgggtgcgtgctacgccgttgtttactacaccatcttccgcgtgctgattaaagcactggacctgaaaaccccaggccgtgaagatgcgacagaagacagcaaagctggcgcgaccagcgaaatggctccggcactggttgccgcgttcggcggtaaagagaacatcactaacctggacgcgtgtatcactcgtctgcgtgtgagcgttgccgacgtcgcgaaagtagaccagccgggtctgaaaaaactgggcgcagcgggcgtggttgttgcaggttctggtgtacaggcaattttcggtacgaaatccgataacctgaaaaccgaaatggatgaatacatccgcaacaactaa

SEQ ID NO: 126048 - DNA, 1554 bp, Enterobacter cloacae
atgaagttgccctttaagccacatctgctcatccttctgtgcagtgccgggctgcttgccgcctcaggcgtcttgtttgtcaaaagtcgtgcaacggaacccgttgcgccagcccccgtcgctcaacaaccggcggcacctgccgtagcccagcccgcccctgtggtcgcgccgacctacactgccgcgcaaatcgatcagtgggttgcccccattgcgctctaccctgacgccctgctttcacaaattctgatggcctcgacttacccggccaacgtgattcaggcggctcagtggtcaaaagacaaccctaaaatggaaggggacgccgccattcaggccgttgccagccagccctgggatccgagcgtaaaatcgctggtcgcgtttcctcagcttatgtcgctgatgggtgaaaaccccccatgggtacaaaatctgggcgatgcgtttctcgcgcagccgaaagacgtgatggattccgttcaacgcctgcgcgcgctggcacagaagaccggtgctttacaatctacgcctcagcagacggtcaccaccgtgacaaagccagcaccagcgaaaacccgcgccaccgaggcaacgacaacaaccgcgtctgcgcccgccccaacggtgatcaaaattgaatcagccgatccgcaggttgtttatgttcccacctataaccccaatacggtttacgggacctggcccaacacggcctatcctcccacctatctcccgcccacgcccggagagcagtttggcaacagcttcgtcaacggcttaggcttcagcctgggcgttgccacaacctatgccattttcagcaatatcgactgggatgacgacgatgactgggaccaccaccatgacggtgactgggataatcacggcggctataaccgcaacggtgataacaacatcaatatcaacgttgagaacttcaataaaatcagcggacagcgtctgacggacgccaaccgtacctggcagcataacccggcctatcgggaaggcgtgccctatccgactaaccagctcaacagtcgcttccactcaaccagcacggcgaccgggctaagcgcaacgcagcaaaagccggttaatcgcgacagccagcgccaggcggccctgagccagatggagaaatccacggggaaaaccttcccgcaaacggcacgtcccggcacgaaagatgtgcagcgtcaggcctcgagtgaacagctgaagcaaatttcgcagcgcaacaactaccgtggctacgacaccaaaccgcagacggcgaagcggaccaccacgcagcagcgagaaaatcgtcaagctgtaacccaaagacaggagaaacgcgcttcacagcccgcgcagcaacgcgctctgcagcagcgaaacggtcagtcccgggccaatgcgctgagcggcaacgacagccgttccgcgaactggcaggcgcagcagcagcgcggtgcgcaaagcaggcagcttgcggctcgccagcagcagccccgtcaggtatctggtggacgcgctgaacgccgtgaatttagacatcgctaa

SEQ ID NO: 126049 - DNA, 3513 bp, Enterobacter cloacae
atgaaccgttcgtataacatcgtctggaattgcgccagaaatatgtacatcgttgcctcggagttttcaaaaggggacagcaaagttaaatcctgcgtacgcgccggaagcgcgatcgcaacgtttatcttgtcaggtgttatgagtaccgcacacgccagtgacacgacgtttgttgcagtcccgggtaataacaccatcagtggtgaatattcaacgacgagccctaatacctcggcggtatccgcctctggctctgatgtcatcgtcaccgataacggcgccttaacgatatccacaaccggggatgcaggcatggggctatccgtgtcgaatggagcgaaaatcacgctcgatgattcgggatccacaatccgcacttccggggaaggcagtcatgcgataaccattgtcggtgataactcagaagccatgttgaacaaccttaccgtttcgacggaaggcgagatcgcatctgccgtattgtttagctctaatgcaaaaggcaccattgacggggggagctatacggcgacgggagagggttcttatggtgttgagatattgaatggcgcagacctgacgataaaaaacgcgaccattacgacttccgggtatggcatggctcgggctattgttaaccgatatgccaccctttcattagacaatgtgaatataaacaccacgggagattttggtaatgcaggtatatataacgacggtgaattgaccggctcaaacgtcacgattaccactaccggaagccagagctttggtattcaaaactataccaacacatttaatttagcggcatcccacgttgaaacttacggtgagcagtcagttggcataatgaataccggacgcgcagaactcactgacactcatatcgtcactcatgggaaaaatgctgacgcaatatcctctgacggggcaaagagcacattcgtactgaataacggttcaacgatcgcgtccggagaaaattcgcgggcagtggcgatgactcacggtggagcccttgaggcgaacagcacagatatcaccagcgaacaatctgctgccattgccttagaaagcgccagcagcgcgaccgtcacccacagcaacgtttccggtagcaatgtcgccttctcgttcagcggtggaaaaaatgtcgctacgattgacggagggagcattacggcaaccgcgtccggaggaagtgcttttgcggtggattccggatctgccgaaattaacgtgaagaatgtgcaaacgatgaacgcagacaatctgctcaccgtggccaataccactgatgcagtcacccttcgcgctgaaaacagcaagctgtccggcgccgttaaggccagcggtgataacgtcagcatgacgctggatgcgaacagccaatggctgctgacggccgattccagcgtcggtaatcttaccagcagcggacgcatcacactcggcgatgaaaacggcagtactggtacactcaatgtcggtaatctcacccttcgggctaacagccaaactgatgtctatcttgacgcaaacgcgaccagtgcgcctattgtcgctcagaatgcgacgcttgatggcacactaaatattacaggttacggtagtgccagcacgctttccgcggatagcgccttcacggtgattgacgctgaaaatgcaatcagtggcaattttaccaacctcaccgtcgcgggcatggcatctggctccgttgacttcatcacctttagcggcaccatggaccccgccgacgtgaccaattacgtcctgacaccgtcattaacctggtatgccagccagaacccagcggcaacagcggctcacggcacattcactctgaccaatcctgacggcagctttacgctgagcacggcgcttgtcgatcaaaatgccgaagccacgaccggatgggacggaaaatcgctgaccaaagaggggcaaggtacgctgatccttaatgccgcaaacagttacagcggcacaacggatgtgaaccagggaacgctctggctggacgaggctggcgttatcggcgtacaaaacagcgagcaggccgtgaatgtcgcggcaggcgccacgtttggcggttccaacggtgtggtgaacggcaatgttaatagcaagggtaccgttcagttcaacgacacgctaacgatcaatggtgatctgagcaacgcaggcagcattgtcagcggcaatattgaaggaaccaatggtgcgacgaccggcaacacgctgatcgtaaacggcgattacaccagcaaccagggttctgtgacgctaaatacgcagttaggcgacgacacgtctccaaccgatatgcttaacattaaggggaatacgtccgggaacaccaccctgtacattaacaacgttggtggtcagggcgcactgacccaaaacggtattgaagtgattaaggtcggcggtgaatcaaacggcacctttgttcagggtaatcaggtccagattaacgcctacgaataccgcctgtatcaggactcaggggactggtatcttcgttcccaggccacgagtgataatggcgacgtaacgcctcagtatcgtgccgatatcggttcatacctcagcaaccagtggctggctcgcgatctgcaaatgcagaccctgtcagaccgagaaggcagtcagttcaaatcggaaaacggcacgacatgggcgcgtttcaaagcaggtaagaaccagtctactgcggcagagagcaatattgatatcgacagcaactattcccagttccagattgggggcgatgttgccgcctggaacaacggcgaacaaagcctggtggtcggggttatgggtagctatatgaacgccagcagcgacagcactggcaataaaggtgctgacggcagccgctttagcgctgacggtaaagtcgatggctataacctcggagtctatgcaacatggtttgccgatgcccgacagcatcagggtttttatgtcgacagttggtatcagtatgggatgtaccacaacagcgtagataacggtgacgttggctcaacggattacgattcaaacgccaacgccgtttcgctggaaacaggctaccgctacgatatcgcactcggcgacaacacgctgagccttacgccgcaggcacaggtcgtctggcaggattacagtgcggatgatatcaaagacagcagcggcacgacgattgatgggcaaaacggcgaaagctggaccacccgtttaggcctgcgcattgacagcaagatgaataagtcgaacgacgcggttatccagccgtttgcggaggccaactggctgcatacctctgaagacacggcagtcaactttggtgacacacagatcaaacaggaccttcctgccgatcgtgcggagctgaaagcgggtattcaggcaaatatgagcaagcaatggagcgttattgcccaggtctccggacagaaaggtgataatgattacagcgatgtaaacggtagcctgaacgtgcgctacagctggtaa

SEQ ID NO: 126050 - DNA, 2292 bp, Enterobacter cloacae
ttgtcagaattcatgtctcttatcctttttctggcttctgtcggcgtttacgcctggaaagctggccgtcacacctggtggtttatcgccacgctggtggtgctcggcatttttattattttaaacattaccttatacgccagcgattactttaccggtgacggtattaacgatgcggtgctctacaccctgacgaacagcctgacgggcgcaggtgtgggtaagtacatacttccggggctcggccttatcgtcgcgctggtgatgatttttggcgcgctggcctgggtgctgcgtcgccgtcgccatcatccacaccatcatggctacagcctgctggcgttattcctggcgctggcctccgtcgacgccagcccggcgttccatcagatcaccgagctggtgaaatcccagtcgcgcgatggcgatccggatttcgcggcttactacaaagagccgtcgaaaacgatcgccaacccgacgctcaatctggtctatatctacggtgaaagcctggagcgcacctactttgataacgatgccttcccggacctgacgccagatttgggcgccctgaaaaatgaaggtctcgatttcagccacaccatgcagctgcccggcacggattatacgattgccgggatggttgcctcccagtgtggtatcccgctgttcgcgccttttgaaggtaacgcctcagcctccatgtcgaccttcttcccgcagaatatttgcctcggcgatatcctgaaaaactccggctacgaaaactattttatgcagggagcaaacctgcgtttcgccggaaaagatgtgttcctgaaatcccacggttttgaccacctgtacggctcagaagagttaaaaacgacggttgccgatccaagctaccgcaacgactggggcttctatgacgatacggtactcgacgaaacctggaagaaattcgaggagctgtcccgcgcgggcaagcgtttctctctctttgcactgacggtggacacccaccatccggacgggtttgtctcgcgcacctgtaagcgcaaaagctatgagattgatggcaaaaacaacaaatcgttcagcgccgtcacctgcagtcaggagcacatcgccgcactggtcgagaaaatcaaagcctcgccctggtttaaaaacaccgtcatcgtcgtctcatctgaccatctggcgatgaaaaacagcgcgtgggatcagctcaacaagcaggatcgcagcaacctgttcttcgtcctgcgcggcgaccagccgcagcaggaggagatcgccaccaaacgcaactccatggataacggcgccaccgtgctggacattctgggcggcgacaactttattggcctgggccgcagcacgctgtcggggcaatccctgtcggaagtgttcctcaacatgaaggaaaaaattctcgcctggaagccagacatcatccgcctgtggaacttcccgaaagagatgaaggacttcaccgtcgatcgggataaaaacaccattgccttctcgggcagcaacttccgtctgccgctgctgctgcgcgtatcggaaggacgcgttgagccgctgccggaaagcgagtattccgcgccgctgcgctaccagctggccgattttgcgccacgcgataacttcgtctgggtcgaccggtgctacaaaatgggccagctttggtctcagccgctggcgctctcgaccgactggtgcgtctcgcagggccagcttggcggagaacaaaccgtgcagcacgtggataaggcgcagtggaagggcaaaaccgcctttaaagatacggtgatagataccgcgcgctatcagcgtaacgtcgacatgctgaaaatcgtcgacaacgatattcgctacaaagcggacagctttatctttaacgtggccggcgcaccggaggaagtgaaacagtttagcggcatctcgcggccggagtcctggggacgctggtccaacgcgcagctgggcaatgaggtgaaaattgagtacacccatcccctgccggaacaatttgatctggtgatcaccgccagggcctatgggcctaatgctaacaagcccgtacccgtgcgcgtgggcgatcgggagcagacgttaacgcttggaaacgacgtgagcacacaaacgctgcattttgagaatccttcacgcagcaataccctggtgattgtaccgccggacccgcagtcgacgaatgagggaaatatccttgggcattcgccgcgcgagatcggaattggcatggtcgaaatcaaaatcatcagcaaagcgggctaa

SEQ ID NO: 126051 - DNA, 777 bp, Enterobacter cloacae
gtgcgtcgctatctttcctgcttcattctgtggctcatgatgctggcgctgctgtcacgctacgcgctggccgccacgcttcaggtggccccggtaacgctcgatctgcagagcgaccagcgggcagcggcggtctatctcactaacagtgggaaagcggccatccatgcgcagattcgggtgtacgaatggacgcaaaaaaacggtaaagatgtgctggtggccaccggggaggtggtcagcagcccggcgatgacatcactggcgccgggccagcagcagctggtgcgtattatcgtcatgcagcccggcatccgtgcacaggagcaaagttaccggctggttatcgacgaactgccggacgccacgtcccgtgccgccaatcccaccgcggtgcacttcctgctgcgctactcgattccggtgtttattgccgggaaccagagcgcgcccgtcagccacgatgccctgaactgtgagcagtctgaaataccggccacccttcgctgctttaatgccggaaaccgccacatccgtctgagccaccttgaggccctgacggccgatgggcaggttgtagggtcgattaaaggcctggcgggctatgtgctcccgggacaaaccgcccttttgccgcttaaacacgcttcacgtcacgcgctcagcacgctgcgcgtctatctcaatgatgaccaccatgccagccagatacccctgcgctcgctcgcttctcgcgctcctgttttggctaccgctcatgctgtcagcccggactga

SEQ ID NO: 126052 - DNA, 2229 bp, Enterobacter cloacae
atgctgtcagcccggactgaacccgcagacaccctacaatggctggccattaccgtgaaccacgccccgcgaggcgagctctgggcctgccgggtggtggataatgcgttatggataagccgcagcgacatgaaaaagctggggcttcacgccccggacgatcgcgccgaatgggttgagctgacgtccctgccgggcctgaaggttaatctcgacgtgctgtcccagcaggtgtcgattaccgcagaggcagacgcactcgagggccagcagcatctcaccgcctcaaagcccgcgccgatgtatcgctaccctgatgcgcaacccgtcagcgcctatacgctcggatacgcgctctacgccagcgatgcgcaggggcagcgccagctcaacgcccagaccatgctgaccgcatccggaggattacccggaacgttcagcagcagtttctcaagccatgccggggaggaaaacagcgccggtcgaccgacccacacgcgtctcgaaacccgctggcagtgggacaacaccgactcgctgaccacgctggcgctgggcgacagcatcaccaccggcacccgctggagccgacaggtgcgctttggcgggctgcactgggcacgtaattttgagctcaatccgcaactcaatactgaaccgcgcagccgctacagcgacacggccgtactgccttccacggtcgatttgtatatcgacggccttaagcagagcagccagcgcatcacgccgggtgactttctgctggataccctgccctccttcaccggaagcgggcaggcggaggtggtgattaccgatatcaacggccagcgtcgcaccgtacagctcgatctctacggcgcgccgggcatgctggcggaagggctcagcagcggttcgctggacatcggctggatgcgggaaaactacgccctgcactccgacgactatgccgcctcgccgctgctggacgcgggctggcgctatggggtgaataatcacctgacgctggcactgcatacggagcagcagcgcaggctgcacaacgtgggcacgggcgctgactggctggtctctcccgccgtaggggtggttagccagcacgttgccgtgagcgacagcccttacggtcagggcgttcagtggggcctcggctggcagtggaacggcagaggaacgggcatttctgccagcaccgtccgcaccgaggcggatttcgccgacaacgcccgcatgagcggtgccgcccccgtcagacgcagcgacagcgtttgggtaagccagtccgtcccccacttcggcaccgtgggcgcgggctgggtacagcagaacattcagggcagcacgcagcgctacctcaatgcctcctggtcggtgtcgctgccggcacacatctccaccacgctgagctatacccgctcgtttacggatgcgtcgagtcaggttcagctactgctttccgtcccattgggtcgcgaggacacgctctccgttcaggccagccgggataaaccacgcatggattaccgccaccagccggacgatgaggccggcggctggtcatgggagctgggccagggctttggcgaacgacgtgaaagatatgcagacgcaggctatctgggccgcgcgggcgaatggcacgttgggctgcagcaaggtgccagccagcgcaaccagtacgcctcagccgaagggagcctgacgctgctggacggcagcctgcacgcgctgcgctacatccagcagggcatggcgctggtctccacgcacggcattgggcacgtaccggtgatgctggaaaaccgcccggccggtgaaacggatgaggacggttatctcctgctgaccgacctgccgcgctaccacaacagcaaagtcagcattaacccgctcgatctgcccgccgatgtgatcgcccccgtcaccgacatgcatgccaggccgggcaataacagcgcggtcaaagtcgattttaacgtccatcacgccgtcacggttcaggcccggctggtcgacagccgccgcaggccgctcccgctgggcagcgtcgtgtcaacgccgcagggtgccaccatcgtgggccgcgatggctttatctggcttgaagatccgcccctgccgggtgaactggtggtgaagaccgatgagggagagtgccgggtcgcgcttccggcgccccgtaccgcgtcatctatacagaatatgggagaacaactgtgtcattaa

SEQ ID NO: 126053 - DNA, 957 bp, Enterobacter cloacae
gtgtcattaagagcgccgttattattgctgctcgtcctgtccgtaaaggcgatggcggcagcctgctggataacctccatgcccgccattaactttggcaacgtcgtggcgggcaataccacctccgtcaacaccgaggtcaagtttagctgccaggccgacaacgagggcaggacggaatatctcaacgtctgcctgagcagcgtagacgccccgccctttgagatgatctcgccgggggaccaggagggaaaacagtacaccctcctcttccgcctgctgaacggcgcagcacgctctcaggagctggggcccgccagcagcgggaacctgattcagcagactctggccgcgcaaagcaatgccaacgtcagcggtacctttccgcttatcgctaccattccggcagggcaaagccagcttccggcctaccactattacaactacaacatgaatctgcgcatcgcctggcacagcgccctgcgtcaggatgccctgcaaaactgctcggacggttccgcagagggggagcaagtgcagggcggcaccagcgcgcaggccgaaatcagccagggatgctacatcgagcgcgtgacgccccttaacttcggcaccctgaccagcaccgcgaccctgcgtccgacgcgttccaccgccaccctgaccacgcgctgcccggccggaaccgcattcacccttgccatgggcaaaggcaaccatgccagcggtaatcagcggcagctctgcaacaacgagggccagtgcctgcgctacgggctctggcaggatgaggcggccacgcaacgctggggagatcaaagcagcggcgatgcgctgcaggtcaccaatcccgctggcggcacccagaactacaccgtttacggcgaggtcccggcacagccgctaaccggtaccggggaatttattgatgacgtgattatcacgctgacttattaa

SEQ ID NO: 126054 - DNA, 741 bp, Enterobacter cloacae
atgaaatacctgcttgctgacgccatcgtctataacgacgaggacggttctgtttctcttatcaatgcgccggatgaagatgcgcagctcctcacctgtacggccaataccatcatgaagctgctggttcagcatcatgggaacgtggttgaacgggaaacctttctccaggaagtctgggatcggcgagggcttcaggggtctaacaactccttaaaccagtacatcagcattctgcgcaagatgctggcggccctgcttcccgacgcgctgcttatcgttactgtaccgaaaacgggctttatgctcagcgcggacgttacggtcactccgctggaggaggccccgccgaccgccgaaacggcgaaacctgcatggcgcgttcgccctgaatggctgttctgcggcgcgctcacgctggtcgtcgttgcgctatgcctctggatcgcgctgatcaagccagaaaattcacaaagggagatccatctgctgacgcatatcggcacctgcccggtctacacctttacgccgctggcggacgtatttcacgggaaggcaataacgctggcgcaaacgcttcagaaggacggccatcttccgtgcctgaaaaattcaattttctacatgcacattcagagaacgcttttctacggccacgaagggcggctggtgctctcccaatgttccctcacgcagggtaaagccagcgcctgtcgtacgctttactattacgagtggtga

SEQ ID NO: 126055 - DNA, 477 bp, Enterobacter cloacae
atgatgagacacaaaaaagtttggctaatcctgatcctcaacctgctgctgctgggcaccgtgctggcgtggtactttcacacgcccccgctgtcggtggcctgcgacggaaacctgaccttttccgaccggcgcgacaaccacgatttcacctttgacggtgagatcattatgcgttttcatcccgacaaaaccgggtacatcacggttaacggcagcgtggtgaatgccccacgcagctgggaggtttcccgccaggagatgtttaaatggcgtcacgtggagggcgaactgtatgagatcgctattcaaaaagtggagcgttttagccatgacgccatgccgcccggggtctttgaaaaatacgttgccggcctgacgctgggcaataaaaggctcctgacaatagagcgcacgccggaagacgcgctggtgatcagcaatttctattcgccggtgctgatctgctcggaataa

SEQ ID NO: 126056 - DNA, 537 bp, Enterobacter cloacae
atgtcgacgggtcaggctatacttgccgccatgactcttcgcattcgccccaccacccgcaacgacattgccgccctgcccgccattgaacgcgcggcggccgggcgcttccgtgacttcccggcactcgcctggcttgccgatggcgaggtcatttccgctgagcaacacctcggctatgtcgaacgcgggttaagctggctggcgctggcaaacgacctgcccgtcgggtttatccttgccgaagcccatccgtcttcactgtttattgtcgaactctcggttgatctggactggcagggaaaagggatcggcaggcagctcatcgcctgcgtggcagaccatgcccgtaacagggggctgacagcgctgacgctgacgacgttcagggacgtaccgtggaatgcgccgttctatgcgcggctggggtttgaaaaaatgacgaccctgacgcctgaactgcgtcagaaaagggaagaagagacggcgcacggtttcgcgtatgaaacgcgctgcgccatgcgcctgcctctgtaa

SEQ ID NO: 126057 - DNA, 288 bp, Enterobacter cloacae
atgccaacggagtatgagtgggatagcaataaggcgaaaagtaacctgcaaaaacatggcatacgctttgaggatgcggttatggttttcgacgatccttatcatttgtctgttcaggatcgctatgaaaacggtgaatttcgctggcaaaccatcggccttgtgcaaggccttcttgttattttggtcgcacatacggtacgttttgaaagcggaggagaaatcatccgtatcattagcgcacgaaaggcggaccgcaaagagaggagccgttatgagcatcgttaa

SEQ ID NO: 126058 - DNA, 669 bp, Enterobacter cloacae
atgaaagataaaccgaatgagtggatttctatttccgatctaatggcaggggtcatggccgtggtgatgctgatgctggtgttatcggtactgcaaaacaaagtggctgacgtaaaacgcgagcaggagaaaaacagcggccaggcagccgctcaacagaaactgaatgccatgatgcacagcatgcagcaggagatggtggatcagggagatgctgcgctggtggggtttgatatagccagcggaaaaattacgctgcgggataaaatcttcgcccgcggtagtgcctgtatcaccgatcaggcaagagatgcacttgctcgtctggcaccacggattcaggcgttcgtgagcggttcgacgaacactcaggtttttgttgaggggcatacggataacatcagcgtgaataaccctgtggtcgattacaccaggttctgtaccgtgtatgacgataactacacgctctcggctgccagagcccgtgaagcacgtaaattgttaattgcgaacctcaacgatcagcaatcgcatcgtgtgattgtggccggttttggcgactctcagccgctaaaagggatttcacccagcgatgagcgtaatcgccgcgttgaggtgcagttcctgacgcacgcgccgtcacgtcaggagcagggcagcgctctgtaa

SEQ ID NO: 126059 - DNA, 1539 bp, Enterobacter cloacae
atgaatctgctgactgaaattggccactttttgatcccaggctttgatgcgctgcagatgggctttttcggcgtaatgctgctggcagtaatctacacctggctctccgtcaggcgcaatgcgcaggaagcgcgctggcagcatgcctgggagcaaagtggattacaggctgctcagccgggggtgagtgcagaaatgggatcggccgctgagctgagccaatcactggcgaccaaagctgagaaaatagccgccattatgccgggtatgctgttgatccttggtctgttgggaacctttcttgggctggggctggcgctcgataaagcttccggcattttgcataacgcgggaaacagcattggtgcaatggactcctccatgcgcgacctgatggagatgatgcagggcctgggcacgaaattcaaaacctcaacctgggggattattgcctttatcgccctcaaaatctgggagtcgaaaaatggctatgaagagcgccgtctcaactggtgtatggccaaactgcagcactccctgaccgaagaatatgccctgcaggcggaggaaaatgcttccaggcagcagcagcgtgaagctggacgtaacgcggctaccgagcgtctggtggaggcgatggcgctgcaaactgtcgcgttgcgcgaggagttcagtcagcaggcaaaacgcagtgaagagcaggaagcgcagcgtcatcaataccatctggcggcgttaaaagagatcgcagatattaataatcagtcgcgcaatctgctggaaacttacacccgtaaaagtgaagagaacctggtagcactgcagcaggcggcgactactatgagtgatgcttcgcagcaagtctctggctcggcgatgagcctggaaaaagtggttaccgcgctgggtgccgaacttagtgaggtcatgaccggcattaagcaagagctgtcgcaggtagtgaatgagatgaatgccgacttcactcgcaacgtgcagcagatgagcgataagctggcggagtctactcatcagctcagtacgacaatgggccagatagaaacctcccttaacggtgctatcgccagcatggatgcgtctttccgcggcaacatgacgcagatggccaaccagctggaatccgccacttcgcagatcagcgagtcggttaacaacatgtcttcgcagatcgattcaaccatgaccacggtgaaagagagaaccgaagccgcggcgaaaattcaacgtcaggcgatggatgaattctccgaaaccagcctgacgctgaatgaacaagtcacctctatgacaaactatattcagcgcgtcacgaaggagatcgctctcggtctggccgccgtttccgaaggcaaccgtaagatggagcactacatcacgcgctttaacgaggccttcgatcagcttggtgcattgccggaaaccgttaagcagatcaccactcaggtgtctgcattgtgcacccgcatcgataagttgctcccggctcaacagcttgtcgccgaacgtgttgaggtctga

SEQ ID NO: 126060 - DNA, 1254 bp, Enterobacter cloacae
atgggtttatggagtcgtatttgctctgcagtctcgtacgtacgagatgtcgcttcatccgtcgtcagcaaagcaaaagaaattgccggaaaagcgatcggtttcatggcagaaaaagcggaaggctttgttggtaaagtcagccagatgtggcaacgcattaagccgcatatcggcacgggacgtaaaattcttcagatgctaggcggttttatcacattgccatgggtaaagagcgcgctggcagggctggatcgcgcgctggcatggctggaaaaacttgataaacagccgctggtaaaaaagctgcagaaagccctggagtgggtcattaactggtgtaaaaacgcccaccagaaacaaatggaggagcaggagcttgaagaggctcgccatcatgctcaggctatggctgaagcgggaggtgagttgagtggtgaggagaaagaggctgtgtcggctttcgcactggtgaacagctatcttatcgcaaaagcagaagtggatatcgccgtgaagcgagatacgctgcaggacttcgagtatttcctgcgcctgcgtgcagtgcaaaagctgctcgccttctatgaaacccgtatgcaggccgtgaagtccatcagtgatgtcgatgcggatatgcactttatggtttatgccgcgaacgcgctgatccagcaggaggcagagtttagcgatgccgatactctgcgtctggataacctcactcagagactattcggcaagccgattatcccgtttgtcttcgaagagatgattattgcatgggagaaaagccgtcagcttctggaagaggagtgggagaagaaaaacagcgcgctttcgaaagatcgtttgctgcataaccgtctggtgcgcgcgctaaaatacgaagaacttgaaccgggtgaagtgggcgtgctgaacgatcttaaaatcaccctgccgcgtgatacggccgatctggaacaactaggcgacgatctactggcgcgccatagctacgtcaacgcggcggaaggctttctgcagatgctcgaaaaagaagaacagcagctgattgcggaaggcaaagcgtatctgctcgatcagggggcgattgtgggtgcactgctgatcgactgctcgcaaaacgatcgtgcctggtcttctctttcccagcaggaacagagcttaattaccgatttcgccaacatctttgctgccgattgccagaaacgtactgaagcgggtctgctcgtcgaggtggttgcatga

SEQ ID NO: 126061 - DNA, 930 bp, Enterobacter cloacae
atgtctctgggacgaattcgaccgcaatttacgcagggcctggagaaagcagccggtgaagaaaataaggcgtttgcatcagcggttattccccgttttacgctagaaaacgatgtggcgctgacgacgcaggtcattgcccagcttgatgaagccagagccaaaattgaccacttccataaaatttacgtggaatgggaattcgcagcggtcgaccctatggggaacgggatcgtgctgaatttttttggcccaccaggaaccggcaaaaccctgacggcagaggcgctggcaggttcgcttaagcgcaagattatggttgtcagtattgccgatctcgaaagcaaatttatgggtgaaaccgcgaaaaatatcgctgctcttttccgtcaggccacggaggaagaggccgtgttgttctttgatgaagcagacacccttttgggtaaacgtctctcatctgttactcagggcattgataatgaagtaaacgcgatgcgttccaccttattgattgagctggaaaagcataccggtatcgtcatctttgctaccaacttcgtcaaaaactacgacagcgcattcctcagccgtatctctcaccatgttggttttacgttacccggcagccaggagcgttttcgcatctgggaaaaattgctcgtgcgcgctattccgcttgccgatgcacgggaaacgatgctggaaagcgccgtgtctctctccgaagggctctctggccgagatatccgcaatgccatgcgcctggcgctacctaaagccgtactggaatcagaacaaaaacttacgcttaagcatcttgaaagtgcacttgcgcaaattcgtgatgcttacgacgcgatatcgaacgcggcctctttcgttccaccacacattaacacagcaaaaaaaatgctcggtttgagctaa

SEQ ID NO: 126062 - DNA, 885 bp, Enterobacter cloacae
atgaaggaaacgttgcttactatcgactgggtgaatgtgtacaaagaggttcaaagcgcgctggaaaccgggcacgtcattattcgtgatggggtagcgtactggcacgccatgtccggtaaaagcgggatcgctcaacaccttccgctaaaagaggtggtgctggaaacggcctcgattggcgacatcaaacaacttatacaaatggcacagaccgttcagctggctgcagtcggcgtctccacggggatcatcgtgggggcaatggtggtacaaaccatgtatttgtcgaaaaaaattgatcaactgcagcagagcatggatctgatctccgaagatgtgcacgcgcagaatgttattttctacatggataaactgtcccgctactttggcgtcgtggagtctgctcgcgttatgttgctggatcgcacgctggtggatgagacgcatgacgttgcggcacacctcattgtccgaatgggcaatgaacgcaacgaggttctctcgtttattgataacttgttctcctttgccgataaactcagcgacaggcatttagaacaggttctggatttcattactctcatgctcgatctggtgccaaaagcgatctacattgagagccaactttgcgatcgctacggaaaattcaggctggcagagcacctgatgcgcgaaaactcacgccgctatgctgccacgctggaacattatcgccagtggtgtaatagcaaagttaaggagagcatcagcggtcgcgttgagccacagtcgcttgcctttacccgtaagcaggaagatttgcgtctgttatttaaatcggaagataacgcgctactgctccaggagctggtttccatcgccccccttcctcttaaagcgtaa

SEQ ID NO: 126063 - DNA, 738 bp, Enterobacter cloacae
atgggaaaatacagaacagatcaagacctggagctacttcgctactcagacaacgagatgctggaagtattggttaactatctcaccacggataaagacgggtcgacgcgttacactgagtccttaacgggtgagaaagcatttcaggatgcaggtaaaaactataagcaggtttggcaactcatcggggcggagctacaacatttcggtggcgatacctttgttaacctcttccgtggtaacggcgtgctttataaagaaatcctgacggacgtatgcaagaaactctccgttaaaaccgatttctctgcggatactgtcgatattgagcaggcccttctcgcaaaattattcactgactcctgggataaaatgaatgaggaagagcgccgcaacatccgtcgcgaactcaaaattgacgggaatcttgctagtggtgcggcactgacggcaatcatcaccgcaatccgtatgggcggatttatgtcctaccaggtggcgatgatcgtagcgaatgccgtagcgaaagcggtgctgggcagggggttggcgctggccgccaatgcgggactggtacgcgcgattgggatttttgccggtccgatcggcatggccattacggcgttactgactatcccggccatcagcggcccggcgtttcgcgttacgctgcctgccgtggtgcaaattgctgccatgcgccagcaaatgctaaacaaaggtggagatttcttttga

SEQ ID NO: 126064 - DNA, 1395 bp, Enterobacter cloacae
atggcaatgacaatgaaaataccgtctcgcgagctgtggtcttattttggctatggtttaggtcagtgttttagctttggtttagtgggttcgtttattaactatttttacaccgacgtgctggggatctcggcgctggcggccagtaccatcttcctgattgcccgcgcgtgggacgcggttcacgatccgctgtttgccagtattatggataccattaacagccggttcggcaagtttcgccactttttgctgatcgcgccgctgctgatcaccggcgtcacgctgctgtcgttctataaaatcgaagcggacatgaccaccaaaatcctctacgccggggtgacgtatatcctgtgggggacgctgtacgccatctccgatatcccgttctggtcgatgtcgtcggtgatgaccaacgactccggccagcgcacccgcgcggtgacggcggcgatgctcggggtgaacgcgggcattgcctgcgccaacatcttcttcccgaagctggcggcgttcttcgcccagtacagcaacgataaaggctactttatggcggcgctggtgatgatgctggtgggcctgccgctgatgcttaacggctttatgcagatcaaagagcgcgtgccgccgagtccggaaaaggtgaccatccgcgacaccttccacaacctgcgccagaacaagccgctgtttatcgtcttgctgtcgttctttttctgcgtgttccacaacgtggcgggcgggctgtatatctacttctttatcaataatctgggcgacggcagcctgcagatggcgattggcgtgatgggaatagtcgcggcggtgctgtgcctggtcgccccgatgctgacgcgccggatgcagaagcggaagctgtttatgatcctctgcgggctggacgtggcggtgcgcgtggtgatgtggtttgtcgggtatcagcaggtgacgatgctgtttattctgctcggcctgagcacgctgttcgtgatgatgaccaacatcctcacctcgtcgatgattgccgacaccatcgagtacgcggagtaccacacccacaagcgctgcgcggcgatcaccttctccgggcagacctttaccggcaagatgtcggtggcggtgggcggcgggttaatcggcgtgtttctgacgatgatcggctacgtgccgcaggcgcaaattcagagccaaggcgtgctgtcggggctgttcttcgggatttgtctgctgccggcgattggctcgctgatccgcatgggctttatgtcgcgctttacctttaccgaggagaagcacgcggagatttgtcggctgctggcggagcggaacgcgtctgcgaaagcgccgggtggcggctgcgccttacccggcctacaggaccagcccttgtag

SEQ ID NO: 126065 - DNA, 342 bp, Enterobacter cloacae
atgggcaagtttattatttacatgctacatatattattctgtggttatgtactggctacatgcctcatttctttggttagttttgataacaaggatgaccgtacaatcgcaataacaatcatattaggaagtgcacagcttattgcgacattacttaatcgagtactgcctcataagttacatattttaggggggatagctggactggtagaaggtccgctattagttattggcgcaattgtgtgtctggatgtgttagaaccctggccgatgaagattattgggatgtttgcgtgggttatttttatgatgtttaggccaacatttacgaaaaaagattag

SEQ ID NO: 126066 - DNA, 498 bp, Enterobacter cloacae
atggccgtacctgtacatctttttttaaccaatgacggcggcacaatgatttgtggttcttgtgacgttgcacaaagggaaggaagtattgagctaagaggattacaacataacctcagcctgccaaccgactcggcaacgggaaaagtcaccggcactcgccaacattcgccgtttcagtttaccaaggaactagacagctcttcgccctatctgttcaaagcggcagcgacgggtcagacgcttaaaacggctgaattcagattttaccatattaactatttcgggcaggaggaggagtattatcgaatcacgctcgagaacgttaaggtcatttctgtgagtccagtaatgtacgacacccgaggctgtccggggacggggcatatggaggaggtggcatttaattatgagaagattacccatttgtacaaggacggtaacttgttatcgcacgatgcgtggaatgaacgcccaacctctggctctgctgcataa

SEQ ID NO: 126067 - DNA, 333 bp, Enterobacter cloacae
atggtagagaatattgagcagcgcatctacgccttagccaggcgctataacggcgtttatctgatgaataacgaagcgaagcaaaaattactgaatgctaaaactgatttggatactgatatgcagcttgatgtcactgaagcagaagatttaatggaagaattttttaaagaatttgatgttgatagagggagttttaacataaacacctactaccctgatgagcctctttcatggaatccattcaaaaaatttccggtggtgatggttccagatttcactattggaatgcttatcgaatccgcaaaagcgggcaaatggttatacgactga

SEQ ID NO: 126068 - DNA, 678 bp, Enterobacter cloacae
gtgaaaaaagttttactcgctactgcgctttctctgtgtgtgacttcagcatttgctgcagacccttcagctgtactgaaggttaaaggtacgctgacgaatgcagcatgtacgccagtattaagcaacggcggtactgttgactacggtacaattaatttgggcagtctgaacgcttctgctgtcaaccagttgggacagaagaatatcgatctgaccattaactgcaccgcagcaacaaaagtgtcctggaatatggttgacgatcgcgctgatactaacgcgggtctgaccgtagaaaacggtatgtttggtggtggtattattaaaggcgctagccaaacttacggtgtgggcaaaaccgcgggtggcgttaacattggctcttacgctctgctagttaaagtagacagcgtaacggctgatggtgctgcggtagatccaatctatcagcagaacgcgacgggtacctggaccaaatccaccaacggttcttctcagggcagccatattcgtgacttcaccgttgcgtctgcaggttctctggatccgctggccttccagaccgcgaccttcccgctggcaacttcactggctcttcaggacaccacaactctggcgattacggacgatactcagcttgacggtcagttgaccatcagcctgcgttatctgtaa

SEQ ID NO: 126069 - DNA, 705 bp, Enterobacter cloacae
atgcaatgcataaggtcgaatatatttaaaacactttttactgtcgctttattttccgccaattttgcggtgcatgcagaaggtatggtgccagaaaccagcctgctaattattgatgaagccacacacagcggtaccattaacgtaaaaaatacggattcacacccatccttattatatacgaacgttgtagacctgccggacgaccaggggcttaagttgatcgtcacgcagcctgtggttcgccttgagccgggccaaacgcagcagcttcgttttattttgcaaagcaagcagccgctggatgttgagcatttaaaacgcgtcacatttgacggtattccaccaaaaaatgacgataaaaaaattaaaattggcattaatattcgccaggatattccagtgctaatacgcccggctacgctgggggtcgtgacggatgcgtggaaatacctcaaatggtctacggtcggatcttctgtaaaagtaaccaacccaagtaagtacgttgttcgtctggcacaaaaagtcgtattacaaccttcaggcgcaaacgccacgctttccaaaacttaccttctgccaggtgagacgatgacggctgcgttgaacaaaacgagcagcggtgatagccacgttaaatttttcccggccagccgttatggcattgaagtgccgagttttacctcagaattaaataaataa

SEQ ID NO: 126070 - DNA, 2295 bp, Enterobacter cloacae
gtgaataaaaaaagccgtattgcactttgtgtccgcgcagttctctgcggcaccttgcctctgatgatgtttgactccgcctccgtactcgcaagggaagtgacgtttgatacgggggtaatgaaaacgctggggttatcgagcgacttgaaccattatttcgctgaagcaccgcgttttctgcccggaacccattccgtgaacgttaaagtgaatggtgaagatcgcggaatggccgccgtccgtttcaataaggacggcgtgctgtgttttgataacgatctgcttgatttcgcaggcctcatgccagtccccctgaaggcaggcgaggcgtgccacaacatccgcgacgactacccgaaagcggtaatcaacgcgttgccaaaccaggaagccgttgagttgtatctgccgcctgaagcggtaaacagcctgtcgtcggatatccgaaacttccagcacggcggtgccgccgggatgctcaactattcgcttttcagcacccgtaacgaatatggcggtagcgacaaaacccgctattcgcaggccaatctggaagcgggttttaacgcatttgactggtcgcttcgcagtaattacatcctgacggatgacaatggcaagaaaaatgccgacagcatttacacctacgcagagcatgtttttgtcccgcagaagttaaccatgcaggtcggtgaaattaatgccatgtctaatgtgctgagcggcatacccattaccggtatccagcttatgccgactagtgggctgacaaaagacggcagcggcgtcagcgtgtcaggcattgcccgttcctcccaggctcgcgtggagattcgccagaacaatcagctgatcttcagtacgctcgtgcccgcgggaccatttacgctggatgacgtgccggttgcgcgtaacaacgtcgatttagacgtttccgtcgtagagtcggacggctccacgaatcactttattgttcctgctgccgcagtgaagcagcgaaatctttctcgcccgcaggggcttaccgtgtctgccggtcaggtacgcagcatcgatagcgactacagcgatccgctggtgatgaacgtttccgacggctggcgcattttcccgtggatgaaccttctggcctccggtactgccgctcaagattaccaggcagctggcggtcgtaccgattttcttatcagcgatctttggtctgtttccacgacggttgcggcaagcaaagagtcttttggtgacagcaacagtggacttaaaaccgagctaggaagcgatcttacgctttcctcccatgtatcgctttccaccagcgcgacgcactacagcggcggctaccgtgagatggcagaagcgatggacgatgactatcaggggtacgataacgcctactccggcagcatacgtttctcatccggtctggcaggcgttttctcagcaggcttcaactataaccagagcagcgggaactctgaggattcccgctatctgcttctgtcgtggggtaagacatttaaatatgccagcgttaccgccaactggcaaagcgctgtgggcaacgtcgatgacgaccaggatgatgaaatgctgtacatcaacgtcagcattccgctgagtccggggcagtctgtcagcacttacatgcgcaaacagggcgacaataccacttacggtgtagccaacagcggttcgctgggcgaaaacacacactactatatcgccgccgatcgtgaccagtcgtccagcgataatagcttcaacggtaaccttaacaccaacctgcattatacccagctgagcgtgggtggtggcagcaacggtgatcaccagcgtaactataacgccaccctggcgggcggcatcgctatgcacaaaaatggcgtgacgttctcgccgtatgcgattcgcgatacctttgcgattgccagactgagcgagaagaaaagcggggtagaaatcgctacgccacagggtacggtctggaccgatgcctggggacaggcggttgtaccttcgctaaacgagtggcgcaattcgcgtatagaagtggatgccaacaagctgccgcagaatatgacgctggcaaacggcacccgatatatcgccgcaggtcacgcttcagtcagcgagcttgatttcaaggtgctgaacagccgacgtgtgatgctgcgtatgaagcaaaccgatggtcagccgctgagaaaagggcttgcaatcgtggatgagaaggacaactacattgtgacggtcgttgatgatggtcatgtctttatcaacgatgcggattag

SEQ ID NO: 126071 - DNA, 561 bp, Enterobacter cloacae
atgaattatcaacaaacagtaggattaacagcgctggggatacttttcttcgtggcgactgcaaatgcggaagattgccaaatatcgctttcgcagccggtggtggattaccatgaaatgcgtcgagataatatcgataaaacccagcagaactggcacaaaatggcggaccgtaccctcaacgttaatgtttactgtccgcagccgcagcaaatggcggtgttgttacaggggacggcaggcgataaagggcgcttcacattcggccagtctggcgggatggcggttaaaatcgatgatatgaccatcgacggtaaaaattacaccgtcggcaaaacggtcgatcagctcggttttactccgcaaagcggcacgccttcgccgttttatgtgcgtaataatgaagcggttattgcggttgataataatcaggtgccttcaggccagcagatgaatttccgggtcacgctatcacctgtgctggatgacaatgcgtttagccgcatcaccgatcaaaccgtactggaaagtgacttaacctggactctgctgacgaggtag

SEQ ID NO: 126072 - DNA, 384 bp, Enterobacter cloacae
atggctatctcaccgctcgccctgcgccgttttgcctgcgccgtgataacactggtggtgctcagcgccatgctgctggcatggagcgcgctttcgcaccaggaatccacgctggccattcgcccggtgaaccagggtgccagcgtgcctgacggtttttctgtctggcaccatctggacgcgaacgggatccgctttaaaagcatcaccccgcaggacgatgttttactgatcaagtttgattcccgtgcgcaaagtgccgccgcaaaagtggttctcgaccgtacgctgccgcacgggtatatcatcgctcagcaggaagatgacagccagcctgctgcctggctgtcgctgattcgcgatacgtcgcatcggtttggataa

SEQ ID NO: 126073 - DNA, 288 bp, Enterobacter cloacae
atgtttttcataaagcaccccttcctcgttctgaccgttttcgtcacgctgaccgcaccggcgctgagccaggccgctgagtttaccgctgagcagaagacggaaatcggcaaaatcgccgaggattactttaccgcccatccggaaaaaatgggtgaagcgatatctatctacctggctaatcatcctgagtttctggttgccgcgagcgaaaacctacgccaaagccagcaagcggcctcgcaaaaaatgaaagagatgcaggacgcagccaaaaaagcgcagtaa

SEQ ID NO: 126074 - DNA, 720 bp, Enterobacter cloacae
atgcctgataacaccgtgatgaaactgcgcatcctgatccctgttttagccatcttaacgttcatctcttttgcgcatgcaggcgtcgtgataggggggacacgcttcgtctatcctgaaaaacagcactccattaccgtttcagtgcgcaataaatccacgcttccctggctggtcagcgcaaaaatttatgctggcggaaactggccaggggcaacctctgtcccccaggcgacctcggcgcttgttgcaacgcccgcgctttttgcactacagggcggacgcgaaaatagcatcaggatttttcgtgccgatgaggggttgcctgctgaccgtgaaacgcttttcaccctcagcatctcaaccattccagccagtaagaccagcagcgacaacgtgcaaatggccgtacgttcgagcttcaaagtgttctatcgccctgagggattaaacggcaatccagaaaacgcgtatcgggaaatcctctggtcatattcagcaaaccagctcgtggtgaagaacccgaccccctactacgtgacgctcttccagacgcgtattaacaacaaatccattgataacgcgggcatcattgccccttttagccagcgaacaatggacgagtgccagaaggcgcctcgctgcgaaatacgctggcaaaccataaacgactatggccgggttatgccgcccgtggttaacatccttaatctgaaatga

SEQ ID NO: 126075 - DNA, 531 bp, Enterobacter cloacae
atgaaaccgtttctccggttatttttcttctgcatcatcctgatgcacctgggcagtgcgagtacaatggcgcacgacgggaccgtttatattgtaggcaccgtaaaaagcaaaacctgcatcatatcgcctgattcggaaaatcttatcgttcgtatgagcgacgtcgccacagggcaatttacgaaccagaaaaataatacgccatgggaacattttgctatcaatcttgaaaactgcggcgcagggttgaataacatcagtacccattttgaaggcacacccaatcagggcaacgcagatttgctttcgctgacaggcggtccgggttatgccagcggcgtggctatcggtatttataatccggacaaaacgcttataccgctgggcgatgaaagccagctgtttacgctgtcaaataaccagcttactgccacccttgatttttatgcccgttatcttgctgacggaggcgctgtatcgcccggaacagccaatgctgcagcaacctttattttgacttatgcctga

SEQ ID NO: 126076 - DNA, 546 bp, Enterobacter cloacae
atgaaaaagcgcaattttctcctgtttctgctggcaaatctggcgttgtccttacagacagccagagcagaaaatgacagtttcaatgtgcagtttatcggcaccatcgtgggggagtcctgcaacgtcgacacaggcagcgttgagcagacggtcgaactcggtgactttaccgcagatgatttcccgtcggttggcaccacaacgccggatacaaagtttgatatcacgttgaaaggttgtacccgcgccattaccggcaccaaagtttggtttaccgggaatgtggatgcgaacaacccgacattgctggcactttcagataacggaaagggaacgcctggcaggatggcaacgggcctcggcgttgagctactggattccaatcgcaccccaataccgatcaataatacggagtcctcgctttatccgctgctgccgggggataacacgctcacgttttatttgcactataaatccacgctgcccgttgtgacgtcaggaaatgcgactgccgttatgtattttgacctgctttatcagtaa

SEQ ID NO: 126077 - DNA, 1008 bp, Enterobacter cloacae
atgaaattatggatgattttattttatgtggtcgggctggcattctcaccttatggaatagccgatatttgtaaaaatgctaacggtggcatctcgattgttaactatgatttgaccaccacgctgaacaccaatcagaacattaaaggtggctccacagagctggaaaaaaatcaggatgtgcaggttaacgccacctgtccaccgggtgagtgggaaaaacgcacctatcgctcctatttgagcccttttccggtcgtcaaaacggatggtgaatggaaatatctccagcttgacccggattatattattggcgccatgaaaataaatgacgcaaccattggtgagttttatccccccattgagtacgttcacatgggcggccacgatgaagtggataccggcggcgttttcccggtcaacgataatgacctgatctttaaattacaaattgtcaggccttttatcggcaccgtggttatcccgccaaaattgatgttcaatgtgtacgtcaccacgacgaataacgatcgcctgaccaatattgtctaccagattacctacagtggcgttattaccgtgccgcaaaactgcgtcattaatgccgggcaaaccgtaacggtagatctgggttctctttatcacggtgattttacgcgcgccgggcagatgccggacaacgctcagcccaaaaccttcaatgtgcccattgaatgtaatgctgacgtgaactcgccggcacaattaaccttgcgcgttatgggcacatcggaccctcgctacccggaagcactggcatcggataatcctgatgttgccgtcgtggttaccagtgagcaagacaacatactgaaaccgaatgtcttttcaagtagcgcaccttttacgactgatgaggcgggcaaggccaacgtgacgctgaaagcatatccaatcagcacaacgggcaattccccggaactgggcgtgttcaccgctctggccttgttacgcgttgatttcgcataa

SEQ ID NO: 126078 - DNA, 2628 bp, Enterobacter cloacae
atgaaacgtaatacttcactgatttttagcacattttctttaacatcccttacgccagtggcgatggcgatagcaggattgctatcgccatcagatgcaagtgcagaatattttttcaacccggcatttttgtctagcgatccctctgccgttgctgacctgtcgcggttttccaccaatggccaggcacctggcgtctatcgtgtcgatctctggcttaacggggcgtttgtggcgactcgcgatatcacctttacggcaagaaatacggcgtcgacggcacaaccgcaggcggatgataccggtctgaccgcctgtttatcagcaaaagcgctggaaaacctgggcgttaaccttcaggcgtttcctgccctgacggcggaaaaaacggacagctgtattgatattgcgtcaatcattcccgcctcatcaactacctttgactttgagcatcagcggctggatatcagtattccgcaagccgccctgaggaatagcgcacgcggatatattccgcctgaacaatgggatgaaggcattaatgccctcctgctgaattataacttcaccggctctcgtagccgcgatcggggggagagcaactcaaccagtaaaagctatttcctcggacttaacagcggattaaaccttggcccgtggcggttaagagattactcaagctggaattatcacaacagcgatgactcacgcagcgacaactggcagcacattaatacctatgttgaacgcgcggtcattccgctgaaaggaagactgacgctgggcgacagctacaccccatcagacgtatttgacagcctcccttttcgcggtgcgcaaatcgcctctgatgacaatatgctgcccgatagcctgaagggtttcgcgcccacgatccggggtatcgcaaaaagcaatgctcaggtaaccattaagcaaaatggctacaccatttatcaaagctatgttccaccgggtgcatttgcgattagcgacctgtttcccacgtcctcaagcggtgacctcagtgttgaggtaaaagaatctgacggtagcatcaacagctattccgtgccgtattccaccgttcccgtactccagcgtgaaggccgcgtaaagtacgcattaacagcggccgaataccgcagcagcagcgatcaacaggatgaggttaatttcgttcaggggtctctaatctgggggctttcgcatggcttcacgctgtatagcggatcgcagataaccaacgattaccactcgctggcattcggaaccggcctgaatatgggtgaactgggcgctatctctgcggatgtgactcacgcgaagagcacgctggcggatgacagcacgcattcagggcaatcgatccgttttctgtatgcaaaatcccttaacggcctcggcactaactttcagctgctgggctaccggtactcgacctcgggattctattccctggatgaaacagcctataagcaaatgcgcggctacacaggtgaccacgaggacaacgataccgaacagcaaaatccctggatggattattacaatctgtactacaccaagcgaggaaaggttcagttcaacatctctcagcagcttggtcatgcaggttcgctctttgtcacgggcagccaacagacctactggcataccgatgaaaaaaatacgctactccaggtaggctttagcgggaccattaaagatgtgtcctacagcctgtcctacaactacaacaaatcaccgggcatgtcgaaaagcgacgagatttacgcgctgaatttgtcgctgccattgagcctgtggctgcgtccacaaaacgatgtcagccagaagcataactatgcttatgccacctacaacatcagcaccgacaaaaagggtgaaacctcgcaaaatgccgggatcaacggcacattgcttgaggataacaacctgagctacagcgttcaggaagggtattcaagccaggggacaaaatcacaaggctccagcagccttgaatacgatagcgcctatggcaatgcgaacgtgggctataactacagcggaaacggcgactaccagcaggtgaactacggtttgagcggcggcgtcattgctcaccggaacggcatcacccttagccagccgctgggtgataccaacgtgctgattgccgctccgggcgcgagtaacgtcaaggtcgagaacgagccaggtattcataccgactggagaggctatgccgtggttccctacgcgtcctcgtatcatctcaaccgcatggcactggacatcaactcactggctgacgatatggatatcgatgatgccgtaaccaatgtggtcccaacccgtggcgcggttgtgcgtgcaaccttcaaagcccggcctggtacgcgtgcgttaatgaccttaacccatcggggcaaacccgttcctttcggcgccatggtgtcacgtgatgacaatggcagcgatacgattgtgggtgaagacggagaggtctatctctctggcctgagcccggcgggaacgctgaaaattcagtggggtgaagggtcagacaagcaatgtagcgtgaagtatcaattacctgaaagtaaacagccgctgctgcggttgaaaacggagtgtatataa

SEQ ID NO: 126079 - DNA, 708 bp, Enterobacter cloacae
atgcaaatgaacacatcacctacgtctttgtctcgcctgatgatggctggtacgttgctgctgacaatgggtctggcaacgaatgcctcagcaggtggaattgctttaggggctacccgcgtcatttatccgcagggggataaacaggtttcattaccggtgatcaattcgtcggcagacaatacgttcttaatacaatcatgggtagccaacgttgagggtatcaagtcaccagactttatccttacgccaccgttgtttgttatccaccccaagaaagagaacacgctgcgtattatgtatatcggccccgaccttcctgccgatcgcgaaactgttttctatctgaacagcaaggctattccgtctgtcgataaaaataagcttcagggcaatacgctgcaaatagcaacacagagtgtgattaagttattcattcgccctaagaaattaacatccctttccgtggatgcgcccaaaacgctgacgtgtcggacagaaaatggaaaagtcatcataacgaatccatcaccgtattacgtatcgttggtgcagttctttgttgggggaacccgtcttcccaattcaatggtcgcacctaaaaacacgttgacggtggatatccccggcggcggttccggcagtgtgaaattccagacagtgaatgatttcggcgcaaatacccctacgcagatttgttcccattaa

SEQ ID NO: 126080 - DNA, 534 bp, Enterobacter cloacae
atgcgacaggtcaccaggcaatcagtgctgtttttcagcgtattgctgtgcgttgcactgcccgcctcggcaattgacgacggaagcgtgcattttcaggggcaagtcgtcaacaccggctgttccgtcagtgcagaaagtcaggaccagattgtgcgtatgggccaaatacgcaataacgaatttgccgcaacgggcgattgggcagcaccaacagcctttcagataacgctagaagactgcgataccagcgtcagtcaacgtgcgggcgtactgttcagcggcgagtccgatgcaaaagacccgcaaatttttcgcgcaggttatggcgcaggcgcagcgcaggggattggtgtgggaatatttgacgcaaccggtcatctacttattccggatacagccccgccctggtacgcccccttgcagaacggcgccaatgttctgcgttttatggcgaaataccgctccacacaaccgcacgttcaggctggtacggccgacgcccaggtatggtttaacgtcgtctaccagtaa

SEQ ID NO: 126081 - DNA, 198 bp, Enterobacter cloacae
atgatttttcattcagcaaaagctcttagaagtggggtcttcgtcggttggtataaaggcacatatgaaaactactacatctaccgatccgaaacacctatctacttctactggtataacactgtgttttcgctgttcggctcctttatgattggtttagccctttacctattgaatggcgattatcattttttatag

SEQ ID NO: 126082 - DNA, 1062 bp, Enterobacter cloacae
atgcgcaatctcgctaacgtattgttcatagtgctgctctcagtgctgcctttaagagaagcgctggcgctcgactgctacctgggcggttcgggcggccccgtagaagaaactaaaacgatctcgccgtttgctatccccagtaatgcacaggcaggtgagaaaatttgggaatcggatgacatcaaaatcccggtgacatgcaaccacaatgtcacaagcagctttcaaccggaggatatttttggctgggtgaatccttatccttcaacctccgatccctattatgaactgggcgtaacctatgaagggatagactacgatgcaaaaggccagcctaacggcgtcgatacccgacaatgtctggacaaccaaaacatcacgatttatacccccgagcagatccgacaaatgggatgggaaaatcgtatctgttccggtaacccggatgatatccacacttcacgaaccttcattgctcgtctgcgcttatacgtaaaaattaaagccatgccgcctcacggctacgtcagctcgctgagcgattacatcgttgtccagtttgacggaaaaggcggcgtgaaccagatgtcggatgcgaaaaacctcaaatatcacatcaacgggctgcaaaatattaccgttctggactgcggggcaacgttcagtatttaccctgagaaccaggagattgatttcggcacctttagcgcacgcgatattgtgaatcaacagacgcgtaaacggaccttttcggtgaagacgacgaaagtgcaggatgcccaatgttcagatggcttcaaaatggactcgtcgttctatacaaatgaagcgcttaccgccaacgataccgcactgctgataggcaatggcctgaagctgaggatccttaacggaaccgagccctacacctttaaccactacaacgaatacgtggattttacgggcagcacgcttgagcatgagcagcaatacaccgcagagctgtcgccggtcgaaggaaaagcgatccagtccgggccgttcgaaacggtggtgctgttcaaaattaactaccactag

SEQ ID NO: 126083 - DNA, 765 bp, Enterobacter cloacae
atgatgaaattaaccttactcaaaagcctgtgcctgatgctggtcggcacagcattcaccactcacgcggccgtaaacctggaccgcacgcgcattgtctttccggaaagcgacaaggccagcagcctgaagattgaaaaccagagtaaagcgctgccctatctggcgctctcctggattgaagatgagaaaggccgtaaagaagacaggcatttcatggcgctgcctccaattcaacgcattgaagcgggttccgcatcgcaggtcaggatcgttaagcaagcggccaccagtcagttaccgaaagacagagaatccctgttttatttcaacctgcgcgaagtgccgccgaaaagcaccagcgccagcgatgcacgcagcgtcatgcaggtggcgatgcagagcaggatcaagctgttctggcgccctaaagcgattaccaaaaaacccggcgagcaggcggaaatgcggatggaaatttcagctactgcgaaagggctgaccatacataacccgacgccgtactacatcacgctggcgtggctcagtaagaatgccagaaccatgctgccgggcttcgacagcctgatgcttgcgcctttcgcgacagcaacaacctctacgggtgactaccacggtaactattacagcatcggttatatcgacgattacggcgcgctgaaaaaggtcgacgtacagtgcgcgggaacggcgcagtgctcgctcaccgaacggaagatcgaaaaagatgcgcaatctcgctaa

SEQ ID NO: 126084 - DNA, 1041 bp, Enterobacter cloacae
atgaaccgggccggactccgcgcgatccgtgttggtcgcctgtcggcgctggttcgcccgaaggcgctggcgtgcctgtcgcttttcgcgctgatggcgctaggcctgctgggctttggcctgacgcacggttctctgcccattcccgcctctgccatcgggcgggcgctgttttcgcctgaaactttgacggcggagacgcgctacgtcgtgatggatatccgcctgccgcgcctgctgatggcggtgctgtgcggcgcgatgctcgggatggcgggggcggcgatgcagtccatcacccgcaacggactggctgacccggggcttatcggcgtgaaggagggctgtagcgcggcggtactgctgctgatttttcagttcccggcgctgagcctggcctggcgtccgctggtcggcatggccggtgggctgctcaccgcgctgctggtgatcgtcctggcgcgcgatatctcgcgcccgcggttcatcctgatcggcatcggcgtgtcgtgggcgtttgccgcagcgatgggcgtctttatgaccaccgccgacgtgcgcgacgtgcagacggcgatgctgtggctggcgggaagcctgcatgcggcaaactggacgctggtgggcctggccgcactctgggccgcccccgcgtttgcgctgctgttgtttaccgcccgggccgcggacgtggcgttgctcggcaatcaggccgctacgggccttggcgtgcgcacaacccggctggcgctgctgcgggttctcgctccggtggtgctgacggcggcctgcgtctcctgcgtgggcagcattggcttcgtggggctgattgccccgcatatggcgcgcctgctgctgcacggtggtcagaccgcgctcctgacgggaagcgccgtgctgggcgcgctgctggtgctgctggcggataacgtcggacgtctggcattcctcccgctgcagctgccggcggggattgtgatttcattgattggcggaccgtttttcctgctgctgctctggcagcgtcgggacagattttag

SEQ ID NO: 126085 - DNA, 954 bp, Enterobacter cloacae
atgatgcgcgtactgttttcgatgctgttgctggtgggattcgcggtgagcgcggcggagccgacgcagacctttactgacgatctgaaccgaaaggtggtggtgccggtgcacccgaaacggattgtctccttacacgatctggacatcaccattccgctgattgagcttggcgtgccgccggtggcgagccatggccgcacgcggccggacggcagccattttctgcgctccagcggcatgttaaccggcgtcgacttcgataattccgatatcaaatttatcggtacggcggatattgacatcgaagccatcgccgccgccaaacctgacctgatcgttaccgagccgacccgcaacacgccggtggaacaattagcgaaaattgccccgacggtgagcatcgatcatctcgacggcggcgcgccggaaatctaccgcaagctggctcaactgacaggaacgcaggcgcggctcaaggttctggagcggcgatatcaggagcaaatcaaggcgctgaaggcgaccatcgacacgcgcaaaatcaccgtatcggtgattcaggccaatcaggggaaaatcaacgccatgcacagctaccactcgctgggccgcgttctgcgcgacgccggattcaaattcccgccactgattgaggccatcccggaaggggggcgcatcgacgtcagcgccgagcgcctgccggagctggatgccgatttcgtctttgctacctggcgcggggatacgggcggtaaaccgcaggacgagctggcagcgatggaggcggtgatgccgggctggtgtcagttcctgactgcctgccggcgcgggtactacgtgctgatctcgcgtgaagaggcgatctcgaattcgttcgcgtctttagggctgatggccgcgcaggtgcagtcacagattgccgggcgtccgctgccggaggcctcacggtga

SEQ ID NO: 126086 - DNA, 2118 bp, Enterobacter cloacae
atggcagatttgaagaaaaaagaggtaagccgtagtcgaatggcggagtttcctgccggaacgccgcttcgttcaggggatgagtttccgactgaggatatcatctgtgaggcactagaaaacaaaagctttgaacgtctgaataactgcctggttatcgccagctcagatgaacatgatatgcgttttatcaatgaggagacgctgaatatttatttcagggatgatgtctggaccaatcgctatgtcagaacccatattggtgaaacgttaagaaccgttaatttttcaggcatacgggatcctgaactgcgtcttgaagccaaaatcatctcagccagcctgctctggattgtcggcaggaccgcgaagacgcagtcactgatccggaaatgtgcaaacattgtggcgggagcccgtattattgagtctatggggtatcgcagtctgtttcagcttcgttttccgcttgtccggaatgctttcattgtaaagatgaaggaggaggatgagcacggcaggaagcgttctgaaagaacattacgtaattactttatggacctggcggatatctcgctgacaggtcatacccgtcttcgaaaatacggttactttcctgatattagcttcgacagttacaacagtgtggatgattcaaaccagacatattgtatgcctttcagtcttatgatgtctgtctgggaagggctgattactgaactggatgctgaaatcagtgatttcgattttgacgggttttcccggctgtgcgctatcataaacggtttttatgattcgccttactatacgtcgatgctggaagcccgtaaaagagggacagcaaaaagcataccggattaccgggccgcgtattactacaatattgttgccggggaaattcgggcgcttttcgcgacacttggccccgggatgcagggctggttctcggtacataaaaataagcgctggagatctgattttattggcgttgatcacataaagctgaacacctggcattttgagctgacgttaaaagtcatgaatgtgatacaggccatgtcggggatgagacacagcgaagtgcttggcgtgatgcacggttcactgatttatgatggtgatatcctgggacttcgttcggtgttgcataagttcgccccggaaggtggaagtcacgaagactgggttgtttgtcgctatgtggaaaagccttttcagcatttacgcagaattaatcaaatcatgacaggcctggacgggaagacgctggacaatgttccattgtctttaaatatcaggtcgtggttctcggagcaaaaactctcttttatggggacgcagcgccagactgagtgggcaaagaaatttgtgaaaagacaccatctgttcatccgacgtgaccatattgatgagttcaggcttttaaatccaaacatacgtgatgatgaacgcgttgcgatggagattcgggagggggctttctggccattgcgaacccatcagtttcgccgttcacttgctgtacacctcaggcgtcttgatctgatttctactaatgatcttatccggcagtttaagcacttaatcagaggcatgaccgagtggtatatgtccggtgcactcaacgcttcgcattttagccgggcgatccctcaggcattcgctgccgagattgaaagggttgataccgaactctcagcttccagggctgtttcttatcagcatgaaggcctgctttatggcgaaggcgggaagttactgatgtcccagagaggtgggcacttacatcagatgacgtttcctacactgaaaaaagcgatgagcatggctaaacgaggcgggcaaaaactggtatctcttggaaacggtttttattgcatgaatggccatgactgcgagtttaaggcggttgttcagtcagcgtcctgcaatccgggatgtgagaacatgctggccggagctgattctgttcccgtgtggaaacgcaggatggctcattatgacaaccttctggagattgccgtgcgaaataatgctcctcaggctgacagggattttctgatgcttgagagagatttttatgcagatgctgtccgcttttttgaaaaggatgaatag

SEQ ID NO: 126087 - DNA, 1176 bp, Enterobacter cloacae
atgaaaaattcattagcgtgcctggcgatggccatcagcatcgggatcggtactggaacagacgtgattgccgcaccgttgccggtcacacctgaccagactaccccggtcagccgctatgtgacccaggttaatgcggataaaagcattacgtttcgcctgtttgcacccggcgcaacgcgagtctccgtggtgacggggtcaatgcctgaaagccaggtttcccatgatatgacgaaagagaaaaatggcgtctggtcatggaaaagcgagccgatggccccgaatctctatgaatattatttcgacatcgatggtttccgttcagttgacacgggaagccgctatcaaaaaccccagcggcaggtgaacaccagcctgattctggttccgggcagtattctcgacgatcgtcctgtaccgcatggcgatttgacgaccttgacctggcactccccgtcgctcaagtcagagcgccgcatctatgtatggactccccctggctacaacggcacaggggaacccttaccggtgctctacttctaccatggttttggggataccgggctttcggccatcgaccagggccgtctgccgcaaatcatggataacctgatggccgaagggaaaatcaaaccgatgctggtggtggtacccgacaccgagacggagagcactgaggccatccccgagaacttcccaccggtagaacgacggaagtctttctatccgctcaatgcgaaagccgcagaccgtgaactgatgagcgagattattccgctggtggatacacgcttcaacgtgcgtaaagatgcggcaggccgggcactggcgggattgtcacagggcggttatcaggcgctggtctccgggatgaatcatctggagagcttcggctggctgggaacgttcagcggcgttaccacgacaaccgtgcctgacgaaggcgtggccgcacgctttaagcagcctgaggccattaaccggcagctgcataacttcaccgtcgttgtgggagagcgcgattcggtgaccggcaaagatatcgccggtctgaaagcggagctggaaaagcagggcatcaaattcgactataaaatgtaccccggtctgaatcacgaaatggacgtctggcgtccggcctatgctgagtttgttcaaaagctcttcagataa

SEQ ID NO: 126088 - DNA, 1191 bp, Enterobacter cloacae
atgacagaacatatccagcccacgacccgaccgcagaccaaagaggtttcacgccccaactggtcggcggttttctccgtggcgttctgcgtcgcctgcctgattaccgttgagtttctgccggtgagcctgctgacgccgatggcgcaggatctgggcatttccgaaggcgtggcggggcagtccgttaccgtcaccgccttcgtggcgatgttcgccagcctgtttatcacccaggtgattggcaccatcgaccgccgcaaggtggtcattctgttcagcgtgctgctgacgctctcctgcctgctggtctccttcgcggaaagcttcaccctgctgctgctcggtcgcgcctgcctggggctggggctcggcggcttctgggcgatgtcggcctcgctcactatgcgcctggtgccggcgcgtacggtgccgaaggccctgtccgttatcttcggtgcggtctccatcgcgctggtgatcgccgcgccgttaggcagcttcctcggcgggattattggctggcgtaacgtcttcaacgccgcggcggtgatgggcctgctctgcatcatttgggtgtggaaagcgctgccgtccctgccgggcgaagcggcgcaccataaacagaacatgttcgcgctgctcaagcgccccggcgtgctggcggggatgaccgccatctttatggcctttgccgggcagtttgccttctttacctatatccgcccggtgtttatgatcatggcgggctttgacgtggacggcctgacgctggtgctactgagctttggtatcgccagctttgtcggtacctcgctgtcgtcgcagttcctgaaacgctccctgaaggtggcgctggcgggtgcgccgctggtgctggcggcgagcgccacggtgctggtgctgtggggcagcgataagtgggtcgcgtctgccattgcgattatctggggctttgcctttgcgctggtgccggtgggctggtcgacgtggatcacccgctcgcttgccgatcaggcggaaaaagccgggtcgattcaggtggcggtgatccagctggcgaacacctgcggcgcggccattggcggcgtggcgctcgaccatctggggctgacgtcaccgctggtgatttccggtacgctgatgctgctgacggcgctgctggtggcagggaaggttaaagcgaagtag

SEQ ID NO: 126089 - DNA, 954 bp, Enterobacter cloacae
atgtcgctagtcaacgtcgcgattgtcgcagtagacgggttcagcccgttccactactccgttccctgcattctgtttggcgactcggtctccggagaaaagcgctttaacgtggcgatctgcgccgaaacgccagggttcctcacctcaaaagacggatttgccctcaacgccacgcaggattttaccgccattgggcaggccgatattgttgtcgttccctactggcagcacgttcttgaacgcccgccccagacgctgctcgacagcctggtacaggcgagagaccgcggcgcagaaatcgtcgggctgtgtctggggtcgtttgtgctggcctgggcggggatcctcgacggcaaacgtgcggccacccactgggagttcgaacgtcagtttcagtcgctcttcccgaacgttcggctggatattaatgccctttacgtggatgacggcaatatcatcacctccgccgggactgccgcagccctcgactgctgcctgtatatcattcgtcagcgctttggcagcgtggttgctaaccagattgcccgccggatgattgttccgccccaccgcgagggcgggcaggcgcagttcatcgcccagccggtgcctaaagatacccgcgatggacgcattaactgcctgatcgactacctgcagcagcacatcaccgaacaacatagtctggactcgctggctgaggtggtctcgatgagccgccgcaccctgacccgtcactttgttaacgctacagggatgagcgtcgccgactggctgaccgccgaacgcctgcggcgcagccagattttgctggaagccggaaatatgccgattgaacgcgtggctgagctggtgggatttaattccgccgtcacctggcgacagcagtttaaggcgcgttttggggtgagtccggcggagtggcgaaagacgtttcggcttcatgcctag

SEQ ID NO: 126090 - DNA, 1698 bp, Enterobacter cloacae
atgaatagcgccgaaataaaaattagaataatttcattagtaaattatgccgttgctatcttattgttttcgcttttttcagcgagggtgagtgctgcacctttatcgccagccgatcgcgattccattcaacagcaacagcagcagcttttattacagaaccagcaacagcgtgaggagctggagcggagtattcctcgccccgcgcccgccagaccgctgccggttaccggctccggaccctgtttcaccattcataccattaccctttccggtgcgaccttaatctccccgaaaacccggcagacccttgtcgcgccgtggcagggccgctgtctggatatggcgaaaataacggaacttctcgcccatatttctgactggtatatcagccggggatatatcaccagccgcgcttttcttaccgagcaggatctctccggcggtcagctgaatattgttgtgctggaaggcagactggaagcgatccgtctggaaggcgaaacgccgcgtatgctgaaaatggcgtttccgggacgggtgggcggcatccttaatttacgcgacatcgaacagggcatggagcaaattaaccgtttgcgtaccgagccggttcagattgaaattcttccgggaacgcaggccggatattccattgttaatcttacggcaaagccggaatttcccttaagtgcatcggtaagcctggataatagcgggcagaagagtaccggcgaagatcagctgagcggcgtgctcaccgcgaataatatgctggggctggcggataaatggtttgtcagcggcgggcgcagcagcgattttgccagcgcgtacgatgcgcagaatttccaggcgggcgtcagcgtgccgtttggctacggattactggactacagctacgcctggagtaactaccggaccaccatcagtaaccagggattcaactggctctccacgggcgataccaaaacccaccgcgttaacgcgtcctgggtggtcttccgcaacggggaggtgaaaaccggcattgcggcaggcgtggttcagcgatccagccgcaactggctcaacgacgcgccgcttcagagcagcacgcgcaacctctccagcctgattctgggcattacgcacacgcaaaaaatgctgggcggcgtggcgaccttcaacccgacctggagccacggcatgccgtggttcaatgccgaaaccgacgaagataagtccggggatatgccgcgcgcggaattccgtaaatggagcctgaacgccagcttccagcgtccagtcgcccgtaacgcctggtggctgaccagcgcctacggccagtggtcgcccgaccggctgtacggctccgagcgcctgacgctcggcggcgaaagctccgtacgcggttttaaagagcagtatctgtccggggacaacggcggctactggcgcaacgagctggggtattccctcttcacccttccggtgattggcgcggtgagcgcaacggtcgccgttgacggcggctggctggaaaaagaccgtcaggaccgctttgcctccggcacgttatggggaggctcggtggggctgagcagcgcagggcgcgggtacagcagccagatttcggtcggtacgcccctgcactaccccgactggctcggcccggatcatgtgagcgttaactggcgcattgccttcatgctttaa

SEQ ID NO: 126091 - DNA, 12630 bp, Enterobacter cloacae
atggatacccgtcacccacccgttcgtttctcgcagcgtctgatcagctggattgtctgcggcctgatggtctggcagccgatggcacctgccgtcgcggcggcgcttacgccgaccgggcagaccacggtcgatcgggcggggaacggggtgccggtcgtcaacatcgccacgcccaacggggcgggtatctcgcataaccagttcggtgagtataacgtcggcaaagaggggcttatcctcaacaacggcacggaccgtttaacccggacccagctgggcgggcttatccagaacaaccccaacctgcaggccgggcgggaagcgaaaggcattatcaacgaagtcacgggggccagccgctcgcagctgcagggctatacggaagtcgccggtaaagcagcaaacgtcatggtggccaacccgtacggcattacctgtaacgggtgcggatttatcaacaccccgaacgtcaccctgaccacggggaaaccgcagttcgacgccagcggtaacctgcaggcgcttgaggtgacgaaaggcgccatcacggttgaaggccaggggctggatgccagcaagagtgacgcgctgtcgattattgcgcgcgcgacggaagtgaacgccgcgatacatgcgaacgacctgacggtaacggcaggggcgaaccgcgtgggcgcagacggcagcgtcaggccgattgccggtgagggcgccgcgcccgtggtggccgtggataccggcgcgctcggcgggatgtatgccaaccgtatccgcctggtctccagcgagacgggcgtgggggtgaacctcggcaaccttaccgcgcgccagggcgatattcagctggacgcgggcgggaaactgacggtcacgaacagcctggccagcggatcgattaccgcgaacggcgcgggagtggccctcaacggcagccatcagtccggtggcgcgctgaatgtggccagctcgcaggatgtggaactcaataacagcacgctcgccagccagggcgatatgcgcctttccgctgcggggaaagtgcagacgacgggcggcgggacaaacagcgcgggcgcgcttgcggtgagcagcgggcaggggatgacgctcagcaatacctccctggtctcccgcggcgcggcgacgctggacagtaaagataccctgaccgtcaacggcggcggcgtgtcggcacagggcggggcgctaaccgtcgcgagcaaacagggaatggcgcttgcggatgcgacgctgacgggtcaggccgacaccacgctgtccaccgacggcagcctgacgcagcgcggcggtagcgtcaccagcaaaggcgcgctcagcgtggcggccgggaaagatatcacgctgacgaatacccgcagcggtagcgatacccgcgcgaccctcagcagcggcggcacgctgtcatccacggccagtgcggtctcggcaggagagaatctggccctgagcggcggacagctggtgatggacggccagagccgggccgatgccacgggcgatgtccgcctgacgggcagcgccatcagtaatcaggggcaggtgaatgcggggcgcgacattgccctctccggcgacagggtgtccagcagcggccagctggcggcgaaaggccaccttgacgtgaacgcgggagagctgacaaacggcggcacggtgcagggtaacgacgtcaccctgaaggggcagacggtcactaacagcggtaccctgcagagcgcaggcaacctggcgctgagcgttgataccctggagcagcggggcacgctgagcgcgaagggcaatgcgaacgtcacggcgcagcaggccctgcgtaacagcggcagcctgctggctgacggggcgatgagcgtgacggcagacctgctggaacagaatggcaccctgtccggcgcgacggcgctgacggcgcagaccggcaccctgaccagcggtcaggcatcccgcaccaccagccagggcaatgtacagatttccgcgacccgcagcgccagcctgaacgggcagacggacgcggcgggggccttaaccgtcagcaccggcgacctgaccaccggccgggatgcgcatctgcagagcgggcaggggcttaccctgcaggcgcagaatgccgcgctgaacggcacgcaggcggcgaagggtgctctgtcggtgacggcgggcacgattgcgcacgccgggaaatccaccggtaacgcgctgagttttaacgcaaccggcgacctgaccagcggcggagagcttaccgccagcgccatcgcgctcagcggacagaacatcctccagtccggcgtcgcaaaagcggatcgcatgaccctgacggctcctgaccgcatcaccagcagcggtacgctggttgccggtacgctggcgctggacgctgcctcggtggagaacagcgggttgctgcaggggaccaccctgctcggcctgaagaccgggtcactcacaaacctcgcgggcggatcggtctacagcacgcaggatttaacgctgaaccttccggtgctgtctaacagcgggcttatcaccactgacggcacattgcgcctccggggcgacacgctgacaaaccagggagaaatcaacggcgtcagcctgagcagcgactacctcagcctgaccaacaccgataccggacgcctgctggcggacgaccggctcaccctgaacggcactgcgtttgctaacgcgggcaatattgcggccagcgacctgcacatcacggcggacagcctgcaaaaccagggcaccgtcgagggggactcggcgctgacgctcggcgtggcagacctcactaaccgtggcgcgctgcgcagcagcggaacgctgacgctcggtggcgacacgctggccaacagcggcgagctcagcgccaccgcgctgctgctgaacctgacccgacaggccagcaacgatgccgacgggcgggtgattgcccggaacggcctgacgctgaccaccgccagcctgacgaacagcgggctgatggccggcaccgacgcgcagtttaacagcgcgtcggtgaccaacggcggcacgctgcaggggacacactccctcacggcgaccgggacacagctcagcaaccagcaggcgggcatgctgctctccggcggcgcgctcgacctgcaccacaccaccctgaacaacgccgggctgctgcagggcaacaccctgaacctcgcgaccggtgagtggatgaacaccggcaacgcgctgggggaagcgggcgtgacggctgcggtggccggcacgctgaccaacagcggcaaggtgctcagccagctggcgctggacgtccaggccgacaggaccgataaccggggccagctgctggcaaaagtgctgaccctgcggggcgacctgcagaacagcggcctgcttcagggcagcagcacgctggcctggtccgggaacaccttcacgaaccagcctcaggggcaggtgacgggcggcgagaccctgacgctcagcggacaaaccctcagcaacgcgggcagccttcaggggcgcagcgcgacgcttgacgccgggagcctgaataaccagggcagcgttcagacgctggatgccctgaccctttccgcgaccggcaggctggataacacgggcgccctgctcagccaaaatctgttcacgctgacggcggcgcagctgtttaacgacggccagctggccgggaaagccctcacggtgaaggctgcgcagctgaacaacaccgggatccttcagggtaacgacacgctggcgctgaccacccgtgcgctgagcaacggcgccaccgggcagctggtgagcggcagtcctctgaacgtatccctcgacacgctcgataacgccggcctgctgctggtgaagggcggattcaccctgcggggcagcgacctgacgaaccggggcgatattcaggcgcagagcctggatttgggcctgagcaatgccctgaccaacacggggaacatcattgccaccgacgatgccgcgcttaacgcgacgacgctgaccagcagcggcacggtggcgggcaaaacgctgacagcaggcggtactgagctgcgcaacagcggcctgatgcagggcagcaacgcggttaacgccaccgccgaccgctttatcaacgagctgaacggtaaatggctctccggcggcggcttcacgctggcgggcggacagctgaccaacgccggtacgctgcagggcgccacgctgggcatgaccggcaccaccctcaccaacagcggcacggtgaacgggcagacgggactcagcggcacgctcagcggagcgttaaccaataccgggctgctgcagagcggcggcgcgaccgccttcaccgcggacaccctggcgaacccggggcgcatcacgggcggtacgctgtccctcaccgcccgcgatatgaacaacggcgggctgatgcagggaacgaacggcctggcgctcaccggcaccacgctgaccacgggcgcgacctcgcgcaccctctccggcggcatgctgacgctggatgcaggccagctgaccacgcagggcacgctgcaggggaacggtgcagacatcagcgccagcgactgggcgcacggcgggtctctgctcagccagggaacgctgacggccacgaccggcggcacgctgacctcaaccggctcgctgatgagccagggccgggcggatatcaccgcacagacgctggataaccgcgggcagctcctcagcgagggcgatgtgacgctcggcggcagcacgcttaaaaacagcggcaccgtgcaggggaacaccctcgcgctgcatcagaacagcattaacaaccagggcaccttaaccggtctgcagagcctgaccgttcaggggcagcagcggctgatggcgcgcatggcgatggccgcgccgcagcaggagctgattaacggcgcaggcggtaagcttctcacccagggtactctgacgattgcgtccggcgcggtgaccaacgccggcagctggcaggcacagaatattctgcttaacgcccggtcgctcaccaacagcggcgcggtgcagagcgccggtgcgttgcagatgacgctggccgatacgctcaccggagccgcaggcagcaggatcaccgcgctgggggcggcaacgctgcaggccgcgacgctggcgaaccagggccagtgggcggcgaaaaacctgacgctgacaggcggcacgctcagcaacagcggcgccatcagcggcgtgaatggcctgaccctcagccagaccggcgcggtcagccagcagtctggcggcaccctgctgtccggcggggcgctgaacgtcacggcggcctccgtcaccagcgacggcaaaatgcaggggggcacgctcggcatcaccaccggggcgctcaccaacaacggacgtctgcagggcgataacggcgcgacgctggccctcagcgggacgctgaccaacaacagcggaggcgaaatcgtcagccgcgatgcgctgacgctgaccacgcccgcgctgtttaactacggcctgatccagggcggcggcgagacgcgcgtgaccgcctcctcgcaggcgcgtaacgacggcaggctgctctccggcgcgcgcctgacgctcggcacgccgcagttcaccggcaccggctggctgcaggccaccgacctgatcctcaatgcggcaaacgccaccaacggcggcacgtggatggccgatcgcgccaccctgaccggcaccaccttcgccagccagggcaccacccaggcgggacagctgacggttaactacggccagctgaacaacagcggcacgctgctcggcaatgcgcagctgaacattaatgccgaccaggtaacccagagcgcgggcggcaagctgctgagcggcggcaacctgtggctgcagagccgggggctggacctgaccggccagctggtgtccctgggggacttaacgctgcagctgacgaacgcgtttaccagcagaaccgccgtggcggcaggcagaaccctcaccatcaacagcggcggcgacatcgataaccgcagcgtgctgcaggggcaggcggtcaacctgaacgcgggcgggcagctcagcaacaacggacaaatcaccaccggcggcggcgcgagtacgctctccggcagcagcgtggcgctgaacggcgcgggctcggtgcagggcggaggtgacatcaccgtggccagccggagcaatattaccgtggacggcttcaccggcacgcgcggctcgctgacactgagcgcgccgggcgccatcgtcaacaccgcgctgttgtacgcggcgaataatctggcgctgtttgccgacagcatcatcaaccagcgcggcgacatcatggcggggaacaacctgtggatgcagcgggatgcggcggaaaatgcgaacagccaggtggtgaacacgtcggggaatattgagacgcagaatggtgatattacggttaagactgccaacctgttaaatcgcagggatggtttaactgcttcgacgacaacaaaaaatgtggcctctacagcggaaccaaagattgtcgttaatattgatgatatgcctgaaggtagcgtaggtgtctattacgactaccggtatgtccatggcggaggggggtgtgctgagggactctgtgaatcttattatacattttattatgcgccatttgaggattatctctcccgaaaaattatactttctgagtcggtaacaagcgtaaccagtcaaggtggagcggggcgaattgtctctggacgcgatataaccataagtgctggctcattaaataatgaagccagtaatattcttgctaatcgggatatcaatctttccggaggaagtttaaataaccaatcatggcaggatggggcaagtacagaatatttaatttatacctttaagggaaaggtggctaccgaccctgttagttatatggatcacccatccggcggtggtggcgtcgacgtatacgtcactcgtcccagtaataatgacctgacttttacattgacaggccataatactgaatcgcaagctggtgcaatctaccgcgccgtcatccaggcgggcggcaacgttaccgcaaacttcaccagcaacatcagcaacactaataccaccgccaatgctggtggcgtcagcaacgtcatctccacgccgtcgctgaacaccctcagcaaccagagcgtcggcagcggcgtgcaaaaacaggggctgaacacgaccggcaccgtggcggtgaactcgccgcagtggaacgatcagctccagggtgcgctacagcagcttaacggcggcggcgcgctggaaaacggcggcgcgtccggcacgcctctcagcaacattggcaccacgcagaaaggcaacgcgaacctcggccaactgggtgcgctggcgaacgccggggtcaccacggccgatctcagaaccgctcagggcggcgccgtcgggcattatcagggccagcgcgtcgataccagcgcttacccacttccgtcgggcaacaacggctatttcgtcttctccgataacccgaaaagcccgtacctgatcggcatcaacccgaaactgaacggtctcggacagctcgatcccgccctgtttgccgacctgaacgcaatgctcggggtcaaaccgtcgtccacggcgccgcaggagacgcggctggcgtttaccgacgagaagcagttcctcggctcgtcttacatgctcggccgcctcaacctgaacccggattacgactaccgcttcctcggtgatgcggcgttcgatacccgctatgtctccaacgtggtgctcaaccagaccggtaaccgctacctgaacggcatcggttccgatctggatcagatgcgctatctgatggacaacgccgcggcggcgcagcagtcgctgggcctgcagtttggcgtctcgctgaccgtcgatcagattgccgcgctcgaccacagcctgctgtggtgggagaaagccaccgtcaacggcgaaaccgtgatggtgccgaaactctacctgtcgccgaaggacgtcaccgtcaataacggtagcgtgatcgcgggtaacaacgtcaccctgaagggcggcgacatcaccaacagcggtagctcgctgctggcgaaaaacagcctgacgctcgatagccagaacagcatcagcaacctcaacaacggcctgatgaaagcgggcggcgacctgaacctgagcgccatcggcgatatcaataacatcagctccaccatcagcggcaaaacggtcgcgctggagagcctggacggcagcatcaacaacctgacccaggttgagcagattgatatcaacgccggagggaagtacggcaagatcggcctgaaagacaccctgctgggcaacacggcgtcgattaccgcgcaggatggcctgtcgcttgaggcggggaaaaacatcaccgttaccggggcgaacctggcctccggcggcgatatgctgctgaacgcgtggggcgatattgccgtcaacgcgaatcagatcaacgacgcattcagctccagccgggcgaaaaccagccgttcgtccgtcacgtatcagggcagtaacgtcaccgcgggcggcaatctgctggtgaacgccgggcacaaccttgacgtgaccgccagcgacgtgaaggcgggcggcagcgcggggctgagcgcgggcaacgatctcaatctgaacgcggcacagaccagcgaaagcagccgtaaagggaaaagcgagtcccacagcaccgggctcgaccgcaccacgatttccgcaggcgataacctggtcctgaaggccggacaggatatcaacgctcaggccgccgcgctggcggcggagaaaagcgtcgggctgcaggcgggtcgcgacgtgaatctggctgcggaagagaccacgcagggcgatagctataggtcaggcaagaaaaccgtcatcaacgaatcggtacgccagcagggaaccgagatcgccagcggggcgaatacccagatcctcgccggacgcgatgtcaccaccgaagccgcgcaggtgacggcgaagggcgatatcggcgtggcggcgggccgtgacgtcaatctcaataccgcaaccgagagcgattatcactacaaagagcagaccaaaaccaaaaaagggttcctgagcaagaaaaccacccacaccatcgaggagaacagcgcgacgcgtgaatccggctctttgctgagcggcgataacgtgcaggtggtggcgggcaataacctgctggtgaacggttccgccgtggcgggcgacggcgacgtgaagcttaaggcgggcaacaacgtcgatatcgtggcagcgacgaacagcgatacctcctggcgctttaaggaagagaaaaaatccggcctgatgggctcgggcgggattggtttcaccatcggcagcagcaaaagcacgcacgatcttcgtgagaaaggcaccacccagagtcagagcttcagtacggtgggctcgacggggggtaacgtcgcgatttctgccggaaaccaggcccatatcggcggcgcggatcttatcgccgggaaagatttaagcctcagcggcgacagcgtcatcatcgagccggggcacgacaagcgcacccgggatgaaaccttcgagcagaagaaaagcgggctcaccgtggcgctctccggcaccgtcggtagcgctattaacaatgccgtgagcgcggcgcaggagaccaaagagcaaagtgatggccgtctgaaagcccttcaggccaccaaaacggtgctgtccggcgtgcaggccgggcaggcagcggatatggcggcaaccaccggtgacccgaacgcaatgggtgtgagcctctcgctgacgacccagaagtcgaaatcacagcagcatgctgagagtgatgcggtggcaggcagcacgctgaacgcaggcaacaatcttgccatcaccgcgaacggtaaaaacaaaggcgcgaacagcggcgacatcgtgattgcgggcagccagctgaaagccgggggcgacaccacgctggatgcacagaacgacattctgctgtccggcgcggcgaatacccaaagaaccagcggcaagaacagcagcagcggtggcggcattggcgtgagcatcggtgccggcggcaacggtgcgggtatcagcgtgtttgccaacgtcaacgccgcgcatggcaaggataaaggcaacggtaccgactggaccgaaaccaccatcgacagcggcaaaaacgtcatcctaaaaagcgggcacgacaccgtgcttgatggcgctcaggttaacggcaataaaatcgtggcagatgttggtcacgacctgctgatgcgcagccagcagaacaacagcgactacgacagcaagcagaccagcgttgcggcgggtggcagcttcaccttcggcactatgtccggttcaggctatatcaacgccagccaggacaagatgaagagccgctttgattcggtggccgaacaaaccgggctgtatgccggggacggcggcttcgatatcaccgtggggcatcatacccagcttgatggagcggttatcgcctctaccgccacgccggacaaaaacagcctcgataccgggacgctgggcttcagcgatatccacaacgaagcggactttaaaacctcgcactccggtatcagcctgagcggcggcggcagcttcggggataaattccagggtaacctgccgggcggcatgatctccgctgcgggtaataaaggccataaggaaggcaccacgcatgccgccgtggcagagggctccctcactatccgcgacaaagcaaaccagaagcaggacgtggccgatctgagccgcgacaccgaacatgccaacgacagcatcagcccaatcttcgacaaggagaaagagcagaaccgcctgaacgcagttgggatgatcagcgacattggtagccaggtggcggatattgccaggacgcagggtgatcttaacgggctgaaggcggcccagaaagaaaccggcgcaacactccccgcaaatgcgacagaaaaagagcgccagaactatcttgcgaaactgcgtgatacccaggcatacaaaaacgtgatggtgacctacggaaccggcagcgccatgcagcgcggcatccaggcggctacggcagcgctgcagggactggcgggcggcaatatcggaggggcgctggcgggcgcgtcagcaccggagctggcgaacatcatcggccatcatgcaggcattgatgacgatacggcggcaaaagcgattgcccatgccatcctcggcggcgtaaccgcagcccttcagggcaacagtgccgcagcgggtgctgtgggggccgcatccggcgaactgattgcgacagcgattgccaaacagttctatcccgatactgacccgtcgaagctgacggaagagcagaagcagaccgtgagtacgctggcatctgtttcagcgggcatagctggcgggattgccgggggaaatacggctggtgcggcggctggagccagtgcaggaaagaatactgtggagaataacttccttagcgcttcaaaaaatgatgcacttaataaagcgcttgaagatcaaaaaaatggtaagaaccttcttcaggcatcacaggatattgttcgtctgaccaatgaggacaaagccaataatgggcttctgaataaataccagaatggtcagctgaatgatgcagaaaagcaagaacttgccgggttacttaatcagtatggctatgaactccagactgtttacggttactcagagcagcaagcggcacaagcgatacagtccctggcgaagggcggagcttttgtggcatcggcagctgatgccaaagcctataatgaggcgctgagctatctgaaaatgcacggtgttcagtcaggtcaagccgcagtgggtacagatgctttgatggtccttcctggagcccctggtactctggtgcgtggagttgtggctgcgggaggtgcataccagacaggtacggggataggtcagattgctgatggtaactatagtaacggagctctgaatgttggtctcggaacggctgctatatttggtggcgcagcagggaacagcgttatcaccaaaactgaaacaggtattgtttctccaaataaaggtgctggctggacagagaattctcagtctattgataaaaatgcccattcttctattcccaaagttactgctgaattgacagatcctcagacaggaaaagtcttcacggatacgaatcaggggaacagagctgatttcttcttgggggatgccagcaagccaacgcttatcaatgatgtagtgcaggcaaaagtaattaaccaaccggataaaaatttcccaaatggaaatatggctaccgctcatgcagaagttggtactatccaacaagcctacgagcagggtatgacaacgggtcgtagcatggaaatgaaagtatctggtaagccagtttgcggttactgtctcagcgatataaaaagtatggctgaaaaatctggcttgaaatcgcttactatttttgaagagaaaagcggagatactttgtattgggaaaaagggatgaaaaaattcaccaggaacgaaacttatgaaagatga

SEQ ID NO: 126092 - DNA, 402 bp, Enterobacter cloacae
atgaaagatgagtttgaagtcgatttctatctgtacaccagaaactctttttcacgggttcgtgcccccaagtggaatgatgtagaagaattcctgatgaaattgagggggaatactggcggtgtaagactccgcattgtccccgaacctgatattgggccgatgaatttagcagtatctacagatgatggcttctatctcttgacgttactagagtgctcggaatctgatttaacggttcgttcctattgggataaatcgaaatctggtatggagaaaaaaatacagatttatggggattactggcctgaacgacaactgacaaaagattttgatcttgttgtcagggtctttaaagagttcttcgatattggcaacgtatcaacgaaacttcttaattga

SEQ ID NO: 126093 - DNA, 234 bp, Enterobacter cloacae
atgaaaatactaaaatacactcttcctttggttttttttatagcatttagtatggtttcgatttttctgacagggatcgttttatatgcatgtggggaggtttttttcttagcatataaaggaataccaatgtctttttcatcggatattgttttgtttttaggtaaaataagtatatgtattggtattttcgccggtgtaatgttatggatcgccaatttgctaaaaaaatga

SEQ ID NO: 126094 - DNA, 1458 bp, Enterobacter cloacae
atgattggcgagatcggcaatcaggttgcggatattgcgcgcaccaacggcaagattgcggccacggaagcggccaacgagaagatgaaaaccgcgggcagcgatgcgcgtaacgccgccatcagccagctgaaaaaagacggtaaagaggttaccgatcaggcgattcatgaccagatgtaccagaccttctataacgaagcgtttaaccagtctggcatgggaacggggccgagcacccagcgcgccatcacggcagcaacggcggccattcaggcgctggcaggtggtgacattaaagctgcgattgcgggcggtgccgcgccgtatatcgccaatgccatcgcgaatgccatcccggagaaggatcttaagggacgcgtgctggcccatgcggttgtcaacgccgcacttgcagccgcttccggcagagatgcggcgtcggccgcaaccggtgcagcggtgggtgagctggctggtaagattgcggttgacggttttggcaaacaggtcagcgaactgagcgaggaagaaaaacagacggtatctgcgctggcgacactggcttctggcctggctggcgggcttgtcggagacagcagcgcgaatgcggcagcggcggctcaggcgggcaaaacgacggttgagaataactttctctctggtgatatgtatgcgctcgacagaaaagtgaaggcagcgaaagagaaaggtgaagatatagaacctattctggaagatgcccggaaacagtcccaaaaagacagggataaaattaaggcttcttgtaaagccaaccctgatacttgtgggttctcgcgtgatgcggctaatgatgctcaaagtgaaatactggagaatggtccattcctgaatatagatcccgatgtagcaaaactggttgctcaggaaacagcgaaagacaatgcggttatcagtcagaatacgagcgagtttggcaaaggactagtggttgcttcagaaggattgtcaatcattgcgggtatgggcaccagtgctgcgttgaatgtgctaaagaccggcggggcaatcagagatccgaaaacaggttctacagtcactgtatatcgggttgaaggtgtccctaacacacgcgttctgatcggtgaaaaaggccaagtcacaataacaggcgaaacaaccttatatttgaattttggtgacaaagcgcgcgcccaagaatttttgcaaaaacgtatttcgcaaaacatggaaggtgctacaataaaaacatttgatgtgcctacatctgttctaaatgatttaagaaactctgcggttaaggaaaatgtagctcggttgccagaaaataaaggtaaacctgttattgctgatccgacaaaagcggatgatcaatatggtataaggcctgaaaaattaaaagatctgcaagataaaattatccgggggtcaggaaaagatgagtataagcgctga

SEQ ID NO: 126095 - DNA, 558 bp, Enterobacter cloacae
atgagtataagcgctgaaatggaaagacaaatcttacttgaacgggaaaggttaacttttcctccattgccaacacaaaaagcaacaggtgtaggtatcgctagatttatagtgtcatgtgattctaatgctttttttgttttgcaattggcaaaagaagtcatattaattgtaaataaacattcacttgaagcatggccgtcacttgagtattggaataaaattcttccttcgcagtttgtaagtaactgccttgcagaattaacaaagcaagaaaaaatagaagcccagataagatgggagcagcttgcatataatgaaaaaataaaagaagcagcgcaagatgagcgttggactttatcaagctggttatcgtggttagaacctgaggaacgggaatggttttggtggaatgccattcagtttgaaccaccgttagaaaacactcattttgtaatagaagtaacatcacttgactcaccttttatgtccggctcattgaaatggttatttaaagcctgtggagctgtagatgtaatttctgaagatgatttgtag

SEQ ID NO: 126096 - DNA, 252 bp, Enterobacter cloacae
atggatattaatgacgaaattagatattttggcgaagggttaaaaggtcgtcttgaaccttcgttagttgactttgctcttgattatcttggcttttcagaaattgtattggctttcgaaacgttatgcgatcatattgctgataatgatgttgcgatcagtaaagaggaatacttgcaagtacttaaaataagtaatgaccttggtctaaagattgatagtaggtatacttatatcaatccagaaaaatag

SEQ ID NO: 126097 - DNA, 372 bp, Enterobacter cloacae
atgactttatttgaagagtgtagtgaagctcttagtgctgatttcactattattgataaagaagaagatgcgagagtaactgctattctggaaggatacccctttgttagcggaaacatttcttggtctgaattaagctttagagactttgaaaccagtgatgagttactctgtcaatccaggttaaaaaatgaagatgtttatgtcattgcagacgatgcaaatatacctttattcagaactaatttgagattagtgcttgaaaatatttatgatgtcgcggcgttgtcaccaaaaatgttcatttttaatgaaagtatgattttgcagccactatttccaaccgatgcatttcggctcgggacaagatag

SEQ ID NO: 126098 - DNA, 456 bp, Enterobacter cloacae
atgatttatctgctattaggagttgcgcttttcgcatttttcatcggaactgtcgtgtttgtccgttttagtaaaatgacgggaagaagcgttcagtcacctcttaccacgatgtttttctttgatgcgcttttttttggtctgggtagtaagcgagacatgaacatcgcagcatcttcatttatcgtctttctagtcagtatctggggattaacctatttaaaattaagcacccatttttggggaagtcgcgaaagttatattggttttgcgatcgccggaattttatttctgattatgcattgccgctattgtgcaaaaaatgtcgttatcaaaaatgatggcctggcccccatgagagagttgattaatatccggcgctccggccttaccagcccctttatatggttaagcagggccgggtatctggggttctttattggcatgcttcactga

SEQ ID NO: 126099 - DNA, 858 bp, Enterobacter cloacae
atgaatccgatatcaacttttataccgcacggtagtgatcggctgagatacattgaattttccttaatatataaaggtgaggtgtcccgctcttcattaatggaggccttcaatataaaagaagcatcagccacaagagatattaataaatataatgagattactgaaggtaaaaacagttacttcgattcaaaaacaaaaaaacatattataaatgatgagatcttttctccatattataacttaagcgatattgatgtcctttgctggataaaatctgaaaaaatagaaaaaacagatattaattatatttatagatgtcagcgtcttaatatacctagtaaagaagcattttctccaataactagagctattacacaaaaaaagaaagtagagattgagtatctttctgttacgagtggaaaatcaaaaagaattattaccccccatagtctgttcgatgatggcttaaaaatatatgtgcgagcttatgatagtaaatataagaagttcattagtctctccccatctcgaataactaaagctaacttattgaatgttatggccggaaaaggtgaaaccataggtgatgacattgagtggaataatattcttgaactagaaatagttccacacccaagaataaaattcaaagatacgatcgaatatgaatacagaatgattaggggctctttaattgtgaaagtacgagaagcgacggcaggattctatctaagagcatggaacgttgactgttcttttgatgcaatattaaatcctgagatctaccaattgcatctaaaaaatcatgctcaatatgctaaaaaagatttcatgtttctggctcctacagaatga

SEQ ID NO: 126100 - DNA, 1671 bp, Enterobacter cloacae
atgtggcgatggataagcggattaatgctcttgtggagtggctatggcgcggcggtgtgcccggtctggtcgcaggcaaaagctgagaaagagatggcgtcgttaagcgcgcaaatcaaacgctgggatgacgcttactggaagcagggcgtgagtgaggtcaacgacgaagtttacgaccagcttaacgggcgcttaatgcagtggcagcactgttttggcagtgagccttcagaggagaaactccctgcgctggtgggaagcgtaaaacatcctgttgcccatacgggcgtacataaagtggccagcaaagaggagttgagacagtggatgcgtgcgcgacagcatctgtggatgcagcccaaagttgacggtgtggcggtaacgctggtctatcgtgacggaacgttaacccaggccatcagtcgtggtgatggcctgaaaggggaagactggaccgggaaggtgcgtttgatcccgactattccgcaaaagcttaccggcaagctcgcgaacagcgtcttacagggcgagcttttctggctaagcgacaatcacattcagcggcagatgggcgggatgaacgctcgcgcaaaggtggcgggggcgatgatgcggcaaaaggataactcagttttgagcaagatcggcgtgttcatctgggcctggccggatgggccgaaagatatgcagacatctttagctgaactgtctcaggccggttttacgctgtcggcacggtatacgctacccgccgattctgttgatgccgttgagaaacagcgcgccgcctggcacgtaaccggattaccctttgccacggatggcattgtggtgcgttcggaggatgcgcccgcaggggaaggctggttaccgggcgaaggcaactggctggttgcgtggaaatatgcgcctgcagcccaggtgaccgaggtgagtgatattcatttttccgtgggtcgaacgggcaaaatgtccgttgtagccgcactggaacctgtgcaattggacgataaacaggtacggcgggtgagtctgggctcggtggagcgctggcagaggctggatattgcctcaggggatcagatccaggtcagcctggccgggcagggtattccccggtttgataaggtggtctggcgcgggacggacagacataaacccgagcctccagcctcgcgttatcatgcgctgagctgtttctatgcttctccggaatgtatggaacagttctttgcccgactgacctggctcagctcaaagcaggtgcttgatattgaaggattaggcgagtcaggctggcgcaccctctggcaggcacatcattttgaacacctcttttcgtggctgttattaacgcaggcgcaaatgcaggctacgcctgggttttcctccgcgcgcgggctggcgctctggcatcgatttaatctggtgcgcgagaagccatttattcgctggctcatggcattgggtgttccgctgacacaggcttcgctgaaggcgatggggaacgtaacgtggcaaacgctgagtggacataacgtaaagaactggcaaagcctgccgggaacgggagagaggaaggcgcgacaaattgttgcattcatccatgaccctggcgttgccgggctggcatcctggttaggcaagcagggcctgcctggattttag

SEQ ID NO: 126101 - DNA, 1653 bp, Enterobacter cloacae
atgtcctttgccaaaacgtcagccctgattattaataaaaaactcagcagccattttttaattttgctgctcgtttccgtgctgattcagttatggccagtatttttaacgcaacctgcacgattcgcagtgcgcattgcgatttgtaatgcgcttttactggtttgcgccgcagcaatctttcgctcgcttcccggcaagatcctcgcattttttttaaccgccctgctcacgttaaattttgcgattgcttacagtacctggagcgtctaccagagcgaatttaacacggtattcgcgatgagtattctcggcactcacgttgccgaagcgaaaagcatgtcaggtttatacctacactgtttaccagccgcgtttgcttactttattgtcacctggttcgcaatcaaagcagctagcgagcatgtttctttccgcgtcaaaactatcggcttcgttctgcttgccgtttattttggctggtattcgacggcaaattggctaaaaaaacgccatgaccttgaagtttattatccgctaagctcccggattttaaccaatacgccattttacaccggcgcagagttcattattgcccatcgcgataacgcgctggcggagaaaattagccagcacagcgtcaattatcctgcgttgcagtatcatgaaacgggcatcgaaaactatgttgttatcgtgggtgaatccgcacgtcgcagcaatatgaagctctacggttttcaccaggataccacgccagtggaatccttgctggcgaaggactccctcatttttagcaatgctattgcccctgcgtcagccaccgtgctttccgtgccgatgatattaagtaaagctgatccagaccacttcaccaccgataagcttgcagacaatatcgttagcgtcgctaaaaaaacgggctatcataccgaatggattagcgcccagggtaatacaggcaagagcaataactatattgtggcgattgcttctattagccataaagcccagtggattgacacccgttatgacaccgaacttttacctgccctggatgaggcgcttaaagcacccggcaggaagttaattttcctgcatatcaacggtagtcatgagatggcctgcgatcggtatccgccatccgcaaatattctgcataccggcaacaagtatgaagattgctacaataatgcgattctgtttaccgactacttcattggcgaagtagctaaacgtctgcagggcagcgcatcctctctgctctatttttcagaccatgggctggaaaaaaacccgcagctgaactccatctatatgcatggctcacgcaacccaagcaaagaggcttaccaggtcccccagtttatctggtatagccagcaagccctgaatgctcaaaaaagatcggtggggtgggtgcatgaagcgtggcccacagcaagcaattatgagttgatgttgacgtggcttggaatcacaacgggtgttgatcaatgcagctcggtgcttgcggcgtgctatcaggctcccacacttatcccggtaattgatggcggccgccacatctatgactacgatcagctccgcgaaaccttcagttcaccagacagacataccccctggcgcaaagctaaagcaagctcgctctaa

SEQ ID NO: 126102 - DNA, 1635 bp, Enterobacter cloacae
atgttcaaaacaacgacacactcttcgttcaccccgcgcagcaatctgttgcgcaccctggggttgacgctggcattcctgctgctgttctcgctttcagaaatcatcattctgctgaaagatcacgtctaccagccgaagtccggtgatatctcgctgtatctgatcatttccctgcttgccgcagccagcgcgcgtttcttcctgactcgcctgctgctggccgtcacgtttatcgttcagatttcggaagcggtgtactaccagttctacggtcagttctatggcccgagcgaagtctggctggcgttcgtggaaacgaaagacattgccagtgggatcaccgacagcctgggttcactgggcatctacttcgccatcatgattgtggcggtcgtgtttgcgctggtctttgcgcgtcgtctggcgccgctttggcacaaatggattgcgcttccttgcctgcttgcgattgtcgtgatgtttgtcggtcagttcttcaaagcgatcgacgggcagatgtacaagttcaacccggacctgcgccactccctgctgcgtaacggcctgtctgcaatgagcttcagcgccatacgcctgatcccggaagcgatgtcaggcgaaaaccagaatctgacccactacgatccctaccaggtcaaacctgttaaggatacgcgcgcgggtaaatattcgattattctggcgataggtgaaagccttaatccgcaccacgtcagcgctctgggctacgaacgcgataccacgcctgagctgaaagcgctgctccagcagtatcaaggtacgggccgcctgattgtctccaacgccgtgtccacccgcgtggccatcccgatgctggtgaataatctgcgcgagccggataactacggggcctataaatcgaaatccaccaatatcttcgccaacgcgaagaaacagggttatcagaccgcctttatctccgcccaggggctggaagggctgagcaactggattggcatccatgatatcgatctgtgggaagatacccagatccgcccggcaccagatgtcggcgcagacgttgttctgacaccatccgttgagaaagcaaccctggactggaacaaaccgttcctgatggtgctcaacagccgcgcgccacatatcccgtacgagcgtaatattccgcagggcttcgcgaaattctctacgccgcgtctgagtgatgatgtggcgcagaagaaaaatgagtatgacgatgcggtccgcctgtatgacaaagaactcgcgtccgcgattcgcaccgcgctggcaaaatccaaactgccggtgctggtgtttatcacctccgatcacggtgaacgcgtgggcgataacggtctgtttggccactcggttgttgaaatgccaattgctcaggtaccgttcctctacttcagtaacgatccggcttacgccatgaaggagatcagcccgcagatacctctcaaccattatcaggtggcaacgctcatcaacaagatgctgggctacgacgtcagcaatccgaatcaaaaagatgacagcttctttatcactggcggtgatattcgcgggctttcggagcgcgtaacctaccatctgaatgccctccccgaagcggagcgctaa

SEQ ID NO: 126103 - DNA, 972 bp, Enterobacter cloacae
atgagcaaactaaaattacacgcggtttcccgcgcggatttcatcgctaaaaactacgcagattttcagactctcctggataaccaggtcaatcctgacgatattccggagcgattttattgtggcggccgcggtggctggacgttccagactaccctggcgctaaagcactattatggtgacgcaatcgagtgttcgtttggctctgaatgcaggccagatgccattaacctgatgcataacgacgactttggttcccgcgtgaagccgtggcgtggcttcaccgtggtcgcgcgtgcggaccgccctcccgtgattggcgccgatgttgtcgtcgaccagaatccggaagtagacaaccatagcaatcgtattttcgtcccctactggccacagccgggcgtaaaaccacgcgaacgcaccgacgagacaatcaaaaccgtcgcattcttcggccgtgtagacagtttcccggacgaataccgcgaagggaattttaagcaacgtcttgccgaacaaggtattgagctccgcatctcgttcgataactggacaaactaccaggacgtggacgtgtgcatcagcttccgcaaatcacacgatcataaactggcgcgtaagcctgccagtaagctcattaacaactggctggggaaaacggtgatggtctgcgatgacgagccgtcttatcgcgcgatccgcgaaagcgagctggactacctgatcgccaaaaaccctgatgaagccttcaatgccatcatgcgtctgaaaaactcccctgaactgtatcgtcagatgcgcgaacagggtgaaaaacgcctacaggtctattcccgcgaagcggtcgctgcacgctggtatgccctgtttgaggatatttggcgaaaaggattgcacaatcgtcctacggtagttcgcgcactgcgctttggttttggtaaagccattcgcccgctgactaaaaagttctga

SEQ ID NO: 126104 - DNA, 984 bp, Enterobacter cloacae
atgtctggaacgcctcaattaagcctcgttgtcgccgtctataatggcgagaatttcctgagcgctttttttgacagcataaagaaacagaatctgcacagcctggaacttgttattgttaatgacggctctactgacggctctgcagatatcatcgcccgctacgccagtgaattcagtcattttaacgtcatcgaccagcctaatgggggtgtctctgcggcccgtaataccggtctggccgcagcaacgggcgattacatcgcgttcccggatattgatgatgtcatctatccgggcatgtatccgcgcctgctggagattgcactcgccgggcagttggacgtcgcgacctgcaacggtacctacatttatgacgacggacgcccgtcgaagaagattttcccttcagataaacttgcgtcaaccgacgtgctggacggcccgacctggctgcagatggcgctcgaatcgcgcaagttcctgcacgtgacgtggctgaacatctatcgccatgcctttatcaaagagcagggcttcagctttgaacagggtctgcgccatcaggacatcccctggactacggaagtgctgctcaccgccagacgcgtgcagtatattgatgagacctattacgactacctgatccactccgcttccgtttcccatacgcctggcacggacgacacgcgcatgcgctcttcgcgccattatatgaagattctggagatgctggacgccatcaacaaacgctatccggaacaggtgaaacgcgtgcccgcctgccgctggcaaatcgccaaagagggtctggggatcctgcatagcattaataacattgaagatatggccaaaaaacgcgagatcacccgtgagcttttcgatcgtggtatctggactctgatttggcaaaatgcgcgcggcttccgccaacggtggcgtctgggacgtcgctacttccgtcttaaaaaaattcttggctaa

SEQ ID NO: 126105 - DNA, 1371 bp, Enterobacter cloacae
atgacaaatactcgtaacatcctgacaggtcttttagttctgtctgtactggctttatgttttatctggccaatcccaaacgatcagctaccttttcatcgtaatggactgatttatcctaatattgtggtggcgctcggtcttttctttagctcttcagtggcgagaaaagcgctggacttaaacaaaattaagttcgtgcttattgtgctgtgggcattaaccttctttatcctgattaacggcttttttgtcgcgccagatattaaagaaatggtgtcgacctgggatggacagtggttacgtccggtattgcttttctgtgcgggcctggtgttattaccggtgattcaggagcgcttcccctctttatcggcagcccgtttctttactctcgtcgtcctttttttctggggcgtcgtctgtatccacctccttgataccgtctggctttactggcgagacggcgtgatccactggggcgaaacgcggattgtttataaccgcacgcgcatgagcttccaggtcaatatgatcaccggtttcctgctcgccgaactgcttacgcgcggcctgcttcatcagcgtttcttacgcctgaagacaccgttcctcgcctttatgctgctgtgtaaccttgtctgcacggcgttagtcgatacccgctggggaacgattggactggtcggcagcctgttctccaccttcctactgctcagcctgcacagtatgcgtcgcagccgggtgctgctcaccggtggcatccttctgggcattattatcgcttctgcgcttctgggctatgcctcctggaaaaccgatccgcgctggcaaaatctggaagatgatgcggtaacaggctggaacgcgcctttcaccagtttttgctataacagaacagacggaactgtaccgactaacgatctcggtcgtccaatggatcactccaacggctgtcgtgccagcttcttccatcagggctggaaactggtgggcgaacatcctgcgggaatggggcctcgcaaagaggccttccgctatgtgctgcgtcgcgacacgcaggacaatcgcattgatattccgcacagccactacggcctgattgagtttggtatccagaacggcatcgcgggcattgcaggctggctgattctgctggcaggctgctggtacatcggctggcgcgagttccgccatggcaatatgatggcgggcatgttcctgctgctgtttacggttggtttcttctcccgaaccatggttgaccacaacctgaaagatcactacctggaacaatatatgctgttaaccgggttgcttgtgggaatgtgcgcgttacggcccgctaaacgaacagaaacaacctcctga

SEQ ID NO: 126106 - DNA, 1104 bp, Enterobacter cloacae
atgcatattgttcacactgaagcagacggcggcaaaggcgggcagcctctgcgcattatcaacgaatcgcttgggatgattcagcgtggccatcaggtgactctcctttgtccggaaactgcgccgctccacgcgctggcacgcaatgccggtttgacggtagtcacgatgccgttaaagcgtaagaaccttaaaaacctgcaggtgctgcgtcgctggatgaaggataaccgtcactcgattgacgtcatcaacagccataactctgccgatacctggctggtggcgctggcgaatctgacgctgtccaaccctgtaccactggtgagaacccgtcatgcgtccggcgtaccgcgcaacaactggacgacccgctggctcttccgcacggcctgcgcgcatatcgtgaccaccggcgaggcgctgcgccatcaggtggcagatattggcgtgccgatgtctcagagtacgtcggtgccaagcggtgtcgatacgcagcgtttccatccgggagataagcaccaggcccgggttcattgtggtttgtcgcaggacgatttctggctgggcgtggtatcgcatttacgcccgaacaaaggccatagcgtactgctgcgcgccctggcgaaaattgacaatccacacatcaagctggcgattgtcggcgaaggtccgcacaaagcgacgctggaacaggaaatcaccgccctggggttacagcagcgcgtggtcatggcgggacatcaatccgatccggaacgctggttcccggcctttgatattgcgctcagcccttcgcacgatatggaaggtgttccgcagggcgtgctgcaatcgttagccacccgtattgccaccattgcgacggatgcgggtggaacgggagatgcggtgattaacgggcagacgggagtgctggtcgcgcagcgcgacgaaaacgcgctgcacgatgccataatgaaactctatgacgactcagcccttcgtgagacgctcgcgcaacagggatatgactacctgagcacgcactttacccgcgaatgtatgctggacgcgatggagaaagtcttctccgatgtcgctcagcgcagcaaatcacgataa

SEQ ID NO: 126107 - DNA, 1110 bp, Enterobacter cloacae
atgaagctggctattgtccgacagacctacaaccccaacggtggcgcagagcgttttgtctcacgtgcgctgaacgtgctggcgcaggatacgtcgcttgatgtcacgctgattgcccgccagtgggaggatgccgcaggctggaaaacgctgacggtcaatccgccgtttcgtaatcgcatcgcgcgtgaatccggttttgccctcgaagccgccgcgcattttgcgcagtttgatattgtgcaaagccacgaacgcataccgggagccaccatcttccgggcgggcgacggtgttcacgccacctggcttgagcaatatggccgcattctgtcgccgctggcgcgctgggcgcaatctctgagccgctatcaccgctacattctgcaggccgaggcgcagatgtttacccatccgcagctgcgcaaggtgatctgtaattcgaagatggtgcgcgatgatatcgcgcggcgcttcgggctgccggacgacaagctgacggtgatctacaacggcgtggacaccgttcagtttagccctgaggtccgcgccctttcgcagcgtgatgtcctgggtattcctcctgacgcaccggtgctggcgtatgttgggtcaggcttcagccgtaaaggcgtcgccaccgcgctgcgcgccattgtgtcgcatcctgacgtctggctgctgattgccggccgcgataaacatgcgcggaagttcgaaaagctggcgcaggcgctggggatttcctcacgagtgaagttcctgggccccgttgccaacgtgcgtgaagtctatggcacggcggatgcccttatcctgccgacgctctacgatcccttcccgaacgtctgcgtggaagcgctggcctgtggtttgccgctgcttaccagccacggctgcggcgcggcggagtggataaccgagggtcataacggctgggtgcgggacgcgctggacagcgaaggctaccagcaggccatctcgctgtggctgaaaggccgtgaacagggtgtcgattactccgccgctgcgcgtgcaaccgccgagcccttcaccctggacagaatggcgaaagagctacaggcgctttatcgtgatttgctgcgctga

SEQ ID NO: 126108 - DNA, 1110 bp, Enterobacter cloacae
atgtctgattttttctcagcggagcgcccgccaaagcgcgtgctgattattaagcttcgtcaccacggtgacgttttgcttacctcgccggtttttaccgtgctgaaaaagaactggccgaacgtggaagtcgatgcgctggtttatgacgatacccaggcgatgctgaccagccacccgcatatcgaccaggtgcacactattgggcgcaactggcgcaagaagggctggtttgaacaattccgcctctaccgcgccctgctgaacaccctgaaaggccgtcagtatgacgtgctgattaacctgaccgaacactggcacggcgcgcgtctggcgcgtcgcctgaaaccgcgcgtctccgtcggctttaagccggataagcgcgggggcctggcgcgtcgccgttgggtgaaatcgttcaccacgctctatccggcgattcaggacaacagccgtcatatggtggaggttaatctggatgccctgcgccggatcggcattcatccgcagtccgatgaagacaaacatacgctttttgtgcccggtgacgcggcagaagcctctgtggccgaaaaactggccgggtttgggctcacgagtaaatcctacattctggttcacccgacctcgcgctggatgtttaaggcctgggatatcaaaaagctggcagcgaccattgataacctggcggcgcgcggcctgccgatcgtcctctccgccgcgccgtcaaaagaagagaaggcctatatggatgcgctgcgcgcagccctcacccagccggtctttgatttaagcggtcagctgaacctgaaagagctgggtgcgctcatgaagcacgcccgggtgtacttcggcgtggattccatgccaatgcatcttgcgagcgccgtcggtacgccaaccgtcgccatctttggccctaccggcgccatcaaatgggcgccgtggggggtaaattatcgtgtaatcgttgccgggtttacctgccagccgtgcggcaaagcgggctgcggagacagcggtgtctctgactgcatcacggccatcaccccacagcaggtgctgagcgccattgatacgatgcttctggaaacggaaacacctgcatga

SEQ ID NO: 126109 - DNA, 987 bp, Enterobacter cloacae
atgcgggtactgatcgttaaaacctcgtcgatgggcgatgttctgcacacgctgccgtcactgacggatgccatgcaggccatcccaggcattcgttttgactgggtggtggaagagggcttcgcgcagattcccacctggcatgaagcggtcgaccgcgtgatcccggtggcgattcgccgctggcggaaagcgtggttctccgcgccgattaaagccgaacgcaaagccttccgcgaggcggtacaggtgcagcgttatgatgccatcatcgacgcgcagggactggtcaaaagcgccgcactggtaacgcgtctggcacacggcgtaaagcacgggatggactggcacagcgcccgagaaccgctggcgagcctgttttataaccgccgccatcacatcgcgaagcagcagcacgcggtggaacgtacccgcgagctttttgcaaagagtcttggctatgcaaagccggaaacgcagggcgattacgccatttcgcagcattttttgcacggttcgcaacaaacagacgcaccctacctgattttccttcatgcaacgacccgcgacgacaagcactggccggaagcgcactggcgcgaactgatcggcctgctggggagcgcggggctacgtatcaaactcccgtggggcgctccccatgaagaagcgcgcgccaaacgcctggcggcagggtttgattatgtggacgttctgccgcgcatgaagctggatggcgtcgctcaggcgctggcaggcgctacggctgtggtctccgtggatacgggactcagccacctgacggcggcgctggaccgtcctaatattacgctttacggcccaacggacccgggcctgatcggcggctatggaaaaaatcaatatatctgccgcccggaacactcatcgcagctgagcgatctcagcgccgctgcggtatttgcgcaattagagcctttgctggcagcagagagagcctatgtctga

SEQ ID NO: 126110 - DNA, 801 bp, Enterobacter cloacae
atgttcaagcttaccgtttgtttattgacctgtaattctgcgcgtttgcttcgcgaggtgattcctccgctgctgacggtggcagatgaaattgtcgttctggattccggcagtacggatgccaccctttctatttgccgcgagtacggcctctcccttcatcatcacccctatgctatgcatggcgtgcagatgaaccatgcgatcgatctggcgagcaatgactgggtgctatgtatggatagcgacgagatcctggacgcggaaacggtcgactttattctgaccctgaaagccggggatgaaccttccgccgatcgcgcctggcgtatcgcccgctactggcacgtgctgggcgaggaggtgcgtacaatctatcctgtttcctcgcctgatttcccggtgcggctgtttaatcgtacccaggctcgcttcaaccaacgacccgtagatgacaaagttgaaggtaagattgtcgccgtgaaaatgccggggcgggtgcgtcacgacacgttttataacctgcatgaagtgttcaacaagctcaacagctacaccacccggctggtgaagtaccagccggctcggccttcgatcggacgcggcatcatcagcgccatcggggcgttcttcaaatggtatctgttcagcggagcctggcgtcagggcaaggttggggtcgtgacgggtctgtatgccacagcctacagctttttgaaatatttcaaatcctggtatcagcatcaggagaaaaaagagcccgttgcgaatgagcagacggactctcagattgcgaaataa

SEQ ID NO: 126111 - DNA, 5565 bp, Enterobacter cloacae
atgaattctactgagagctctacctttcaaaacagcgccctttctttagaacaaaaacttgaaaaagccagggctgaacttctggatttgggggcaagaaaccgcttactaaacattccgcgatcgaagaatacacgtttcctggaagtgattgatgagcgttctgaactggtctacaaccttctgtttaatgaaaaaaaaacgttcacatttttgcatggtaaatcaggtaaagaagacgaccaggagactgaagatggtctttcagacgaaaaagcttttatttatcaatttgatgaaaaaaacaccgaaatcaaatcgcagcatcttgatactaaactgcagactcgtttaacccctaaagggttgcaaactcgattacttgatttgtaccacgactccaaaacgcttgaagaggagcaaggcgcaaacattcttttcctggcactgggcacattgaagtgggtagatcccgccaataaagagaatttccgttatgctcctctgatactagtgccagtaagtctggaacgcggtagtgctggagaaagatttaaactaaaagcacgttcagaagacatcattcctaacctctctttggaagcattccttgaacgcgtacatcagatcacattacctgtgatgcaatctgatgatgatgaaattaacataagtagttactttgaagctgtacagcaatcaatagctttgaaaacagactgggaagttataacaaatgacatcatccttggtttgttctcattttctaaatttttgatgtatcgagatctcgatcctgcaaactggcccgatgatgaagctattacatcaaaatatcttattcgcgccctcatggaagaagggtttgatgaaagcgatggactactttcagaagacagctctatagaccaacttatcacgcctaaagatatgcttcatattatggatagcgatagctctcaaacgctggcgatccatgaagtaaggagaggtaaaaaccttgtcatacaaggacctcctggcacgggtaagtcacagacaatagccaatattattgcgtcggctatcgcggatggaaaaacagtactttttgttgcagaaaaaatggcagctcttgaagtcgtcaaacgccgtctcgaccaaacaggagtcggtgatgcctgtttagaacttcatagcaacaaggccaataaacgacttttactcgaggagttgaagcgagtatgggatttaggttcgccccgcggtgaatttcctgatgaattaattgagaacttaaccgaagctcgtgactccctgaatgcccacccagcgcgcctccacaaagtctatacaccttcgggtttgagcccttatcaggtgattgggcaattggtaagattgcgtcaaaatgaacaaacacctacggacttcattcttcatggcttcgatgaatggagtaataacgatctgataaaacgactggatctcgttaaagagcttattgaacgaattgagaatattgggctaccccataatcatccctggaatggtgtcaaacgagaatccgttttaccgggtgaactcgatcgcctcatgccaaaaattactacgttgttacacaaagtacatgactttcaaaacactatagcgactttagctgtacgagttggaataacacctgaaccagtacttttcaacgaggcggacaaaatttttcagattgctaacctcataaatcaggcacctgagttagaggaagctgcactagttaatcctgtctggtctaactctctttgcgaaataaaaagtctaattgagcagggtacaacgtatcaaaataatttcgaggaaatcaaagaccagcttcatgatgaacagtttgatacccctctacttgaattccgagatgaactgcaaacagtcccagaggatcttttgccagatgccttctcagctgccagagtattactaccactattaccgcaaattcaattaacagtggcccatctgacgaaagagctaggtactgaatctctgtatcgttcatctcaggaaatcaataatctgattgaactcagcatacgcgtagctgatgcccccgatgcgagcccgcaagcttttgtcgcttccgtatgggagcatggtgtcgaacaagccagagagttggtcaattcaatcgctgatttacattctttgcgtcagaaaatcgatccccatgtttcggagaccatatgggataccgaactcacacaaattcgtcataaccttgcgatacatactgggatgttcaaaatactgaacagcgaatggcgtcgttcacgtgcacttgctcactccctcattcgaaatacaaatcaacctattcagcagcaaattgagcttttggataaggttattcatgcgcaagcgctacgaaaaaacatcgccaacgctagcgagtttgggaacagtgcgtttggctcacattggcgtggtgaaaacagtgacagcagtgctctgaaggcattagtagaatggatggcaacgcttaaagatgttggttcagaagcacgtttactggcgagccaactgtctgatcgtgaaacgttgaggcactttagccagaaactggagcagcttcttaatcaagccgatattgaactgaaacaactttggaaggcttttggcgcaactgcagaatcttggtttgataatcattattctattaagcgtgttccattaagctatgttgaagctatggctcaaaaacttagtcgtatagattcaacatcacaacaggtgtttaaagatccggcagatcgccctggtgaacgtctggcgctggtcaagaagattatcgcattgcaatatcaaaagaaggccatcgaatcccaatacgaattgggaagcgcagcattgggtagtacatggcgaggtacactgtccaactggcaaaatatcgttagcgattgtacatggattgaaaaacacggtgacttacgcttcatatgcgcgacagtaaacgatcgtggtgagttactgaactccgctaatcaactttcagcgacacgtgtctctatcattaacgaacttgaaaatctggccaacgaactcgaatcgtccaccgacgaattcttccatttggataatcagcatttacgtatcgatagtgtcctgcaaaaactaacctcctggactgaaaatgccgaacaactgtctaaatgggttgcctggcaacaccggcgcaaccaggcaaataatttgggactctcagaagttgtagaacggcttgaggacgggcgcttaccattatcaacatgttatagctcggtcgaatatacctactatgaatcgctgttcagtttaatggctaaagagacaccgtctctttcccgcttcgacggtgaacttcataaccgaaaagtgcagtactttgccgaaatggatttacgccgtataaagagctcaagtattgaggtcgctcgggcacaccatcgtcgtattccttcaaaaatcggagctgcaggtccggttggagtcctgcgtgccgaaatggcgaggaaaagaggccatatgcctattcgccaattgatgcttaaagcgggcccggcaattcaggcaatcaaaccggtcatgatgatgagcccactctctgtcgcacaattcttgatcccaggtaagcaaaaatttgatttactcgttatggacgaagccagccagattcagcctgtcgatgccataggtgcaattgcgcgctgtcagcaagttgttgttgtcggggacgaaaggcaattgccgccaaccagtttcttctctcgtatgactgaagccagtaacgatgacggggatgaagattcgacgcaagtagcagatatcgaaagcatacttggattgtttgttgccagaggcttgccacagcgaatgctccgctggcattaccgtagtcgacaccagtcgcttattgcggtttctaatagtcagttctacgaaaacaaattgtttatagtaccaagcccatacactgaagaggcgggtatgggcttgcgattccattatgttgaaaacggtgttttcgaatcaggtgcaggtaatgccaaccctattgaggcaaaaagaattgctaccgcaattcttgagcatgtacagcagaatcccgaattgtcactgggagtcgcaacattctcggtttcacaacgtaaggctattcaggatgaattagaggttcttcgccgtttaaatcctcaatatgaggatttctttaattcccatccaggagagccattcttcattaaaaacctggaaaatatccaaggtgatgaacgtgatgtcatcatgatctctgtagggtatgcgcgtaataaacaaggctatctggcaatgcgatttggccctctgggttcgcaaggtggtgagcgacggctgaatgtgctgattagccgtgcaaaacgtcgatgtgaggtttttgcatcgatcaccgatgaagatattgatcttgagcgagcgaaaggtgttggcgtaatagcgttcaaactattccttcaatatgcccgtacaggacgcttatcaatgtccacagcttccgggcgtccgatggatagcgtatttgaagaacaagtcgcctcagcacttcagaaccgaggctatcaagtacacccgcaagtaggaattgctggcttctttatcgatctagcaattgccgatcctgaattaccgggacgttatcttctcgggatcgaatgtgatggcagtgcttatcattcctctcggtctgcccgagagcgtgatcgtttacgtcaggccgtacttgaagatcatggttggataatacaccgaatctggagtacggattggttccaaagaccagaggaacaattgcaaaaagttattgatgctattgataatgcaaaagcagaactgaatagcagagcagaacatacatacgggcgttcccgagctgttcctgttgatatcgtggcagttgaacgagaagacgttattgaggttggttttgatagaactgattccgctaatgacaagtctgtgagttatgaagaagcacagcccgaagccaatctttcatatgctttacatgaaacaccaaccggcatacttgctgacatggttgaaaaaatagtcttcacagaatctcctatccatattaacgaggtaataactcgtcttcgctccgcatggggattacaacgagctggtgcacggatagaaagcgttgttagtcatgctgctcaaattgcctgcaggaaaggtaatatttataaggaacatgaatttttcatacacaaggaagtaactattcgacttcgtaacagacagaacgtcttgtctgcaggcttgcgtaaaccagaactgatcgcacctatagaaatcgcttcgggtatatttgacatcgttagcgcaagcctgggagcaactgaagatgaaatcattacatctgtctcaaggatgcttggttttaaatcaaccagtagtgttcttcgaaaagtgatctccgatgttattgagctggagattaaagataaccgtcttaagcaacaagatggtttgatagtcatcggggagaccgcttctattcaaaatgctgtctaa

SEQ ID NO: 126112 - DNA, 927 bp, Enterobacter cloacae
atgactaataccggttttattattggtgcgtacccctgcgcaccctcgtttcaccagaaaggggaacaagaagaacaaaccttctggcgggaactttccgacacgccgaatattcgcgggctggaacagccttgccttgaaaatcttcacccccttggtgacgaatggctgttccgccataccccgggggactggcaaatcgtggtcacggcagttatggaaaccatgcggcgccgcggcatcaacggcgcgtttggcctggcctcggctgacgacgcgcagcgtaaagcgtgcgtggacttttaccgacatttgcacaaaaaaattaacgccgtgaatacccgcttcccggggaaagtgattgctcttgagatgcaggcggccccgcaggcgggcaatgcctcggtcgaacaagccaccgacgcgttttcccgctccgtccgtgaaataacaagctgggactggggctgcgacctggtgctggaacactgcgatgccatgaccggcgtcgcaccccgtaaaggcttcctgcccttagagcaggtgctggaggtggtgaaagacacggatatcagcgtctgcatcaactgggcgcggtcggtcatcgaaggccgtaacaccacccttccgcttgaccacgttcaggccgcgcttaatgccgggaaactgggtgcgctgatgttttcaggcaccacccccggcggggagtacggtgaatggcaggatctgcacgcgcccttttcctcattctgcgccgacagtttgatgtccactgaacgtgcaaaagcactctttactgcggcgagcgccgcaacgttgaaattctccggtattaaattactggaaataaatgctaatgctgatgtcagccatcgcatcgccattttgcgcgacggtatcagcgcaatgaataaagcaacgcaataa

SEQ ID NO: 126113 - DNA, 456 bp, Enterobacter cloacae
atgaaccgatttatcatggcggatgcggaaaaatgcatcgggtgccgcacctgtgaagtggcctgtgcggtcgcgcatcaggatgacttcaccgcagaggcttttacctctcgcctgcgggtggtgaagggggacgcctacactacggcggtgggttgccatcagtgcgaggacgccccctgtgccaatgtctgcccaacccatgccatcagccttacggcaggcgcctggcttgttgagcagatgcgctgtattggctgtaaaagctgcatggtcgcctgtccgtttggggcgatgcaggtacggctggtgggaagcagggcacaagcgctgaaatgtgatttatgtgtgcagcgcgaaggcggaccggcctgcgtggaggcctgtccaacccacgcgctgcgctgcgttgatcctgccagtattcgggctgaaaggcttactgcattttattga

SEQ ID NO: 126114 - DNA, 1719 bp, Enterobacter cloacae
atgaaacaccacttccttttttcgctgacggggctggttgtgctgagcatggcccgcgccgatactctgccctctattattaaccccgataacccggcgcaagtttctcgtaacgttgcccccgaacagactgaggccgcgccacagccgaacgtcaaaatagaaaaaccgaagtcaacgctgacgcctgaaacgcctattaccattcatcacattcagtttattggcggcacgcgttatcccttgaaggaattacttcagcccttcaggccttacgctggaaaaaccgtgccgctaaaaacgcttacggggctggtaaacgatattacggaacgctataaggccgacggttttccactctcttatgcctggctgcccgataataatttccagcagggcaatattaaaattgttctggttgaaggctatgtcgctcatagcgacatcaccagtaataacccgcacatcgccgaacgtcttaaacgtttgtccgaaaaaatcatggcggaaaaaccgctgtctcaggatacgttcgatcgctacagccagctgatgacgcgcaccccgaacgttccggttacggctaacgcgcagctgccaaccaatatctatggcgcggcggcgatgcaaatcaccggcaaccaggagcggagctggaatatcgcgtcgacgattgatacccgtaaagggcaagatttaatgatgctgaacggcacgctcagcaacatgacaagctatggcgatcagcttggcgtagccacgcttgtgccgttagatagcaacacgcgaaaaaactatgtcgggctcaactggcagcagtttttaaacgatgaagggctgacgatgcagctcaaaggcagctattaccgtgaagatccgcgagatttttcgcccctgctctctttgccgaataatatcagcgtcgattcgaagcaaaaaacaacgcaatacaacggcggcgtgacgtttggctatcccctgctgctgacgcaaaaatcacaaattaatctgaccggcggttttgattacaccgaccgccaggacgattatgccctgcaggccagactgctgggcaaaacctatagcctggactccgtcaaccagcacgcgcgttatcccgcgctggaagtgggcatcaacggtgcacatcagttcacaaccgccagcatcagcggccgactcaacgtgcgtcagggtattgatgcgatgggagccgatatcgtctcggcccccaggcccgatattaattttacgctcacgaaaagctatctggacgcagcctggatgtttgccgataagtggcggctatcaacgtcctgggagggggactggtcaaataacacgttgccagaacccgaacgcgttagcttcggtgcccagcggtttggccgtggataccaggacagtgaagcaagcggtgattacggctatggcgggcaggtagaactgcgctatatccagatgcgaaaagagagcacatggcttgccacaatccagccctacatcctggccgataccgcgcaaacctggtttaacacctccggcttgcctcatcagcggctcgggtcagtggcggctggcgtgatggtaggcgatacccgccactatagcatcacggttgaggcggcaagacccgtcggggatgttccgacagacagtcgcaacagagactggcgctacagtctgacgtttacgtggaatttcaataaaatgcagtaa

SEQ ID NO: 126115 - DNA, 1188 bp, Enterobacter cloacae
atgctacctaataatgttagtcgcatcagcgctattgctgttgcggtactgctcgcgttctctctttctgcctgtagtggaagcggtggcggatctcactcaacggccaaaaataaccctgcgacgggaagcagcagcggctcagatgatggaagtggcacaaccgcgagcaatggcggttcgggcagcaacggatcgggcaccggaacgggttcaggtaccgggacaggcgctggcggcggaacgggttctggttcagggtcgggctcaggctcaggctcaggctcaggaggcagtggaggaaccactaccgcaggcgtaaatacgatactgggtgatgccggtaaaaccgtgaccagcgtcggatccactgtggatagcctcggaagccagcttccgacaaataatcccgtcacgtcaaccgtctcaaccaccgtcagcggtgttggcagtgccgtgtccaccgtggggacaggcgtcacgactggcgttggcgatccaaacaacccgaacggtgtgggtaccacggttaaaggcgtgacctcgtcggtcacctccctcggcaataccgtttcaacggtaggcacgggcctggcgagttccacttccggaaccccggtcagcggcgtaaccggcctgacgggcagcgtggtaaacagtaccgggcaactggtcagtaacaccggcacgggtctcaccaacacggtaagcagccctgctgtcactcaggtaacaaccgataccacgaccctggctaacaagacgctgggcggagtacaaggcgtgacgcaaaccgtaggcaccacaacgggtctcggcacaccggttaacggtctgctgacccaggtgggtggcaccgtcagcggcgtggggaccaacattagcagcagcaatagcgggcttagcggtgtcggtcaggtcgttcaaaatgtcggccagacggtcacggatagcggtacgctagtgaaacccacatcaaccaccggaggcagcggcacaggatctctgacggccgatgccaatgtgacagccacaaacaatagcctgagcacaacggtcaataccaccctcaatacgctgactgcgggtgtaacggccaatgcaggcacaacccaaaacacatctacgacaaacccgattaacgggctcaacacgttaacctcgagcctactgacgccaaaacagtaa

SEQ ID NO: 126116 - DNA, 285 bp, Enterobacter cloacae
atgaacgcatacctcacttacgaccgcatcgaagatcggcgctgggttgagcaacagctcaccgacgagaaagagaagtggatcaatgaccgggcgcagaaaatcatcgacatgatgccaaaagagccgtccggcctcttccacttcacgatcccgattgactccagcccgtacgaagggcttcgcagcgataaagctggcgaggcgtacaacgatttcatttctgcagttgcttacgcccaggcggaatacgactgggaacaccgtaccggctgcccgttctga

SEQ ID NO: 126117 - DNA, 207 bp, Enterobacter cloacae; identical to SEQ ID NO: 77608

SEQ ID NO: 126118 - DNA, 159 bp, Enterobacter cloacae
atgacagtaacccacaacggcaagcagtacaccgccaaaaagcttaacgataacgagtggcagctgacgtcggtatcggcaccgcgcgacaagctgactctgaaccgctggcagatgcatatcgctggcctcctggaacaggttgaggtgaaggtatga

SEQ ID NO: 126119 - DNA, 276 bp, Enterobacter cloacae
atgcaaaaatttatcgttatccagcagcacgcatggtcaaacgaccacggttacggcattggttattcctcagatttggaaatatttgataagcgggaagtggcaatttctcacggatttgaagtagcaggttgtgatgatttcaatatcggtgttatcgacgacggccgactagtgtcgctcgactggatggaaaagccagttggtaacgggaaaggtgtttcagttgagaaactccagattatctctgatgccattggcttggaggcatcatga

SEQ ID NO: 126120 - DNA, 180 bp, Enterobacter cloacae
atgatgattaacatagaaatacctgaaagctatgaccctgaatggcaggcagacatgatattcatgctgtacgaaaaagttatttctcttcgtgacgaattcgatccggagggaaacagcagagaatttagggaatcgttaaaaatactggaatctcttcgcgagtattcaggctactaa

SEQ ID NO: 126121 - DNA, 1023 bp, Enterobacter cloacae
atgagcagcatcgacaaacaggctctgcgtaagcgctactccgcaaaaccgacaccaaaatgcgatatctgcggcgccaaaatgacaatacagcggatgtctggcagtcgcgtaacttacggctgctcaggtgcgatttacgatgaaaccggatgccactatgccgaaggccgcagcctggctgatgaacattacgagcaatcccgcgtgacagtcaccgatgaaagtgaccctgatgtgctggcgctgctggatgatctggaagccaaggaccgtaggctaaatgagattcttaagccccatatgttgttgccagttcttgacgatatggatgaagacaatctgcgtcatgttattaagacagtatgcgaaaactattcgttgctgcacgcgaaatgggaggcagcagagaatcgcgccgaggacgcagagaagcggattgcagagcttgaggcgacggtatctgaaccagtggcatttaggtcaaagttgaaagcatcttctgctgcaggttgggagcattgggattatacggatcatcgtcaacctgacgctttcgaacttgagaactgctttattgagcgtctctacaccgccccgccagcgccggtatctgtgcctgataaatggacaattgctgatgctgtgagattttgcaaagaaacaggaaggcaggaagctggagctgcaatggatgcttggaacgcctgccgcgccgccatgcttcagggtgccgaacctgtaacgaaggcttacaagttgcctatgcagccgcttgcaatagacgcccatggcactctgcgttttaaagaaaacccgatcgtcaggaagttgctggattacgccacagagcatggctacgggctcaacgagatagcgctggacgagtttgaagctgaagaccagatgcaactggcccaactcataggctacagcctgtctggatacggaacactgtcttatgtgacagatgaatcatacgatcgcgccgcggcagcagcacctcagcaggaggtgaagtga

SEQ ID NO: 126122 - DNA, 285 bp, Enterobacter cloacae
atggatgcgttcaaagacttcggagcgactgactggttatttttcgtaacgctgctgatcgcatggttttacatggttgcaaaagcgtatagctggttaataggtgtcctgattcgccgcggatggagattgtggaatcgcaaggacgagaaaacactggctatggactcgttttatgaggcgttcaggctggcagatatcgagccggggcagagggtggttattactaccgaaagcggaatgacgattcacatactccggccaaaaggtgatcgtcatgcctaa

SEQ ID NO: 126123 - DNA, 642 bp, Enterobacter cloacae
atgcgtaaaccatcccgccgtaagtgcaaagtatgcggtgaatacttcgtgccgaaattccacgatatccggatccgctggtgctgccaggagcacggcgcaatcctcgctatggaagaacgcgagaaggagaaggtgaaagctgcagccaagcgcatcaaagagcagaaggaagccgagaaagcagggcgcaaacgccgcaaggagaggctggcagagcttcggcctgccggttactacaaggcgcaggctcagcaggctttcaacgccttcatccgtgcgcgcgatgccgatttgccatgcatcagctgcggcgagaccaatccgcccgatctgcatggcggccaatgggactgcggccacttcaaaacggtcggcgctaaccctgagctgcgctttgaagagcgcaacgcccataagcagtgcaaaccctgtaacgccggagcggggaaatacaccgccaaagaggcgaccgtcgcgcagcaatacgaagctggcctggtcgctcgttacggccaggaatacgtcgactggctcaacggaccccacgaaatgaccaactaccgccgtgaagatttcatccggatccgtgatgaataccgcgccaagctcaaagcactgaaacagcaggaggcagcatga

SEQ ID NO: 126124 - DNA, 165 bp, Enterobacter cloacae
atgacagacgctgtatttctatcggtatatctcattgcggtggcctgcttcctgattagggaatgggttaagcacaagaggctcagaaagaagatcggcataaagattagagccattcgatatgcggaaaaataccgaatgctcaaaagactaatgaggggttag

SEQ ID NO: 126125 - DNA, 225 bp, Enterobacter cloacae
atgtatcgcatggaaaaaataaccactggtgctgcctatggcgcttcagccgggagcatcctaaacggcatgcttaatgcctacagccccgagcagtggaacgctatcggcgtgctggtgggtatcatcattgccgtactgacgtatctgacgaatctctatttcaagatccgcgaagacaaccgccgcagcaggagccgagatgaaccagacactcaggaataa

SEQ ID NO: 126126 - DNA, 495 bp, Enterobacter cloacae
atgaaccagacactcaggaataagctggtgggtgccatagttggcggatccggagcaatcacgattgctgcagtaatgctgggcaatgcagatgggctggaaggacggcgctattacgcctatcaggatgtggtaggtgtctggactgtttgcgatggacacaccggtgccgacattcgccgcggtcaccgctacaccgacaaagagtgcgacaacctgcttaaggcagatctgcgaaaggtggcaaacgccatcgacccgctgattaaggttcgcatacctgaacctacccgcgccgcgctttactccttcacctataacgttggctctggtgctttttccagctcaacgctgctgaagaagcttaactccggtgatgttccgggtgcctgcaaagaacttcagcgctggacgtatgccggtggcaagcagtggaagggtttgattacccgacgcgagattgagcgtgaagtttgcgagtggggccagaaatga

SEQ ID NO: 126127 - DNA, 204 bp, Enterobacter cloacae
atggctaccgtttacagaatcacaatcaccaaaaaatccaaagagtcttttacggggctcatgacccgcagccagcctgagatcgtcaatggctatgtcgccctggcaatggatgacggcaaatggcgctacttcagccaggacagcattgaggacttcctcttcgagcctgtagagcagccagcagaacaaacaacggagtaa

SEQ ID NO: 126128 - DNA, 1452 bp, Enterobacter cloacae
gtgaccgaaagcgaaatgaaacaacagcgcgccagtaactccagtgttgagagggagcggaataaaaacctctcaatgctgtttaacggcaccagtaataccaaacgccagcgactctaccaggaattcggctacccactgcatctcacgtttgatgacttctaccgggcgtaccggcgtaatgcggtggctggtgccgccgtgacgcgcatgctcgacgggtgctgggaagactaccctgatgtttacgaaggcgatcagacaaaggacgcatcgaagcaaacggggtgggataagcgtgtcaacaagctactgaaacgctgctgggagcagattaaaggcgcagaccgccgtaacctggtggggcgctactctgcgatcctgcttcagattaaagacagcaagaagtggtctgaacctgttgacaccaccattgtggggaggcttcaggaaaaggcactcgttaagctgattcctgcgtgggaagctcaaatcgaccctgtgacctgggacgataacccggacagtgaaacgttcggcgaagtgacaatgtactcgttcacagagttgccggttgacggaaacttcgacgcccgcccggggcgaatcatcaacgtccacccggatcgcgtaatcatcctggccgagggctctgatgatggcgtgatgacgtcgggcaagtctctgcttgaggctggattcaacaagctgctggacatcgagaaagtcagcggtggtgcgtctgagggcttcctgaagaacgccagtcgccagctcaactactcgttcagtgagaagacgaacttctccgcactggcgaaagcgctcggcgttgctgaggggcagcttgcggaagcgctggatcagcaggtccgtcgacttaacgacagcaccgacagcgccagctttatgcaggctggtaccgctgaggtgttgagtgtggcggcggctgacccggaaccgacatggcgtaccgcgctgagcgagttctgcgcgaccgttcctatccctgtgaaagagctagttgggatgcagactggtgagcgcgccagcactgaggatgctaaaggctggggtcgcaccaggatgagccgccggaaaggcttcctgaccgacgtaatcaccgacgtggtttcgcgattctggacgcttggcattattccaccggccaagaatgaagaaatcaccgtgggttggtctgatctgctggcgccgagccaggcagagaagattgccaacatggacaagctcgccgacgtggctgtgaaatcgacgaatgcctttggccgttctgctatcactgagaacgaaattcgcgctgctggcgaactgcaaccgctacctgagcttgatgatgaggatctgccagatggcaacaaaccaaaacctgatcctctggccgaccctcagtcagaagccgaaaagtccggtgataccacggtcgaaagttga

SEQ ID NO: 126129 - DNA, 1389 bp, Enterobacter cloacae
gtgaaactttcaagcattcacgtaaaaagcctcgccatcaacgcctccaacatctcaacgaccaccattaacggccaggaacactacgtcattcgtggtgcagtcccgatcgtcgatgacatcgtgatgaatggcggcctgtacccggcggaggagattaacaacagctaccagacgatggagcgcaagttaatgccgatcggccacccgatggtgaacggcaaatacgtcagcgccaacgacccgcaggccgtcaacgattactacgccggggcatgggctcaaaacgtcagcaaggccaacgacaaggtcgtgatggacgtttacgtcaataaggctgtggcagacaccaagcctgacggcaagcgccttattcaacgcctggacgacatgatttccggcaataacgccgacccgattcatgtctccaccggactgctgctgaacaaagagcaaaaggccggggagtcgaagcagaagaaatactcctgggtcgctcacaacatgcagttcgaccacatcgcgatcctgcttgatgagcctggtgctggcacgccggaagaaggcgtcggcatgttcgtcaacgctgacgggcagcaggccgatgttgaaacgacgagcctcatcgatgccgccaacagcatgaaagacggctggtggaacaaaaccaagttttatttgagcaacgcctcgaattactcattcgatgaaatctgcgcggctctgcgaaacaagatgagcgagggtaagcctgaaacatattacttctggccggaagccgtctggcctgatcgcttcatttacgaggaaaacggcaaatacctccagcaaaagtacctcattgacgacgatggcaaggctgaactcgtcggtgagccagtagaagtcgtgcgcaaaccaactgagtacgaagtcaaaaccaacggagaaacaaacccgatgaaagagaagatgatcgccgcgctcaatgccgcaggcgttaaaaccgaggggctgaccgacgatcaggtctgggatgcctacaaccagcagatgcagaagaaagaaggtggcggcgaccagggccaggctcagattaactctgacgcgattactgctgcagtaaatctggcgctgaagccgcttaccgatgaaatcagcacgctgaaatctcagttgcaggcgaacgctgagagcgacctgaaaaccaagcgtgatgcggttaaagcgaaattctcgttcatgaccgaagcagcggttaactccctgtccggtgacgcgctgaacgacctgtactcacagtgccagaccagcactggcttgaacccatctttccagcaggtcaatgctgaaaacgaccagtggaaagactacgacctcaacgctggcatcgatcaggagaaaaaataa

SEQ ID NO: 126130 - DNA, 435 bp, Enterobacter cloacae
atggctaacgtcatctatcgtggtccggtcgaacgtgagccggaaaccatcaacctgcctgtcgcatctgcgcttaacccaggcgttgcagtcgtaatttctgccggaaagctaacaacaaccggtgcgccaaccggccgctggttcatcctcggcaaccgtcgtttcatcggccaggcaatcaccaccgcatacgcagccaatgaaaccggcgtggcgtaccgcgttgaaggtgagcaggaatacaacgttcgcctggctgctgcggcctatacggtgggtcaggagctgactatcggtaccggcggcgtattcaaagcggccgcaaccggcaaccaggtcgttgctacgttcgacgaaaaagcagggcgcactctggcggcggaaggtttcgccgacgtggtgatcctctccactccgtacgccaaggcataa

SEQ ID NO: 126131 - DNA, 1032 bp, Enterobacter cloacae
atgttaaagtttactccacaacagcaggggctgatcatcaacgcgcgccgtcgctgggacatgatgcagcgcaatatggctgcacagcatggctttgcagtcaacgacgctggcggtcagttcattgcgtttgatgatctcgtcggtaacgcctccgtgctgccgaaagatgtctggggggaatgggaccgctctgcgattaccgttcagcgcgacgtgctgtcagtgtttaacgacctggccgccagcgtttcccgcccgatggcactcggtaagatcgttcactacttcatgactctgtcagattccggtgatgtaaacatcagtctggatggccgcggcaaggcgaagggcgatcaacctgtcatggattatgaaggcacgccgctgcctatcatcgacagcgagctgactttcggctggcgccagatgctggcagcgcagactgaaggctactctctggacagcgacgccatctccaaccatcagcgcaaagtagctgagaagctggaagacatggtgctgaacggcgatccaaacatcaatgtcgggggagcgaccatttacggtctgcgcactgcgccaaaccgcgcaaccggcacgcatggtcttgacctgaacggcgcaaccggcgctcagtgggtcggggccatctccgcgctgattgggctgctgcagtccaagaatttctacggcccggtaaccatctacgtgaactacaaagactggttctacgcgtctgtgaacgactacgcggcaaactatccgaagaccatcctgtcccgcatcatggaaatccctggtgttgcggcgctggttccggcttcgaaggtaccgcaaaacgaactgctgggtgtggttaagcgccctgacgttgtgcagatcctcaacggcatgccgatgaccatgcgcccgaaagctcgccagaatccggaagacgattatgtcttctcagtactggctgctgcggcgccgcagttcaaacacgacgcgaatggccaggccggttacgcccagctgaccaaagcataa

SEQ ID NO: 126132 - DNA, 288 bp, Enterobacter cloacae
atggctggtaaagaacaaaaatggctgctcacccacgacagccacgagctaaaaaagggtgaagtctacaaaggcgagactcttccactgtggctggcaggaaaagcgatcccggtcagcgaccaggtcctggaagtggcgacccccgccgatgttcaaaagctgcaggctgacctcgacgaggccaatggcaaagtggagtcgctgaccgctgacaacgctaagctgcaggctgacctcgacgaggctcagaagcaaatcgacgagctgaagaaaaaggcgaaataa

SEQ ID NO: 126133 - DNA, 441 bp, Enterobacter cloacae
atgggcatcaaagtgaaaggtattagccaggcgaaaaagcatctgaatgatgtcatcaacgacgttaaggggcgcaaggtaattcgcgcgctgcagtcggcgatgatacttatcggtgcgcgggcggcctattacactccgatcgacacctccacgttgattaacagtcagttccgtgaaatcgacgctggcggggtgtacatcaccgggcgcatcggctactcagccaactatgctgcgtatgtgcatgaggcgtctggaaagctgaaaggccagccgcgcgcgcactttggtacgacccgtgccggacagcagttcggcggcgggaccgaaacaggaaactactgggatccgcatggtgaacctcaattcctgaccaaaggcgcgaatgacgagcgcgataacgttgatgcggtaatgcgcaaggagctttcgctatga

SEQ ID NO: 126134 - DNA, 564 bp, Enterobacter cloacae
atgagttcatccaaagacaaagaattgcctgtggagtatttgcgggagtgctttcttgttgagccatctgtcggggtgctgtactggaaagagcgacctttatcgcaccataaaaacgagaagtatttcaaagcatggtcttccagatttaaaggaaaacctgttggatggcttggaaaaaatggctatctctacgtcactttgaataacaaaaagtatttggtgcatagaattgtttgggcgctattaaacggacactggccgccaaatgagatcgatcatattgacggcaacagagccaacaactctattcgtaacttgagagaggttacgagagagcaaaaccatgtgaacagggctcttatcaatgggccgagcaggaccaataaaactggctgtcacggcgttacctggcataagaaatccggtaaatggatggcgaagattatttaccagaataaaagtcattaccttggcatcttcgatgatgttgaggatgcaatatctgcacgaaaggctgctgaaatacaattcgggttccatgaaaaccacggaaccagatga

SEQ ID NO: 126135 - DNA, 2877 bp, Enterobacter cloacae
atggcaggtgagaagaacgccggtagcatcgtttatgaaatcagcgccgacgttgagccgctgctgcagggcgggaaacaggccattgatgctctggataaactggatgctgcagcccagcagtccggcaagggaatggataacctcgaccagagtacgtctcaaactggatccgcgtttactgaactggccggttatgccaactccatggacaaccagttgcgcaagctgaacaccaacgtgagcggcatagcccgcgctatggaagaggcccgcagcggtaccggcgttgcgagcagcgaattcagccgtgccgaatccatcatcgaggcgctgggtaaccagctggctgtgctggatgaggcgcaggagaatggcgcgcgtagtgccgcagttctggctgctcagttgcgtgccgggtcgaaagcgacagacgaagaaaagcagaagatcggcgaattgaccggtcgcctgtatgacatgaagaccggcgttgaaaatggcgcaaagggtactggtagctggaaaaccagcatgcagcaggccggataccaggttcaggacttcatcgtacaggtgcagggtgggcagtctgcgctggtggcgttcgctcagcagggctcgcaactcgctggtgcattcggtcctggtggtgcagtagttggcgccataatagcgcttagctctgtgctggctggcgtgctgattacttcgctgaatggcggtaaaaacgccatggatgcgctgaaagacgcagctgaagcgatggataaggtgatcaccatttcctcacaaggcgtggccgctctatccgacaagtatgccgccctggcgcgggtaaatgccgacgtggcaacactgctccgtaatcaggcgctgctcgagtataaccaggccatttcaaagattccaaaggctattagtgacgcgtctgatgctttcatcacgttaggcgatcgcgcactggcggcggtaggtggggcgtctccgagcatcaagaaattcaacgatgagctttctgcgcttggcgttaccaccactgactggagccaggcgattcagcaggccaacagccaggggcaatatgcctctggcattgtgaactctttatcttcaacggtcagcaccctttcttctcgccttggaatcagcaagcagtcagcgtttgatctggcaagagagttatcatacctgagcaacaacccgtcgccggaagcacttcaggaactggctaaaaaactccaggaaatgaagtcatcatccaaagatgggcagtcagccattgctgaactggctggtaagcttgtcgatctggcgagagaggcggccaatgcgaagatcaacgtcgacagcctcaacaagtccacagacaacctcacgtccgggcagaagaacctcatcaagcagtctgagcgaaaccttgcgctgtcgaagttgcaaggtgaggcccgcgcacggctgcaggcgcaatacgctgccgaagatgccggttttgcgaaggatgatccgcacgccaagcagatggaagatgatgctgccgctacgtacaaaaatacgcaggcacagaagactctccagtccgagcagaagaagggggcttcccaggctgattctattgcccagaagctggctaacctcaagcagcaatcggagttggcggcagactcaacgaacaagctgagtcgcgagcaggcgatcctgactgcgcagcagtcgcttggaaaaggcgctaccaaagagcaaatagctctggccggtcagtacgcagcaaaaaaatgggacactgtcaacgccattaaggctgaagctgcagcgcagaagcttctccctgaagcagctgagaacgccagttacaaacaggatgttgaggatctgaatacggcgctggcagcgaagaaaatcagtcaggaacagtataaccagacctcagagcgactggcggcaactcaccaggttaaccttgcgaaaatccgcgcccaacagacggtaacaccacagcaatctgctcttggtgaaatcgacccggttcagcaattggcaaatcagcatgctcaggaactggctctcattcagcagtttgagacgcagaaaggtcagatcactcagcgcggccttgagctgatgaacgcagccaataccgaatatgagcaggctcgtattgcggcgcagtgggagatttaccgcaaccagagcacgaccaatcagctgatggctgacgctatcgattctctccaggggggggcgaccaatgccattaccgggctgctcaacggcacccaaagcctgcaagaatcctttgccaacatcggcacgacaatcctcaacagtgttgtcggtagtctggtgcaaatggggattgagtgggtcaagagccagttaatggggcaggccgctgccgcagcatcactggcatcgactacggcccaggcaacagctgccgcatctgcatgggctccggctgctgttagcgcctccattgcaaccttgggtagtgcagcagccgtgggacagactgcatacgctggctccctgttatccgccaaaggaatggcaattgctggcgctcgttataacggtggcccggtttctgccaactctatgtaccgcgttggcgagaatggcaaacctgaaatctaccaggccaacaatggcagccagtacatgataccgggtgacaacggcagggtgattagcaaccgggatatgcagagcggcggtagtggtggctcagtaattcagcaggaggttcattttcacattgagactaccggtggaattgacgatgcgactatggcgaagatgtcgcagatgatgaagcaggtgagcctgaacaccatccgcgaccagcagcgtcctaacgggttactacggaggtaa

SEQ ID NO: 126136 - DNA, 354 bp, Enterobacter cloacae
atgccagaaatattcacatggacacctcagaatggctacagcgtcgaacgaacgcctaacgtagcagtcgtcaagctaggcgatggctacgagcagcgccagacgaagggcattaaccctctgatggataaatactcgctgacattcaaaggcgtggatgatgcgaaatgctcaaggcctaatgctgcgaaagctgccgatgctttcctcaaggcacgtatggcggtgcagtctttctactggacgccatctgatactggagtgcaaaaactgtttgtttgccgctcatggagcatgacaaagaccgggccgctatacgaactaacggccacatttgaacaagtgccacgataa

SEQ ID NO: 126137 - DNA, 348 bp, Enterobacter cloacae
atgcaatggcatctggatcgccacctgaaagatggttctgtagtcctgtttgtgccggtagttgaaggcgctctcactgccgctgctgcggcatggattgcggttgccgtcagcgtggcgtcaattgcgtactcggtctacatgtcccgcaacatgaaaactaaaacgtcagcggaagcggctgaggcaaacacgctaacgaacaactcatttaccagtgcggaaaaccgtgtcgggcaagggcgtccggtgccaatccttctcggggaaatggaagtcggttcgaacgtcatttctctcggtattgacacaagtaacaaccaggactggacagaatcaattagctaa

SEQ ID NO: 126138 - DNA, 3147 bp, Enterobacter cloacae
atgtcttcaggcggcggtaaagcatcaaccccgaaactcctcgacgataacctcaagtcaaaacaattttaccgggtgctggatctcatcagcgaagggcctatctatggtcccgttgatcaggaacacctgtcatcattcaagctcaataagactcccgtaactgatgcgacaggcattgtcagcgtaaatggtgtcagcgtcgcctggcgcccaggctctgaaacgcaatcccccattaatggcttctctgctattgaagcgaccaccatcgtaaacaccgaagtaacctatgatactccgctggttcgcaccataaccgatcaggacgttacccgggtgcggtttaacgttggtgtgaccggactggtcgagcaggacaccaaaggcaatcagaaaaacacgtccgccactctggtgctggagagcagaaccggtgcttcaggctgggttattgaaaagaccgtgactatcaccgggaagatatcaggcgaataccttgaggcccatctgattgatgctccggatattaagccgtttgatattcgtgttcgccgcattacacctgacagcagcagcgatttactgtccaacggcaccatctggaatagctacagtgaaatcactgacgacaaccttagctatccattttcagccatcgctggagcagtaatcgatcgcgaccagtacacagataccccaagccgcacttaccatcttcgcgggctgattgtacccgtaccagacaattatgaccctatagcccgcacttactcagggctgtggacaggtggattcaagcaggcatggaccaataacccagcctggttgttcagagagctggcaaagaattctcgtttcgggctggctaaacgtgccggctacatagatgtggatgacggtgcactgtatgtgctgtctcagtattgcgatcagcttgttgacgatgggtacggcggaaaagaaccacgcatgacgctaaacgcctacatcacagagcaggctagtgcgagagacattctcgacaagatagcgagcatgttccgtggaattgcattgtgggacggcctgcgcctgtccgtaatgctggacgcgccacaggatccgattgcgacaatcacgaacgccaacgttgtgaatggcgagttcaaacgaagctctgtaaagcgctcagagaaatacaatgcggttgtagtgtcctggactgaccccgacaacggatgggagcaggtgaaagagtacgtttcagacgatgagatgatagccaaagggaactacaacgaaaccactctggaggcgtttggctgcacctctcgaggacaagcatggcgagcaggtaaatggctgctggaaacagcaaagcgtgaaagcagcagactgtctttccagatggctcgggatgctatccacttcacaccgggtgatatcgttgaggtcatggataatgactacgcaggaactcgccttggggggagaattgtttctcattccgggaaggtgataacggttgacgcggttgattcctcggtagtaacggacggctccactatgtcgattatggggagggacggaaagttctctcgctatgagattgatagcgttaacggaaacaacgttacactcaaaaacgaacctgaatgggtgagggcaggtactgtatttgccatttcaaccgcaagcgttgcgattcgccttttccggatactgagcgttgccgaaacggataacaattctgtctacagcatcaccgcatcgcaacatgatccgaacaaacaggccattgttgatgaaggcgccgtgtttgaagttcccaacgatacgctgaacggttaccgcgtgccgaacgtggagaacctgcgcatcatcaacacaaactctgagactgtccaggtaacggccacatgggagacggcaactaccaccaaaaagctgatgtttgagttgtacgtgtacagtgctgacgggaaagtagtggcgcagtacgaaacagatcagttccgctatgaattctttggtctgaacgccggtggatacacgcttggcgttcgcggtcgcaatgaaaacggaatgaaaggcgctgagacgcaaatcagcatggttatcggtgcaccacctgcgccttccagtgttatctggacgcctggcctgttctctgctgacatggttcctgtcatgcgcattacggcaacgacagacacctcgtttgaattctggtactccgggcaaaatcagatcgtcaatccggcagaaattgaagaccaggctcagttcctcgggcgctctaaccagtggacgcttcatggtctgcaggcagataaaacgtattacgtttatgtccgtaccaggaatgctttcggggtatctgaattcgttgaggcgtccggtcaggcgtcatctgatatcccgggaatgatagaactcattgatgagcagatccgcgaatcagatgcgtttaaaaatgttcaggaaggtatcgacactaaccttgacggaatcatgtcgaacgcgctggcaaatcacggaacggttgagcatcagtaccagcagtatggggaggtgcgagcagatattctggtagtaaaaacaacggtcgcagaagtggataaaggccttgcagacctgtctacctacgtgcaggcccaggtaggggatttgaccgcagctgttaaccagaaattgacggcagaagtaaacagtgatggaacaggaaaggcgtcctatacgctcaacctcgggatagtcagaagtggggtgaagtacaacactggtttcgggatgtcgatagagccatccggcggcacctataaatctacagtggtctttgctgctgatcagtttggtatttactcaggaagtgacccgggaaattaccaagctgcgttcttcgtttataacggccaagtctttatcagctcagcgtttattcaggatggcacgatcaccaatgccaaaatcggtaactttatccagtccaacaattatgttgcagggtctgtcgggtggaggctggataaatcaggaacatttgagaactacggttcgactgctggcgagggggccatgaaacagaccaaccagacaatcagtgtacgggactccaacaatgtgttgagggtacagatcgggagaatcactagcacatggtga

SEQ ID NO: 126139 - DNA, 315 bp, Enterobacter cloacae
atggcggattacggtgttcaaacttgggatgcatcaggcaatgtgaataactatggaattaagcccgtaagcgtaagtggttatctcgagttggctcagaaccagaaaacaggctcttactccgtagtgcttccaccggggtgtaagcttacttattttcagatcatgaatggcgatcagtggggaacgagccggaggaagatcactattacaggtggcaccgcaacagtatcggcagtgggcgataccgactactccgcagggactgagcctgcggcctcggcgtatctcattttccagatagagagggcataa

SEQ ID NO: 126140 - DNA, 672 bp, Enterobacter cloacae
atggcgcagtatggcgttttactgacgacgacggccggagaagtatgggtcaccgctaacagttctcctatttcgttgcaggcacggaagacagcagaactacagggaacatcgggtttcaataccaaagtgacgcacacattccccgcgggccagcccgttgttgccttcgttcattgcacggttgaggtcgaaatcacccagactataagcgggaacaccatcacgattgattttctcagacctaatgcaaccggaacagcgtacgtatattttttctctattttcccgcagacaaagccagactacgggctggccgtgtgggatgcatcaggcacgctgattttgacaaacgaaacccgcacgctcagcgatgtggtcaccctcggtactgctggagtggatgccagctcaggctataacatcaataccaccctggcggggaagtgggcctgtatgcctgccatgctgggtcttattactggagttatatcggctggcggccagccgcagccctactcggcgatatacaagagcatggcaaaacttgagggaggcaatacgcgaatattcgccagaccacaaacaacgcccagcggaagcattcagaacgtcgcgtattcgaatctgagaaacgtgattatggccatcaactgcgtcaactacgattga

SEQ ID NO: 126141 - DNA, 234 bp, Enterobacter cloacae
atgaaaaacatgattctttgcctggcggtggctgtattgctctccggatgtgctggcgttcttcaaaagcagcaacctatatgtaccggaacggccctaatcggcggacaggaaaacatcgtccagatttacggagtgcgtaagcaaagtaaccagacccagtaccgcgccggttacccatttaactggtcatgggttagcgcaaacactttcagtagtaccacgtgccagtaa

SEQ ID NO: 126142 - DNA, 1218 bp, Enterobacter cloacae
atgtctgcaggaactatcaccctgacaaacgggtccgctattgttggcggtaccggaacctcattcgcaaccgaactcgcagcaggtgactttattgtctctactgtgggtggtgttgattatacgctgccagtaaaaacggttgacggtaatttccaggttactctggttagtaactttaccgggcctactcaggccggtgcggcctggtcagctgttccccgcgttgcgctgaacatggtaactgctgcgctggtggcacaaagtgcagaagcgctgcgtggactgaattacgacaaacagaactggcaaagtattttttctggaaacggcaatgtaacagtaactttgccggatgggacgaaatggacgggaccagcatggaatagcattaccaccactctctcaggcaaggcggcaaaaggtgcaaacgatgacattacctcgctcagcggactcacgacagctctgtccgtagctcagggtgggactggttcgacaacaagcgctgatgctcttaataaattaggagcactgcctgtagctggtgcttctggactaaaagcgagataccgatttaatgcttcaggcggcagcgtaggtattatctttgacgatacaggcctgtcaggatacggaagcctttttaatgactgggataaaaaggcgcttgcattcaactgtaacttcaatggtaacggtcagttcgcagtacacactatacacaggtatgtttatccaggtgtagctgcagggtgtttttatagcgggcttacatctgatatttcataccagattggacatttatcatcttccggaaatttaaccgcatctttctcatttaactatggaggttcggcattcgctaacaatggatcatggaccagtgcttctgatgttcgtatcaagcgcgatgttaaccgtattgagaatccattcgaaaaaatgcggaaaatcagaggagcgacctggtaccgcaaagatagtggcgaatttggtattggaatgatcgctcaggagattcaggaggtattccctgacgctgtgaagactaacggcttcagccttactctgccagatggagaagtggtgaaagacgttcttttcccggatacagctggtgtggccgccgctctgcaccatgaagcaattctggcgttgatggatcaaatagaagatttaaagaaacaggtcgaagcgttgcggtctggaagctga

SEQ ID NO: 126143 - DNA, 267 bp, Enterobacter cloacae
atgttcgttgagttggtttatgacaagcgaaatgtagaggggctcgaaggggccagagagatcatactggccgagttgaagaagcgggtgcaccagattttccctgatgccgaagtgaaggtgaagccgatgcaggcaaacggcctgaatagcgatgccagcaaaatcgatcgggaaaaactgaaccgcatgctgggggaaatgtttgaagagtccgatatgtggctggtctcagagttcccgactgttagccaggttggcctgtag

SEQ ID NO: 126144 - DNA, 240 bp, Enterobacter cloacae
atgcctcgccaatatgatattcacgcagcttttttagcctctatagaacagaatccaaagggctacctttgcctaaaaacaaacaaattcatcaataatttgcgcgagaagaactggcatttcagccaggcagacgctaacgcatggattgagagataccagcctgattttgctgataagacgacggatggcagtgataaccgttactggatcttgcgaaatatggggagggtattctaa

SEQ ID NO: 126145 - DNA, 390 bp, Enterobacter cloacae
atgggctttccttcgccggctacagattacgttgaacagcgtatatcgcttgatgagcgcatcataaccaggccagcagctacgtactttatgcgggccggcgtaacgcattaccgggaagggatactcaacggtgctttactggttgtcgacgcgtcactgtctccatgtgacggttcattgctggtttgcacagatagcggtgagttcaggatcaagcgttatcgcgcgcacccgcagccacatctggaaaacctggagaacggtaaacgggagaggttgccagataaggatgaggtatccgatacatcgcggccagtattcggggtgatcacctacatcatcaacgatgcgcgctctggcgagttcgatgactgcccggtgatgtga

SEQ ID NO: 126146 - DNA, 408 bp, Enterobacter cloacae
atgacggaaatggacgatgactttttagaatatgatctggactggtttttgtccagccaggaagggtacttagcgcattttgcaacagcaggtcaggggccgattcctgaaaggatcaagtcatctgtcgaggactttaattttattcttgattatatttactcgctggaacccttgtcagaggtgtatgtgatagaaggcaatttgcctgcattttcaaatgacaatcaacgttcttcctatctgcgctcatttgttgagatgtcaagtaaaggattgttcagctacgactatgaacaaggtggatataaattaatttcgaaaccaaaaacaccattgaaatatgaaatattgccaaatgaagcgaaaggcgtgatttatgttgcagatagagaaattgacttatag

SEQ ID NO: 126147 - DNA, 147 bp, Enterobacter cloacae
atgtctaagacttttctttttgatgatgaatgtgacattgattcctcctttaatcgaaattgctgtccaatcaggcatgatgcgataagaaaaaaattgatgtttcttgcgagcttctacctgaaggggaaagagcgcctcaaataa

SEQ ID NO: 126148 - DNA, 267 bp, Enterobacter cloacae
atgcagtggtatttaaaagccgcacaacaaaaccatgctgaagctcaaaataacattggcgtcatgtatgaaaaagcagagggtataccgcaagattatgctcaggctatgaagtggtatcttaaagcggccagtaacggtaatgccaatgctaaaaaaaatattggaaatctttattactacgggaaaggagtgccgcaagattatgcaaaagctatggagtggtatgaaagcattaaaaacactgatatttatttaccagagtga

SEQ ID NO: 126149 - DNA, 504 bp, Enterobacter cloacae
atggaatggggatgcataaagtgtggggtcgaaatacctcaggacagagagttttgcgacagttgcgaagataaaaacttcaggaaaattggaggctttctttttctccctcttataggattagtggtcactgctgcttcctatctttttgcaatgacagatgcatttaaatttacgatagaaaactattcgcatttgaatgcaaatgcaaaaatcttcttcatgctttccctggttatttatataggcgaatttctttttacagtcaccgttctttcatttttcctaaaaaagaagaaatcgctaccaaagctttatattttgtttttaatatcaatcgtgacgacaatgtcatttaatacctacttgctttacatattaattcctggcgctgaaattggctataatgaacttgtgccaatttttagaaacgtgataacagctttgatttggattccttatttcataacatctgttcgcgtaaaaagaacgtttatccgataa

SEQ ID NO: 126150 - DNA, 591 bp, Enterobacter cloacae
atgctgaatcctggattcgtgacccgcaaagcgcttgctcagtggcaggatgtccccgcttttttacctcagttccagtttcatgaaaaacaccgaacggtcattcatactgcgcatcccgaacatattctgccgttgattgcaaactttgacgtccggcaagatgtcgtcattcggcggctgatgtttttacggcaattaccgcagaaatttctgcataatcagcaggctaactccatcggcaactttggcctgcacagttttacccttttgaaaaactcagcatctgagctctgctatggcttgcgaggacagttctggcgttcagattttggtctggaaaaagtaccggatgtcagcgcttttcagacgtcagtgacgccgggcagcgcgacattgttgctgcgctatcaggtaacggaattggccccaggccagcatgaactcagtacagaaacgttcgtcgattgcccggacagaagcacccggctcagaatggcggcttactggctgataatccgggcgggcagcggctggatccgcaggagaacgctgaaagcggttaggttgaatatcgagaagctggactga

SEQ ID NO: 126151 - DNA, 648 bp, Enterobacter cloacae
atgaatgacgcagaaaaacgcgacgacatgctggctgcggaatatgccctcggcacgctgcggggaggagcacggcttcagttccagaaaagggtcctccgtgaaccggctctggccgcccgcgtcgcgtactggcagaaaatgttcagcacgctggatagtcatcttgtgcccgtccctccacccgagacggtgtggaaaagaatcgccctcgatctgccgcccaaaaagcctttacgcaaaagtcggccttatgtcggctggatggttgcggcctccctcgccgccctgtcggtcgttgcctggtatgcaacccgtacaccggaactcgctccgctgatggtcctcaacgatgcccaacagcacgaggaatgggtcgtcagcgcggatgccagccgccagcacctgagcattgcccctcttcggccgacggccgtcgcggcgcaacacagcctccagctttggctgatcccaggcgggcaggcgccggtctccatggggctgctgcataacgacataccgacacgcgtcaccctcaggaacacaacgctccctcctgacgccacgatagccataagccttgaaccagcgggcggatcgcccactgggctccccacaggcccggtgctttacagtggcaaattgtaa

SEQ ID NO: 126152 - DNA, 597 bp, Enterobacter cloacae
ttgacgacgctactggtgttcactcggaattttgcaatgaggcaggccattcagggcttatcctcagcggacaaagcggtattcttttttgataaccgccttgagtttatcgtctgtgcaacgatcctggataagccttgcattttgattgatgcaattgatgaaacaacagataacataaggtggttgtattctcggctcgcggccagaggattatcgcgacgaacctattttatttcaccagaagaaaacacaggcaatagctatttaaaactcttctggctggttacgacgatcaaagagttgaaggcgctttgcgatcgcgcagcgaaactccccgcaacggaaaaaccctgggaagtagccgatgttatttacgacaggttatcggtaaagttatcgccagaacatctggactttctgatgacgctatacgatgcgtcgaccgggaaatatcgttgcaatgaccgcgatgacattaataaaaactactatttaagaaagcgacttgcattaggaagcagttcagagatgaaacagctcatcgttattttatccactcaggcttatcaccatccttgtctaaaatcagcctga

SEQ ID NO: 126153 - DNA, 678 bp, Enterobacter cloacae
atgagtcaacttattcgaacgattgcgttatcaggcgtttgcctgctctctctaccggttaaggccagcataaccgtcggggggacacgcttaatttataatggaaatgaaagcgaagcctcactcccggtgagtaacagtcgggatgccgttccctatttaattcagtcatgggttgagttaggtgaaaactcgaaggagaaggtttcttttatcgttacgccgcccctgttccgcctagacggaggccatgaaaatacgctgcggatcatttataccggtgaaaaaacactgcctgataatcgcgaatcttttttttggctaaacgttaagtctattccctcaatgacccggtcagatgaaaatcggctgcttattgccgttaagacgcgtatgaaaattttctatcgccctgcggcgctggcgtctgaaaaatccggtgaagcatggacgaaattaaagtttgagacgcgcggtgaacacctggtgattaataacccaacgccgttctacgtttctctttattcattaacgattggcaataaaacgattgcgcagccgccgatgatttcaccctttagttccgcaacggtggccggcagtggaacgcaggtggcctggaaagccataaatgattttggtggcgtaacgacagaaaagcgccagatgctgaaataa

SEQ ID NO: 126154 - DNA, 2517 bp, Enterobacter cloacae
atgtcactcgcgcaggtaagcaaagtgaatactgttcctttttctcgatatggttttttctctggctcgtggcctaaccgcgtaagtcgactctcgacgatagcgctttttatttcgggcgtttttcccgcagctgcgggcgaactctattttatggccgatgcgcttgaaaaaacacactcgacttctcagggcatcgatctgggccgcttcgagcggggagaacagttacccggcacctacagggtggaaatatggcttaatgaaaattatatccgaacggaaaatatctcttttgtatctgttaacggcgtcgggctggcgccggagcttaaccggagcgtgctggaatcacttggtgtcagggtcaaggcatttcctgaattatccatgctgcctgccgaggcaataattaccgatcccggcgcatttataccggatgcctccacccggctggattttgacaggcagagactggatatctctatccctcaatcggcgcttaacgcgcgggcacgcggcaccgttgatccgtcgcgctggaaccagggcatttctgcactgctggtaaattacagcatcaacggctcgcgcagctggagccgggacggtgaggcgcaggatcagctttacaccaatctgcaaagcggtattaatgcgggaccgtggcgcctgcgtaactacagcaccgtgacgaagaacaacggaaagcagtcgttttcgtcgttgaatacgaccctgagccgcgacgtccagtttttgagagggcagtttcaggtgggggaaaccagcacccccggcgacgtgtttgacagcgtgatgtttcgcggcgcccaaattttttccgatgacaccatgttgccggaaagcatgcgcggcttcgcccccatcattcgggggatcgcccgcaccaacgccacggttaccgtgaagcaaaacggctacacggtttatcaaacctacgtggcgcctggcagctttatcattcgcgatctttatcctacgtcagcgagcggcgatctggatattgtcgtcaccgaagctgacggcagcgtccagcatttcgtgcaacctttctccgcggttcccgtcatgctgcgggaaggccgcgtgaagtatgcgctgagcacaggcgagtttcgaacgacgaagcatggggcacatacgcccacatttggcctgggcacgttggcttatggcctctccaataatctcacgctgtacggtggcgtcctgggggcaagtaactatgcgtccggcgtgcttggttccggcctcagctttggcgatataggctcactatcggcggacgttacccttgccgaaagccagctcgttgaggagaaaaatcgccgcagccggggacagtcctatcgggtgcagtattcaaaaacggtggccacgaccgataccaccgtgacgctcgcaagctatcgctactccacggaaggcttttataccttccaggaggtgaatgaattcagcagccagcgctacaacaagcgaagccgactgcaactcaacctcagccagtcgctgcaaagctggggaaatttttatatttcggcataccagcaggactactggggcagacagggctatgagcgcaacgtcagcaccggctttaacaccagtattcgcgatatcaattactcgctcggctacacctacagcgaaacgccgggcaaagaccgtagggaccagattgtagcctttaacttacaggtgccgctgagcaaatggctgccgcaaagctgggccagctatagcgtgaatatgcaaaagaacggtcctgagacgcacctggtgggtctgagcggcaccgcactctctgataataacctgagctaccttgtccagcagggctatacgtcgtctggcggagaatcgagaagttccttaagcggaacctataaaggcggctacggtaccgtaagcgcaggctacaactacagccgacagaacagtcagctgaacttcggtctgcaggggggggttgtcggccacgagcatggcgtgacgttctctcagccgctgggggataccattgtgctgctagaagcgcagggcgcatcaggcgtgagcgtgcgcaataaccctggcgttaaaacggactggcgcggatatgcggtagtgccctatgccagcgcttatcaggaaaaccggattgcgatagacatcggttcgctggggccggacgtggatgtggacgaatccgtagtcaacgtcgtacctacgcgcggtgccgtggtgcgcgcgacgttcaaagcgagaacagggttccgtgctctgataacgttgctgtatcagaactcgccggtgccctttggggccatggtaaagcttaacggaagcgatgcgatgagcattgtcgggagcgacggagaggtctatatgagcggcctgaacgacggtgacagcataacggtacagtggggagcgaaaacctgtcgcgccaaaataaacttgaacgccttaccgggtaaaattcagcgtaccgctgcgacgtgtcgttaa

SEQ ID NO: 126155 - DNA, 981 bp, Enterobacter cloacae
atgtccaccgtatttaaaatcgcgacggcagccgtgggatgcgctgtctctctgaatgcctttgcgctgtgttctgcaaacgacgtagcggtcaacttcgatcacaatattgtcgttcagcgggatgcgccggttggaacggtattagcaacgataattaccagtaaccccataaaatgtgaccctgagggtcagcaaatcggatacgatggctcgtggtttattcagctctccggggcgaatacggattacggcgcctcgccgctggcaaacgtgcgggcgacagaggttcctggcattggcatccggtggaagaacttttccagcaccacgcaaagtagcgaatttgtcaccagaatggacctcaataacccgaactggaggcgagggatcctccaggatggtgtatcaacgttcacggatacttttgagctgatcaaaaccagcactaccccggagacgggctcaatacccgctctggcgctaaatatggaatacagtactccgagaagtaataacattatgcgcctgccgctttttaaatatatattttcgccgatgaatataagcactgcatcctgtcagattgaagataaaaatttgaatattaatatggggattgcgctattaccgaagtttaacggcgtcggcagcacccagaatcaggtgacattttccataccgcttatctgtagtgcacagaccgcagtgaatgtgacgttggataatgtcagcccgcttgccgatcctgttaacggagtattggggttaaacagcagttcgacggctacaggtttgggcattcagctaaaatataacgattcgcccgtgcagttcggcaagcttattaaatacggcacgacgacctcggcaggagaaatcgtcaatattccctttaaggccgcgtattatatgacctctgcgaatgctcgatcaggctcggtgagcgccacggcgtcgtttactatgacctatcgttaa

SEQ ID NO: 126156 - DNA, 642 bp, Enterobacter cloacae
atgcacaccacccaccgcacgttcattctcgccggccataccgtacaccacgtcaccttcgacccaaccaccttcaccgacgccgatctcctctggctcccccaccacgctgagcttgcaaacgccgggcgcaaacgcaaagccgagcatctggcaggccgcatcgccgccgtgcatgccttacctgaccacaccgtgcccggcatcggccccagcggtgaaccgctctggccggaaggcgtttcaggaagcatcacccacagcggcacgcaggcgatggcggttgtaacatgcgaccatccggcgattatcggcatcgattgcgaaacgatcctctccgagaatgaagctcaggaaataaaagacggcgtcattgatgcccaggaagagctcgtcctttcctgctcaggttttccgttccccctcgccctgacgctggcgtttagcgccaaagagagcctgttcaaagccctctttccgaaggtacagtcctggatggggtttgacagcactcgcgtcacacagctcgacgataaaacgcttaccctggcattaacccttcaacgcgcaggatacgccaaagccaccgccttcacccttcactggcgacagcacggcgaaaaggcgatcaccctgctgtaa

SEQ ID NO: 126157 - DNA, 1200 bp, Enterobacter cloacae
gtgacggcgttaacaacgggaagtgaagcgtggtggcagtcgaaaaacgggcctgaatggacgccggaaaagggaaactatcgcgtcacgttctggtggcgtgacccggcaggaacgcaaagaacgtcaccgatcaaacgcgtctggctctacgtcaccggcgtgaccgatcaccatcaaaatgcccgcccgcagtccctcgaacgcattcccgataccgacgtctggcagtggcagggcgagttcagccccgagtggcgcggaagctactgttttatcccttccgtgaatgaaaacgattttgccagcgtcgtgtttgaaggcgagcagccggagcgcatggcgctgcgcgaagggtggcgcaagctgctgccgcacgcggtttctgacccgctgaacccgcagagctggcgcggcgggcgcggccatgccgtctccgcgctggagatgccgcaagcaccggttcagccggggtggaatcatcccgatacgccgtatcagccgccagtctgcattgagtgggaaagcgtgcgcctgaaaaatcgccgtcgcgtctggattttcactaccgggggcgacgacccggaacgtccgctggcggtgctgcttgacgggcagttctgggccgaaagtatgccggtctggcctgcgctggcgtcgctcaccagcgagcgcaaactgccgcctgcggtctacgtcttaatcgatgttatcgacatggcgcatcgcaaccgcgagctgccgtgcaattccgatttctggctggcggtgcaggaagaacttctcccccttgttaaaaaacgcgtgccgtttagcgaccgcgccgaccgtacggtggtcgcagggcaaagctttggcggtctctcttccctttatgccgcactgcactggccgcagcgttttggctgcgtgcttagccagtccggctcctactggtggccgcaccgcggcggccagcaggacgggctgttaatcgaacaacttaaagccggcgaaatatcccctcgcgggttacgcatccttcttgaggccgggcgcaacgagccgctcatcttccgcgcgaatcaggcgatttatgccgaactgcacacacaccaaccggttatctggcgtcaggttgacggcggacacgatgcgctttgctggcgcggtgggctgacgcaggggcttatcaccctctggcagccgcttattcactaa

SEQ ID NO: 126158 - DNA, 471 bp, Enterobacter cloacae
gtgacgctcgaccctgaaacagacttaaaactggagcgcgtggtggacgcaccgcgcgacctcctgtggctctgctggaccacgcccgaacacatcaaacacttcttcatccctgcaccgcataaggtgctcgactgcgatctcgatctgcgcgtgggcgggcggttcaacaccgtgtttgaggtggacggtcagcggatggataaccggggcgtgtttcttgaaatcgacccggggaaaaagctggtctttaccgacggctataccgaaggctggaaaccggccgagaagccgtttatgacggcgatcctgctgctggaagaggtgggcgagggcaaaacccgctatacggcgatagcgcgccaccccacgaaggaaattcgtgagcagcatgagcagatgggcttccacgaagggtgggggattgtgctggatcagctggtggcgtatgtgaaagggcttaacgcttag

SEQ ID NO: 126159 - DNA, 306 bp, Enterobacter cloacae
atgaacggcggcaatcacacccgagccaataccgaagacctgctgattgccacccgtggcgccgggctggaacgacagcacgccgggattaagcaggtggtctacagcccgctcggcgcgcacagcgaaaaaccgtgggaagttcggcgccggcttgagcttctttacggcgatgtgccgcgcattgagctgtttagccgcggcgcggcaccgggctgggatcactggggaaatcagtgcgccaccgccgcggttgaattgctacccggctgcgccatcgatgttgtgaaaacggaggctgcatga

SEQ ID NO: 126160 - DNA, 771 bp, Enterobacter cloacae
atgagcaaaggtaccattatctgcctgtgcgatatcactggtgtcatgtctgtgccatgggttgaagcaggctaccgtgcggtgttggttgacccgcagcatccagatacttcgattaacggtccgattgaacgcatatcggcaaccataattgaggctatgccgcggctgtcccagatcattcgtaccgagaacgtggtcatggttatcggctttcctccttgcactgacgttgcagtatcaggatcccgttggttcgaatcaaaacgagccaaagaccaacattttcaggctaaagctgcgctcgttgccgagcaatgcaggatgacaggcttggcggccggatgctcgtgggcattcgaaaacccggttagcgtgttcagtagcatcttcggttcggcagattacacgttccatccgtaccagttcactgggctgtgcgaggatgacaactacacgaaacagacctgcctctggacaggtaacggcttcaaggcgccggcagagaatatgcatccgatggtggaagcggctatcgacgccgtgaaactggcctgcggacggatggtgccgaagaagaaggcaatcgaggtcatctcaggaacatctttcgccggattggtgactgactggtatccggacaaccgcattcacgaatgccctcccagtgacgagcgtgccaacattcgaagcgcaactcctctgggctttgcgaaagcggtttttctttcgaatgcccctcatctcaaaaacaaacgggaggccgcatga

SEQ ID NO: 126161 - DNA, 699 bp, Enterobacter cloacae
gtgacagcgcaaaacctgatcgatacgcccccccggttacagtacctctctcaggacatcgtcggcattaagcttgagcctatcgtcgccctcgcctctttgcgtcaggttggcgtcgaggtccttagcgtcctggctgatacgcggcacagtgaggattttttttgcgatcggtccgctggctggtcgctaacgctgcttgaggcgcagcttgctgcgttaaaaaatacgccgcacagtcataacctttttattaatctgccgataaccgtcctgacagagcctgcgtccttccagcggctcatcagactcccctgcgtgccgctcaatattgagtttgtcgaccttgcggcttttttggcgctgtccgtcgcgcagaagcagcgcgtggttcagaatctgcagcagctgagcagacaggggcacgctatctggctggatgacattgatgatgtcttagtgcagtcgtttttatcctgtcgacttccgttaagcggcatcaaaatagataaggaagcattctggcgtttacgcgacacccctgcgctgaggcaactggtttccctttgctttcagcttgccgggaaagtgcttatcgaaggtattgagactgaacgcgatcgtacctgggcactgcaggcaggcgcagacttcggccagggatattactggccgtcctggacatggccggaggattaa

SEQ ID NO: 126162 - DNA, 672 bp, Enterobacter cloacae
atgaacgataaaaaaaacgtattacttctcagggatgtcggatttcgagtcggggaaaacacgatcctgcagcacgtcgggtttcgcctgtcgccgggcgagtttaaattaatcacgggcccctcaggctgtgggaaaagcacgctgctgaagattgtggcgtcactcctcagcccgacggagggcgccattctgtttgaaggcgaagatatcgcctcgctttccccggaaagctatcgccagcaggtctcgtactgtgtgcaaacgcccgtgctttttggcgatacggtctatgacaacctgatttttccgtggcaaatccgcaataaaacgccggagccggaaaagtttatccaggatctggcccgctttggcctggcgcaggagacgctgagcaaatccatcaacgcgctgtcgggcggcgaaaagcagcgagtctcgctgatccgcaacctgcagtttttaccgaaggtgttgttgctggacgaaatcaccagcgcgctcgatgacgtcaacaagcgcaacgttaacgagattattcatcgttacgcccgggagcagaacattgccgtgctgtgggtgacgcacgacgctaacgaaataacccatgcggatgacgtaattacgctccagccgcacggcgggaaaatgcaggaggcaaaccgtgggtga

SEQ ID NO: 126163 - DNA, 852 bp, Enterobacter cloacae
atggcacatattttttatgagtttccctccctgaagcctggtgttcctgatgtcgaaacattaatggccgtcatcaaatcgtcggaacgcacgcgttttgtgatgggtgaagaggtggtcgattttgttaagaaggcgctcatcgtgaacaccacgatcggcagcttcaaaaattgctattttgccttcgacaacgggacacacttccttgaatttgacggtaaaggcaaatcaaaacgcttcaatgaggtgccggactggttcgtctctccggcggaattttcgcgcacccagtggcttatcaaccacaatcttgcggatgtgaaagccacccagttcattgacgtcctgatgtcctacccgctgaaagcgcgccgcgcgcactgcaatttgttattcgggctggagctggaaaaagtcaacgcggttccggccacggcgtcagcggcaggtaaaatcggcaataaaaacggtaaaaccaccaagccccgcgtcaccgatctgggctcgttcgagctgttcagccagttctttgcgcgcatgaaaaccgccgtgcaggccgatgagttccctactctgcagatcctgacgggcatggataacctggcaaaagcgccgcataatttaaagcagggcatcagaacctggtttaaagccatcgcgggggaccttccaccgaataacaaacgcgttgaggcgggaaatgccgttctgttctgcgccccccttcgcgaacagatccagcgtatcgaagcgcgggggctggagcattactaccagggattatccaaagccattgccgaagcgggtgatggcttcatctctgactttacctatacttacgagcaataa

SEQ ID NO: 126164 - DNA, 183 bp, Enterobacter cloacae
atgttccaccctggacaccccttttttatccaaattaacgcgctgttttatcgcttccttacgtttcattggcttagcaaaaatggcgagaaaagttcagattcgaacttcacgttgtcagaacttcttattaggaatattcctaatagcttaagcggggaaatgaaattaaaaaaatcctga

SEQ ID NO: 126165 - DNA, 711 bp, Enterobacter cloacae
atgaagacattcaatcagttcggacagccagtaggcgaagcgcttagcgactggcagcctcgtcagcacccgtcccgggtcgtgcttcagggacgctattgtcggcttgaaccgctgcgcgtggagcatgccaacgcgctgttctctgcgtattccctggccgaagatacccgcagctggacgtggctactgcgtgaacccgatgccaccgcagaggagtttgccgaatgggtggcgagcgtaagtgagttatccgatcccatccactttaccgtgatggataaccggactcagtcccccgttgggacgctgtccctgatgcggatcgatcctaaaaatggggtcgtggaggtggggcacgttcacttctcgcctcttttaagccgcacgcccatgtcaacagaggcgcaatatctgctgatgcggtatgtgttcgataccctgggctaccggcgttatgagtggaagtgcaatagtttgaacgagccttcccgcaaagcggcactgcgtctgggttttcagtttgaggggcgttttcgtcaggcgctggtcataaaaggtcataaccgggataccgactggttttcgattctcgacaaagagtggccggcgctggcaaatgcctttgaaagctggcttgccaccgacaattttactgccgatggcaaacagaaaagatccctggaaagctggcgagaaacgcgcgtttag

SEQ ID NO: 126166 - DNA, 3090 bp, Enterobacter cloacae
atgtccaacacatcctcgctgaccctcagcgacatcctggcccgtcgggactgggaaaaccccggcgttacccagtggaaccgcctgcccgcacacgcgccgttagacagctggcgtaatgaatcttccgccagagatgacgctggatctgtcagcaggcgctctcttaacgggatgtggcgatttagctacttttctgctcccgagcgggttcctgaggcatgggtcagcgaagattgcgcggatgccgtcgcgatgcccgtgccgtcgaactggcagatgcaggggttcgacacgcccatctataccaatgtcacctatcccattcccgttaacccaccttttgtgccgcaggaaaacccgacaggttgttactcgctcacatttgacgtggatgacgcctggcttcagcgcgggcaaacccgaattatttttgacggcgtgaactcggcgttccatctgtggtgcaacgggcagtggataggctattcccaggacagtcgattgcccgccgagtttgacctctcggcggcattacgccccgggcagaaccgcctggcggtcatggtcttgcgctggtgcgacggcagctatctggaagatcaggacatgtggcgcatgagcggcattttccgcgatgtctccctgctgcataagccggagacgcacattgcggattatcacatggtcaccgatctgaatgcggagctggaccgcgcggtgttgaacgttgaggtcgcgctggcaggcgcagactacacggaatgcgaggtggcgatcacgctgtggcgcaacggtgagcggtgtggcagtaccacccaacggcccggatctgccattgtggacgagcgcggcaactgggccgagcggttaacggcggcgatcccggttacagcccccgcgttatggagcgcagaaaccccggaactctatcgtctgacgatcgcgcttttggatgcgcagggcaacgtgctggagacggaggcctgcgatgtcggcttccgccggattgaaatcagcaacggcctgctgaagctcaacggtaaaccgctgctgatccgcggggttaaccggcacgagcatcacccggaaaacggccaggtgatggacgaagcgacgatgcgccgcgatatcgagatcatgaagcagcacaacttcaacgccgttcgctgctcgcactatccgaaccatccgctgtggtaccggctttgcgatcgctatgggctgtacgttgttgacgaagccaatatcgaaacccatggcatggtgccgatgagccgccttgctgacgatccgcgctggctgcccgccatgagcgagcgcgtgacccgcatggtgcagcgcgatcgtcatcatccctcaatcatcatctggtcgctgggcaatgagtccgggcacggtgcaaaccacgacgcactgtaccgctgggtgaaatccacggatccgacgcgtccggtgcagtatgaaggcggcggcgcgaacacggcggcgaccgatattgtctgtccgatgtatgcccgggtcgatcaggatcagcccttcccggcggtgcctaaatggtcaatcaagaaatggatcggcatgccggatgaaacgcgtccgctgatcctctgcgaatacgcccacgcgatgggaaacagcttcggcggattcgcgaaatactggcaggcgtttcgcagccatcctcgcctgcaggggggatttgtctgggactgggtcgatcaggcattaacgaagaaagacgaaaatggcaacgcgttctgggcgtacggcggggactttggcgataagccaaacgatcggcagttctgccttaacggcctggtcttccccgatcgcacgccgcacccggcgctgttcgaggcgcagcgcgcgcagcagttcttcagctttacgcgggtcagcacctctccgctggtgattgaggtgcaaagcgggtacctgttccgccataccgataacgaagtgctgagctggacggttgcccgggatgggaaggtactggcttcgggcgaggttacgctggcgatagcccctgaaggtgttcagcgtctggagatcgctctgccggaattgaaagccgcgccgggagaagtctggctgaatgttgaagtgcgccagccgcgggcaacaccgtggtcaccggctgaccatcgctgcgcgtgggaacagtggctgcttccgtctccgctgtttgtcacaccgtcagcctctgcgggcgagccgccggttttgacgcaaaacgaccgcatcctggcgatcgcgcatggtcaacagcgctggcagttcgatcgcgcaaccggaaacctggctcaatggtggcgaaatggcgtggaaacgctgatgtcgcctctgacggataacgtcagccgtgcgccgctggacaatgatattggggtgagtgaagcgacgaagatcgatccgaatgcctgggttgagcgctggaaagcggcgggcatgtacgatcttacctcgcgcgttctgtactgtgaggcagcgcagcacgcagacgaggtggtggtcacaacccagcacgtccttgagtatcgcggcaacgcgctgtttctgagtcgtaaaacctggcgggtggacgatcggggagtactccacggcgatattcaggtggatattgcgtctgatatcccggaacccgcgcgcgttggcctgagcgttcatctcgccgaaacgccggaaaacgtgtcctggctggggctggggccgcatgaaaactatccggacagaacgctggcggcacagcaggggcgctggacattacccctggcggagatgcatacgccgtatatcttcccgacggaaaatggtttgcgctgtgatacgcgggagctggcgctgggaacgcatcagctgaacggccggttccatttctcggtgagccgctacggccagcagcagctgcgggagacaacccatcaccatctgctgcgcgaagagccgggatgctggctcaatctcgatgcgttccatatgggcgtgggcggcgacgactcctggagccccagcgtctcgccggaattcctcctgcagacacgccagcttcgctacgccttttgctggcagcagaacccttaa

SEQ ID NO: 126167 - DNA, 1701 bp, Enterobacter cloacae
atgcgccagcttaaccgtcttaaccagtatcaacgcctgtggcaaccttccgctggcgcgccgcagcaggtaaccgtaaatgaacttgccagccgctgcttttgtagcgagcgacatgtccgtactctgctgcgtcaggcccaggatgcgggctggctgacctggcgcgcgcagtccgggcgtggaaggcgcggtgcgctgacgtttcacgtcactccggaatcactgcgcaatacgatgatggaagaagcgctaaaaagcgggcagcaacataacgccctcgagctggcgcagcttgctcccgaagatttgcgtgccctgctgcacccgtttttgggtgggcagtggcaaaacgacacgccgacgctgcgcattccctactaccgctcactggagccgcttcagccgggctttttaccgggtcgggcagagcagcatctggcagggcaagtcttctcaggtttgacgcgatttcacggcaacagcagtgagccgacgggcgatctggcgcatcactgggatgtgtcggatgatggcctgcgctggcatttctacattcgctccacgctgcactggcataacggcgataaaattgaaacggcgcatctccagcggagcctgaccgcgctgttgacgcttcccgccctgcgcaccctgtttcagagcgtcctctgtatcgaaacaacgcatccgcagtgcctgacgtttacgctgcatcatccggactactggctgccgcacaggctggcaacctactgtagccgtctggcgcatcccgaccattcgacgattggcagcggcccctttcggctggtcgcctttgaacccgacctggttcgtctggaaagccatgagcagtaccacctgagccatccgctgctcaaagccatcgaatactggatcacaccccagctttttgatcacaggttgggtaccagctgccgtcacccggtgcaaatcgcgattggtgaggccgacgagctggaaagtctgcggctggtaagcagcagcaccagcctggggttctgttacctcacgctaaaacagagcgcacgcctgagtgagaaccaggcaaagcggctgattaatatcattcatcactccaggcttctccacacgcttccgctaaacgaggggctcatcacccccaccggggaactgtttcccggctggacaatccccgaatggactgatttaaccgatgttgccctgcctgaagcactgacgctggtttaccatcttcccgttgagcttcacaccatggccagccagttgaagacgtacctggcgctacagggttgtgagctgaccgtcatctttcatgacgccaagacgtgggacggatgccagcagcttgccgaagcagacatcatgatgggcgacaggctgattggcgaagcgccagcgtatacgcttgagcagtggctgcgctgcgatacgctttggccacacgtgttaagcgcaccggcgtacgcccatttgcaagccacgctggatgcggtacagactcaggccgaagctcgggatcggcacgcgggcctgaaggccatttttagccgattaatggaaaatgcagtgctgacgccgctctttaattatcagtatcagatcagcgcgccgccgggcgtgaatgggattcgcctcaacacccgcggctggtttgattttaccgaagcctggctgcccgcccccaaatcgtga

SEQ ID NO: 126168 - DNA, 381 bp, Enterobacter cloacae
atgaaatgtggaatcaaagcactgttaattacgctggctattgccaccaccgggctgagcgcgggcgcactggcggcgacacctgccgctaaaccacaggcggtacagagtaagaccgacgccgcagcgccggggcaggggcaaaccaaagcgactgacgttggtaaaaatgtggatgatgacggtacgcgagtcagcatcaattcggcctctgcggaagagctggcccgcgtgatgaatggcgtcgggctgaaaaaagcgcaggccatcgtaagctatcgtgaagagtatggtcctttcaaaacggtcgacgacctcaagcaggttccgggcatggggagcgcgctggttgagcgcaacctcgcacacctgacgttgtaa

SEQ ID NO: 126169 - DNA, 510 bp, Enterobacter cloacae
atgaaaaaagcgcgtttttccttttggatccctctcatcgcgggcgggatagcactgatatcggcttttgtggtctggtcagtcaacatttaccgcgtgacatacctttcgatccgcggggagcagtaccttgcctgtggggcgttgctgctggcgctggtgccgatggtctatttcatcagaaaggggagactgaaaggtaagcgccttgctgacgcggtcaaaatctacctcggcttctttatttgcagcctgccggttgccatgttcgcggtctttacaacggcctggctgctggagggggactattcggcctggagcaaaccttaccggtatgagtccagtacccgccacacctgctcgggtgcggaagtctacgagccggaattaaagaaggagatccgcatctgtaaccctcaggggaacgtttattccgataccaccctgtatgtggaaaagcggagcaatgccctggggattgtcgtgctctgggctatcacgcgcgcctga

SEQ ID NO: 126170 - DNA, 405 bp, Enterobacter cloacae
atgtgtataaagtttactctcttaaaagatcgtgaaactgtaattaagtccctgactcactggattgactcgaatttatacagacccattaccgttctggatgtggcgcgaaaatccggttattcattggcttatattcaacgaaactttcgccaggagtgtggcataagtataggtctctatatccgcagccggaaacttgaaaaagccgcgcatatgctcagacacacgcagctctctgtttcacatatatttacaatgctaggctatgaagagccgtctaccttcagcagagcgttctcaaaccaatatggactctccccaaccaaataccgtgagatggctaaaaaaagtcatgacatgaatggcttgtcgatattgattactgaggtgacgcgcgactaa

SEQ ID NO: 126171 - DNA, 645 bp, Enterobacter cloacae
atggataaaagagcgcttaaacggcaacagattctggacgttgcatccgggctgtttcgacaaaaaggatttgatgctacgtctatctctgagatcaacgcgattgtgggtggctcaaaatcgacaatttacagtcacttttcttcgaaagaagagctatttgtagaatgcatgtcttctgaaacagaacagtatattaagagcatgactattgaaactgcagggcaggtgcgccttttcagaaaatcaccacagctggtcatcgagcaatttgccgttgcctttttacgctatatttgttcaccggatattgtggacttgcaaagattaatgatttccgaagccggaaggtcgggaattggagagttgtattatgaacgaatgcaaaaacttcgttcaaacgtatcggcgcttttcaccgatttaatgaatcaaaatattttaagaaaagatgacccagtgctggccgctgagtattttcgctctcttctccaggccggtatccttgaacccttgcttttaaaagcacgaaaggatcagcctgacgaaagtgaaattgtcatgaaagcgcaggcctccgttaatgcgtttatgaagttgtatggtcctgaacaaaatgaggatgttgcaaagacatctcattaa

SEQ ID NO: 126172 - DNA, 1407 bp, Enterobacter cloacae
atgggctgtgttgtcttttccgccatcagcctgagcggatgcgccatgatccccgatctcggcaccccaccgcctatgaagacggtcacacaacttaaaagcgatcagagtttcccacatcagaacggccagtggccgaaagatgactggtggaaaaaatacggtgatgagcagctcaacggactgattgatgacgcgctcaaaaattcccctacgcttaacatcgccgacgctcgcgtgaagcaagcgcaggcgatgacccaaagcgcgagcggatcgcttttccccgaggtcaccgctaacgccagctttatgcgggacaaaatgagttacaactatgtgacgcctgaaagcgcaacaccccaaaactggaacagctatgggcgcaccacgctggatatgagctgggaaattgatttttggggtaaaaaccgcgcggcgctcgcggctgcaacgtcaggtgaaatggcggcagtcgcggaaaaagcgcaaacaagactggtgctgtcttcgtctgttgttaccgtttacgcggagctggcgcatttatacaccgttcgcgaaacgcttaacgataccctgacgatacgaaccagtacgcttgcgttgttccagcaacggcatgacgcggggctggaagatttatccagccttcaacaggttgagacgcgtcaactcaacgcaaaagcaaacctggtggcaatagatgaagcgattgcgatcaaaaaacatgccctcgccgcattgatcggtgacgggcctgacagggcgctggccataaccgcgcctaaggcaacgcttttagcgcatgaggaccttcctcccaatattgcgttggatctgattggtcgccgtcccgatattgtcgcggcacgtttacgcgcagaggcggcagcagagaaaatcaaacagaaaaaagccggtttttacccgagcgttaatctggttgcctttgccggattccagtcattgggtattaacaaccttacccgaagtggctcagcaattggcagctttggcccggcaatatcgttgcccatatttaatacgcaacagctacagggtgatttgaaatacgccagcggtgaatatgacattgcggtgaatgtatataacgacacgttaacgaatgcacttcgtgaagtgagcgatgcgctcaccagcagagcctctcttaaagacgagatgctgtattctcaggcggcagtcgcgtcagcagaaaaagcgtattcgctcaccagacaaaggtatgaaggaaaagttgctgattatcttgacgtcttatcctcggaagacgagctggtcgctgcccgcagaaaattagccgacgttaattctcgtgcctttacgattgacgtcgcattagcgcgcgcattaggcggcggatatacctcgagcaaacagtga

SEQ ID NO: 126173 - DNA, 1143 bp, Enterobacter cloacae
atgagtcattctgcagcgattgaaaatcaaaatattgaatcatccgatatcaaaaagaaaaagagaaaacgtttgttctcctgtcttgcagtgagtattgcgcttgctggtgcaggctcttttgcctggtgggaattcgtcggttcccggtatgttgaaaccgataacgcctataccgatgtcgaatcagcccaactctcttctgccgttaccggtacggtaagcgccatcctggtcacggattcccaggtggtaaaaaaaggcgatgttctgatccagctggatcccaccgacgcgcagctagcccttaatcaggcggaagcagacctgaacctgtccattcggcgagtaaatggatataaggccactgatacaaagctcggcgcagaagttgtggctaatgaaaaagagcaaaaacgcctgctggcccaggttgatgccgcaaacgctgacttccagcgcgcgacggttgacctcaaacgacgcgaggcgctcatgcagacaggcgcgatttcaggcgacgagctgacgcgcattcaaaacgtttatgcttccgctctggcaaacctgaatgccgctaaagccgccgtggcgcaagcagatgcagcaaaacaggcggcggtgggtgcaagacaagcgaatgccgttctgattgagaacgcagataccgagaccaaccctgaagttgtccttgccagagcgaagcgcgatcaggccagactggatctggaaagaaccgtaatccgttcgccagtcgatggcgtagttgctcgtcgccaggtcgagcttgggcaacgtgtacaaccttccacaccgttattgtccgtggtgccagtacagcaaattcacgtcaatgccaacttcaaggaggttcaactccagcatgtgaaagtgggacagaaagtggagctggttagcgatctgtatggcgataacgtgcttttccatggaacggtagaaggctttgatggcggaaccggcgcagcgttttcagttattcctgcgcagaacgcaacgggtaactggattaaggttgttcagcgtttacccgtacgcatcaaactcaatgctgacgaacttgcagcacatccgctgcgggttgggctgtccatgaaagcgacagttaatttaaaaagtgaataa

SEQ ID NO: 126174 - DNA, 1545 bp, Enterobacter cloacae
atgtctacattcgttatcgataaccagcctccttcgctgaagggcggtatgttatgggtgggtgccctggttcttgcaatggcgaactttttagccgtgctcaacatgaccattgcaaacgtcactcaacccaatatggctggtgccctgggcgcaggcaccagccagggcacctggatcatcacggcctatgccgttgctgaagccattacggtaccgctttcaggatggttaaccacacggtttggcggcgtgcgcgttttctccatttccgtgttcatgttcggtattttttcattgctttgtggcctttccacttcgctgggaatgctgctgctgatgcgagtttttcagggcatggcaggaggccccctgatggccttatcacaaacgttactgctgcgtattttcccgaaagaaaaatccatgcaggcgacgggactatgggcaatgaccacgttgctggcgcccgttattggtcccgttctcggtggatggatttgcgatcattacagctggtcgtgggtatttatcatcaacgttccaatggccatcgctttttcagtcgtggcgtggtcagtattgaaaatcttcgaagatgagctggttaataacgctattgatatcgttgggtttgttttactggttatctgggttggcgcactgcaaatcatgctggatgaagggaaagaccttgactggtttgcctcagaagaaatatgggttctggcgattgtggcctgcataggttttttgagtttctgtatctgggaactgaccgctgaccatccgattgtcgatatcagcgtgtttcgccatcgcggtttctcggccagtatgtttgtgctcgcgcttgcgtttgggtgtttttttggtctgaatgtcctgacgcctttgtggttacaatataacttagggtatacaacaacatgggccgggattgtggtggcctggggtggccttctgcaggtggtcttttctccggttgccgctaacctctccaacagaatcgatccgcgcattcttatcttctttggctgcgcctggctcggtctcgataccttctggcgcgcctatgcgacgaccgatatggactactggtccatctgtgtccccttgttattcatgggggtgggaatgccgttgtactatgtcccgattacgggccttgcaatgggctcggtagatgaagcggaaatgccctcggcagccgggttaatgaactttgttcgaacgttatcaggcgcgtttgccacatcgctggtgacgacgtcatggcaagaccagcgctatattgcgcatgacaggctggcgtccgtcgttgacccgacaggcgatctttcacagtacatcaactcggcgcctcagcaaggtgggcagtttgttagggagctttttgacaagatggttaacagccaaagcatgatgctttctacgaataatctgatgatgtcgataggcgtcatattctttatcgctgcttttgctattgctttagcaccgaaaccctctcgcgttgttgatgccgcatctgtaggacattaa

SEQ ID NO: 126175 - DNA, 1074 bp, Enterobacter cloacae
atgtcgaaactggatttgaggtccaaaaaaacctggggcgcgctggcagcgatcgccgttgtcgccggtacgctggcatctgcttttgcatggacggcgggctggcttgggtcacgcacggtcagccaggcactggtgggtgaaacaccgaaacccttcccaccgggttttcgtcgcgcgcatggaaaaggcatctgctttgccggcacctttacgccaaacggctcggcggattccctttcaacctcccgcctcttctcgcagcaggaagtgcccgtggtgggccgattctctattggtactggcgatccccatgccccggatagtacgaccaaaaccctgagcatggcgctgctgctgaagacagatgacaagcaacaatggcggatggcgatgaacaacgagcctttcttcgccacgcacagcccggaaggttttctggccttgcgaaaagccacggccgttgatgcgtccaccgggaaaccggatccgcagcgtctcaaagactttttaaaagcgtacccggaggcggagaaataccttaaatgggcggcacaaaaacccgcccccggcagcttcgcgggcgcgacgttttacagcattaacgccttttaccttgtgaacgcgcagggggaacgtcaagccgttcgctggatgatgcgtccgcacgagcctttcctgtcgataagcgatgagcaacgacagaaagccgatgataacttcctgttcgaaaacctgcgtcagcgcctggcgcagaagccactctactgggattacgttttgcagctcgcacagccgggcgatccggtggatgacccttcccagccatggccggacgatcgcaaaaagagggtggccggtacgctggaagtgacgcgcgtcgaagcacaatccacaggcgcgtgccgcgacgttaactttgacccttctgtcgttcctgcaggcgttgcggtgtctgacgatcccatcttaaacgcccgttccgctgcctactcccactctttcagccgtcgtgagcgggaaatcggctacggcaaggccaccgaagccgtgcaaaagcaggaggtaaaatga

SEQ ID NO: 126176 - DNA, 588 bp, Enterobacter cloacae
atgagctcaaataaagataggcgagagcacgcgccgcagcatttcaataccctggcgcgaagcctgcactggctgatggcggtgatgatcctggccatgcttttcatcggtgccgcgatgatgacgtcgttacatcaccggatttggttaatcgatctgcaccggccgctgggtatcgccattttactgctggcactggtgcgtctggtcaaccgacttctgagccggacgcccccacttcctgccgatttgcccgtctggcaggtgcttgccgcaaaggcatcacactggatgctgtatgggttaatgctggcaatgccgctgctgggctgggcgcagctgtcggcagcgggcctgccgattgtgatgtttgatggcgtcaacctgccggcgattgtcccgaccagtccagcactgtatgcctggtgtcacgacgcccacagccttctggcaaaattgctttttgccgtggtgctggtccatctttctgccgcactggttcacgcgtggatctaccgggacgcagtgtttgccagcatggcgaaagggggtaagccggtgtcagccatccgggaggacctgaagtaa

SEQ ID NO: 126177 - DNA, 1932 bp, Enterobacter cloacae
atgaacaggatactggttggtatcattttttctctttttatcacgacaggatatattgcataccttgtttatgatcgtcagcaagaattgcaaaaactgactcaatacactgagtcctggtccgtggcacaactggtatcagagtattaccgttttgaatcatggcttggtctatacgcaaccgataccgatgacgttacgatagaccaggtccgcatgcgtctcgaaattatgctcagtcagggcgatttaatgaaggggggcgatttaggtcgctacattgacagcgataaaacgcatcaggaactcgctttacgcttagaaaacatactggcctatctggatagccatcttgaaaatatgagccacccggcgttgaaagcatacctgacaaatatgcatgaactcgatgcaccgctaagccagctttctgccacggcattaacaaaagatattaacacagttaacgaatccaataagaaaatacagatactgtattatatctactcggcactttcattgctcctggtaattttaagctttattctcggcttcttaatgatctaccagaataaaaacatcctgaaagcacatatgcaggttaaaagcctggctgacgaacttcaaatttcaaaagaaaagctgcaaattcagaactcgaagctggagtatgatgtttatcatgactccctcaccggcatgaaaaaccgacttttcttctgggacgatctcaacaaaattaatcttcaggcagataaaaaccacgtccccgtcaccgtaatgttatttgatttagaccgtttcaaagaggtcaacgatacctatggccatgatacgggagatttgctgctgaatcaggtatcccgacggctgacctcaatgagcagcgcaacggatacgttttaccgcttgggcggcgatgaattcgcccttctctccagcggactcacggaaaccgccgccgtttcgcgcgccaaagaaatcagcgatcatatcagccagccttatacgattaataaccagctgataaaaattgccacctgcgtaggtatcgttttatcagataatgaacgacgctctgattatctatacaaatttgccgatctggccctttacgaagcgaaaaaagaaggttcgcagcagatcaaaatcttccgtcagtggatgctgcaaagactgcaggaaagcagaacccttgaacatgatatggctctggcgatcgatcacaatgaattcgttgtgtattatcagcctattgtcgattcattcagcaatgaaatttacggctatgaagcgcttattcgctggatacacccggtgaaagggatactcgcgccagattattttatttccgtcgctgaaaaaacgggaatgatcaatgagatcggcaagtcggtgcttgagatggcctgccgggaagcggtgtcctgggcggtgccggccaggatctcggtgaacgtctcccccgttcagctaggcacgaaatcgtttaccgcgatggtgcagtccatcctgaaagagacagggctaccggccagccgacttgagctagaggtaacagagtcttcgctcttcagtgacagcaacatgccgatcactattctcaaaaaactccgggcgctgggtgtcaaaatttccatcgacgatttcggaacgggatattcctcgctctcacgactgagtgaactgaattttgataaaattaagatagataaatcctttgtgaatccgatatccacgcaggatgatgcccttaatatcgttaagttaattaccggcatggcgaagagcctcaacatgcgggtcattgcagagggtgttgaaaccgaagcgcagcttgaacggcttcaggcgcttggctgcgatctcgtgcagggatacctgttcggaaagccccaggctgagattgacaggaagattagatacggttga

SEQ ID NO: 126178 - DNA, 660 bp, Enterobacter cloacae
atgaaaaaaacagccccggagtatacgcctgttgatttatctcgttggccaaggaaggagcattttgaagtcttccagtcatttgctgaatgcacaattaaccaaaccgttctcatcgacattaccgcgctgcgaaaacatatcaaagcggtgggctggaagttttacccgacgatcatttttctcctgtctaacatcatgaaccggcatcctgagttccgcatggccatgaaggacaatgagcttgtcatatggaatgaagttcatcccagctacaccattttccaccccgaaacggagacgttttcgtcactgtggagccactatgacggcaatattcatcacttccagaacacgtatgcagaagatacggcccgctatggaaatagcctttcttactggcctaaggaagagtcacgggaaaatgtctttttcgtgtcgtctattccgtgggtaacgtttacgaactttacgatgaacattgctcacatgaagaacttcttttcgcctatgttcacgtttggaaaatactacgagcaggatggaaaagtgctgctgcctatggcggtgcaggtgcatcattcggtgtgcgatggcttccatgtggcaaggatgtttaatgagttgcaggagatgtgtgatggtttgtcggagctgtag

SEQ ID NO: 126179 - DNA, 546 bp, Enterobacter cloacae
ttgctagaccagaccggcggcatcgtaacgccggagatgaaatctcttcgggctgagtatctgaaacaacaggaaacagctacagaagtagccggactgattactgaaaaagaagagctgctgccggtactggttgacgcgaccgcgcataaggcaaacatctatgtgaactgccatcatgacatcactcaggagcgtatcaatgagcttttacgagtcttttttatttaccacagtgccgaattgagcagcctgctcaggatgaagtacagacaatttgagcggaatagcttagcgcataaaccgggcattattgaagggtcaaatgatgcagatacgctgtttcgtgaatttatcctgcatctaatgctgaagtcgatgaatgaaatattgccgttgagattccgtgacgacgtgatgagtctgaccggttcagcaccggtatcaggatcacatgacgaccgaaaaaaagaaagctgttctgacctgaacagaaaagctcacttaaacccggccagtgccgggtttatgatgtctgtagcatga

SEQ ID NO: 126180 - DNA, 741 bp, Enterobacter cloacae
atgatctccgaattaacattctctagaaaatttacttcattttggaatcaattacttccaaatgctaataactttatacgtatcattaacggtagtctcattgaggatgtctatcctcccctggatgaaagtgccaacagagcaaataacgtctttgtcaatgaatgtgcatttaacttgtacaaagccatacaaaatggctcaattgatagaaatatactttcagtgccaggcttatttcatagcgcagattttcaaactatttttgagcagacgaaagagtatttaaagaggttcagttacggttctaacttcaaacttcctttaagcatgatcgaatacaatactatcagggaaatagctaaaagtatattttctcggtatggtgagataaatcaagttgaagtatctccaaatttcgatggatgtggtgtaataaataattcatatggtgatatttgttattcaaatattcttgttgaaattaaatctggagataggaaatttagtgtatacgatttaaggcagatactaatatattttactttgaatttttattcaaaaaataaaagaggtatcaccagttttgagcttttcaatcctcgaatgggtattatatatagtgactccattgtcaatctctgcaaagagttagcatttattcaagcggaggaattgtattttgaaattatgaattctattacagaggaaaacttcatagaaactgaaatgcaacgttag

SEQ ID NO: 126181 - DNA, 1629 bp, Enterobacter cloacae
atgagcaatgaatttgatagtagtaagctagagaattgtttcgatctcgcgttagaaaatattattagacacggcgatacagatattttcccatatccatttgaaagtcggctatttgaagaccgtaaggaaatcgtaaaaactgcattaatgcaaacatttgatgactttgaaaataaacggacagaggtcccaccaaacatgattaatagcttttctagcatcggctattatggttacaggtgggcaacgcaaattgatccattctggaatgctttttttcttggtctagttttgaagatcgctgaagatatagagaaaataagatctactaatacgtctgtttattcatatcgtttcaatccaaaccttgctgcgggctcactttttgataaggatatttcatggagaaaataccaagaagacagcattgtcgaatgtgctaaagatgaaattaagtatgtacttacatgcgatatagcagatttctatccacgtatatatcaccatcgtttagaaaatgcactagacagaatagatcctaataaaaaatactctggtaaaattaagaaattgctacagacatttagtgaaacaaaatcatatggagtgccagttgggtgtccttcatcaagaatattagcagagctagcccttgattccattgataagctattgtctatgaatagggttaactacaagcgttatgttgacgattttattatattttgtaactcaagagaggatgctcataagactttaactttacttagtaaaaaattaatggaaaatgaagggctaactttacagaaacataaaaccaatattgttactaaagaagagttcctttcagtgactaaagctaaattgcatggcaatgatgaagatgaagagtctcctatgaaggccaaatttatgagcttgcctattagatttgacccttattcagcaaacgcaatcgaagaatatgaggaaattaaggagtctttgaaagatttcgacttgctagctatgctgagtagcgaattgcaaaaatcaaaaataaatcaatcttttagcaagcatttgataaaggcattctctgcaacgtctgatgaaataataagtagtgctttcaaagtgatgttcaataatctgcacgagctttatccgatttttacaactataattcaggtggcaaattctaactggcaaagattaagcttagaaactaaaggcattattcttgaaaaaataaatacactaattcaagaaaattcatatatcttaagcactgagcttaatttagcatatgtagctcggatgctttctaaagaaaatactgaagaatccactctaatcctttgtgaaatttataataaaaacccagaaagcatcttagttaaaaacatcgttacgcagtcaatggcaaaaattaattcttatgcgtggctttcagatatcaaaaagaactttgcaggaatgcatccgttacagagaaggttattaattgtctccagctattttttaggagatgaaggcaaacactggagagagcataataaaaaatcattcaatttcatagagaatatctataaggattgggcaggtcaaagacaaactgcaagaaatcttgaggacgcactatga

SEQ ID NO: 126182 - DNA, 486 bp, Enterobacter cloacae
atgcctttaaacgatgtgcagattcgccgcgctaagcctgaagataaaccctatacgcttggggatgggcaaggcttgtcattgcttatagaacctaatggaagcaagagctggcggtttcgctatcgctatgccggtaaacccaagatgatctcgcttggcgtttacccaacgatcacccttgccgatgctcgttcccgtcgtgatgaagcgcgaaaacttgtggcagaaggaaagaacccttgtgaggttcgaaaagagcaaaagctggctatgcaagcagagtcagagaacgccttcgaaaagatagccagagagtggcatcaacttaaatttgctaaatggtcggcaggatatgcatcagacatcatggaagcgtttaagaacgacatttttccttatgttggaacaaggcctgtgggaaagattaaaccgctggagctgctgaacgtacagcgtaaaattgagaaacgttgtgcgttgtag

SEQ ID NO: 126183 - DNA, 198 bp, Enterobacter cloacae
atgaacaacaatccagtggccgcgaagtgtaacattttccccttctcgcgggcagcgaatccgccgtcgcgcgcgccaaattgcgagctaatgcgcaaagttcctggagccatcgcgattttgatggtttataaagtaaaactaatttgtaaactcaccgcccggctcttgcgaaaatctatagcggtgctaatgtga

SEQ ID NO: 126184 - DNA, 381 bp, Enterobacter cloacae
atgacgcctttcgaacacgacattatcgacctccacattgcgcttgaagcatggttaggcaaaggtgaaggcgaggccgacgccctgctcgcccgtttccgtcccgattttctgatgatcccgccgggcggtgtgcaggtcgactataacggcctggccagttttctggaaaaacagcgcggaagccgtcccgggctgaacatcgtcattgacgagttaaccacgatccagagcggcgaacggggtgcagtgcttcactaccgggagacgcaaacccggccagacctgcccgttaacgtgcgctggtcaaccgcggtgcttaatcaggaaggtgacaaaataacctggcgtctgctgcacgagacggcgacgcagccgtaa

SEQ ID NO: 126185 - DNA, 2217 bp, Enterobacter cloacae
atgagcagcaacggcgttcagctgcgggtgcgcggcaaggtgcagggcgtggggtttcgtcccttcgtctggcagctggcgcaggcgcttcaactgaccggtgacgtctgcaatgacggagagggcgtgctggtgcgcctcgcgggtaatgggggggcctttaccgcgaggctgcatcaggactgcccgccgctggcacgcattgatcgcgtggaagcgcagccgtttacctgggcgcacgtgccggaggactttaccatccgccacagcggggccgggacgatggacacccagattgtccccgatgccgcgacctgtccggcgtgtctggctgagatgggcgacccacgcgaacgccgctatcgctatccgtttatcaactgcacccactgcgggccgcggtttaccattatccgcgccatgccctacgaccgcccggccacggcaatggcgccgttcccgctctgcgggccgtgtgaagcagagtaccgtaatcctgccgaccgccgttttcacgcccagccggtcgcctgcccggactgcggacccgcgctggcgtggcgtgcgggcgacatgaccgctgagcgcgaggctgcgctgcgcgcggcggtggcgatgctgaaaagcggcggtattgttgcggttaaagggctgggcggctttcacctcgtctgcgatgcgcgtaacccgcaggcggtcgcgacgcttcggtcacgcaagcagcgcccgtcgaagccgctggcggtaatgatcccacatgcggatgacctgccggagacggttcaggcgctgctacgctcacccgccgcacccattgtgctcacgccaaaagcctggctgcccgcgctcccggaaggtatcgcacccggtctggattccgtgggcatcatgcttcctgcgaacccgctgcagcatcttctgatgatggactgccagcgcccgctggtgatgacctccggcaacctcagcggcagaccgcctgccgtcaccaaccgccaggcactggatgagctcagcggcatcgcggacggcttcctgctgcataaccgcgatatcctgcagcggatggacgattcggtgatggatcgggacggtgcgatgctgcgtcgcgcgcgcggctttgtgcccgatgccatcacgttgcctgccgggttcgacaatatccccgccatgctgtgcaccggggcggagatgaaaaacaccttctgcctggtgcgtgggaaccaggcggtgctgagccagcattttggcgatctcggtgacgagggtgtggaagcgcagtggcgttcggcgctgtcggtgatgcaggacatttacgcctttcagccgacgcgcgtggtgtgcgatgcccatccggggtatcgcgctcgccagtgggcgcaagcgcaggcgttgccccttgaagaggtacaccaccatcacgctcacgcggcggcgtgcctggccgaaaacggctggccgcgcgagggcggagacgttatcgccctgacgctggacgggatcggcatgggggaaaacggcgcgctgtggggtggagagtgcctgcgggtcagctatctcgaatacgcgcatctgggtggcctgcctgccgttgcgctgccgggcggcgatctggcggcgcggcagccgtggcgcaatctgctcgcccactgcctggcgtttgtgcctgactggcagcagtacccggaaacccacgcggtgcagcgccagaactggccgctgctggcgacggcgatccagcgtggcctcaacgcgccgcgggcctcgtcctgcggtcgcctgtttgatgcagtcgcctgcgcgctgggtatcgaaacccaatcctgggaaggtgaggccgcctgccggctggaagccctggcatcgcagtgcgcgggtgtcgaccatccggtgacgctggacgcggataatctcgcgcttttctggcagcagtggctgagctggcaggcggagccctgcgcgcgcgcctgggcgtttcacgacgcgctggcaaaagggctggcgcagctcgccgcgtttcacgcccggcgcctgtcgctgtcgacaatctgcctcagcggcggggtattgcacaaccgtctgctgcgcgcgcgtctgcgtcattatctttctgactttacgcttctttttccttcgcgcctgcccgcaggtgacggagcgatctccttcgggcaggcggtggtcgccgcagcccggtcatgtttacaaaggacttaa

SEQ ID NO: 126186 - DNA, 138 bp, Enterobacter cloacae
atggcagggttgaaaagggagtgtggcgaaatgtttctgcaaaacgccctctcccgtggaagagggcatcaggccgcaccgtgtgcgcagccatgccgggtggcggcgttgccttacccggcctacccgtcggggtaa

SEQ ID NO: 126187 - DNA, 10062 bp, Enterobacter cloacae
atgagccaaatctctgttatttcaaaacttactggcgtagaaacgaccctggaaggcacacaggttacgctgaaccattcctctgtcgttgagcttcacgtcgagcgagcgagcgtctcccacttcgcgcgaagcggtaacgacctgctggtgacattgcactccggcgaggtgatcacccttaaaaacttctatgtggcggacgcgcagggcgtgagtcagctggttctgcaggacagcaacggcgcgttatggtggattgaagatccgaccggggccgccacgtacgaatctatcgcgtccacggacgtgctgcttgcggcgtcaggaagtgacgctggtggcgccgccatctggccatgggccctgggtggtattgccgctgcagggggcatcgcggccgcggcaagtagcggcggtggcggcggtggtggcagcagtaacaattcggccgatccggatacgactgcaccaaatgcaccttccggccttaagttctcctcagacggtaaaaccgtcaccggttccgccgaacccggcagtaccatcacgctgaaagacgcgaacggcaacgtcattggcacaggaaaaacgggcagcgacggcaactttagcgtctccctcgggacaccgttgaccaacggcgagcaggtaaccgccaccgcaacggataacgccgggaatatcagccagggttcaagcgtcaccgcaccggatctcaccgcacccgatgcaccaacgattggcagcgtaatcgacgatatcgcccctcagacggggacggtgatcaacggcggcagcaccaacgatcggcggccgcagctctccggcaccgctgaagcgggctccaccgtgacgatttatgacggcggaatagccattggctccgcggtcgtcgccagcaatggcacatggacattcaccccgtccgtcgacctgaatgaaagcacccaccagattaccgtacgggcaaccgacgccgccggcaacaccgggccagcctcaccggtattcaccctcaccgtcgatcttacccctccgacagcgcccaccgcgattgtgctgctcgacgatacgggccttatccgaggaacaatcacgtcgggcttgcctaccgatgcctcgcagccgatcctggcgggaacgggcgaacccggtggaaccatcaccatttacgataacggcgtggcgattggtacaacgacggtgctgcctaacggtacctggagcgttaccccagggggcccgctcccggacggaacgcactcgatcaccgtcactgaaaccgatgccgccggaaaccagagtacggcctctgagcctatcatctttaccgtggacaccacgccgccgtcagccccaggaaacctcgtggtgtcgaatgatggcggcaccatcagcggcatcggagaagcaggcagcacggtgaccatccgtgaaggcgatttcactcttggcacagtggttgttgatagccaggggaacttcagcctgacgctgagcccgccgaggatcaacggcgaaatccttaccgctgacgccaccgacacggcgggcaacaccagtccaaccacctccgcggcggcaccggacattaccccgccgcagaccccggtcatcctgtcggtgattgatgacgtgcaggccaccaccggtcccgtggcccagaatgggctgaccaacgaccgggcaccgaccctgaacggcacaggcgaggcaggctcgaccatcacgatttataacggcagcgatgccctcggtacggtggttgttccctcctccggccagtggagctttacgccgcccacaccgctgaccgacggcacctgggtgctgaccgcgaaggcgacggatcccgccggtaacccgagcgggatatcaaatgcgtggacaattaacgttgacggtacagcgccaaccgccccggtgattttacaggttgtaaacgatattccagggcagaccggcgcgatcgacttgaacgggaccaccaacgacgccaccccgacgctcagcggtaccgctgaagcaaacgcgacgatcagcctgcgcgtggacggtgttgaaattggtacaaccgtcgccaatggcctcggcgtatggagctttacaccttcctccccaatcggtgaaggcccccacgctctgaccgccgtcgcgaccgatgcggcaggcaaccccggccccgtctccaacacctggaccctgacggttgacagcgtcgcgcctggggcgccggtcattacccaggtgctggatgatgtgccggagcgcctcggcgccctcaattctggcgacagcaccaacgacaccacgccaacgctcaacggcacggctgaaccgggctcaaccgttaccattcgcctggatggtgccgatcttattacgatcccgatcgacggcagcggcacctggacctatacccttcccacgccgcttgacgaaggtcctcatacctttagcgttgtcgccaccgacgcggcgggtaacaccagccagccgtcagacgactttaccctgaacgttgatatcactgcgccagcggcggccaccatcgtcaccgtgaccgacgacgtcggcggcgtattgggttcgctcaacagcggcgataccacggatgacactcgccccctgctgcagggcactgcccctgcagacacggtgatcaccgtctatgacggcacgactctgcttggcaccgccatcctcaacggcagcggcggctggagcttcacgcccgtgaccccgctcaccgacggtccgcattccctgacggtgcacgccacggacgccgcgggcaataccaccatctcaacgccatttgaactgacggtggataccgttgcgcctgccacgccggatatcccggccattaccgtcaatcctgacggcacaacaacgccgctgaatccgggcgaaaccacccgcgacaccacgccaaccctgagcggtaccggcaatccaggtgataccgtgacgatctacaacggcggcgtcaaacttgatgatgtgctcgtggacggtaacggtaactggacatggacaccagccaccccgctacctaacggaacctatgacatcactctgaccgtcaccaacatggacggcacgggcaacgaaagcgccccgtcgcagccggtcactattaccattgataccgaggcgccggctacgcctgcggcaccgatcgtcaccgacagcgtcacccagatcaccggccccgtccccaatggcggcaccaccaacgatccgcgcccggtgctgagcggcaccggtacgccaaacgacgttatcaacatcactgacaccgttaacggtacaccgaccgttgtgggcaccgtcacggtagacagcaacggcaactggagctggcgtcccggcagcgacattgccgagggcagccacgcctataccgccaccgccacggatgaagcgggcaacgtctctgacccgtcgtcagcgattacgatcatcgtggataccctggcgccggatacaccggtgattagtgcagtgggcggcgcgcctgatggtggctttatcaccgataccacgccgacagtgggcggaaccggcgttaacggtgagacggtgatcgtctacaacaacggcgtcgagctgggccgtgtcgtggtggtgaacggagaatggagcctgacgcttccagcgcaaacggacggtccgctgaacattaccgtggcgggcgtggacacagcgggcaacctcagcgcgccgagttcggtctttaccgtcacgctcgataccgttgcgcccgggataccgcaaattaatgccgtctcagacagccagctcaccaacaacgtgctctacacccgcgacggcacgccgaccctaaccgggaccggcgagcccggcaccaccgttatcgtctccgtcgacggtactgcgtcaggtgtgccgatcacgatccagccggacggcagctggagctggaccgcaggcacaacgctcctggatggttcacatacctttactgtctcgtcagtcgatcaggcaggcaatccgtcaaacggttcagcgtcactgagcgtgacggtggatacccaggacccaaccgcaccgggcaatcttagccttgctccagaaggtacaccgctgaccggtaccgccgaagcaggcgcactcatcaccgttaaggatagtggcggtaacgtcattggtaccggggtggcgaccggcggcagtttctccattgcggtcagcccggccccgcaggatggcgcgaccctgaccgtgaccgcgaccgatgcttccggacgtaccagcgttgatgcaacttataacgtcaccggtacgcttccgaatcttcctgacgtacccgtgatcgtggccatcaacgatgacgtcgacccaatcattggcgacgtgaaaggcaaaacgaccaacgacaccaccccaaccctcaccggtacggctcaggcgggaagccagatcgctatctacctggacggtggcgtgacgcccgtctcgacggtcacggccgacggcagtggcaactggagctatacgccggccgcgcttggcgaggggctgcacacctttgaggtgactgcgacccttaacggccagaccagcggccgctctccggcggccagcgtcaccgttgaccttaccgcgccgggcacgccgaccatcggcgccgtgattgacgacgtcggcccgggcaccggcccgctgaccagcggccagaccaccaacgacaaccagccgaccctcaccggcaccggcgcggtgggcgataccatctccatctacaacaacggcgtgctgctggacagtgtggtaatcggcaataccggcacctggagctacaccacgcctgtcctggcagagggcaatcacgtcctgaccatccgcgagaccgatccggcggggaaccagagcggtccttcggcgggcttcaccgtcgtggtggattccgtttccgccacgccggtcatcaccaacgtcacggataatgtgggcaatgccgccaccacggtggtcagcggcgagctcaccaacgacgccacgccaacccttacagggacagcggacgcaaacagcgtggtgactattttcgacggcggcacccagattgccgtagtgacggctgacagtaccggcgcatggacgtttacccctgataccgccctcggcgaaggctcgcacagctttaccgtccgggcgaccgacccgcagggtaacctcagcgcggtctccgcgccctggagcgtggtgattgacctgactgcaccgacggttccgacgctggataatgtgagcgacgacgtccctggcggcgtccagggtaacctcaccagcggccaggtgaccaacgacagcaccccaaccatcagcggcaccgggctggcgggcagcactatccacatcatgaataacggcacgcagattggtacaacgaccgttgacggaagcgggaactggtcctttacgccgaccgcgccgctgggcgacggcagctacgccctgcgcgcgtatgcaacggatactgcaggcaacgcctcggccaactcatcggtcttcacctttaccgtggataccgcagcccctggtgtaccggtagtcaccagcgtggttgacgatatcggttcggtcaccgggacgctcacgtcgggtaacagcaccaacgacgcgcgtccgaccttcagcggtacgggcgaagtgggttctaccgtgcacgtgctcgttgatggcaacgaaattggcacggcggtggtcaatgcccagggcaactggagcttcaccccgggcagcgatctggccgaaggtccacacgccatcacctttaacgcgaccgatgcggcaggcaacaccggcgccacaacggcaccgtttaacctgacggtcgatacgggcgtgccgttagcgccggtcatctcgaccgcgggtgacaacgtgggcagtattcaaaccccgctctcttccgggcagagcaccgacgacaccacgccgacgctgaacggcaccgcgaccgccaacgccacggttaccgtgtatgaaaacggacagccggtcggcaccgtgcaggcggacggcaccggcgcatggagctttacgccatcagcgccgctcacaagcggcagccatacctggaccgccacggtcaccgatgcagcgggcaacgtcagcccgacctcgccgggctttaccctgattgttgataccgcggcaccgaacgcgccggttatcagccaggcgatagacgacgtgggcagcatcaccggcccgctcacgtccgggcagacaaccgacgacaccgtacctcggcttgttggaaccagcgaaccgtttgccaccgtgaagatctatgagggcaccactctggtcggcacgggcaccgcggacggcagcggcagctggagcatcgtgctcacccctccgctgaccgcgggcgcgcacagctttaccgcgcaggccacggatgcggcaggcaataccagcgtgtcgtccaccagcttcagcctcaccgtcgacaccacgccgcctgcgctgccggtgctgaccagcattctggatgacgtgggcaatgcggcgacgccggttgccaacggtgggttcaccaacgacgcgcagccgaccctcagcggtacggcggaagcgggagccacggtgaaaatctttgataacggcgtacagatcggcagcgtgacggcgaccggcggcgcgtggagctttacgccatctccggcgctgagcaacggcgcgcacacgttgaccttcaccgccaccgatgcggtgggcaacgccagcgcccccaccgccggatatgtcattaacgtcgataccctcccgccagccgcgccggtcatcagttcggtcattgatgatgtcggcagcgtcaccgggcccgtgaccggtacgaacccgactaacgacacccgtccaacgctgaacgggactgccgaagcgaatgccacggttcggatctacgacggcatcacgctggtgggcacggtcaccgccgatggcagcggcaactggaccctgccacaaaccaccaccacgttgacgcagggcacgcataactttaccgcgacggccaccgatgcggcgggcaacaccagcgtggcgtcagccgtgacgacgattatcgtcgatacgaccgcgccaacggcgccgaccggaaccttcaacgccgacggtagcatcctgaccgggagcgcggaggcgggcagcaccgtcactatccgccttgcggacggttcaacggtgaccgccattgcgggcagcaacggcacctacagctacaccttcattaacaaacagatcgaaggccagacgctgcagatcaccgcgaccgacgtcgcaggcaacacctccctgccgggctctgcccttgcgccggtggtgccgctctccgccagcaataacgttgaggagctgaacctcagcaccacggcgaccgtgaccaacagccagtacagcgactacggcttcctgctggtcggcgccgtgggcaacgtcctgacgctgatcggtaatgacaccgcgcaggtgaacttcacggtgggcaacggcggcagcgcggacatcgtggtaaacgccaacgccacgggggcggtgctctctctgctcaatacccttgagctggtggtgcagcactacgtcaacggtgtctggacaaccgtggtggataccggccagccgcagtttgccgatctcctgaccctcggcgccaccggcgtctcgctgaaccttaccgggctggccgacggcaactaccgcgtgctcagctataacaccaacctgctggcgaccggttcctacaccagcctcgacgtggcggtgaaagagaccggtccgggtacggtcacgggcgataccagcctcaacggcaacgtgatcctcgatacggacccgaccgccggcagcgacaacgcgccggccggcaccactatctccacggtcactaacgcgcagggcgtgaccaccagcgtgaacgccgacggcacggtgatccagggcaaatacggtacgctgaccatcaaccgcgacggcagctatacctacaacctgaccgacaccagcgccgcggtcgttggccggacggagagcttcacctacaccatcacccataacggcgtcagcgcgtcggcaaacctggtgctgtctctgggtgccggtacggtcatcaacggcattgtggcagtagacgacacggcctcgctgacctttgacaccaccgtgagtgaggtgaataacggcgcctcgtctcagaacggttttaccctggtgggcattaatctcggcagcacgctggggcttaacctgctggacgacctgaccaacccgattatttacaacgtggaggaagggacgacccgtaccatgaccatccaggcctccgtggggggcgtggcgctggcatcggtgttcgatctgtacgtctataagttcaacaatgcgacccagaccttcgagcaggttcgcgtcgagtcgggctggctgcgcgcgccgctgctggggggcacgtcaccgcagcttacgctgaacctgcctgccggggagtacctgttcctgctgaataccgcgtccgggatcaccgccctgacggcctacacgctgagcgtcctgcaggaccatgtctacagcgtggcgagtattagcgaaacgaccaccggcgacgtgctggcgaatgacccggttccggcgggcacgctggttaccgaagtgaacggcgtgacggtcaacagcagcggcaccaccaccattcagggggaatacggcacgctgaccatcaatgcgtccggtcagtacacctataccctgaggaacggcgtaggcgcggaccatatcagcacgccggatacgttcgtctacaccgttaccgcgcctgacggctcgaaggatacggcatcgctcaacatcaccccaaccgcgcaggcaatgaatgcggtcaacgatgtcagcgccacgatggaccttacctcggtgcaccacacgtcggtctactcggataccaccgtgggcgtcgccagctggaccacggccctgctctcgtcaacccagggcagcggcagcggaacctttgtggtcgacccgaacaccgcgctgcacaacgcgtcgctgcactttagcgtggcctcgctgctggcgctgggcgggctgacggtgaactggacgattagcgatgccaacggcgcgatccgcagcggctccttcagcggcgcctcgctgctgggcggcagtatcgacgtcccgctgaccgggctggatctcaacgccgggacctatacgctgagctttaccggtagcgtaccggggctcagcgttgggaccatcaccatcacgccaagcgtaaacggcaccacctactcgctgagtaatttcgacgtcaccggcagccacaccgtcaacggcaatatctttgacggcaccgactctggcggcgtgctggatcagctccactcggtggatacccgtctgagcgtgaccggctacaacggcgtgaccaccacgctggatccgtataccggcagcgcaacggtgaacattgtcggccactacggcacgctggcgatcggcgctgacggacactacacctataccctgaacagcggggtatcgctctcaaccatgacctcgaaggagaccttcaactacaccctgaccgactctgccggaagaacggataccgctacgctgaccatcaatatggcgccgcagttcatcagctcggaacataacgacgccatcaccggtacggcctacggcgatacgctgatttaccaggtgctgaacagtacggtggggaatgccacggcgggtaacgtcagcagcgccggaggcgatcactggaccgggttctcgctggcgcagggagacaagatcgacattggcgatctgctggtgggctgggacggtaataccgcctcgttggggaattatatccatgtcacacaaagcggtagcaacactgtgatctccatcgaccgtgatggtgcagggtccacctacactaatactgcactcgttacgcttgataacgttcagaccacgtacgacgagcttgttaaccagcaacacatcattacctga

SEQ ID NO: 126188 - DNA, 210 bp, Enterobacter cloacae
atgttccccggtgaaagcatggagcaggtgacccagtgttccggcgaacacaatacgctgagccaggatttcgtcatagtagagagggtctaccacaacgacaaaattaagatcggagtattgatcgaacccgccatgaacaagcgagccgccagcgagaagggagtgaatctgcgatcattccaccacaatcactacgtccagccctga

SEQ ID NO: 126189 - DNA, 777 bp, Enterobacter cloacae
atgaactttgcagaacgccactatcagcatgagcctcttcttatcgccaacgtctgggatgccgccagtgctgtcgcagcgcaaaaagcaggctaccaggttctgggaacgtccagtgcagctatagcgtccacactgggatatgacgacgggcagggagtgccgtttgatgagttattttatatggtcacccggatccgggctgccagcagcctgccattgagcgttgacatggaagcagggtatggtgattcagccgaagagatagcagacaatctgcggcgtcttgctcagacaggcgtcgcaggcgttaacctcgaagacagccgagtcataaacggggttcgtcagcttgacgatgcctctgatttttcccgtaacctgagaacagtatgcgatacgctgagaagcgaaaattacagcctgtttctgaacatccggactgatacttacctgctcgggcatgaagacgcgttgcaggagacgatattacggggtcaacgctacaaagctgcaggtgctgacggcctttttgttccctgcctgacgtcagagaaagacatcagcctcattgcagaggcaacgggattgcctttgaatgtcatgtgtatgcccgttcttccgtcattcgacaggctgaaacgggcaggggtaagccgcatttcaatgggcaattttgttcattcagcgatgcagtcaacgctgactgatgtcatgcatgcgatccgatctcgtcagacgtttgaaggactttttggtgatgaaaataaccgataa

SEQ ID NO: 126190 - DNA, 1047 bp, Enterobacter cloacae
atgaaaataaccgataaaaatctgtgtgatatctggtatcaggcattacttgaacgtgcttcagattacactggcgtgttttttgttggcgtcaaaaccactggcgtattctgcatttcggtatgccgggcgcgaaagcccaagcgcgaaaatgtcgaattttataaagatgccaaatctgccctggcggacggctttcgtccctgtaaggtctgcagacctgcggaaaatgcgcacagcgcgccattattcgttgagcaggcgctcgcgcttgtcaggcgcgatatcaaatcccgtgtagcagacgcggagcttcgtcagcatggcatcagcccggagcgggtaaggcgctggttcctgcaacatcacggcatcacttttcaggctttccagcgaatgcagcgggtgaacgttgccttgcaggagctgaaaagcggacgagcggcgactgacgttgcgctggacaatggctatgaatcgctgagcggctttggttatacctacaagcgtcttactggcgcagcgccgactcaggcaacccaggtgatagtcattcaccggtttaccacgacgcttggtccgatgtttgtctgcgcgacagaccggggagtctgtctgctggagtttaccgatcgccggatgttagaaacagaattccgcgatattcagcgtttatttaacgccagaatcgtcaccggcgaaaacagccatacccggcagacagtaaaagagatcggcgagtattttgccggaacgcgccgacagtttgatctggctttagatgctccgggcagtgattttcaacaatccgtctggcatgcgttgcgtgctgttccctatggacagacctcacactatcaggccattgcactacggcttaataagccaaatgctgtgcgcgccgtcgctgccgctaacggtgccaaccggattgcgattgtcatcccctgtcacaggataattggaaaagatggggcgatgacaggttacggaggggggatttcacgcaaagaatggctcattgagcatgagagaaataatgtttaa

SEQ ID NO: 126191 - DNA, 2334 bp, Enterobacter cloacae
atgaaaatgaacgtaacggaaaccgtaaaacaggcgtgcggccactggccacgcattctcccggcgctgggtgtgaaggtcatgaaaaaccggcatcaggcctgtccggtgtgcggcggttctgaccgtttccgctttgacgataaagagggacgcgggacatggctctgcaatcagtgcggcgcgggtgacgggcttaagctggtagagaaagtattcggcgtaaccgcatcagaggctgccgagaaggtgaacgccgtgaccggcaacctgccgccggttgccccggaagtgattgcggccgcagaggctgaaacggaggctgaccgcaaagcggccgccgcgctggccgtcagactgatggagaaaacccgcacggccagtggcaacgcctatctgacccgcaagggcttccctgaccgggaatgtccggtactgtcggtcatgcataaaaccggcggcttgacgttccgcgccggtgatgtggttgtcccgctatatgacgataccggcgcactggttaaccttcagcttatcagttctgaggggctcaaacgcaccctgaaaggcggtcaggtaaaaggagcgtgtcacaccatcgaaggaaaaaaacaggccggaaaacgcctgtggattgcggagggctatgcaaccgcgctcaccgtgcatcacctgaccggcgaaaccgtcatggtggcactgtcgtccgtgaacctcctttctctggcgagccttgcccgtcagaaacacccggcctgtcagattgtgctcgccgccgaccgcgaccttaacggcgacggccagaacaaagccgcagcggccgcagaaacctgtgagggtgttgttgccctgccgccggtgtttggtgactggaatgatgcgtttatgcagaatggctgggaggccacgcgaaaagcgatttatgacgccatccggccaccgatgcaaagtccgtttgataccatgagcgaggcggagtttaccgccatgagcgccagtgacaaggctctgcgggtgcatgagcattacggtgaagcgctggcggtggatgcgaacggccagctcctgtcccgctatgaagcagggatatggaaagtcgttcagccgtccagtttcgaacgcgacgtagccgggcttttccagcgcctgcgcgccccgttctcgtcggggagaatcacctcagtggtggagacgctgaagctgattattcctcagcaggtcgcaccggcacgccgtctgattggttttcgcaacggggtactcgatacccaaagcggcctgttcagcccacacagcaaatcgcactggctgcgcacgctgtgcgacgtggattttaccccgccggtggaaggcgaaatgctggagacccacgcgccgaatttctggcgctggctcgaccgggcggccggtaaaaatccacaaaagcgcgacgtgattctggccgcgctgtttatggtgctggcgaaccgctacgactggcagctctttctcgaagtcactggtcccggcgggagtgggaaaagtattctggccgaaattgcgaccctgctcgccggagaggataacgccacgtcggccgatatcgacacgctggaagacccgcgcaagcgtgcatccctgattggtttctcgctgatacgtctgcctgaccaggaaaaatggagcggtgacggtgcagggctgaaggccatcaccggcggtgatgcggtctcggttgacccgaaataccagaacccgtattcaacgcatattccggcggtcattctggccgtgaacaataatccgatgcgcttcaccgaccgcagcggcggtgtgtcacgtcgccgggtgattattcatttcccggagcagattgccccggaggaacgcgacccgcagctcagggataaaattgcgcgcgagctggccgttatcgtgcgccagcttatgcagaaattcagcgaccctatgaccgcccgcgcactgctccagtcgcagcagaactccgacgaggcgctcagtatcaagcgcgatgctgacccgacgtttgatttttgcggctatctggaaatgctgccgcagaccaacgggatgtttatgggtaatgccagcatcgtcccgcgcaattaccgtaaatatctctatcacgcgtatctggcctatatggaggctaacggatacaggaacgtgctcagcctgaaaatgttcgggctggggctgcccatgatgctgaaagagtacggcctgaattatgaaaagcggcacacaaagcaggggatacaaactaacctgtcgctgaaagaagaaagctacggcgactggctgccgaaatgcgacgaacccgcagcgacataa

SEQ ID NO: 126192 - DNA, 321 bp, Enterobacter cloacae
atgaaaaagccattaccccccgtattacgcgccgcgctgtatcgtcgcgccgtggcatgtgcatggctgacagtatgcgaacatcagcaccgctacccgcacctcaccctcgacgcgctggaaagcgccattaccgacgaactggagggcttctacctgcgccagcacggcgaggaaaaaggccgtctgattgcctgtgcactgctggaagatttaatggaagccggaccactcaaagccgcgccctcactgtcctttctcgggctggccgtgatggatgaactctgcgcccgtcacatgcaatcgcctgttgtgcactga

SEQ ID NO: 126193 - DNA, 219 bp, Enterobacter cloacae
atgtttcactgtccgttctgcaaaaccagcgcacacgcccgcaccagtcgttatctgtcagagaacgttaaacagcgctatcaccagtgcgtgaatatcgagtgctcggcaactttccgcacgcttgaatccgttgacgggattatctgttcgccgccgacagagccggtcattcctgcatccgaaccggcagccaccgttaaccgtgcgggcgcttaa

SEQ ID NO: 126194 - DNA, 426 bp, Enterobacter cloacae
atgaacgtcaaaaccaaccttgcatttgtgcatttagataaatcagaaggaaagcaatttgaaacttctcttcctaacacaaatatagcttattacctctgcatcctactgtttttactcgctcctcatttgacttcatataaccatttactcccaacaataactctgcaccagttacatatccgtgcagagcagcaacacgttcaagtctcgaaaacccacattattaatggcgcgcaatgctatccccgccacgcctgcccgcttaagggggcgcatttaatgcaggtgcatgaccggcatcagggcgcgccagtgctggcgctggcgggggttccagtatcggtaaaacgcatgcaaaaccatgcaccttatgcatgcatggcttttttaggggaaaaaggcgggattttcgggaatttttga

SEQ ID NO: 126195 - DNA, 2223 bp, Enterobacter cloacae
atgaataattttgtcaagaaagaattatttgaagtggcgcttaacaaagtgacgggttttgaatttgaggactttgcatgtgcatttatggcagccttagaaggaaggaattttattccattgggaggtgttcatgatggcggtgctgatggccttagtgataaagagttgtatcaggctgaatcaaccaatgttttctatcaaatgacgattcaatcggattacaagtcaaagataaggatgacgataaataggttaaaggatttcaatagaacacctagagtgctctattatgtgacatctaaggtaatatctcatattgacaaagaggaggatgaattatctgaagagttaggggtgattatcaaaataagagacgcaaaatacataggtgtccatataaacgacacccaagctactaaagctgcatactatcagtttttggctagtaaaaccgaacatttatctaaagtaggtgcctctacagaattggggttttcagattttgttaaagatccttcagtttttgtttttcttcaacatgaaatgtcagaatcacaagggaataggaagttaatacattctattactgatacattaattctttgggcattacgtgacaccgatccagataagggcttatttatgaataaagaggagattaaagaagctataatttcaagctttccttgggctaattattttatcaataataacttaaaaaataggctgagtagtttaaagtcaaaagaagttaatggcagagaaattcgatggtacaaaaatgataaaaagtattgtttgccatttgaaacaagagaagcaatcaaacttgagaactccgtagatgagttgcttgcgattgattttatgaaggaaattaaagaacagtgtaatttgaaatttagtttgtctcctaaacgctgccaagtgatttctgaacttactaaggtaattattcagagggttttcgaaaggcagggattaatgttagcgtcctttatttcagatcctgatagttctgtcaatgaaaaagaacttgtaataagcgattgcattgaggatgtgcttataaaatcaaaaataaaaccagaggatatcgcagactatagaaactatattgaaaaaattttaaatgatgttttttatcacagcacagaaaatcaaagaaaatatttactacaactctctaaaacttatgttttgttgtttacattaaaagcagacccgagaatagttgactactttagttcaatgtgtagtaaatttatgctatttttaggttcagatataattgtcaaagctttatctgaaaggtatttacaaaaagaagatcagcaatgtaaaaacttacttcaatctgctgcgttgagtggtgttaagttaaggatgtcaactgcagttttggaagaagtgtatactcatataagaaatactaactacgagtttcataatcactttaggacaattgaaaaccatataactacagagatagcaagaaatagttcaaaaatacttattagagcttatttttatgcccggaaagcaggtttagtacgcacttgggagagttatattaatcagtttgtaagttatgatgaaattactaataactctggcagggaagaattgaagagatatttggtttcagaatatagtctaacttttatcgaaaatgaggaactatcctcctactcaaatgcaaaagaggtaaaggaacttgcagatactttagttgaaaatgatgagaaaaagcatgatgttttagcccataatagtgctttgttagttcatggtatttacgggttaagaattaaaaacaatgaatctaataacggcagtccatttggatatggaacttggtggttaacaaatcaaacaagaattcaaaagcatactgcagaactcgtgcgaaaacattcttctaaatatattatgaggcctgagtttcttttgaattttttgtcactatctccatctgctgaacaagttaggaaaacctatggaaatatttttccgagtaatattggtatccaatttggacatcgtctaaaagaagatgcttttcatgcagttttagataaggtcaaagaatggtcggattatgagcctggacgggttacggctcttgtgtctaaattatctgacaccattaagtcagagcaatataatatagaagaaagctgggatacaattaaagaaaaaattgaagaggaagattaa

SEQ ID NO: 126196 - DNA, 1197 bp, Enterobacter cloacae
atggcgcggattacacgccccctcaccaacaacgaaattttaaaagctaaacctgaagataaggactacacactgcatgacggtgatggccttttcatcctaataaaaacgtctgggaagaaactgtggcgatttcgttatcaacggccggatagtagtagccgtacaaaccttagtcttggctcatatcctgctttaactctcgctgccgctcgtcagatgcgtgatcagtatttatcgttgctcgtacaaagaatcgacccacaaaggcaacaggaacaagcctctgagcagcggcaaatcgaattggagagcattttctctgtagttgccgggaattggtttgagcttaagagaaaaagcgttacagaggattatgcgaaggatatttggcgatcgctggagaaagacattttccccacgatcggcgagattcctgttcaggagctcaaggccagaacgattattgaagcattggaaccaattaaagctcgcggggcgcttgagacagttcgccgcttggttcagcgcattaacgagatcatgatttatgcagtcaatactggccttattgatgcaaatccggcatcaggggttggaatggcgtttgagaaacctaaaaagcaaaacatgccgacgctgcggccagaagaattgcctaagctcatgcgttctttgatcatgtcaaatctgtctgttcagacccgttgtctgattgagtggcaacttttgaccttagcacgcccttcagaggcttctggttcacgatgggacgagatcgatctggaggccaaactatggataattccagcggaacggatgaaagctaagcgtgagcacatcgtaccattatctcctcaggcattagagattttaaatgtgatgaaaccaattagcgcacatagagaacatatttttcctagcaggaatgatcccaagctaccaatgaatagccaaactgcaaacgcagcattaaaacgccttggctatggtagaaaattagtcgcacatggacttcgctctatagcaagtaccgctatgaatgagcaaggttttaattcagatgtaatcgaagtagcattatcgcatatcgaaagaaatgaagtacgaaaagcatataatcggagtctttatttaaagcaaagacaagaactaatgaactggtggggcaatatggtctcggcttttaattattag

SEQ ID NO: 126197 - DNA, 324 bp, Enterobacter cloacae
atgtcaactgccgtgagcacagaaaaagggtttagcatggttgaggtcctgctggcgatgatgctgctggtggtggtcgtgacggcactgtcggggtatcaccgggcgctggcggcgcggttcaccgtgtttaatcagtatcgccagctctggcaccatgcctggaaccagtctcagctctcaacaaatgttctcccggcaggctggcaggccagtcgggggcagacaacgctcgcaggatgtgtcagcatcacggttacacttatttctcctctgggtcggcgcggtgagttaacgcgtctgcattgcccggttagccagtag

SEQ ID NO: 126198 - DNA, 555 bp, Enterobacter cloacae
atgagacagggcggcttttcgcttaccgaagtgctgattgctacggccatcagcagcctgttattgataagtgcatcgcgctttttacccggattgcagcgggcggtattactgcaatctgcccagcgagagctggaagaagaggtctggcaacgcctgttcgccctcggcaaacagcttcagcgtgcggggtactgcgcgggaaattgccagggacaggcgctgacgatcggcaggcaggggcgctgcatcattgcgcggtgggatgccaacagtaacggctactgggatagcagcgcatcagaaaatgacagcaccggttttcgtctggaatcgggggcgctggaaaccctgcgtggcgcgacgtcgtgtgaaggaaaagggtgggaaaagctcacggacccggacaggcttacgatagcacactttgtggtgaggagagtcgaacatgccggttttgcgccagagctgaatatcgaactggccgcgaggcgtaaagatgaaaaaggggaaccctggcaggcgttgtatacggtcacggggtacaacctgtga

SEQ ID NO: 126199 - DNA, 495 bp, Enterobacter cloacae
atgttcacggcgcttcgccacactcccggtatgaaaaaagagaacggttttacgcttatcgaaacgctggtcgccgtttcgcttgtcgtcatcctcagcgcttcaggtctgtacggctgggacagctggcaacggcatcagcggctgtggcaaaccgccagtcaggtgcgagattacctgctgtttctgcgcaaccatgccaaccgccacaaccgcgaccatcaaatcacccgtcagcgggttggcgacagggactgtctggtgagctctgccgtgcagggctgtgagaaggacagcccctttgtgctgctccccctctggcctgaggtcgcgatcggcgaggtcacgccgtcgctggggttctatggattacgggatacggcatgggcagggcggatacgcgttcaaagtcgtgccggagactggctgattatcgtttcagacggagggcgcatcaggatgtgtaaggtctccgagggaggacaatgtcgatga

SEQ ID NO: 126200 - DNA, 486 bp, Enterobacter cloacae
atgaataaggctgtcatcctcccgctttacaaggcgccacacttcgcagagcaggttaccgactggatctggcaggcctttggcgaagggcttcctcgggaatttttccacagcattgttgagcacagccagacgcctggggcattaccgttgacgttcattgccgttgacggcgaacagcttcttggcacggtgggactctggcgctgcgatttgatcacccgtcaggatctctgtccgtggctggcggcgctctacgtagacgacgcggcgcgaggcaaggggcttgcgggagaacttcagcggcatgttatcgcttacgccgcgcagtccgggtatgaggagctccatctctggtctgcctgccgcgacttctacgaacgttacggctggcagtatatcggtgatgggctggaataccccaacacgcgggtgcacctctaccgttattcgctttgcgcttctgcaggcgacgcaacggagtga

SEQ ID NO: 126201 - DNA, 1125 bp, Enterobacter cloacae
atgtcagaaatggatttcaaaaaaagcacagatattgatttcccccattattccacccgtaacgaacacgctaaagaaatagatcttttaggtttattagcggttttagcggcggctaaaaagcgcatcgtggccgttacccttgcttttgctctcgtggggctggccatttcatttttgctgccgcaaaaatggaccagtaaagcggtgatcaccccggcagaacagtcgcagtggaacccgctgcgccagatgatggtggcgttacaggtgctggatgtggacgtgaagattacccgtccggaagtctttgatctttttattaaaaagtttcagtcgcagtcattgcttgaagagtatctgaaatcctcttcttacgtgatgtcgcagcttaaagacgctgaggtggatccgcttgagctgcatcgggcgatagtcaatatctcagacagaatgaaagcggtgaataacgatcagggaaaagacgcagataaaaccccctatatctcctggacattaaacttcactgcgccgacagcaggcgatgcgcaatccgttctggagggatacatcaattatatcgcggctattgttgagaaagagacagtgcagaatatccgcaaccagatcgcgctgaaaacgaaagtcgttgagcagcagctagagctggatcgcgtccgtttgaccaatattcacaataccaacctgcagcggctgaattattccctggaagtcgcgaatgccgccggcatcaagaagccggtctacagcaacgggcaggcggtaaaagacgatccggattactctgttgcgctcggtgctgacggtatcgcgcaaaagctgcagattgaaaaaaatctcaaggacgtgaccgagctgaatgcggatttccagaaccgggaatattatctggcgcagttgaaaaagctctcctttgcggatgttaaacttgagccattccggtaccagctctctccctccatgccggtgaaaaaggatggtccaggcaaggccctgattgtcgttctggcggcgctcctgggggcactgtttgcctgcagtagcgttttactgcgcgaggcgatgctcacccgtaatccactccccgagccggtgacggaataa

SEQ ID NO: 126202 - DNA, 453 bp, Enterobacter cloacae
atgtttccgataggtaagaaagaaacaatcttgttggacttcattggttctcttggaaaactggagtggttacattatcagagccgtattgaagatgaatggataaatgaccattttgaaaaaattgatcgctctaagtatcctccttataccagttttcgttttgaaaaagaggttccagaagttatcgccttactggaagatgcgattcaatcatataaaggtaaagttgagtggtgtatgacccatcatccgaaagagtatggtactggtgttaatcatcgtattttgcctacatttgttaagaatctcagagtcagtgaaggtatggaagatgttaacgagtatattgaaaaccattatcctgattttggcccaatcgcctatgaagatcttgttggactgacggagcatgttcaatcagttttcaaaaatgctggatatgatgcataa

SEQ ID NO: 126203 - DNA, 1098 bp, Enterobacter cloacae
atgggtgccattacggcctcggcgatgaccgaccatctggtcagcgcgctgtatggcgataaaaaatccagtgacctggcagcagaggagaaacggctggtcagtagcctcgtgagtatcgcgggtggtctggcgggcgctgcggtgacggatggcagtgtctccatggcggcaatggcgtcggaaacggcgaaggtggaggttgagaataactcgctgggtgtcgttattcagggcggtaaactggctgcacagggatgtctgaaaatttctgcttgccgtgatcgcctggttggcagtggtctgggtgctttactgggcattggtgcatccacatcagcaatggatacattgtcacaagatgagcagttgcatctgatctatgtggcctcgctcaatgatccttcccagctcagtcagttaaatgatgctcagaaagcggcctatgagtccctgacaggtaagacgatcaccagtactggtggtacgcaggtcatcaacccgggaccatcaaacactggtggagaccagactgtaactggaaatgtgccctccaacacagggaagaatagtgtagcaaccggagggataaatcatactggtaataccaacggtgatggagcgtcaaacaataatggctggacgacaactacgccggttccggattctccttcactggatgatcttttctatcagaacgagaagatccccggtcttgaaaatgttcgccctgaaaatcccggttatccagccaatcagagtgttattgaaaaaatgaacgaacctaagtttattgcctggataggcaatacagattgtacggattgctcagatatcgcacctaaacttctcgatgcagctggcgggcacgggaaaattattgaagcaaggccgacgactccgtacaacttaaatgtgtatgaaaatggaaaaattgtacatgaacaagcatttcatcaggtttataccgatggtcagtatgtttacgatccaagagtgtccttaaaaccaattcctaaaggagattgggaaaaacatatcaaatctataaatcagggaagtgttacgatctctgataaattacaggggttaaaataa

SEQ ID NO: 126204 - DNA, 231 bp, Enterobacter cloacae
atgttggaatatagcgtaggtagttcagttgatcgggaagatctttatgctgaattgtcttttaatcgagtccagtggggtgaaatctcactatcagaagacaggaaatcagtgaatattattatttatccagatgaaagtaatattcttgaatttcaatgcgatgagtttttacagcttatagagaaggcaaagtctcatcttcttcgccttgaaccactgtctaaatga

SEQ ID NO: 126205 - DNA, 1182 bp, Enterobacter cloacae
atgtctatcaagggtcaatcttatctatatccaactgcggaaggggtctggatgtttcagatcttcattccggcgtacatgcgccacatcttcggcgggaaacgtctataccggaaatcaacgggaactaaagatcttgccgccgctaaacacttccgtaatcacatgctcatcgagtggaagacactcaaggaacagtattccccaaacacggaggaacggcgcattcaaaacgccatagccggattacataagcaaaccacgctacgcgccccactccagaccgtgccaacattaaccgccatacgtgatcaatacgctgacagatacagtgataagcgctcattctcgacgctggctaaatctgctcgcgccgtagaggtatttctcacttcgcttgaccgtgcagacattcaggtcacggagatcagacggtcacaagtggcgatgtttatcaatcagcaggacaagaaagccccccaaaccgtgcagaactggctgacgtgcctgggaagtctgtatgagtatgcacggagaggttacgacgacatagcaccagataacccgtttcacggtcacaacctcgaagcacgagccagcattgtaagctatgaaccatttgaagctcatcatatgcaaaagctactggatgcagcagagccggagatcaggaatatcataatcatggggctgttttcaggatgccgccttgatgaactggcaagcctcaagaagtcagagatcaaaacggtggaatgtgtacgctgtttctacatttcgaaatcaaagactaaggcgggggtacggtacgtccctattcattcccggctatctgcgattgtcgatgaatacctgaaccacagttacggcgaatacctgttcccacaagctaacaagattaacaggaaggatggtaagaaagggccgtactactctcaaaacttcaccaggttgcgtgacaaggttttgcctaccgctacagatcgtcaatgcttccacagcttgcgcgggatgttcatcacatgcttagaccgtgccggggtgcaggagacaagaataggcagtatcaccggacacactgaacagaaagcgaaaaccgaagcattccgtacctattcacagggggcgagcatggaagagttagcagggtatgtcgaattggtggactaccctgaaatctaa

SEQ ID NO: 126206 - DNA, 1197 bp, Enterobacter cloacae
atgataattaaacccaagattcgtggtttcatctgcacaactacacatccggttggttgccaggtcaacgtaaacaaacaaatcgagtacgtccgcaaaaacggaaaactcactgatggtcctgcacgtgtgctggtgatcggtgcctcaactggttatgggcttgcatacagaatttctgcagcatttggcggtggtgcttccactatcggtatcttctttgaaaaaccgggtacggataccaagcctggctctgcgggctggtataattctgcggcttttgatgaagcagcgaaacgtgaaggtctttactcgaaaagcatcaacggcgacgcgttctccgatgagtgccgcgacgaagttatcagcctcatcaaagaagatctgggtcagattgatttagtggtttattcgcttgcatctccggtaagaaagatgccaaaaacaggcgaaattgttcgctctgcgctgaagccaatcggtgaggtttatacctctaaagccattgataccaacaaagatcagatcattactgccagtatcgaaccggcaaccgaagaagaagtgcgtaacactgttaccgtgatgggtggcgaggactgggaactgtggattgatgcgcttaataacgctggcgttctggctgatggtgtgaagaccgttgctaactcctacatcggcacggatttgacctggcctatttactggcacggtgcgctcggtaaggcgaaggaagacctggatcgggcggcaaaagcgttacgcaacaagctggctcctctcaacggtgctgcaaacgtcgcggtgttaaagtctgttgtcacccaagcgtcttcagctattccagtcatgccgctttatatttctatcgtgttcaagctcatgaaagatcgtgggatacacgaaggctgcatcgagcaaattaatcgtctgatgactaccagcctgtatgggggtaatgccaaacttgatgacgagcagcgaatccgcatggacgatctggaactgcgtgaagatgtgcagcaggcgtgccgcgaaatctggccgaccattaacgatgaaaatctggagcagttaacagattacattgcttataaagaagagttcctgaagttgtttgggttcggattcgaagaagttaactacgaagccgataccgatacaaacatagattttgatgtgaaaacattaatctaa

SEQ ID NO: 126207 - DNA, 429 bp, Enterobacter cloacae
gtgagcgaccacgttcagattaagaataatacattcaaaatgtctggagtaatcacggaaactccgatcagacttgagggagatttattatacagtgctggtgttaatggtacgcgaatatcacaagctatcacctatctcgatcaaatatttgacagtcgtcagcccatcacattagtgacagaacataaagtgtacgagaatgttattctctccggcatctcctacgattataaatctgaatttgctatgcaattcgatcttgaattcgagcaaattcgccttatcagcaaagctacggttaatgtgattgcaactaaaacgcagggaaataaatctgtaggcggtacggtgaaacagaaggtggtgaacaatgcacctaagaaaaccgaaggtgatacggtgactacggagtttaataaaaaataa

SEQ ID NO: 126208 - DNA, 243 bp, Enterobacter cloacae
atgaacaacctgtacttactgaacgaagatacaaagtttcaactcggatgcaacgaagtatgcagacgaatctataaccactttgcaagcctccaccgtgagaatggaacattccgttccagcgtcaaaaccctggcgtctgccctgggctactcggaaagcgggatcagatattggctttcgctcctaaaagacgcgaaggtgatcaccattactcgcaggggcgggtacgggagtacgtag

SEQ ID NO: 126209 - DNA, 699 bp, Enterobacter cloacae
atggcaaaaaccctcgccgagattaaggcagactaccaatacaccgacaagaaaactggtgaagtaaaagatcgtacaattaacaccccacattatttccgagacattcccagaatttattctcccaacctccaggatggttacatggacttttgccccaaggcgcaaaagttgtattgctattttcaggggtgggaaaattcagggaatttctgttacgaaagtcaggaagagcttggaaaggtgatcgacttatccagggagagaacctgcaaactcattaagaaactgcaagatgctgggctaatcacgaaagagaaaaatcctggttatcgttccaaagtttaccggacgtttccgatcactgatgcgcacgttaccccaccagaagcactgacggtgcaacctgttataatttctgatgtagtgccacaccaaccagcgcctgaaacagcgaagaccgcagtaacccacgaagacacaccagcgataacgcctcaaagaatccgtacttctgacgcagtgaaacacctgtttgaaaatctgtcacaacgacgagaggacgagagcttttattgctggtcatcaagggtgttacaacggcttggaatagatcattcaatgggaatagagcaactatttcaggaaacacacccgtatgaatacacccagattgaacaatcaacgatcccattttaa

SEQ ID NO: 126210 - DNA, 168 bp, Enterobacter cloacae
atgatcgagaagaaaaccaaactaccgccgtccacatcgttaatgataccggatgccacattccagattctgttcaaagaagcaaagcgccgaaaaatgagcgtaagcgcactccttcttgaagaatgccaaaacttggcggttaaatattcgaaagctggcgcgtaa

SEQ ID NO: 126211 - DNA, 192 bp, Enterobacter cloacae
atgcgttacttcaacgttgaccaaatctacgcagatttgattacaggccgaacaacacgaacacttgtttacagttcacttgtccgagcgcgtaagagtgaacaaacggacagggtggaaatgttcgaggaagcgatccgacgctttgacgaatggcgagcaacgccaaatttcaccccagtgaccagctaa

SEQ ID NO: 126212 - DNA, 579 bp, Enterobacter cloacae
atgaaaggcattagccaggcgctaaagagtgcagacgaagttaaagcagtggcggcagagctacaacgcaacgccagaagcaacctgttctattgcttgtgggtgtttatgtatgaatcgggcttacgtatctctgacgtgctcaaactccggtacgaagatgtagaggggcaatctcacctcaaggtgaagcaggagaaaaccggaaacgtggtgaggccaaaggtgacagccgcgatgctgtcagtgatggcacaacgcaaggcagagcaagccgatatgccagtgaagacggatttcatttttagcaagggcgatatacgtagcaaaggcaacgccgtaacccgtaacacggtattcactgaatttgggaagatgggacgtagagcaggattctctaacgtgggatgccatacaccacgtaaaagccgtgggcgcgtgatgttcgatgctggagtggctattgaaacaatcgcccatttcctgggacagacagatccgcgctcaacgatgtattacatcgggtatggtcaggacgtgcaggacgatttaacagaggagttttctttagagtggtga

SEQ ID NO: 126213 - DNA, 1383 bp, Enterobacter cloacae
atgaagaatagtattcttgctgatgctttgttgaatgctgcgaaaaatagcgagcctgaaagcgctatcaccaaacttgttgcatcaagtgctggagaacagcaaaaacaaaccaaaagaaaacttcatgctcaagaaatgtctctacctgaattgatcagggtaaaaaatgaatactctgaaaaaataaacgatccggtaacatctaacgagaagaagaaagaaatttcggaaatcattaaatcattaaattatgagatcaggaatagaactaaggatacgcctggacaaagtctaaaggaacctcgctcaatatttaagcaggagaggagagttgcacgcgaaaattatagaaaatctattcaggttagatctttcaagaaaactatcccgccgaatcagtttaccattagccatgaaaatcgtagtttcctgccattgaatgagaagactttggagcgtgaaagattgcgtaaagagttaatagccaaagaagctcaggctgagctggagagaatggctttaatttctcgcgttacgcatactaaaattattcaagaagaaagaactgatacgaagaagacatcacctgcaaaggtgatcacaaaattagataccaattcaacaaccaaaattgaagtgcctgaattttattttaatagcgaactgtatagccagttgataaggactattcctgtcacgcaagcgtacaagatcgcaaaaagtcgtgaactatcttcaaaatattatgacagtaaagttgagccaggtaagttttcatattttaattcgctcgcttacttaatttcgttaagaagtaagaatgaaacagatgcgcgtgaaattgccaagaaacaagggcaatctgaaagggttttgtatgaccttatcacagtaggttataagatttctctaagtaaaaaagattctggcgcagtaagaaaggaacaagagaaaattagttcctatcctgaatcagtggatcttaaattaatttcgagtaatgttcagcgtacactgcagttaagaagaattagtgaccaacaaagtttccgaaggagagttgagaccaacttcaaaggtaggtgtgcagtaactggacaatcaattcaatctttgcttcaagcctgtcatttagaggattattgttcttcgcacaatatggataccagtaacggcatcctacttacctcggattgtcatcgaatgttcgataacggccaacttggtataaatccagataccctaaccatacattttaatgttgaatgtatatatgcccatatgtttgagggtaaaataataggggcacatactgtgaagttagacgagaataaactgcgcagtaaatggaaattatttttgaagatcagatccagttga

SEQ ID NO: 126214 - DNA, 561 bp, Enterobacter cloacae
atgaacaaatatttaaaaattggtctttttaccattctggcgggagcgggttctgcagcagcggcagaagatggcacaattacctttgacggaacgatcagtgacgccacctgtattattacaggcggtgacgcacagggtgaatccacctctcctgatttcaccgtgcatctgccaagcgtcagcaccaccgcgctggccactgcgggtcagcgcgcgggagacacgccattcttcattaaactgagcggctcaaattgcaccaacaacaaagtcgccagcgtcttcttcgaactggcacagagcaccaatatcaacaccgcgaccggtaacctgaaaaacaccgttaccacgggtggtgccgataaagttgaaatcggtctgttagattccagcaaagctgttttggatctgaataccgcaaacaataacccgaaaacagcggtcatttcgggtaataccgctcgcttcgactactgggcgcagtacgttgccaccggcggtgcggcaacggccggtaaagtcaccactgacgtcatttattccattaagtaccagtaa

SEQ ID NO: 126215 - DNA, 735 bp, Enterobacter cloacae
atggtcagtaatattctcaaagtaatgttaatggtgacattgacgtggttcccctgcgccaacgccactatacaaattttaacaactcgtgtggcattcaatgcaaacgagagtgaacaaaccgttcgcgtgaataacctcagtaaaaacccggagctggtgcaggtctggctttccagcaccgacaaaaccgatgggacggagaaggagaatcttccattctttatcaaccctcccgctgcgcgcgttaacggtcagaaagggaaagttttccgtatattccagacagaggaagccgcaggaaaatacccgaaagatcgcgaaaccctgctctggctaaacgtactggatattccacctgaactgccggaagaggcggatcggaatcagataaaaatggcgttccgcacgatgatcaaatttttctatcgccctgcgggcctgaaaggcaatcccatgcaggcgggcgacgatctgaagtgggaactgcgtaaagtggcaaagggctacgacgtggtgggaaccaataattcgcctttccacgtgagcatgacgagcgtgtggctaacgaatgccgacaataaagacattgagatccccggtgacatgattgtcccttatggaacgctggtttatcactttccgcaggtgagcgcagtgagtggacgcggcatatttaaatacaattatatcactgatttaggcgcatatattaagcgcacttataacttttaa

SEQ ID NO: 126216 - DNA, 2583 bp, Enterobacter cloacae
atgtccgcacgccataataaatacaggcttctcaaaaaagcgaaaagtacccttggccagataatgattctggcattgtgcatttcaggccaggttaacgcagaaacagaaaaaaaagcggtaaacttttctcgcggctttatgaatttctatgacagtggattagaccttagccagttcgacggggtagataaaatccagccaggtgattacaaactggaagtatttagcaacttgcggaaattagggacctggcccatttcatttattccggcaaacaatacgcagggcgtaaatgcctgcatgacgccggaaatgattatccgctttgatgtcgacaccagcaaactgccggaaaactggaagacgggccgctgcctgatcctcgaaacgcttatccccggcgcgaccgtcacctacaaccaggatgatgagcgcctggatgtcaccgttccgcaggcgatgctgctcaatacaccagagggttatatcagccctgaactatgggatgacggtgaacctaccctcatggcctcctacgcgctgagtggttcaagcacgcgcaaccgtgagttaggtgaaaccagcaactatctctttggtaacctgcaaaccgctatgacgctcggtgcgtggcgttttgtaacctatgacaccctgaacctcggcaatgatattgaggatgaaggggtcgatcatctgcaggcatttgccagccggggaattgcggcctggcaatctgaagtggtgctgggcgatctcaacaccagcggggagatgtttgatacaacggccattcgcggcgtcagactcgccaccgacgatcgcatgctgccggattccgtgcgcagctatgcgcctgtcgttcgtggttttgccaacagcaacgcgacggtcaccatcaagcagtccggcagtaccctctatgaaaaagtggttcccccaggcgagtttgccatcagcgatctctatgcaacgggctacaacggcgatctggaagtcaccgtcaaagagaccgatggcaccatcaattcctttaccgtcccctactccagcgttccgcagctgctgcgcgaaggctattttcgctattcggtctcctcgggtgaaatccgcaacacatttcttgccgatgatccgtggatgacggaaggcacgcttcagtacggtttgcttaataatctgaccggttacgtaggcgctcaaaccgcgtttgatggcgattacaacgccctgctgggtggtgtggctatcaataccccgctgggggcattaggcctggacgttacccgctcttatacgaactttaactccagcaccgggagcgatgactgcggctcactgtgtgacatgtccctgcgtatcagccttgctaaaaatctttccgaaaccgggacaaatttcagcctggtgggttaccgctactccagtaaaaattactactcgctgtcggatgccgtcagcgtgaagcaggcgctggagcatggtaacgaccgatatttacccgaacgctatcgtgaacgcctggaagcaaacatcaaccagatgctgcctgcgggttggggaagtttctacgtcagtggtttcatcggcaacatctggaacgatgaactgggccgcacggaaaaatccaactacgcgctgggatacaacaaccggtttggctcgtcgacctggggcatttcgcttggccgaaccaacaatgaagacggtggtcacgacgatacgatctacctgagcgtatctatgccgctcggccatcgttatgaaaaacaggctcgcctgggagcaaactttagctacaacagtgatgaggccaccatccgcacctcgctcagcggctcggccggcgagcgatcgcagtatggctttagcggctacttcagcgagtccagcaggccagaaaccaacttcggtaccaacctgtcttatgtgggcgatagcgcttccggcggcgtcgcgttcagccagtccctccatagcttcatgggcggtttgaacatgaacggtggcgtggttgtgcaccgtggcggtatcaatttgaccccaacgttaggcgacaccattggcgtgatagaggccaaaggcgctgaaggggcaagagtttaccctgattcaaatgcggtcattaaagataacggctacgggattgtcggctatctgacgccttacagatacaacgatgtcttcattgatccaaaaggtacatcaatgagtgtcgatgtagaggatacgcgtaagagcattgtgccaaccgccggtgccgccgtgcatatcaaaatggaaacacagcagaagcaacagacctttgtgcgcttcacacatgcctccgggcaaaagatccccttcggcgcatccattaccgatggtagcaataccacgctcggtatggtcggacagggtggcctggcaatgctgaccttacctgaacctggcaagccgatcgttattaaatggaatagtaataaggtgatgaaagcgtgctcagcagaagtcaatcacctttctgataacagaaacacccgcaacatgaataaagccgcctcctttaatgcgatagatattctctgcaaaggcctttaa

SEQ ID NO: 126217 - DNA, 1011 bp, Enterobacter cloacae
atgaataaatacattactactctgctttatctcgttttattatccgttttatggatgtttacccttgaagcaaaagcctctgcgtgcagactcgaaggcgtggaaaaggttttaaatattacagacgacattacgttaaaccctgcggataaaggctccactggaacggtcttatggtcgaaaacgtatactgcacctaacatcaaatatatctgtgatgaatcaacgcaaacgcagtggcacaccgcttacagccgaaattatctctcttcctcggtagataaagtctatacaaccgaaattccgggtatcggtattcggatgaaatggccagccaacgcagggaacacctgggtgccgggtaactccggctctccggtgacctgcagcccgagctgttctatcgacaacagcaccgtattggtagagttcgtgcagacaggtaatattaatcagggagaatccgagatccctgccggcgaaatggttaacgtaaaagtcaaacctttgctcacgccagaggatgcgcttcgtattcttactatcaatttctcagcgccaattaaagtaaatacgcgttcatgttccatttatccctcgtcgaccaacgtcgatttgggaacctacagtattgcctcattccagaatacgctaaattatcaaggtgataaaaaggacttttctattaccatcacatgcccggaacaggcacaagttggcttaactttctcttccctgatcaataccaaattcgcatcaatgaacggtcttttgggcgtcgagaccggcgaaggctacgcgaaaaatttcgcgattatggtttacgaaaaatccagcccttatgtctcatcggcccttgttcttggaaaagaataccctttccaggtttcatcccgcttaactaaaaactatcaggcccagatattcgttcctgccgaggttaatcgcgaaaactcattaagtgctggcagggtggtcggcgcaattcaatacaccatggctttaagataa

SEQ ID NO: 126218 - DNA, 1734 bp, Enterobacter cloacae
gtgcttcagcgtttttcaaaatatgcacttttattagtgccgttcattcctgtggctcatgctacggcggcactccctggtcagcaaaataaacaggaactggatcgtctcgaaagacaaaccagccaggcattaatagaagaagccaagcggaccgagcagttaatccagcaacaaaaaaaaatgcgcgaagccggagatgaaaccctggccagcagcgactcgaactggaaatttcaggtcaatcatattgtcatccttgatgatacgcagtttgacaactcaccgcagcgtcaggcgattatcgatcgctatgagggcaaaatgctcggtcgaacagaaatatttgaactggccaaagaactgaccgatttttatatttctcgtggttatgccacgacgctgattggtgttgagcccggtaatatcaaaacgggcacactctctctgcgggtgatgtggggaaaaatacacgatcttaaggttaacgggcaagcgccgtccttacgtgaacgcacgcgcatgttcactgcctatccttttgcgaaagacaagattctgaacatgcaggatgtcgatcaaatggtcgaaaacctgctgcgcgtttaccctaacgacaatattgaaattcaaccgtctgttataaacagctattccgatcttaatctgctgcacgtgcctgcattccctctttcggtcaccgcgggtcttaacaactctggctttaaggctgacggctggcagcagtattatggcagcgtaaccgctaaaaacattgccggcatcaatgatattttcaacgtttattattcatggaataacctgaagaataaccaggataatcaggattcgtggtcaacgagttacagcatcccactgggttattggtcgtttgacgcgctttattacaaatccagctacgacaaaacgcttgccggcaataacgccagctacgcttctgacggagattctgaccgtgcttctctgcgtgtcagccgcatgctcggccgtaacgccacgggtaaaaccagctggtgggcaaaagttgaaagacgtaatagcaacaacagcattgaaaaccagcgtatagacgtcagctctaaaacctatacctcgatttcgtcgggcgctacctgggtcggcgctctgatgaacggctggttctatggcgatgtgggcgtgacggcagcggttccctggtttggttccgcctggaaaaacgatgccgaccttaaagggtttgaccttgattacgtcaagtacaacggcattgccagctggacgcgtccgctttttcagtctggccgtttaggtggcgtgtatgaactcaacgcagggttccagtacaccccgaacgtactggttagcgatgcaaaattaacgctgggcgatgaattcaccgtacgcggcttcaaggacgatagcctgctggttgatagcggcggctggatcgccaataccctgcagtttccattcgatgttggcgtcggcggtatctatcagcttattccctatgtaggttatgacctgggctttgccaaagataattgccctaaaggcgtcaacgtatgtgatagccaattcatgatgggtggctctgtcgggattaaagctaccggtagccatttttcaacgtatgtcctcgcgggctggcctataaaaaaaccagattcactggaagagaataccgtcgataacacggtcgtttattacaagatggaagtaacgttctaa

SEQ ID NO: 126219 - DNA, 8256 bp, Enterobacter cloacae
atgagcaataataaaacctcaaaaacgaagctaaccgcagggaatttgcataaacacctttgcccactttttatttcaatagcgggtattctcgcagctaatgccgaagccgcaacggtgccggatgccagccagagtaaagggccaacaatgggtcaggcggctaacggcacgccagtcgtgaatatcaccgatccgaatgcgaaaggcgtctcgcataataaattcgaccagtttaacgttgataaaaatggccttatttttaacaacagcatgcaggatggtgtgtctaagatcgggggttacacggttaaaaacgcccagcttgagcatgaagcaaaagcaattatcagtgaagtgacgggagcccaggcgtcctatattaacgggacgatggaagtcttcggcagaaaagcggacgtgatcgttgctaaccaaaacggtattagcgttaacggcgccaccaccattaatgccaacagcctgacgctgagtaccggtaaggtgcagatgaaagaggacggcaactataaactagctgttgaaaaaggcaccgtgtctctcacagggcaaggcatttctaccgaagggctaagctacttcgacattgtcagccgaagtgcaaaactggaaggtgaaattgccggtcaggcggacgttaaggtagttgccgggcagaacgattacgatctctccagccgccagcacacgactcgcgccacgggtgacggccatacgccggatgtcgcgattgacggtcgggcgatggggtcaatgtacggtggtaaaattcaacttatcagcaccgaatccggcgcaggcgtccgtcatgagggcagtattattgccacgggtgacattgagatcagtgcgaacggcgacgtgacgctgacaggtttacgcagcgataaaaatgtcactgtcagcggcaacaatattgccctgaacaaaaacagcagcggcaccggaagtacagaagcgcaaaataatattatcctgcatgcgctctctggcatgacggtgaataacgacgttatctcccgtaacggcacgatccgaattgatgcctcaaccctgctgcaaaatacggctgctatcattgcgcaaaacagtgccacaacagcggtacccgccattcagattaatgttgccgggcagtacaccctttccggaaaactaaaagcgctggatgctaacggcgctgtcatttccggtggcgtcgtgacgttaaaaaatggcgattttgtcgtcatccagaatggccagcaggtgcccttcagcaccctcgtctccgatgcggagatcgtcagcaacagtggtaatgtcaacgttaccgcgggcagcatgactaacaatgaaggcgttattctcgcgaagaaagggacgctgcagttcaacctgaccggtgcgtttgaaaacaagggttccgtcagcgccacaggggatatctggattgcatcaggttcgatgaagaacaatggcatcctgtatgccagcaacgcccagacgctgtctgtcggccatctcgacaacgcaggccgcctctacgcggataaaaacctggttatgaccgccagcgccctgaacaacagtggtcatattggcgctaatagcggtgagatgcgcattaaggtcaacggtgaggtttcaaacagcggcaccctgagcggtaacgatgcgctgatcttcattgatgccgacggcaacatcgtcaacgacggcaccattgccagcaacaagcatgacgtgacgctggcatccggcggcgacacgctcagcaataccggacgtattgcaggacgtaatgtctccacccagacccgtaaagccagtgcaaacgtcagtaacagcggcaccatcagtgccagcgagaaactgaccatcgcaaccgcgaatctgaaaaaccaggccggcacgctgagtgcgaccactgacatgcagcttgatgtcaaaaaagagctacagaatagtcaaaaaggcagcattattgccgggaagaacctcaccataaagggtgacggcgcgctggcagtacacaatgacgatgggctgatccagggcgataatatcaatgccagcggaatttccaccctctctaacacccatgacgcgctgatcgcggcaagagaaaacctctccgttacagcgacatcgttgcttaacgacgcctcaaccattcaggccggtagcctgacgctcgatcgcgtcagcaccgtcgataaccttaacgccgccacgctgtatgccagcaagacgctgcaacttacccatctcaacacgctgaataacaccggcagttttgtgatttctgacggcacgctgtcactgtccgatgtgaacaccctcaataacactgaaggtgcaacgctattcggtgctggaaataccacgctgagaaacgtaggtacccttaataacagcggcgcatcgatgattaaatcggataatgcgctctcgatcgcgacgaccacgacgcttaataacagcagtgatgcagtgattgcctctgagggcaatctgaatatcagcggcgtgaagacgttaaacaaccgctcggtgatcatcggcaatggcaatatcgcgatcgatgccgttgaggagctgaaaaacgacggtgtggttcaggcaggtctgaacctgattattcgcaacgtcaaaaacctggccaacacaggtgaagggcatgttttagctgcactgcgtaacctgacgattgaagacgttgagtcgctcatcaacagcgacggcgcggtcatctccgccaatatgcagacggtgctgaacgccatcggcgttctgaccaaccgcacggccggtgtcattcaggctgtaaacggcccgctggagattgtcgccaacacgttgagcaacattggcagcctcaccgcagaggacgggcagcagtcggtgtccactctcgtggcgggcggcgacattacgatcaatgcgcaaaacatgcttaacaccgaacaggcggtgattgtgtcgacgcaaagcgatctgtcagttaatgtcgctaataatctgatcaacgccaatgcagcggtactatcgggtgccaacaatacgaaccttaacgtagcgggcgggacgattagcaacgaaaaaaatgccctgatcgccgggaataacatcacgattaatgcctcgcagctgaataatcatgattccggcacgacctctgccagaaacgacctcaacatccataccggttcattcaataacatcaatggcatcctcgaagcgggtcacgatttattgctcaaggtaaaagactccatcgcgctgaatgacaataaccgcagtattcgtgcaggtcatgatatgacgctcagcacggaaggtacgctgttcaacaacaccatgatggaagccatcggcaacctgacgctccaggcagacggtaaggtgatcaacagcaagtctgtggtcacggggggtgatttacgcatcatcgctaatgaggtaatgaacaacagcaacagcctgctctggtcgttagggaagatggatatgaatgcccacgacggtgcctttgttaatgactataacggtaacgtgctgagcatgggtgacatgtcgctcatcgcgaaaacgattatcaactccgccgggatcattcgctccgaacagaacatcaatattgatgcggcctctctggaaaaccagagcacctatacgggtggcaccatttcgcaaacccaaacgcaggatgccgtgggtcaatgggccggtattgataatgtgatgacgcaggtcaggattaccacggttctgcacatcccggttctggcgtcagatatcgctatgagtaagctcggcgaaatcagcgccgggaaagatattaatattaaccagcgcggcattttcgacgaaaaagaggttaaaaataacggcggcctgatccaggcgggacgtgatatcaccatcacgggtaatctgctgaactcgccaacctatacctccgaatccatgtatgactatctgaatctcatccttgagcaaccgatagtactgaccgactactggaaggtggcagcagagcactacacgacgctgaccttcaactcgctctatcaataccttgatttcatctttggtgacggcgcacctgcaaccaaaagcggtacccaggatccaaacagagagcgtagctataaatcgcttctcgacgccgcgaatgactcaacccagctcaactacgtcatgagcaaagtgtttggtgaaacgtggaattcgcaagattacgcgaccctgaacacggcatggcataacctggtaagcaatgacaccagcattacccctctgaagacgaatatgatctacttcgtgccttcagaaaaaggtgaaatcacggcgggtcgtaactttacgcacaatggcggcacgctggataacggcctggctaacgctggcacaatcaaagaaaacgccaaaattgagaatatcgacgtgggtgactacaccatcgacaccgccgtcgcgggctatgatgttgccatcaataccaaaaagctgaatgaactggccatggggatcagcccactgccgaccatcaaggatttggtctctctgccgggcatgtttgaagtcactgacgaattcaaaaaagcctctgaggcggcgaaaaacggtaccgaatacagcggcccggccaaccacatcattccgattttcgaaacgcgcccggaaatgatcgatcagagcaagtacagcggctctgactactatttcgacaaggtggattacactaccaccgaaaccgttaacgtcattggcgataactactttatctccgaactgattcgtcgagagatcagccgctccgtaggcagcatgtttgcgatacgagacggtcttgaaggcgatgcgctggtacaaaacctgatggataacgccggtattgcggcgaaaaacagcgatctaaatctggtggtggggcagcctctgagcgaagagcagcgcaatgggctaacccaggatatcgtctggttcgtgagccagaacatcaaagggacggaagtgctggtgccggtggtctacctttgccctgaaacccttagccagctggctaacggtgatatcagtaaaggcacagcgtccattgcagccgggaatagcctttcagttgatgccaccgctattaacaacgtgaacggtaccctctcctctaagggtgacgtcacgctgaaatccaaagaggatattaacaacatcagcaatgcgacagatgctggcatctcggcaggcggtaacgtctcaatgacgtcggaaaatggcagcattgcctcaaacggcgcggcagtgaacgccggtggcgacattgacatgaaggctgaaaagggcgacatcaccctgaccgcatctgtcggacacggcgaagacggcaagcagaagattcatgcgcacgatgatggcgtcaccgcaggcggcagtatcaacatgcaggcgaaaaccatcacttccaacgcggctgatattacggcaggccaggacgtgaatatgaaggcgagcgaaggtgacgtcactttcaacgacctgcatcagattgattctaaccgtaccatcaataccgagatcaacggtctgtccagctataccaccaccgacaccaaaacggtgaccggcgaagctatcggcgcaaccgtcaaggctggcggcaatgtgcagattgatgccagcaagaatgtggtcatcgaaggcggcagcattgacgcgaaaagcggctccatcaacgcggcagaaaacgttgagataaagacgtctgaaaacgtgtccgctgaggaacacaccacacagtctcgccagtttgttgctgaggccggcatcagcggcgccggtaaatccgcctcggcttcctacggcaaaaacgacggcaccacaaaaaataccacctctggcgactacaccagcgcaggcggtaattctgaaacctccgcgattggtgccaaaccgggccgcgcaccgatcaccgatactgccggtttcagggtgggtatggaagacacaaccgataccgtgtcgacccagagcaagcagaacaccaacgcgtccattaattttaccgattccggttccgtaaatgcaggaaaaacggcggatattggcggcgctgacctctccgccggagataagctcagcattaacgcgaaggatgtcgcaagcaccaaatacgaggatgaaaccaaaaccaccgtcacacataaagaccgctttgtcggtgtttcaggtgaggcccacagtgcggtagttgatgcgatcgacaaaaccgggaatctcattgataaatcgcagcaaggccagtcgattaacagcggaaccacgacggcggaagtgctgggcgatgtgtccaacatcatgctaaacgatcttgctggcggctccgtcactttcggcgggaacacgacaaaaacgaaagaaacgcgcaccgcaacggcggagaataccaccaatattaatgctaaaaacgtcagcattaattcgaccaacgataccacgctcaacggcgtgaacgtgaactcgcagaatacggagatcaatgcgggtggtaatgtggacattaacgcagcgaaatcaacaacctcttacaccaatgaaaccgaaaaacacaaaggcggtcttaccgcaggcgtgggagtggatataactggcgcaagcggcggtatttcagtcgattacaacggcagtacggaacacggctcgggtaactctacgtcgtataagaacagtactatcaacggcaacacggtgacagtgaacgctggcggtgatatgaacatgaagggcgctaacatcgatgcagaaaaagcggatgttaacgttgcaggcgatatgaatatcacctccgtgcagaataccgagcacaccgaaagcagccgcggtaactggggcgcttctgtgggcatctccgtctcggcagcgggcatcatcccgaacgcgtccgtcaacgggggcggcggctctgaaagttacgattcgtctaaaacagcgaagcaatccggtatcaataccagcggcgagctgaatgtgaaaaccggaggcgacctcaatatgaccggggctaatctggtatctcaggatggcaccggatcggtgaacgttgcgggtgatatcaatgcgaaaacgctggaagaccacgttgagcaggatggtctgtacggcggtggcggcattggcctgagcaatggcgtagtgccttccggtaacatctacgtcgacaccgtggatgaaattcactacaacgaaacgcagaaatccactatcgccgtgggtgacaccaccagtgcggcagtgaatggcgatctcaatacccataaagatgaaatgtcggttgtcacgcgtgatgagaaagaagcaggaaataacatttcctacacgcttgccgatccggggattcgtaagaagaaaagcggcgctgacgcagacagcgatactccagtgaagccggatgacggccatacggacgatggcggctgccctcagaagtgtacgccgactaagccaggctcaacgcagcagcagacgacaaccacgacgcgtacaacgtctgattctcagcatatgacgattgagaaaacgacggcgacaacgacctccacgtccgcctcttcggtggtccataaggaggccgtcgcgtctgaaaccgcacgcagtgaagccgtgccaaacgttgcgccgtcaacgtcccagccgctgacgccaaaagcgaaaccagaagccacaacggttacgccaaaagcgaaaccagaagccacaacggttacgccagtgaagaaatgggccgtaccggaaactaactatccggtgctctctcctggctctgcaacgggtaaaaccggtaaagatatgccgaaaacaccggaccacaggaagtggaatggcgacatgaccaacggcgttgcgccatccagcaacaccaaaggcgatgacgtcaagctctcgccgggttcgtccaccggtcagaccgggatggatatgccgaaaacgccggaacacaagcagtggaatggcgacatgaccaacggcgttgcgccatccagcaacaccaaagggaatgacgttaagctttctccggggtcgtccaccggtcagaccgggatggacatgccgaaaacgccggaacacaagaagtggaatggcgacatgagcaaaggtgcgatgaacgcgcgtccacagtggaaggcgttgcaaatcgatcgaccgattgatatctatgctccggtaaccattaccttcaccgacgagcagtacagctaa

SEQ ID NO: 126220 - DNA, 819 bp, Enterobacter cloacae
atggatgcagcattgcttaacatgatgcaatcaggtggaagaaataaagcctgggcggaaacgatggtgaatatggaagccaggaaactggtaaatacagccaacactctgtcggcttttcatctcagcgatggtctgactcgaatgaagttcattcaggaaattcgggacctcatagaacaacagtttacgctagctcgtcaggctaaatcagataaagaatgcatggactgcgttaaaatacttcgagaagaaaactataacctcctggaacaagctcgtttattacgaacgaaggcagcgaagctttacgcgaaagtcgagttcatccgagagaataacaaaattgttgggtatgttatctcggcagttagtgttgtcctggccggtgctgaaatagccgcaggatttacactgattggcacgatgacccctctcggagtacttgctggtgcgattctggttactgacggggcaaacagcatcagtaaagaagtggctcgctacgcaacgaacaacactaccagtgaagggctggtcgcgaatgccgcgatgtctacagctgagtttatgggctttagtcgtgagaatggtttaggtgtctacaaatcaatctcactggccgctaatgcgtataccatttttggcttgttacggcgacctggtacctggcgactgtttcgttatctacccacagactattaccgaaaggtgagcacattgagccgcccgcagcttacaatgaaaatagcaggttacggcgtgaaagctaagattatttttgatctgttgtccgtcagcgacccgtctcagaattag

SEQ ID NO: 126221 - DNA, 432 bp, Enterobacter cloacae
atgaacgaaaataccttaattctgaccgaacatcggctgttgccacgtcttttcgatgccgcgttaacgctggtggcgtggggaggctttctgtttttcctgtatgcccggctctggatgcagctcaccgaggagagcgaccaccgctggagcgtgattattgcgtcctttaatacggtgttgctctacctgctgttcgccgcgctcaacggctggctgctgattttgtggtatcagtacaatcgccgtcgggcccacgcgaggcggcgtcagccgggctattttcaccaggaggagctggcccgcagctttaatgtctcaccgcagatcatctctgagatgagccagtacaacctgctgacggtctatcatgaccagattggccgcatcatcgatctgaaaatcaacgggcaggaagaggaagaacagtaa

SEQ ID NO: 126222 - DNA, 978 bp, Enterobacter cloacae
atgagtgaacaacaggcccctttagtaagcgtgcgcgatctgcgcaaacactatccgcttaacggcggtttgctgcgtaaaggcgcggcggtgaaggcggttgatggcgtgagctttgatatccagcccggcgagacgtttggcctggtgggtgagtccggctgcgggaaatccaccctcgggcgcgccattctgcgccttttcgatatcaccgcgggcgagatccactttgccggacaggcgattgcccatgctcgcgaaagagagctcaagccgctgcgtaagcggatgcaggcgatttttcaggatccttactcctcgctcaaccccggcatgacggtgcggcagctggtggctgagccgatgcagatccacggctacagtcgtgaagaacagcgcgaacggacggaaacgctgctctacaaagtggggctcaagcaggagcaccttgagcggttcccgcatgagttcagcggcgggcagcgccagcgcatcagtattgcccgcgcgttgtccgtgcgtcctgaatttgtgctgtgcgacgagccgctctcggcgctggacgtctcggtgcaggcgcaggtggtgaatattctgcaggatctgcagcaggagctggggctgacctatctgttcatcgcccacgatctctcgatggtgcgccatatctccagccgcattggagtgatgtacctcggtaagctggtggaggttgccccggcgaatgaactgtatcagcgtccggcgcacccttatacccgcgcgctgctggcggcggttccccagcccgacccgcgcattcgcaacctcgaagacgcaaccctgcgcggcgaaatgcccggccctacgtccgcgctgccgggctgtaagttctgcagccgctgcccgcacgccatgccggtttgccagacgcaggagccagcgatgcaggagatcgcgccagggcatttcgcggcgtgctggctgtttaagatgtga

SEQ ID NO: 126223 - DNA, 978 bp, Enterobacter cloacae
atgagtagcttattagcgctggagaatctgcaaaccaccttccgcacccgcgagggcgaggttcacgcggtgcgcggcgtgagctttcaggtgcagccgggggaactcgtcggcatcgtcggcgagtcgggctgcgggaaaagcgtcacctgtaagtccatcattcagcttctggggagcaacggacggataaccggcggcagcattcgcttccagaatgacgatctggcgcagaaaacgcccgcgcagatgcgcgccattcgcggcaacgagatcgcgatgattttccaggatccaatgaccgccctgaatccggtgctgaccatcggcaaacagatggcagagatcctgatgcgcaataaagggctcaccaaaagagcggccaaagcggcggcgatcgccatgctggaacaggtgggcattgccgaggcggaacgccgatacgatcagtatccccacgagttcagcggcgggatgcgccagcgggtgatgatcgccattgcgctctcctgcaacccgaagctgcttattgccgatgagccgaccaccgcgctggacgttaccattcaggcgcagatcctgcgtctgctgaaaagcctgcaacagcagacccaaaccgcgattctgctgatcacccacgatctcggcgtggtggcgcaggtctgcagccgcgtggtggtgatgtacggcgggctggtgatggaggaggggagcgtggaggacattttttatcgccctgcgcatccttatacccaggggctgctggcctcgctgccgcgcccggatgaggtcaaccaacgtttatcgcccattgaaggcgcaccgcctggcctgcttaacccgccgccgggctgtccgttcgccgaacgctgcccgaaacgcatgccccagtgtgaacggcagcccgctttttacgccatgggtgaaggccatcgcgccgcctgctggctatgggccgataaggagattcaggcatga

SEQ ID NO: 126224 - DNA, 846 bp, Enterobacter cloacae
atgagcagacgctggcagcaggttcgtcaccagctgcgccgcaaccgtccggcgcagttctccctgtttgtgctttttatatttgttatcgccgcgctctgtgcgggcttgagtccgtacgatccggatcggatggcgctcggcgcacgcacgctgccgccggatgccgcacactggttcggcaccgacgagtacgggcgcgactacttcacccgcgcgctgtatggcgggcagatctccctgatggtcggttttctcgccatgctcttttccacgcttatcggcacggtggtgggaacggtgagcggctactttggcggctggctggacaacctgatgatgcgcgccgtggatatcctgatggccattccggccttcttcctgctgctggtggtgaatgcttacctcaagccgggcgtggataacatcattctgatcatcagcctgctgacgtggatgaacatgtcgcggctggtgcgcgcagaaaccctgtcggtgaaagagcgcgagtatgtgctttatgcccgcgcgtcgggggagcacccgctgcgcattatcgtgcgccacattattcccggcgtgctgccgaccattatcgtggccgccacgctcaatatcgcctcggccattctgatggagtcgacgctcagcttcttagggctgggcgtacaggcaccggcggcgtcgtggggaagcatgcttaacaacgcccagtcttatattggcgaagcgtcgtggctggcgatgttccccggcatcctgatcctgctgacggtgttcagctttaacgtgctgggcgatgtgttccgtaccgcctttgagccaggagcgaatcgcgatgagtag

SEQ ID NO: 126225 - DNA, 954 bp, Enterobacter cloacae
gtgaacacacttctcacgcgtcggctgctgcagctgctgccgatgctgttctttatttcgctggtggcgtttttgctggtcaagctcgcgcccggcgatccggtggcggcgtacatcacaccgcgcatggctccggaagatatcgaacgtattcgccagagcctggggctggataagccgctggtcacgcagtacgttctgtggctgaagaacgtcctgcggggcgatctcggctattcgctgatttaccaccgcccggtgctggagatgatcggcgaacgcattccggccacgctggggctgatgggcgcgtcgctgctgctggcgatcgtgctggcgatcccgctgggcctgctggcgggggcatttaagcaccgctggctggatcacctgctgaacctgttcgcctatatcggcatctcggtgccgattttctggttcggcattttgctcattacggtctttgccgtgcagcttaactggttccccagcatgggaatgcgcaccatcggcatggaggataatgcgctggacgtgctgcgccacggcgtgctgccgtgtattgccctcacgttctacaacctctccagctacgtgcgctacatccgctccaacaccatctcgcagctctctgccgactacgtgcagacccagctggcctacggcgccacgcgttccagcattctgttccgccacgtgctgaaaaacgtgctgctgccggtgatcaccctgttcggattgtcgttcggtgagctgattgtgggggcctacgtgacggaaagcgtcttctcctggccggggatggggctgctcgggatccagtcgatcgcttcgctggactacccgctgatcatggcgatcatcatgctctcgtcgatgatgctgatcgtcggtaacctgatcgccgatctgctttatcgcttcgccgatccccgcattcgtacgctgaggtaa

SEQ ID NO: 126226 - DNA, 1590 bp, Enterobacter cloacae
atgcgcaagcttctgttatcggcagtggttgtttcgctcgcgttaggcctggcgggctgtgatgatgcgaaaaataaagagacaaatacgccctcagcggcaaaaagcgatgcgccaaaagcgggcggttcgctgattatcggtattacctccggcgacccgttagctgtaaatccgctctacgccagcgaccgtaccacgttgacgatcatgcaggcgctctatgccccgctctatagcttcaacaacggtaagatcgaatggggcctggcggaaagcctgacgccctctgccgacaacctgagctacaccctgacgttaaaacccaacctgaaatggcaggacggccagccgctgacggcggacgacgtggtctttacgttcaacaagctgctcgatgccaaacagcacagcttcttccgcagcatgttcacctacggcgataagccggtacaggtaagcaaggttgacgaccgcaccgttaagttcaccttaccgcaggtcagcgcggcctttaccggcacgctggtacagatctacccgatcccgcagcacgtgttcgccggcgaaggcgacctggaaaagagcagcaaaaacgatgcaccggtcggctccgggccgttcaaatttaaagagtaccgcgccggacaatattatgccctgacccgttttgacgattactggaacggcaaagcgaagctagattcggtgacctaccgtttcgccaaagacagtaacgccgccaaccttgcgctgcaaaacggtgaaatcaacctcaagatggttgacccgcaggatgtgaaccgcctgaaaaataccggtaagtttgacttcgtggtctatccggaaggccgtctggcctatatgacgttcaaccagaacgtgccggtaatgaagagcaaagaattgcgtcaggccattgcgtacgccatcaacaaagacgagctgacccagaccgcctttacctcgctggactacgccaaacccgcgacgtccttcctgacgcccgatacgctttacaagacggatgacgtcgagcaatacacattcgacctgcaaaaagctaaagagctgcttaaagcgtccggcgcgccggacaacctcaagctgcgcctggcgtatgtgaataccaacaaaacccaggagagcatggcgctctacattcagcaggcgctgaagggcattggggtgaacgtggagctgatgccgctggactccaacgccatgtcccagcgcagcctcgatatgaacaacaccgcgtgggagctgaacctgggcggctacatcatgggctcagagccggacggctacaaatcgctgttcatgagcaacgaagcctataactacgcgcactacaaaaatccgcagtttgatgccctgtgggataaaggcgccgtggaaaccgacgccgcgaaacgtgccgatatctacaagcaaattcagcagatcgtggcgaacgacatgacgtactacccgatcgcctataccaatgcgaccgtcgcggtagacaagcgtttcggcggcacccaggaagcggagccgaaaccggtctatctgttccaggatctgtcaaaaatctatcagaaataa

SEQ ID NO: 126227 - DNA, 867 bp, Enterobacter cloacae
atgtcagacaacacgtatcagccacccaaagtgtgggaatggaaaaagaacaacggcggcgcgttcgccaatatcaaccgcccgatttccggcgcgacccatgagaaagatcttcctgtcggttcgcacccgctgcagctttactcgctcggcacaccgaacggccagaaggtgacgatcatgctcgaagagctgctggcgctgggcgtaacgggcgcggagtacgacgcgtggttgatccgcatcggcgagggcgatcagttctccagcggcttcgtggaggtgaacccgaactcgaaaataccggcgctgcgtgaccactccacgaacccgccaacgcgcgtctttgaatccggcaatatcctgctctatctggcggagaaattcggccacttcctgccgaaagatccggcgggacgcaccgagacgctgaactggctgttctggctgcagggcgcggcgccgttcctcggcggcggctttggccacttctataactatgccccggtgaaaattgagtacgcgattgaccgctttaccatggaagccaaacgcctgttcgacgtgctggataaacagctggcgcgcggtcgctacgtggcgggtgaggagtacaccattgccgatatcgccatctggccatggttcggctgcgtggcgctgggcagcgtgtacaacgccgctgagttcctcgacgcagaaaagtacaccaacgtgcagcgctgggcgaaagacgtggcgaaccgccatgccgttaagcgcggacgcatcgttaaccgcaccagcggcgagctgaacgagcagcttcacgaacgccacgcggcgagcgacttcgagaccaatacggaagataagcgtcaggcgtaa

SEQ ID NO: 126228 - DNA, 333 bp, Enterobacter cloacae
atgaaactgattaaaacaacgctggttatcagcgccctcattttttccacctcgggaatggccatcgataaaaccgccgctggcgcggtagcaggtgctgccattggcgcggccacgggcaaagatctgaaatccaccgttggcggtgccgttgttggcgcaggcacgggtgccatgttcaaaaacggcgacaaaggtaaagccgcgcgtaaaggcggcgccgtaggggctgccgtgggcgcaggcgccgcggcggttaccggcaagagcgtgctgaaaggtgcagccgttggcgcgggcacgggcgcgctgattggtgaagcgacgcactga

SEQ ID NO: 126229 - DNA, 273 bp, Enterobacter cloacae
atgaaaaaccgtattattttatttgctgccctggcaggttttgccgtggtcaatacagcgatggcccagagcgtcacggtcgatgtccctgccgggtataaggtcgtgattgttccgcagtcagccacggttcctgaggcggtaagcgttgcgcctgcacctgtacaaacaacgtatgccgcccctgcaccggtctatcatccgcgtgcacgccatgtggcgagcgtggcggaaggaatggtgattgagcatcagtatgacgatcaccattga

SEQ ID NO: 126230 - DNA, 255 bp, Enterobacter cloacae
atgaacagatcgttatcttttatccctgtcctttctctcatttttctgacgcttttctcggtttccaccagcgcgacccagcaggcgcaggagcggcgcgtggcgcgtgatgtcaggcaggaaacccgcgacgcgtcacggcaggtgaaacagacctgcgtggcgaacaataaccagagtaatcacgactgccgccaggataaacgtcagatgaaacaggccgggcggcaaaaagcgcgggatattaagtattaa

SEQ ID NO: 126231 - DNA, 2592 bp, Enterobacter cloacae
atgcgcaaattaatgaatcgcacattgctttcgcaatgtgtattagtggctttaacgtcatttggcgcccaggctaacgtaacgcccgctacgccctgccagccgggcgtgacatcgcagacctgcggcttaacgaaatatgtagataatagtttttatgaagatcccggcgtgactaatgccattatggccgacaccaccgcaaataatatctttatggatggaagccgtgaatcaggggatacccagtcattaaccgtttctggtaccgacatgtccggccattatattcagggcagcaacggggggacggctaatattacggtgaataacggcgccaccgtcgatatgatcgaagtgggcaataccggtgcaaccaccaatacgacggtgaccatcgatgacgccacgctgaatggcgaaaatgacgccggaagctacgagggcaagaaagcctatatgatgggttccgccatttatctcgaccccatggataaaggttaccacaccgtcaatgttgaggacggcagcatgctgcacggcagtattctcagtgcgggagccggtgcacaaaatattgccatcagcaacagcacgatggataaaggcggtatttacgcgggtagcgataaatctgataccaatattacgctgactaacgcttccgtggatgcctcgcagagcgaaatcgcgcagaacatcgacacgctggcggtaaaactgagcgaatacaagcccttcagcgacatcaacctggatgcctttggcgatgtcgccatcgcgatgtacggaacgaaggctgattcgctggcgctggataacagtacggtcaccggcgacattggggcctttaacgaaaacggcaccacgctgatttcattgaccaataacagcgtggtaaatggcaatgtgaccgtcgatggtaacgccgcaaattccgttctggtggataacagcaccgtgaatggcgagataaataccagccagagtacgggcaatagcacaattacgctgcagaacaacgcgaccgtcaacggtgatattacaacgggtgcaggtgatgatacggtcgtgctgaccaatgattcacatgtcaatggcaatgttaacggtggtgacggcagcgataccctgtcaatggatgcgggcagttctatatccggacaaataagccagtttgaaacggtaaataccaccagcgataacagcattgacattgataaaattaacgatgcaaccagctggagtttgcaaaacggttcaaccctgattgccaataccaccggcagcaatgcgctggttaccatgagcaccgacagctacgtgaatttcggtaatattaccggcgccaataacgccgtggtggtgaacagcattacgccgtctgcgcaaaatcagcaggggatagtcctggggaccttcaccacgtcgggcagcagtgcgccgcagaattatgcagcagccacgtttaccaacggcgaccagaccgtggagaatcgtagcggcgcgtataactacaacaacagtctgaatattgttgcggccgacagcgcgcctcaggctcagctgactgcagataatagccagagctggaatattgaatttaacagccagaaggacaaccttgcgagcgacgttcaggggctggtagccggcctggatgcagcggaacaggccgggcatcaggtagcggatgacatcagcaaccacatgaaccaggtgcatctggcaaacctgctgggagaacagcaggacggtgcgcaggtctggggcgatttcctttatcagaacggtaatttcagcaacgacgtcgactataaaagcatcactcagggtgcgcagggcggcgtagactggacggcgcatctggacaacggcgacagcgtcaccggcggtatcgcgctggcgtggacgcgcagccgcgtgcaggacaccagcgacggcgcggatagcttcaaagacagcgtttacggtaactactacagcctgtatggcggctggcagcaggcactgaacggccgaacctggggtctgtttgctgacggcagcttcagctacggcgatatgcgttactcgctgtctgccaacaacgtgacgggcgataccagcggcatgacggaagcgctgcacggctccaccgatggcagtctgtatctggcgcaggcccgcaccggggtgaacgtgttgctgccaggcgaaacgctgctgcaaccctacgccactcttggctgggatcagaccaaagcgaacggcttctctgacagcgaagtcacctttgccgacagccaggtctcttcctggaacggcggtgcgggcgtgaggctcaccaccacccttcgcgatttgaacaagaacgtgaaggtgatgccgtggatcgacgcgcgcttccagaaagagttcagcgatgacaccgacattcaggcggcggattatcacaatacctccggtcacaacaacaccatgggcatctttggggcaggtatcaacgccaccatcgcccataacttcaccctgaccaccggcgtctatgtcggtactggcgatgtggataacgatgccagcgtacaggcggggatgagctacagcttctga

SEQ ID NO: 126232 - DNA, 450 bp, Enterobacter cloacae
gtgaaggaagttaaaaataacgacgtttatttgactttggatgataaaaaaagtgatgaatttatcttaaagcaaaatctcgacgcactgcgaaacacaaaaaatgacgagatgacgcgcattacacaagacctggtatcgatcccggcgacgctggtgcggctgaaatggcagaatcgccgtgagatttatccgctgcaggtcaaagaagaaatttacggtgccgtgatgaacgccatcatggaacagcggccagagctaaaagagaagcttctgggacgccttgaggccaactaccagtacctgcttgccagagagatcgccaccctgcgtctgacgcgcaaactgtcagacggcgagtaccgtacctcaaacgtcacctgcgttgcgcttgatgaggacgcgctggcaaccccctctaccgcaccgacggaaaataagaacgcataa

SEQ ID NO: 126233 - DNA, 402 bp, Enterobacter cloacae
atgaaaattaggaagttaacaggagcgatgctgattggccttacgttatgcggttgtgtaatgcaccgccagacacagccagaagtggaaggacgtctaatcgacagcgcaggtaagccagtcccgggcgctaaaataacattagagagggagcaaacgctttctgacgacaacggtcgttttgcttttcagagccagcatgaatggatcttttttctgccaataggtccgatggactggatttatcacaccccgctccagataagcgtcaacggaaaggaatatggtgcagaagtaggcggcggtctcggtgggccacataaactggaagggaaagcgtacaacgttatttgcacattacctgatcttcccggagaagcgagatgtcagtccggtttataa

SEQ ID NO: 126234 - DNA, 1026 bp, Enterobacter cloacae
atgatcagaattatagggtgctcgctctgctccattaccgagcacgaagggcgcattattcagagccgctctgaagattcgatcatcaatgagatcgaagccattcgcgactccgtgccgggctttaccggcgtgatttccgatcttggcggcccaaccgccaacatgtatatgctgcgctgcaaatcaccgcgcgcggaacagacctgtcgtcgcctctcctgcgtctatccgaacatttgtgagcacatggacaccaaccacgagccgacgatcaacctctaccgccgcgcgcgcgatctgaagggcatcaagaagatcctcatcgcgtccggggtgcgttatgacatcgccgtggaagatccgcgctacatcaaagagctggcgacgcaccacgtgggtggctatctcaagattgcgccggagcacaccgaagaaggcccgctgtcgaagatgatgaagccgggcatgggcagctacgatcgttttaaacagctgttcgacacctactcgaagcaggcgggcaaagagcagtatctgatcccgtacttcatctccgcccacccgggcacgcgtgatgaggacatggtgaacctggcgctgtggctgaagcagcgccgcttccgcctggatcaggtgcagaacttctatccgtcaccgctcgccaactcgacgaccatgtactacaccggcaagaacccgctgagtaagattggctacaagagtgaagaggtggtggtgccgaaaggggacaaacagcgtcgtctgcacaaggcgctgctgcgttaccacgatccgaaaaactggccgctgatccgccaggcgctggaagagatgggtaaaaaacatctgatcggctcgcgccgcgactgtctggtaccggccccgacgctggaggagatgcgcgaagcgcgtcgccagaaccgcaatacgcgcccggcgctgaccaagcacacgccgattgtgcatcagcgttcgaacggtggagcgggaatgaagaagaccgtaaaacgtaagatcggttaa

SEQ ID NO: 126235 - DNA, 876 bp, Enterobacter cloacae
atgggcagattgacgtttggcccggcgatggacgtgacgcatgcgtgcgtccgtcgccgttttcgccatgcttcctgttgtgcctgcgctgacgtttgtcccgtgcaggctttttcttttacggacgcagatatctcggttgatgagaaccgctgtattgaatgcggtgactgcctgtttgtttgccccactgaggccatcaccggcatcacgccgcgaaaacgctttttgtgtggcgatacgcttgtcgggccttttattgaacgtgcgccggatgtaaatgaactgctgctctggcatgcacagcaccatgttcgttttatcagtatcgacgtggagcagtatcctgactggctgctggcgattgcccggcttaatcttgtgcttcgtcgacgtggtgaagcggcatgggcgtttaaacttttacccgtcaacgaggttaatatcgcccgccgtgcgctgatgcacgttccccgtgaggatgtccggacctgtagcgtcgtgcccggtcagcgtgaactgcgcagagcgttttctggggttagtgaggcagagatagctctcgacgccggaacgtgcgtattgtgcggcgcgtgctggcggagttgtacggaaaacgcgattcggtttgagaacgctgaactggtcgtcgaaaccggacgttgtaccggttgcggtggctgcgaagcggtatgccagcatgcggcgataaaagtgacgcgaacagaaggaacagcgaaaaacgtggccatactggcatatgaagccgtttgcctgaagtgccaccgtcatttctggtcatttacgcctgatgaaaagcagtgtccgctctgttttcaccatcaacacgatatgcgaaacccggactgttgctaa

SEQ ID NO: 126236 - DNA, 1035 bp, Enterobacter cloacae
atgcagttaggatttgtcggtcttggtgcggtcgtggaaaccgcgtatctgcccgcgttacgtcgcctttttggtcacgcggttcattgttttggatttgatgttctccccaccaggcagcctgaaggcgtcacgcgctgcgcttcgcttacggaacttctcgccgtaccgcttgatactctctttattaccaccgcatcgctgcaccacctcgaggtgctggaacaggccatagcctcggccgttccgcggattgtgattgaaaaaccgatcgtcgccacgcttccccaaatcaaaatgctcaacgcgctgctggtaaaccccgacgctgcttcccgcgtgctggcgctcgatcactggatggcgcgcatcgaaacggtaaagcggtcgttggttggcagcgtctctgacatcgtcaaaatcgacggctttttgcaggagccaagcggatataacgccgcaggggaacccatcgcgcttaactttgccaccggcgagccggacacccgaacgcttcgccacccggacggcgtaatcctggatatcggtacgcacgtgctggcgatgctgcgcgaaacggtgcgttatctgggcggaagtgatgatatgaccctgcaggtcgtcacggctaaagaccgcctgggccgcgctatcgcaaaaggcgacctgtccacggcggagggcgaggcgcatctccagggccgcatcagcggcgtgccggtgaatatctggcttaacaaatacgcgggacccgcgggcgggcaaaaaggattacggctctgtttgcgcgacgggcgcatcatcagccacgaccggcgcggcgcggaggatgtgcttgagctgagtgagggtaaggatattcagcgctggcatatccccgggacactctacgagcactgtcttgccgggcacattctgggcaccaacagtctttttgaacgggatccgcacgaggtgagccgcacgacgcgtcgccgagtcgaggaagttgagctgctgctgaccttgcagcaacagctgcgtggcccgcactga

SEQ ID NO: 126237 - DNA, 189 bp, Enterobacter cloacae
atgtgccgtgatgccgctatttcggaagccagctattacaactggaaggttaaatatggcgggatggaagcggccgatattaaaaaaattaaagaccttgaggatgagaatcgacgtttgaaacagatgtttgccgaccttagccttgagtgcggggcgcttaaagacgtcatcgaaaaaaagctttaa

SEQ ID NO: 126238 - DNA, 3915 bp, Enterobacter cloacae
atgaaaaaatttatagtttttgttcatggcttaggtggtaaaatagacaagacgtggggtaatttcccacagtatataattgacgaccctgatattgagcatcaagtcattgagtatgggtacacatcacccaatttcataacacaattctttaaatctgccccaacaattttaaatattgctaatggactgcttactgatataaaggctagatgtgaccttgcgaatgatgaaatcattttagtaggccatagtatgggagggttagttattaaacgtcttctcgtgaggcttagtaaactaggaactaaacataacatcaaaaaagtatgtttttttgatgtacctcacggtggttcaggtttagcaaatattggtaagtttattgcatttaataacagacacatgaagtcgcttgttaacaactcaagtgatttagatgctttggatgaagattgggtagataaaaagttaagtgagcagttgaacatactgagcattattgatgcaaatgaaactgtagtatcttcagtaagttcaaaaagcctatttagataccaccctatcgaaacaataaatggagtcgatcatagctctattgtaaaaccaaattcaaaagatgacatccaggtcatcctactaaaatcatttattaaaaactctccttcagttggaaaatttaacctagatgcagctaagcctattaaagagtggcttaaatacgatgaacgtaagcacgagctttcgtatgaagaagatgaaccaaggaaaatagcattttcagcgctatcagaagcaatagactctgatgcttgctttataagacttactggtttatctggtttaggaaagtcacggctattgattgaatacaaaaatagaaacaatataaaagataatgatttcattgtatttagtggctctgaaaatattcatagggttcaagaatcaataaaaacagccgccgaaaacggtgcgatagggtttattataatagacaattgctcagtggaactacataattacgccacaaatgcaattgaggttaacaattcacctttaaaactcatcaccacttatttttatcacgaagaaaataagaagctaacaaatagcattcgtataaaattagaaaaattaggggcagagcagataaccaatattatcgaaagtcgacttccagatctagatccttcatcaaaaaagcaattagagaaatttattgagggattccccctgctggcacaaatgactatcaaagagctacagcaagaggggcgtgtcacaaccaaatttgatgaatccaaccttgtagaaaaattaataaatggtgatgggagcctgagtgaccaagctagagaattgcttaaagtattttctcttttcgattattttagatttcagaaagggagcagagatgatatcaatgaagatgctgaatttttaaagcgtattgctggaacagaccagataactttcgaaaatacaattatgacattcaatcataaagaattgattaattgtactggaagcctagctcgcgtagttcctaaaccattagctttaaacttggcactggaatggtggaatacaagtgcatttgatagacaaagtgaaattgtttctagccttccagctatgctgcttgaaagcttttgtgatcaaataagatacctagactcatcgataaatgttcagtcatttgtcgaaaacttttgtgctgccaatcgccctttcggccaagcggaattgttactatccaaacagggttcaagactgtttcgcgcattagttgaagtgaaccctgccgttacgaacaatcagttatacagagttatttttcaattaactgataaagagatactcgatattaaaggcgatgtaagacgcaattttgtctgggcattagagatgcttgcttttcataagtcttgttttgataaaagtgcatgggttttatttaaattagcacaatttgaaaacgaaaattatagcaataattcattgggtcaattcgcacaattatttcgctggcaattatctggtacagaagctgattttgatcaaaggctagaaattttgaataaagctctttctttagatttagaaagcgcagacgtggtaataattaatgctattaaaacggcaatggacactcacggaggcactagaactataagagcagagtttcaaggtactaagccagagctaaaagaatggaatccaaaaaaatatcaggaaatttatgattactggcagtctttattagaaattttacttgtaattattaaacgcggaaatttaaccgaacaggttaaagatgcttttggtaatgaaattagaggattaattcgatataacttatcggataagttggactattttataaaagaagtaataaagttaacaggtaaatactggcctgccgcagctcaatcgatatcccatgctttaaattatgatatcaagggaatgaatcaggaacaaatcgatatcttaatgtcgtgggaaaaattattaacgcccgatgaaaatagtattgaggagctattgaaattagtcgtatttaatccatcgagagagcataaaaaagacgacaatggccactatattgatctggcagctgaagatgcgaagggtctagcaaaagtccttgcaaacaggcttactgatttgtataaacattttgaactcttgatgacgtttcctgagcagaagcaaagctggatttttgcaaaacatttggtcctagaagcagattatacagaagaactactcaatgtaactctcgaatatttgcgcaatcataaaactataagcactcagttcatttctggtttactttctggactttatataaaggaacctgctaaatggaaagaaataattgagttattaggttcagatgaaaagctcattaaatattatcctgacgcgatatgcacaggtcgctttgatattacacatttagatgttttcattagactgatagctgaagataagcttcctagttattcagctgctacgctcgtttatggacgcgcgacagagcatttaactgaaaagcaaatatccaatttttgtatatcactcagcaaaattgatgcgactgcaaattgggtagcacttgataatatgaatatgtacatatttggtcgtgaagatgtggactttactcagttaaggctgactttagtccatctggttcttaatgtttcttttaaaaaagaagataagagtcgctattcggatagctatcattggttaaactcagtggaacgactattaaagtctgaaaacgctgaatttgcattacaactatgttcgcatataattgaccaagttggcgaaaataatgttgattattctgatttatgggattacctaaacaatgctttttataaagcatttgagctgcatagcaattatatctggccgaagatttctaataaattcaatgataaaaacgcaaataaatcgtattacttaattgacttaattggaagtggtaaatcttataaaaaaagagataacagtatttttgacatattaaaaccagaggttgttgttgcttggtgcagggatgatgttgctcttcttattgtggctcgggcgatttcaatgtttatctcaaatggcgagcagcgtgtagttaacccattgatgattcaattattaaaagaattctctaataataaatcattccttagtgaaatatctgctaacttttcaagcagatcgtggtcaggatctttagtgccatatttagaggctgataaggagatacttaaaaatttgacctaccacgataacattaatgtaagaaactgggctgtaagtttcatagagaacattgaccatcaaattaaatatgaagaaaatcgcgatgctgaagagcatatgttaagaggctaa

SEQ ID NO: 126239 - DNA, 3387 bp, Enterobacter cloacae
atgttgtgtaatattagtttggaaaggaactcgcagaattcaatggctactacactagatgacctcttaggcgacggacgattggctcgccttttttctaaccaaaatcgcgcttgtgcacttcagctatgggtccttcagattaaatctgaaaagtcgacagaaatgcgtgtagtctacggacgtctactcccatacagtcattcgagtaacagttggtccttcagcgacaacgataaccatcttatcttcggaaacatcaaggcaaagtttactcgccttaacttgtatatagacagtatcctttgtgccgagtttttaaggcaattgattgctggtcggtcaatctcagaaataaatgatatattggaaattgagtgttcgagtaaattaacgaaactcttcggtgctactgctcttatggccaataatctggtctatcgtccagttgcttatctactcaaccgagatgcgtatgatcgccagtcaatttctagcccacatagtgcagccggggcttttagtgcttcgattactcaaatgaataaggaagcgttatttctgttgagtgaggaatacagcgctgccttaactacttcgttagttgaacggctcaatgcggaaactggtttggattttggtaaagcagatgccacgcgatttggtgatcttgaattattggtctttcctacacttaatgaccttgagcagaacttgctatgtgttaaatggattgattcatcacctgctctatccgtttgctttgcttcgacacaagtgccgctctttgacaaatttcagttccacttgagcattataaacgatggccaaatcatttcctcgtctattgcttcagcaaatcgtaaagaggatggggtgtttgaatatgtgtttaaactgagcgaggggatgcgtgagaagacagatagtactgaactggagatttttggtttctcaaacgatcgccctaatgagggattactctgctgccggtggcggataggatatatccgagaaataaattttcagggccatatggtggggcaagggaccagttccgtcaagttcgactggcttgaaaaagcatccaggccagctatgtcagagcgtgtaaaggctgcgcttacggttaaccggagcaatttgggatttggtagccgcgtcggagggcggcaggcagacccttgggttccggtgaatcgtgaacttctttctctttttacacggcttcatccgcctaaatcagaagggcagtttttccagagatggagtatggggaatggagaagggcgattgcaattcgcggagtggtttagaactctattgggcaagtaccagcagcatcaaatagttattttcgatccttacttcgagactgctggtttagggcttgtattgattaatgcagcaattaagtccgattatatcatttttacgtcgctgccaaagacatcgagagagattgaatatgcaaaagataaatccgaacaactttatccggggcgattgaacaatttaatagcgagctgtgagcataatagtcacttactaggccacctaaagtttcgtatctatggtctaaaagaaggccggctacatgatcgttatattttaattatgggggcagatcgtcttccggttgccggattccatctgtccaattcgtttcaaagtgcagccgaaaattatccattattgattactccaattccttcggatgttttactccaagtagagcaatataaatctgcactggtacaggagagtatggttactaagtttggaaatgaagttgagaatcccatgatgcaactgattttcgattctagcaagacgtcagttgtaccacgacgttatgagtctctaaactttctcgaaaggtctggagtgggcagagtactcagtgtatggttcggcgaaatgtcattgcagggcttaagtggtaatcagttaagagcgcagatgatggcgttaggcttattaaatgataactcgcttattttgcacgatgggttacataatttcatcaataacaaacaagttattaactctaaggactttaatgtgacttggggtgtgctgggagaagtgctagcacattctcccgctggggacttagaatgtgacgttattgaatcaaaaagcgattttcttaagttattgagtcaatttgttgtggaatcgttcgatcgcctacatgaaaatacagataaggagctggctgtagttgacgtatggttctttcgaaaaactgtagaagccttactgcacagcccttatcgcacggaacagctattccattcgacaaaatacgcagccctcacttggccagagtactttgccatcaaaatcttatggtgtcatgctccggattgcttgttgacgatcgccgaagcgcagatctctagattgcaaattgagcacgaagagtcggagatcatgcggttgtctctgttgagccagatagttagcgaagtttccctatcgatacagttcaaaatcagcaacattcaacgagatagccttatccatcgcaaccaaggattactaaaatggctggggtttaatgcaatagaaagacagttagatatacccgcaggactcacgtcagtattgtcgtgtctggaaacccttactcatcaggaacgagtgctcgccttaggttggatgattaaccatgcagccaaggattccaataaagagaaaatttataaagatttggtagaagcgctgcatgaggaactaccagagaaaatatctatggaggaattgcggtacttggtcgattccatgcgaggacatatgaagcaattagcatgggctgagccttggttgtctcaagatgtaattttaccgttattgcagaatgcccgtgcctccactgaggatgcatgtgatatatggatacaggagttggtgagcatgcttgggccgcgactgaacaatcagtctcgcttgtttgaacgaacccgtgaagggcagatgactaacattgcttcgtttcttttcgccaacagtaacacctctcagcgagagttaagcctgacgatgatgaataaaatcttaaaccgacagcgacaaatcatacaacaaccactcgccagcacgtctaactggagccaatgggacgatgcgctgagagtgtcattatggatacttgcttttgctaaatggagtgagttttatctaagtgcgctaggtacgttcgatcaaaacttagaacggttatcaggtgatgcacaaaggcttgccatggttagaatgaaagaagaatggcaatccgaagatgttggtatacagagcgaactcattgagttcctagagcagggcgagagactattaagtgaaggcggtaggctgaaaaacgattttcataagctagattaa

SEQ ID NO: 126240 - DNA, 1926 bp, Enterobacter cloacae
atgcaaaccgaacgtatgaccatggcccaggcgctggtccggttcctgaatcaacagtacgtcagcgtggatggcgatgaaacgcccttcgtggagggcgtcgccaccatctttggacacggcaacgtgctgggtatcggccaggcgctggagcaggatccgggccatctgcaggtgatgcagggctgcaacgagcagggcattgcccatatggcgacgggatttgccaaacagcaccgccgtcagcgcatctttgccgtcacctcctccgtcgggccgggtgccgccaatatggttacggcggcggcaaccgccacggcgaaccgcatcccgctgctgctgcttccgggcgatatctacgccagccgccagccggacccggtgctgcagcagatcgagcagtatcacgatctgagcatcagcaccaacgactgcttccgtccggtctcccgctactgggaccgcattaaccgcccggagcaactcatgagcgcgatgctcagcgcgatgcgaacgcttactgacccggcagataccggtgcggtgacgatttgcctcccgcaggacgtgcagggggaagcttgggattacccgctgagcttcttcgcgcgtcgcgtgcaccacatcgagcgtcgtccgcccgatccgcagcgtctggcgcaggcgcgggcgctgatcgcccgcaagcgtcgcccgctggtggtgtgcggcggcggcgtgcgctattccggcgcgcatgaggcgtttcgcgactttgtcgagacgctgcagctgccgtttgccgaaacccaggccggaaagggggcgctggtaagtgaccacccacttaacctcggtggcgtaggggtgacgggcgggatggcggccaaccagctcgcgccgcaggccgacctggtgatcggcatcggcacgcgcctgaccgactttaccactggctccaaggcgctcttttcccatccggacgtggaattcctgctgctgaacgtggccgagtttgacgccctgaagctggacgccacggcgctgattgccgacgctcaaaccgggctcgaggcattgacccacgcgcttggtgattaccgcagcggctggggagaggcgatcgctgaggcgaaatctgcctggcgcgacgagtgccgtcgcctgtgggatcgccagtggcgtcctgacgacgcgcccgaagtggcggggcacctggacgcgcggctggcggaatacggcgaggcgctcaacacccgcctgacccagacgcgggtgctggggctgatcaaccagcatgtggaagataacgccatcgtggtgggcgcggccggttcgctgccgggcgatttacagcgcctctggcaggtcaaaacgccggacagctatcacctggagtacggctactcctgcatgggctacgagattgcggcagccatcggcgcgaagcttgcccgacccgagcagccggtgtacgccatggtgggggatggctcctacatgatgctccactccgagctgcaaaccgccgttcaggagggcattaaggtcaccgttctgttgtttgataacgccagcttcggctgcattaacaacctgcagatggggcacggcatgggcagctttggcacggaaaaccgccatcgcaacccggaaagcgggcggcttgacgggccgctggtgaaggtcgattttgcgcaaaatgcggaaagctacggctgccgcgcgtggcgggtaaacgatgagcaaagcctgctggcggcgctggaggcggcccgcgtccatcctggcccgacgctgctggacatcaaggtgctgccgaagaccatgacccacgactacgcctcctggtggcgaaccggcgatgcgcaggtggcgaagtcgtctgccgtgcgtgaggccgcggagcaaacgcagtcgcaggtgaaaaaagcccgtcagtattga

SEQ ID NO: 126241 - DNA, 726 bp, Enterobacter cloacae
atgtcagatctggttgaggtacttctgaacggaccggcacagctctctctgccactctatctccctgacgacgaaacgtttgcaagtttctggccgggtgataacccctctttactggctgcactgcaaaacgtgctgcgtcaggaacacagcggatacatctatatctggtcacgcgaaggtgcggggcgcagccatctgctgcatgccgcctgtgcggagctttcggcgcgcggtgatgcggtaggctacgtgccgctggataaacgaacctggtttgtccctgacgtgctggaggggatggaacatctctccctggtctgcatcgataacatcgaatgcgtggcgggggatgagccgtgggaaatggcgatctttaacctctacaaccgcattctggaatcgggcaaaacccggctgctgatcaccggcgatcgcccgcctcggcagctgaatctgggcctgccggatctggcgtctcgcctggactggggacaaatctacaagctccagccgctgtcggatgaagataagcttcaggcgctacagctgcgtgcaaagcagcgtgggtttgagctgccggaagacgtgggccgtttcctgctgaagcggctggaccgcgaaatgcgcacgctgttcgacacgctggatcagctcgatcgcgcctcgattaccgcccagcgcaagctgaccattccgtttgtgaaagatattctgaagctatag

SEQ ID NO: 126242 - DNA, 570 bp, Enterobacter cloacae
ttgacaacctcatcacaacattacctggttatcactgcgctgggtgccgacaggccgggtatcgtgaacaccatcacccgccacgtaagcagttgcggctgtaatattgaagacagccgtctggccatgctcggcgaagagttcacattcattatgttgctttcagggacatggaacgccatcacgttgattgaatcgaccctgccgctgaaaggtgccgagctggatttgctgatcgtcatgaagcgcaccaccgcgcgccctcgcccggccatgccttctaccgtctgggtgcaggttgaagtgcctgattctccacatctgatagagcgcttcaccgcgctgtttgacagccatcagatgaacatcgccgagctcgtttcccgcacacagccgggcgacgcaagcacggttcccacgctctttattcaaattaccgcgcacagtcctgcgtcacaggatgcgtcaaatatcgagcaagcgttcaaagccctctgtacagaattaaacgcgcagggcagtataagcgtcgtcaattattcgcagcacgaacaggatggagttgagtaa

SEQ ID NO: 126243 - DNA, 1947 bp, Enterobacter cloacae
atgctggcgtttgaacagctgatacgcgagcttgagcgcaccggccatcgtcggctggtggtgctcagcggtgagacgcagtggacgttgagtcaggcgactgacctgcgtaataccctgccgggagactggctgtggctggatgacaatccctctaaaaccctcagcggactgctgggacgcgaataccttcacgccgtttttgacgcgcgcgccgggtttgacgtctcagccttcgccgcgctcagcgggacgctacgcgccggaagcctcctggtgctgctggtgcctccgcttgctgactgggccgacaggccagacagcgattctttgcgctggagcgacagcgcggagccgatcgccactccacactttgtgcaccacttctgccggacgcttgccgccgattcggatgcgattgtctggcagcagcatcgtcccttgtccgttcccgttgcgccggatttacccgactggcagcctgccagcggcgcaccgcagcgcgagcaggcggagatcctcgacgcgcttctgaccatgcctgcgggcatcgctgccgtaacggcaccgcgcgggcgcggaaagtcagcgctggcggggatgctgctcaatagcattcaggggagtgcggtggtcacggcaccagctaaaggggcaacggatgtcattgcgcgctttgcgggcgagcatttccactttatggccccggatgcgctgctggcctccacgctgcaggccgactggctgattgtcgatgaagcggctgccatcccgggcccgctgctggagaagctggtgacgcgcttcacgcgcgtattattaaccaccacggtgcagggctatgaagggacgggcaggggattcctgctgaagttctgcgcccgtttcagcgaactgcggcattatgccttatcgacccccattcgctgggccgccggatgtccgcttgagcggttcgtggcaaatgctctgttatttgatgatgcgcttatcgatcgcaaaccggaaggtgaggttcgtataacgccgctggcgccgcggatgtgggagagcgacccggcacgcgcggcaagcgtatatgaactgctgtgtgctgcacactaccgcacgtcaccgctcgatttacgccggatgatggacgcgcccggccagcactttgctgttgcagagacgggggctgatattgcaggcgcgctctggctggtggaagagggcgggttgtcaccggagcttagccgcgccgtgtgggcgggataccggcgtccacgcgggaatctcgtggcgcagtcgctggcggcgcacggcggctctccgctcgcggcgacgctgaaagggcgacgggttagccgcattgcgattcaccccctgcgccagcgggaaggcatcgggcaacggcttatccgtagcgccagcggggaagattatctgtcggtgagttttggttataccgacgagctgtggcgtttctggcagcggtgcgggtttgtgctggtgcggatggggagccatcgggaagccagcagcggctgctacacggcgatggcgctgctgccgctgagcgaggccgggcgtcggctgtgcgcgcaggaacatcaccgtttatgccgggatatgcgcgtcctgtcggcctggaacggtgaaaagatcccggtggacgacggctgggaagctacccttaatagtgatgactggcgggagctggcggggtttgcttttgcccatcgcgcgttttcaacctcggttgccgcgctgacgcggttgttgctcaccgttgatatgccgcttccggccctgcgggggaaactagcagggaaaacggatgagctcgggcgaaaagcgttgctggcaaagctgcgctctgaaaccgcgcaagcgcttgaaaccattgattatccgcgctgccagcagttgaaggaagccattttgcaatggcaattttttcaatga

SEQ ID NO: 126244 - DNA, 339 bp, Enterobacter cloacae
atgacgaccattcaggcttcaacccaacctattcagaccagcggcgggagcggtacttccagcagtaacgatatcgccgcgcaaatcagccgcattctcgataagatcaaaaagctgactcagcagttaaaagagctggcgaacagccccggcagcgcggatgagaagaaaaagcagcaggaactgattcagacccagatcaaagtgctgcaggcgcagctcgccgcgctgcagcgccagcaggcggaagaggcgcagaagaagcaggatcaaaagctcggcaaagtggaaggtgttaacagcccgtcagacacgcatcagatcgatatctacatctaa

SEQ ID NO: 126245 - DNA, 360 bp, Enterobacter cloacae
atgcagatggcgctgcttgagcggcgggagctggacgtgggcatcgggcgaatggcaaccgaacccaccgcggggttaaccagcgtgcggttgtatgacgccgcttttctggtggcgatgccggaagatcaccgtctggtgagcgaatcagcaattgcgctctcagcattgcaggacgagtattttgtcacgatgccttccgcgcattctgattgggcatttttacatcgcgtctgccagcagtccgggttttcgccgctgatgaaggagcgtataccggccgatttgtatgtggtgtatgacgagaagcaggcgacgcctgcggtgaagacgttgattgcgacgttgacggctggctga

SEQ ID NO: 126246 - DNA, 1428 bp, Enterobacter cloacae
atgacaggttcacgcgttatcgctactatcggcccggcttcagacaatactgacacgttactcaaattacgcaaagcaggcatgtccgttgctcgattaaatggttctcataatacccccgaatggcatgcagaaacggttaagcttctgcgtaaaaccgttcctgatgttcctgtactgctggatattcctggaaggaaaattcggacactccagttggctcatgaaccttcgttcaaaagtggcgatacaataatactgacaacagatacccgccatgacggtacagaaaaagttcccgtcggatttgatcggcttcatgagaaattatccgtcggcgacggcgttttcgcagatgacggaacgctttcatttgttgttgacaacattcagggaagagatatttatttgcgggctaatatggatggcaaattaaggagtcgtaagggaataaatgtacctggtatcgaccttgggcagtctttggtaacagataaagatcgagcaatgattgaatttgctaaatcaatcggtgttgattatatcggaatcagttttgttgaaagccgggagcatattgaagccattcgtgatctgattgctgcacccgttccgcgtatcgtggcaaaagtagaaaaccgtggggggattactcatcttgctgaaattgtagattcggcggatgtgattatgattgaccgtggcgatcttgccgttgaaacatccattgatcatgtggccctttatcagaaaaaaatcctccgtgaagcggctcgcgcaggtaagcccaccattgttgcgactgaaatgctccacagcatgattgaaaatcctttaccaacaaaagcggaagtcagcgatatcactaatgctatattggatggcgcttcagctgttatgctttccggtgaaacggctgtgggtcgctatccggttgaggctgttgatcggatcagtcgtattgcgacactcgcggctacggggcgccactcaccttatcataccgtcaaagagccaacagacagcgatctcagacataccattcgtgcgcttgcaaaggctttaccgctgactcgcctggtcgtcctttcccgtacgggttacgccgtgcgcattgctgctatgtctgatgccggattgcctgtattagccataggaacacatccagaattgacacgtagctggaatctacttccgaatgtgaccagcgtgtatattaaaaacgaggatgaaatatcactacagggcgaagatcaacttttgagaaaattaacccatagtggatatcttcttgaagatgattatgtcgtgattatctctgctcaacaggacagtaatagccttaatggaaatgtaattcacacacttaatgtaaaagcctggcttcagcatcagttgataaaacgcaatgaagcagaggtggcataa

SEQ ID NO: 126247 - DNA, 735 bp, Enterobacter cloacae
atggaacacgaatatctcttcttgcctgttattatgctgttttcagtgattcaatctatctttggcatgggtattctggtctttgggacaccagcacttctcctgctagggtatgatttttcgtctgtcctgggcctgcttttgccttcatcggtcctgatttcattgactcagttatatactggtcgtggatggcgtgtagacaggaaagaaattttcaatatggccttgtgtgcggctgctgtgattatctttctgagtgtcattattatttcaggtggaaggtttaattttgacttcattattggtttggtactaatattttctgcagtagtgagattgagtacaaattttagacagtttatcagtgccaggcttattaaatatcagcgcctttatgtgctagtgatgggggctttgcatggggtaacaaatatgggtggggcattattggctctctatgcctcaaccattcaaaacgaaaagacagccatacgcgcagaagtctcacgctattatctgatgtttggcataatacaattgcttacgcttactatcctgaaaccacattctctgagtctctccggctttatggccgcaccatttgcactatttgtttactggggagtagggaacgtacttttccgtcgcgctagcccatccgtatatgaaggtctgctgacagcctttattgcggtatatggcattctggtgctaacgaagggatatatctga

SEQ ID NO: 126248 - DNA, 927 bp, Enterobacter cloacae
atgattacgactctgctcgctcttattcctgtcatgtttctgattgccctgggctatatgctacgctcgcgcaattttattgatatgcaattttggttgccctgtgagaagctcaattacttttggctgttccctgcgctaatgttctcccaggttgcctcggctgacctgggggaatttccggtcaagcctatcgcatggtctatccttggggcagtgctgctggcagcactgtctctttggatctggcggggattaagcagacagtcaggtcctgtattttcctctgtcattcagggagcattacggccgaatacctatattggggtggcggcagcggcagcaacctatggcactaccgggttggcagtcacgtcgattagtatcgctgtagcgattcctcttttgaatgtggcatccattattgtactgatgtattacggtcagggttcgaaacccgcgcaggcacaaatcatcagggcgctggtacgtaaccctgtcataatttcggtgcttgctgggctgctttttaatgtcgcgagtttgcatttaccgcagattgtatccgacattttgcatattctgggaggtgcttctctgcctctggggctactggctgtaggtgccgggctggatctgaaagcggcccgtgcttctcacggtgccgtgttgcagtcgacaatcgttaagcttctttttgttcctctggtgacactactcattggtatatggtcaggaataagtggtcctgtactggcaactgtcgtactcttcaacgctcttccttgtactccctctgcctacatcatgtccaaactgcttggtggagattaccgcctctcagcaggcattatttctgttcagacggtactggctgcggtaacgattccggcaattctttttctgaccacgttgtcaccgagctga

SEQ ID NO: 126249 - DNA, 663 bp, Enterobacter cloacae
atgaaactcagcgaacgtgccagacgctttgcaacccaggctcatcgtaaagccggtcaaaaacgtaagttcacaggcgaaccttatattgtccaccctgcatccgtcgtcaaattactacaaagcataaatccaaccgaagaaatgatcgcagcggcatggctccatgatgtcgttgaggatacgggagttacactggaaaccatcgattcgttgttcggcgcggaggtcggacaatatgttgaaatgctgacggatgtcaggacccggcgaacgggaggctctcgtattgaccgcaagaatgccaatctcattcacagcgcgcgggcaaatgccggagcacaaacgataaagttatgcgatcttatagataatgcaagagatgttgtggcgcgcgacccgatttttgcctgcgaatatattttagagatgaaaaggttgctcagtgtcctcacagccggagatcaaatcctgtatgcacaagcccgcgcgctatgcgatgaaggacttgccctgctgtgtcagcagcagggaagcgatgcatggttcgtagagagctgggcgcagtatgaacagcacacgccactcagctcggtgacaacgtggtcagaaaaagaattgccggaatcgttaccgcagccagtaccgtctgaacagaaataa

SEQ ID NO: 126250 - DNA, 456 bp, Enterobacter cloacae
gtgaataccttgttagaacgctggtgcgaaagccgtccctggcatcgggtactctgctggtgcctggggagtctcctggcagggctggtcgcgtggggcgcgttgctcagaccgatagacaagcagtgtgctgaacaacaacgccagctgattgaggatgtaagcactaacgcatcgttatggcctgttgtcagaaaggggtcgtttcgtccggacgctgcgaaggctcgggagctggcgccgttctccccgctcaattttcagggcgataacacgacgctggttcactggaagccgctgcaaaatggaggggagctgtcgctggatgcggagtggcaggccattcctgagcttttttcccggctggcacagcaggatgtgcagatcgcggctttcacgatttcgccacaaggttcggcgttacgcctgcggctggagctggaacatgcgaaatag

SEQ ID NO: 126251 - DNA, 495 bp, Enterobacter cloacae
atgagcatcctgaattttctgccctggcgacagcagcggcgcgcgcgatgcctgcgcttctggggcgcaatgtgtatcggcacagtactgttgatgttcgtagtcattgtttgtctgcggatgaaccagttcgtgaaactgcgcgcgctgcaaacggatctgacgggaatgcagtccgtgcagcacgcgcttgtcgcccggcaaaaactggccgcacaggcgcagctccccgtgcaaaccaggcaacgacgcgcatggcaaccggtgctggcctccctttcccgcgccattccttcacaggtctggctgacagagctgcgctatcagccgcctgcgctgatattgaccggttacgctatcaccctgccggccctctctactctgcgcgatgcgcttggccaaatagcgggctttacacccgggacgccgggcgagcttcgtcaggatagtcgggggcactggctgtttacgcttcatctcaaaagcgaggggtaa

SEQ ID NO: 126252 - DNA, 390 bp, Enterobacter cloacae
atgaaaaagatcgttaaatggtgtgctgccgccgtattcgttggcgcactggcaggctgtgcgcgtactgccccaatcgctcaggttcactctactgtgagcgcgggtcataccgccgaccaggtaaaaaccgcgattttgaaagcaggacaaaaacgtgactggatcatgacggaagccggtccgggcgttatcaaaggtcgtctgcaggcgcgcgaccactcggtcgacgttcgtattccttattccgcaacaagctattccattaactacgaaagcagtatgaacctgaaagcggctgacggtaaaattcacaaaaattataaccgttgggtgaataacctcgaccacgatattcagctgaacctctccgcgggcgccgcactgtaa

SEQ ID NO: 126253 - DNA, 1065 bp, Enterobacter cloacae
atgtacgaaaaggatacgctcagcgcactggatgccattaccgaagcgcaacgcatcgcttttgctccgatgttatttcagaccgcgctttgtctgcgtaactcaggcattctcgcctggctcgataaacaaggtaaagagggtgccagcctcgaggaaataaccgaacacagcacgctcggcagctatggcgtcagcgtactgctggatatgggattaagcgggcggatcgttacccaacagcatggacgttattttctggcaaaagtgggccactttttactgcacgatgaaatgacccgcgtaaatatggatttcactcaggacgtttgttacaaagggctatttcacctggcggacgccctgaaggaagaaaaacctgcgggattagcggtgtttggcaactggccaaccatctatccggcattatcccaattaccggctcaggcgaaagagagctggttcgcctttgatcattactattccgacgccgcgtttgatgccgctttgccatatatattcgcaagctcgccgacaaaattgtacgatgtgggcggaaatacgggtaaatgggcgttacgctgctgccgctatgacgaaaatgttgccgtgacgatcctcgacctgccgcagcagatagcgctggcgcaggaaaacatcgcaaaagcaggtttttctcatcgtattggattccatgctgtcgatatgcttagcccagcagccttgccgggtgaggccgacgtctggtggatgagccagtttctggattgtttctctccggatcagattgtcgccatgctgacgcgcgtcgcacaggtcatgaagccaggcgcacgtttgtgcatcatggagcttttctgggatgcccagaagtttgaagcggcctctttcagcctgaatgccacctcgctctatttcacctgtatggcgaatggcaatagccggttttacagcgtagaggcgttttatcgttacctggagagcgcaggtttcagcgttgaacagcgtctggataaccttggggtcggtcataccctgctgatatgcaccaaacgtgaacaatag

SEQ ID NO: 126254 - DNA, 723 bp, Enterobacter cloacae
atgaaattttcactgaacattatcgactggcaggcgagagccccaggactcagcgatgccacagagtggcaggcgtggtcacgcctgcagctgcccgtcgatccagcggccccgcttccccggctgaccgctttacccatgatgaccgcgcgccgcctcaattcaggcagtaagctggcggtggacattggtctcgctatgctgcaacaccacgccattgatgccgtcgtctattccagccgccacggcgagctggagcgcaactaccgtattctgcatgctctggcgacggggcaatccgtatcgcctaccgacttcgccatgtccgtgcacaactcggcggtgggcaatctcacgattaccgcacgccaggcaatcgtctcgtcatccatttctgccgggctggacaccttccagcaggcattatgtgaagtcctgagcctgctgcaggcgggctactcccgcgtcttgctggtcgattttgacggcgcactgccggaattttaccacccggcgttaccgcaccagatgcccacctggccctacgcgctggcgctggtgattgaatccggcaaggaattgcagtgtgaaacccgcagcggcagcacgggggatgaacccgcccttccgcaaagcctggtcttcctgcaacgctatctcagcgaggcgcgccagtttgtggtacccggcgaacgtttgctgtggcaatggacgcgcgcatga

SEQ ID NO: 126255 - DNA, 252 bp, Enterobacter cloacae
atgaccgaacaagaaaccatttatcaggaagtctgtggccttctgacccgactgtttgaaatcgacccgcaggatattacccctgaagcccgtctttacgaagacctggagctggacagcattgatgcggtggacatgattgttcatctgcagaagaaaacgggcaagaaaatcaagccggaaaccttcaaatcggttcgtaccgttcaggatgtggtagacgccgtcgaacagcttctgcgcgaagagtaa

SEQ ID NO: 126256 - DNA, 540 bp, Enterobacter cloacae
atgctgctggcgtggcccttcctgattggatttgggctggcgcataacagcctgcagtggctattacccgtgatggctctggtgttactgctgcggctgcgtcaggcgcagcggaacacaagcccgatgcggtatgtggtgcagtgcgtggcgctggcggggatcgccctctgcacggcaagctacctgctgaaagcccaccagtggctgctgctctatccggtggtcgtcaaccttgtcatgctggccgtgtttggcggttcgctgtggacagcgatgccgcttgtcgaacgactggcgcgcttgcgcgagccaaacttgcccccggagggcgtgcgctatacccgtaaggtgaccctcgtctggtgcggttttttcgtcggcaacggcacgatggcgctgtttaccgtcctccacggcgacatgcatctgtggacgctatggaacggtatggtggcttacatcctgatggggatgctgatggcagcagagtggctggtgcgccagcgggtgataaaaaaagagatgcacaatgactaa

SEQ ID NO: 126257 - DNA, 1362 bp, Enterobacter cloacae
atgactaacccccttccgctgggccagtggttaaatgcgccgcgccctgacgacacgcctgttgcctggcttgacgatcgtacctggacgctgggccagttgcgccacgatgtaaccttactggtcgagaccctgcgtcagcaggaaggcgagcgctgggcgctgtgctttgaaaacagctacctgtttattgttgcgctgctggcctcgctgcacgccggtaaaacaccggtcattcccggccatagccgcgtctcgcagcttgaagaacagcaatctttgtttagcggcgttctgagcgatcgaacgcttggttttcatgggaaacagattgtggtggcctccagccaccagacagccagccactgggtgcctctgccggccattgacgaaaaccgcttcgttgaactgttcacctcaggctccacgggcacgccgcgccgggtggttaagcacatcgtaagtctggatcgcgaagcccgcctgctggctcaccgctttggtgagcgtttggccggatgcagcattgtggcctcggtcgtaccgcaacatctgtatggcctgacattccgtatcgtcttgccgatggcgctgggcctgccgctgcatgccgcgatgctctattacgcagaacaactggccgccctgcctcctgacaggcaatacctgttcatcagcagcccggcgttcctgaagcgcctggataccgagcttgccgcgccgcccgtcaggatgctgatttcagcaggtggaatgctgccctggcgtgacgtctcgaccacctccggctggcttaacctttggccggatgaaatttatggcagtaccgaaaccgggatcctcgcctggcgccatcgtcaggaggataacgtgccctggctaccgttccccggcgtgatcttccatcaggaagatgacgcctgtcgcgttacgtcgccactgatccatgagccagaagggctccagctcgacgatatcctgcacttcgacagcgaggggcttttcagcatcgccggtcgccgcgggcgggtggtcaaaattgaagaaaaacgcatctcgcttaacgagatcgaacgccgcctgctagagctcgacggtatttgcgaagcggccgcactgccggtcacgcgcgggggtcgtcaggggattggcgccctgctggttctggatgaaacggcccgtcagcgcgggtatgtgcaggataaaaaagcgcaggagttcgcctggcgtcgcgccctgctgccgtggcttgaacctgtcgcggtgccgcgctactggcgcatcgttgatgaaatgccggtaaacagtatgaacaagcgtgtctatgcgcagttagaggagttatttcatgaaaattcatga

SEQ ID NO: 126258 - DNA, 1692 bp, Enterobacter cloacae
atgtcagtaatctttcgtccctgcgtgctgatcccgtgctacaaccacggcgcgatgattgcccgcgtgctgtcacgtctcgcgccgttcggcctgccgtgcctggtggtggatgacggcagcgacgcagtcacccgtcaggagcttgagcgcctggcggcggagcagccgcagatgacgctggttcgtctggcgcaaaacgccggaaaaggtgccgcggtcatcagagggctggaggagtgcgcgcggacgggctacacccacgccgtgcaggtggatgcggacggccaacacgccatcgaagatatccccaaactgctggcgctggcggagcgccacccggacgcgctgatttccggccagcccatttacgatgactctattccgcgctcccgactttacgggcgctgggtaacccacgtctgggtgtggattgaaaccttatcgctgcagcttaaagacagcatgtgcggctttcgggtctatccggtttcacccacgctgcggctggccgcgcgcgaaccgctcggcaagcggatggactttgacaccgaagtgatggttcgtctctactggcagggcaacaccagcgtctttctgcccacgcgcgtgacctatccgcaggacggtttgtcccacttcgacgcgctaaaagataacgtgcggatctccctgatgcatacccggctcttcttcggcatgctgccccgcatgcccggcctgcttttccgtcgacgccgccagcactgggcgcagcaggacgaggtcaagggtctgtgggggatgcgcctgatgctgcgcgtctgggaacggctgggtcggcgggcctttaccgtgctgttgtggccggttatcggcgtgtactggcttatcgcgcgtccggcacggcaggcctcgcggcagtggatggcgagagtgaagcaagaactgcgtcagcggagcatgcctgttccctcacggcttaacagctttttccatttcatgcgcttcggcaacgcgatgctggataaagtcgccagctggcgcggcgaactgaagcttcatcgcgatattgtctttgcccccggcgcgagcgaagcgttaaacatcgcggctccgcagggcaaactgctgctggcctcgcaccttggcgacgtagaggcctgccgggccctggctcagctggaaggcagtaaaatcatcaacgccctggttttcagcgagaacgcccagcgctttaagcaaatcatgagcgaaatggcgcccgaagctggcgtgaatttgatgtcggtcaccgacatcggcccggacaccgccattgccatcaaagagaagcttgagcgcggtgaatgggtcgcgattgtgggggatcgcatcgcggtgaatccgcagcgcggcggcgaatggcgcgtgatctggagccgattcatgggccagcctgcaccgttcccacaggggccgtttatcctggcctccatcctccgctgcccggtggttctgattttcgccctgcgccagcagggtaagctcgtcctgcactgcgagccgtttgccgacccgctgcgcctgccgcgcggtgaacgccagcaggcactgcaagataccgtcgatcgctatgcgcagcggctggaacattacgccctcatgtcgccgctcgactggtttaattttttcgatttctggcatctgccagagtccagtgagaaggagtaa

SEQ ID NO: 126259 - DNA, 609 bp, Enterobacter cloacae
atgtaccagtttgtactgggaaaaatatccaccctttgcgcggacccgctggcgtcaacgttcgcagacagcgcacctcagggtgctcgcaatgcctcatggctggctggcaggatgctgctcgccagagcgttatcccctcatccgctccccgacattatttacggcgagcaggggaaaccggcctttgcggagggccatccgctgttgttcaacctgagtcacagcggtgacgatatcgccttgctgatgagcgatgaaggcgaagtcggctgtgatatcgaagtgattcgccccaggaagaactggcaggcgttagcgaatgccgtcttcagcatgacggagcatgatgagcttgagcgcgaagcgccagaggaacggcttgccgccttctggcgtatctggacgcgaaaagaggcaatcatcaaacagcgtggcggtagcgcctggcagattgtcagcatcgacagcacggcaccgtcgcactcggtcagccaggtgcagatcggctcactcagcctggccgtttgtacgtcgaccccttacaccctgaccaccgagtcgattatccacgtcggggcaggaaaatcaccagtacacccaacataa

SEQ ID NO: 126260 - DNA, 447 bp, Enterobacter cloacae
atgctatcgatgaacagtgacctggccgtctcgccagcgaaatctgcgctgatgcaacaggatacgggcccgctgcgcgcacgcatccttgatcaataccaaaagtggaaggggacccagtaccagtggggtggaaccacgcgccgcggggtggactgctccgcgctgatgcagcacctgttcagcgatgtggcgcatcttaatttaccgcgcacgaccggcgagcagatccaccgcggggtgcaggtgacgcaataccgcctgaggcccggagatctggtgttcttccagacgggtccgaaccgcaggcatgtcggcgtgtatattggcaatagccagtttattcatgcctcaagcagccagggcgtcacggtctcaaccctgacggatgcttactggcaggcgcactacattactgcccgtcgggttgcaggcagtgcggcctga

SEQ ID NO: 126261 - DNA, 603 bp, Enterobacter cloacae
atgcgagtaatcatgtttgacaggcagtcactctttattcacggagcgatacacagtcttcagaggttgattccggaaataaatataactgggacctgtcaggcagaagatttatggactcagatttctgcttcaccgtcggctatcgtcatgattgatgggaatttaattcaggacgaagggagcactttgctggaagcgatcctgcatcgctttccggcgatacgtgtgattctgattttggcgaaaaaagaggccaaatgtgctgagcagctgcggcagcgaaacgtcatggccattattccccgaaacgccaatcccgaacggttttccgccgtactggattcggtatccagagggatggtctgttttcccggagagtgggtcagagagccgacgtcgcctcaggcattattatccttgagcgagcgccagcgcgaagtcttgaaattgctggcggcgggggagtcgaataaagagattggccgcaatctgaacatcagtgcggccacggtaaaagcgcacctcgaggcacttttccggcggctggacgtgaaaaacagaacgcaggcagccatgtattatacccgggcgacggcctga

SEQ ID NO: 126262 - DNA, 1305 bp, Enterobacter cloacae
atgactaattctacctataccgcttcgtcaccctcgccgctctggcaatactggcgcggcctttccggctggaacttctactttctggtgaagtttggtctgctgtgggcaggctatctgaatttccatccccttcttaacctggtgtttatggccttcctgctgatgcccctgccgaacatcaggctgcatcgcttgcgtcactggatagccatccctgtcggctttgcgctgttctggcatgatacctggttaccggggccggacagcattatgagccaggggtctcaggtggcaggctttagcgccagctatgtcctcgatctgaccgagcggtttattaactggcagatgattggcgcggtctttgtgctgctggttgcctggctgttcctgtcacagtggatccgcatcacggtgtttgtcgtcgcgattatgatctggctgaacgtgctgacgctggctggtccgggcttttcgctgtggcctgctggtcaaccgaccaccacggtgaccaccacagggggaagcgcagcagcaaccgttaccacggctggcgatacgcctgtagtgggcgatatcccaacccagaccgcaccgccgacctccacaaatctgaacgcctggctctccagcttctacactgcggaagacaagcgacagaccaaattcccggacgcgctgccggcggatgctcagccgtttgaattgctggtgatcaacatctgctctctctcatgggccgacgtggatgcagccggtttgatgtcccatccgctgtggtcgcatttcgacattcagtttaaagattttaactctgccacctcgtacagcggcccggcagcaatccgcctgctgcgtgcaagctgcggtcaggcatcgcataagaatctgtatcagcctgccggcaatcagtgttatctgtttgataacctcgccaaactgggctttacgcagcatctgatgctgggacataacggccagttcggtaacttcctgaaagaggtgcgtgaacagggtggtatgcaggcaccgttgatggatcaaactggtcttcccgttactctgctgggcttcgacggctcgccggtttatgacgataccgccgtgctgcagcgctggctccagaccatcgagaaagacagtaatccgcgcagtgcgaccttctttaacaccctgccgctccacgacggtaaccatttcccgggcgtgagcaaaacggcagttataaagtgcgtgcgcagaaattcttcgacgaactggacgcgttcttcacggagctggaaaaatcaggccgtaaagtga

SEQ ID NO: 126263 - DNA, 1476 bp, Enterobacter cloacae
atggagttttacagatttaggaaaatctcaagtttgctgggtgagtttcaagagcttgaaaacaatgagatatactttgcctcccccgaagaaatcaatgacccgatggaaggttatagagatatttattgggagggtgatttcattgcgtggaaaaatctctttaggcactatcttttatgtctcgaatggatgtgctctggctatttaataggtggtgagaaatggcagttttcagagaaagatataccagttcatcttggttttgacttatatccaacagataaatacagaagtctcgtttctgatattattaatgatttcttttctgattctgatttattaagcttgattaatgatatatgtaagagaacaaccaagattcgcagggatgagttatcattttatctatcaagagtacatttttatgcgttgaaggttatttttaacaactatattaaaaatggaatgtacgataaaaataaagctgaatggattgacgatggtcgaggtcttaatctggacggaaattttattgaattactagaacagatgattgagagacatgaagataacgctgatagaataacttctatattcttctcatcgactatgaggagtcatcagcagttgaatttaatacaagtgcttaacgctgaggaattaagggggaataatattttcatcttatttgatttttataataaatatattaacaacttaagcaagttaatgtattcggattggtttacagcatgttttatgaggcagaatacaaattcttcggtctggggaaattatggagataatcatacaggcgtgtgtatgatttttgaagcaatcgaagaggacggttcttttaaacttccatttcactgcaaaaccggatgttcatcatcaggtgctatttggggggatgttaaaatgacgctgcataagatcaattacgaaaatgggctggagtcaactgatttttttagaaatcaaggtgtactgccgatacctaaacttaatgagatgtggtattcggatgatggagagatgagcttatgtgcacaagaaatgaacctggatatcgatgcatggaggaaaaaatattgggatgtctatattcgagatatcacggtaaaatcattggactgggaatatgaaaatgaatatagggtcatattgcaaagttttcttcatgattatagctctaaaaatgagagggcattaaaatatgatttttcatgcttaaaaggaattatttttggtattaaaacaagtctcgagcataaagtggaaataattaaaattattaggaagaaatgcctagattcaggaagggatgcatttgatttctatcaggcttattattcacctaatgaaagaaaaattctccattacaagctaggtcttttaaaattcagccatcacacagattctgatggtgctgaaacggatggtcatgctcaggaaaccggtagtcagtaa

SEQ ID NO: 126264 - DNA, 339 bp, Enterobacter cloacae
atgggaagacgcgttgatacaaaaattcggcatgtgacagcttcagaaacgaacatttttgctgagctgggttttgaagaaagtgaagctaaacagttgcacgaaagtgccgaaaaagaggttgagcagttgcttgccatcaagcggcaactgatgcaggaaatttcctcgtggattgcggagaataaactgcgtcagaccgacgctgccgccaggctaaacgtctctcgtccccgcgtgtctgatgtcgtgaacctcaaaacaagtaagttcacccttgatacgctgatcatgatgttatgtaaacttggaaaacccgtctcagttaccgtcggctaa

SEQ ID NO: 126265 - DNA, 1575 bp, Enterobacter cloacae
atgaagaagcggaaggtggtgatcggggtgcttggcaccgtgatggataaacggggaaagcggactaatcgctttcgcaaatggcgaccgaccgtcgggctgtgccaacagccggatttcccggtcgacaggctggagctgctacatcaaccgcgagatctcggcatggctcagcaactggcggaagatattgtgctggtttccccccacaccgaggtgcgtcccagcacggtaatcattgaagacccgtgggatttcgaagaggtttatgcagcgtttctcgatttcgccacccagtacacttttgataccgatcgcgaagagtatttcgtccacatcaccaccggcacgcatgtggcgcagatctgctggttcctgctgacggaagcccgctatcttcccgccagtcttttgcagactggccctgccagaaaagaagcctctgctgaggagactgcagccggaacttactcaattatcgacctggatttaagccgctacacgacccttaccaaccgttttcagcgcgagcagcagcagtcaatctcatttctgaaagcgggcattgagacgcgaaacgccacctttaacagtctgatcgacaagattgaacgcgtggcgctacgttctacagccccgatcctgctgaccggccccaccggcgcgggcaagtcgttcctcgcgaaccgcatttatcagcttaagcagtcacgccatcaggtttccggcaaactggtttccgtcaactgcgcgaccctgcgcggtgataacgccatgtccacgctgttcggccatgtgaaaggagcctttaccggcgcactgtcggcgcgcagcggcctgctgcgtgaagccgatggcggcgtccttttcctcgacgagattgccgaactaggcctggatgaacaggcgatgctgctcaaagccattgaagaaaaaacttttttcccgtttggctccgataaagaagttcacagcgattttcaacttatcgccggaacccaccgtgatatgcgccagtgggtggcagaaggacgttttcgtgaagatctctatgcccgtattaatatgtggagctttgccttacccggccttgcccaacggaaagaagacatcacgccgaatgttgactacgaacttcaacgtttctctcgcgaaagccagacgcaaatccgcttcgataaagaggcacgcgaaggctatctggcctttgcctgttccagcagagcgctgtggcggggcaactttcgcgaactgagcgccagcgtcgcacgcatggcgacgctggcggaacgagggcgtattactcaggatctggtgctggaggagatctcacgtcttcagaccgactggcaaactgacgtgacgcagcctgcaactgacatggcgattgacctctttgaccagcggcaacttgaaacggtgctggaggtatgtcgccgcagcgcatcgttgtctgaagccggacgtgagctgtttgccgtttcacggctcaaaaaagccaatcctaacgacgccgaccgactgcgcaaatatctggctcgctttagtctgagctgggaaagcatccggtcataa

SEQ ID NO: 126266 - DNA, 1128 bp, Enterobacter cloacae
atggctaaaaaaatcacgataaaaaaaggtcagttaggactggtagcaaaagctggcgattattaccgggtactggaggcgggtgaacaccgtctgggttggttcaatactgacgacgtgctggtggtgagccaggatggcagcgaggtgccgggtgcgctggcggattatctgcgccgctttcagcctgactgggtggtacgttactgcctggcggtcgaccttactgcggatgaaatcggggtgttatcgaacaacggcgtattgcaggaaattgtgccgccttcgactcgtcgtctgtactggcagcaggatgcggcgttgaccctgcaaagaatcgatacccgcgacgtgcgggtgccggtggacgtgatgaatgctgctctgcaaccgcgtcgcaatggcgcgctaaaggggcgcgacgcgatgctggtcgtacaggtacctgcctggcacgtcggggtggtgaaaatcgacggagaaattcaggcactgttaccgccgggactgacggcttactggaaaattaaccatctggttgaggcagagatagtggatacgcgccttcaggtggtggaagtgagcgggcaggagatcctgacgaaggacaaagttaacctgcgcctgaacctggcggctaactggcgttacagcgacgtgctgcaggcctgcggacagcttacgaaaccgctggaacatttgtaccgcgaactccagttcgcactgcgtgaggcggtcggcacccgcacgctcgatgagttactggaagataagcagatcattgacgaggtggtcagcaaacaggtgcaaggccgcctgtcatcctttggaatggaaattgcgtcgcttggggtaaaagatattgttttacctggtgatatgaaaacgattttatcccgtctggtagaggccgaaaaatcggcccaggcgaatgttattcgccgacgtgaagaaacggcggcgacacgatcgctgttaaacaccgcaaaggtgatggagaacaacccggtggcgctgcgtttaaaagagctggaaaccctggaaagggtcgcggagcgtatcgacaaaatttcagtatttggtggcctggaccaggtattacacggccttgttaacctgaaaggataa

SEQ ID NO: 126267 - DNA, 1227 bp, Enterobacter cloacae
atgcaacagaatgattttgaattactgacggcgtcaaacggcgccccgatcaaaatgtggactcacggcgttcccgtggagccagaggcacaggcgcagttactgaatactgcaaagatgccgtttattttcaaacaccttgcggtgatgcccgacgttcatctcggtaaaggctcaaccatcggcagcgtgattccgaccaaaggggcaatcattcctgcggcggttggcgtggatattggctgcgggatgattgccgttcgcacgtcgctggtggccggtgatttgccggataatctcagcggtttacgtagcgccattgaacaggcagtaccgcatgggagaaccaatacccgttctcgacgggataaaggcgcgtgggaaacgccaccgaaagaagtggacgatcgctggtgggtgctggccccacgttttaaacaactcacggataaatacccacagttgctgaaaaccaacaactaccagcatctgggcacgctgggtaccggaaaccactttattgaaatttgcctcgatgagcagcagcgcgtctgggtgatgttgcacagcggctcgcgcggcgtaggaaacgccatcggtaatgtgtttatcgccctggcacagcaggatatgcagcatcacctgggacatctgccggataaaaatctggcctattttcaggaggggagtcgtcactatgaggactacatcgaggcggtggagtgggcgcaggattttgcccgccacaatcgggaagtgatgatgtcgcgcgtgctggcggcgctctctcgcgaagtgacaaagccctttattacgcagcaggaggcggttaactgccatcataactatgtgcagaaagagcatcactttggggaagaggtactgatcacgcgcaaaggtgcggtgtcggcgcagaaagggcagatggggattattccgggctcaatgggcgcaaagagcttcatcgtgcgtggcctcggcaacgagcaaagcttctgttcctgcagccacggcgccgggcgagtgatgagccgaacggcggcaaaaaaacgctatacccttagcgaccatattcaggcgacctctcacgtagagtgtcgcaaagacaatgaggtgatcgatgaaacgccgatggcctataaagacattgatgccgtgatggccgcgcaatcgtcgctggtggagatcgttcacaccctgcgtcaggtagtgtgtgtaaaaggataa

SEQ ID NO: 126268 - DNA, 789 bp, Enterobacter cloacae
atgagcaacaacgatgttgatagcgcgatgcgcgcacgtgtctgcgcgcaacttcgcgatatagagcagcgctataacgtgcgcgtgctctacgcctgtgaatcgggcagccggggatggggatttgcctcaccggatagcgattatgatgtgcggtttttgtacgttcaccgcccagaatggtatctgcgcgtcgaatcccagcgggatgtgatcgagctgccgatagatgatgaactggacgtttgtggctgggaatggcgcaaggtactgggcctgctgaagggggcaaacccgacgcttatcgagtggctggattcccctgttgtttatcaggaggatgagacggtagtggccgagttgcgcgcgctaatacctgcgtggttttcgccattgcgtgcccgctggcattactactcgatggcccgaaaaaacttccgtggatatttacagggggaaacggttcggctgaaaaagtacttttatgttctgcgacctttgctggcggcgcggtgggtagaagcggggaaaggcgttccaccgatgcgttttgccgaactgcttgccgggagcgaactgtgtgcgccgttacgtgcggaaatcgatacattactggaaataaaacagcgcgcaggtgaagcggaatatggtcctaaacggcccttactccacgcttttttgcaaagtgagctggtgagaggagaagtgccgccggtactacccgacagcagagaaggaaatttaaaagatctggattcgctgctgatgagaacagtaatgaaaagctaa

SEQ ID NO: 126269 - DNA, 738 bp, Enterobacter cloacae
atgaaaacgctcattcacgctgcgcttatcgccagttttgccgcgccgctggcatggtccgcgggaacggtaaaggtctacacgccggacagtgaaaaacctaaaaccttaacccacgccgaacatctgctcgatctcgtcggacagccaaggcttgccaacagctggtggccaggcgcggtcatcgctgaacggcagaagaccgtggaagcggaacagcagcacaaggcgcttcttgccaggctaacgggactcgcggaacaggaagacggcgacgacgcggcggccattaacagcgtccgtcagcagctgcaggcgctgaaggtgacgggccgacagaacgtcaatcttgacccggatgaggtgcgcgtcacggaaaacggcaacccgacgctagaaggggactatacgctctggcttccggcgaagccgacgacggtgaccgtgatggggctgatcggcagcccgggtaacaagccctttactcccggccgcgacgtggcgagctacctcgacgagcagagtctgctgagcggtgcggataacagctacgcctgggtggtttaccctgacggccacacgcaaaaagcgcccgttgcttactggaataaacgccatatcgaacccatgccgggcagcattatttttgtcggttttgccgaccatttctggacgaaggcgtatgacgggcttaacgccgatatccttcactccctgattcagcggataccggaataa

SEQ ID NO: 126270 - DNA, 1326 bp, Enterobacter cloacae
atgatgattactctgcgcaaacttcctctggcagttgccgtcgcagcgggcgtaatgtctgctcaggcactggccgtggatttccatggttatgctcgttccggtatcggctggacgggtagtggcggcgaacagcagtgcttccaggcaaccggtgcccaaagtaaataccgtctgggtaacgaatgtgaaacctatgcggaactgaagctgggccaggaagtgtggaaagaaggcgacaagagcttctacttcgacaccaacgtagcgtactccgtggcgcaacagaacgactgggaagctaccgacccggcgttccgtgaagccaacgtgcagggtaaaaacctgattgagtggctgccaggttccaccatctgggccggtaagcgcttctatcagcgtcatgacgttcacatgatcgacttctactactgggatatttcaggtcctggtgccggtatcgaaaacgtcgatctgggcttcggtaaactgtctctggcagcgacccgttctcaggaagcaggcggctcatacatcttcaccagcaacgatatctatcatgacttcaaagacaccgctaacgacgtcttcgatgtgcgcttggcgcagatggaaatcaacccgggcggcacgctggagttgggtgttgactatggccgagctaacaaaactgacggttacagcttcgctgacggcgcatctaaagatggctggatgttcaccgctgaacatacccagagcatgctgaaaggctacaacaagtttgttgtccagtacgctaccgatgcaatgaccactcagggcaaaggtattccgcagggttccttcaccggcaacaactatgacaaagacgctgaaattggtgttgtaaataacaagattaacaacaacggttccctggttcgtattctcgaccacggtgcgatctctctgggtgacagctgggatctgatgtacgtcggtatgtatcaggatatcgatcgtgacgacaacaacggtacgacctggtacaccgtgggtgtgcgcccaatgtataaatggacgccaatcatgagcaccttgcttgaagttggctacgacaacgttaagtcgcagaaaactgacgataccaacaaccagtacaaaattacccttgcacagcaatggcaggccggtaacagcatctggtcccgtccagcgatccgtgtcttcgcaacttacgcgaagtgggatgagaaatggggttatgacaacggcattgcaaaaagcgataccaaagccacaacctacagccgtggtgacaacgatgagtggtccttcggcgcccagatggaaatctggtggtaa

SEQ ID NO: 126271 - DNA, 528 bp, Enterobacter cloacae
ttgagcacgactaatcacgatcaccacgtctacgtcctgatgggcgtttccggtagcgggaaatcagccgtggccagcgaagtggcgcatcaactccaggctgcgtttcttgatggcgacttcctccatccgcgcagcaacatcatgaaaatggcctccggcgagccgctgaacgacgacgaccgcaaaccgtggttgcaggcgctgaacgacgccgcgttcgcgatgcagcgcaccaacaaagtctccctgatcgtctgctccgcgctgaaaaaaacctaccgcgatctgctgcgtgacggcaatccgaacctctctttcatctacctgaaaggggatttcgaggtgattgaaagccgcctgaaggcgcgtaaaggtcacttcttcaaaacccagatgctggtgacgcagtttgaagcactgcaggagccgggtgaagacgaaaaagacgtcttagtggttgatatcgatcagtcactggagggtgttgttgccagcaccatcgaggtcattaataaaaggcagtaa

SEQ ID NO: 126272 - DNA, 558 bp, Enterobacter cloacae
atgtccccttcagaaatcgctgcatgtctggcctatgctctctccgtctggctggccgccagaaacaatatccatacgtggtggataggcatcatcggtagcgggctttatgcctgggtcttctattctgtgcagctttatgctgacgttacccttcagttctttttcatcataacgagcataaccggctggctgcattggcttaaaggcaatcatggagaggtcttgcctgtccgtcgtaccagaccgggacatttttttatgcttttagcctgcgccgtaagcgtagcagcggcgtacgggtggatattgcatctctataccaacgcatgggccccctggctggactccatcattttgacatttagcattcttgctcagtttatgttgatgggacggcgtctggaaaactggtacatctggcttgccgttaacacgctggcagtaccgctgtacgcgacgagagaactgtatctgaccgccggtttatatctggtgttttggtttaatgcgtggcacggactgtatcagtggcgcaaggagatccgtgcgcaatga

SEQ ID NO: 126273 - DNA, 1011 bp, Enterobacter cloacae
atgacgctgtatgctaacggcctggtggtaggcaaattcgcaccattacatgcaggccatgaagcgcttatcaatacggcacttgagcagtgcgagacggtctgtatcatcagctattcgtcgccggaaatacgcggttacgaacctgaaaagcggcttaactggttaacaacgcgctttccgcaatgtcgccacctcgtgctttcgccgcatgtgttggctacatatggccttgcgccaccgccaccgaatgacgctgatgacgatcttcaccggcattatgttgcaacgctgtgtgaggacattttgcactgtcagccagaggcggtatttactgccgaagactatggagacgggtttgccgttgtcctgagccagcgtttcggacgaccggttgcgcacgtgcgtctccagcgtcaacggggaccagaggccccttcgggaacgctcatccgttctgatgttcatcgttatcgtaagatgatgtccccagaggtgtaccgcagctttgtttttcgtatctgcttattaggaggagaatcgacgggcaaaagcacgctagcaaaagctctggcgcagacgttaaacgttccgtacgttgcagagtatggccgtgaacactgggaagcgaagaacggtatcctggatcgggaggatttgctgcatattgcccgcgagcaagtacgtcgggaagcattagcctgcacggcgccttatctggtctgtgatacctcacctttaacgaccctgttttacgcactcgatcagtttggcagcgcgccgcaggcgttaaaggagttagctgaacgagactatgcgctggtcgtactttgcggagatgaatttccgtttgtgcaggatggcacccggcagggcgaggcgtttcgccaccgacagcaagtatggtatgaagcagagctgtcggcacgaaatattccttttctgcgcgtgcagggctcactgcctgagcgaatcgatcacatttgccgatatatccagggaccgatctga

SEQ ID NO: 126274 - DNA, 1200 bp, Enterobacter cloacae
atgcaatctttaccagatctttatccaatctttatacagcaaaatgtgcgttttttagacaggacagcttcctctgaacgctctttcatgtggcagcgtcgattagctgggaaacttcttcgggttagcctacgcacccaggacagaaatgtggctcagtatcgtgccgtaaagctcactgaagcctttataaggctctctcagctaatggggaatacaaatccactattgattcgtgaaacgcttctaaaggccagagataagcaaatagaggatgaatttttatccgccgtctctgtatgtcatgtctcgctgcatccagtaatacaagaaaagagcatttcccctctattgtcatcagtacttaatgagtggcttgaagagatgagttctgattgggcgaagagtaccaaagtgcttaatgagagaacggtaaatggtttcctggaatggtgtggggatatcccagtcgattcagttacgaaaaagacggtgagtacttataaaaagtttcttgataagtcgggtaagtcacctcgatccagacaagatgccattattaaggtttctgcaatgttcaatttcgctatgaagcaacgtgattacatcgtgaagaatccttttttggggatgaactataagcatgttgaaaatatgagtattaaaacgggtgtttcattaagggagcatcaaaaattaatttcttctgagcatgttgccaataccagatccttatggtggttactaaacctacttttttacacaggagtacgtatcggtgaggcgatccaaatctcttcaaatgattatattgagaaagaagaccaaggaatactcattaaatgtatcagcattaatgatgatggtactaaaaccgttaagaataacgagtcaattcgcgatatacctttaagtgatagtcttctaaaggctggtatatgggaagagaaaccaatatatcattgggttaataattcatctgcaagtaatgccgtaagcaaggctttcaaaaaagcaggcatgaaacatacagcacatgactatagatatggcttgtcagaccgattgagagatcttcaagaagtacctgaccatataagattctcgatacttggacatgctcatcgaacaatgacggatagaacatacaggagtaaacaaccacttctgcaaatgaaacacgtgattgatcgtatctga

SEQ ID NO: 126275 - DNA, 159 bp, Enterobacter cloacae
atgagaatgaaagaacattattatgataagacactatcttattataaattattagaagaaaagtatgagtgtattataagggaagaggaaaggaagctttctaaagacagcaataagaggttgttaataaaaacaaatataatcaatgctaaaaaataa

SEQ ID NO: 126276 - DNA, 204 bp, Enterobacter cloacae
atgtctatcaagggaatctacggggtattatccgattcctttatagtgccacattgccgtgactcctgcgttttcgtcttttttgtctggaatttacgctcgggaaatttgcacgggtttcatttgcactgcgttctgttgaacaactcatctgccatctacttgtcgataggatcaggttttaatttattataccaaggataa

SEQ ID NO: 126277 - DNA, 612 bp, Enterobacter cloacae
atgaacaataaaaagcagagtactaaagagttcagtgaacgcttaaagcacgtcatagcagcacttggaacaacgggtagagagttctcaaaacgtgcgggtattggctatagtactgttcacaactacatgcacggctcatcaagccctacactggataacttggtactcctggcaaaagcaggcaatgtatctattgaatggctggctacaggccagcaatcgagcatgagcagcactgattcaaatgtcatacttgtaccttttattgatcatgccgatgaaatgttgaatcttgatgctcaactgcttgatgtgacggatttacattctctgcgtgctatcagggttaataccgatgtaatgacccctacctttcttatgggtgcagtactactcattgatactaacgatacaaatttaaccgataacaaacttgttgtattaaaacagagcgggaattatttgtttaagagagtacaggtgctcatggagggagtacgcttactgagtgataatgacaattatccgtcaatcgcagtcgcttttgaagatatgaaaagtatcaatgtcattggtgctgtagtgatgattattaacaaagttaattag

SEQ ID NO: 126278 - DNA, 711 bp, Enterobacter cloacae
atgatcatctcattttggtggtcaattatagccattccatctatacaagaaaaccaccccgcattaacgcaaaaatttccaaagttttttaataactttcttctacctatcatcattgtcattttattattaatagctgggcaagctaatgtatatatgatgaacctacaaggaaagaatcttggttttatgatcgaagatcaattctctgaagcgaagagtgctgggatctttaacagagaaaagtggattgagattaaagctaagcaagatgagtcaataaaattagccgataaacaagccaccgctgcaacattagaaaaaaataacaaagactacatcgaaagtaagattaatagtctcgacaagagtagtggtaagtacttagtagctgaaaatatctacaagcaacatggtgtttgggtcgatgattacattgctgttcaaaagaagtcatgctcacgtgaattcaatcgactgttggctgctaatgcagcgtctgagcaagccattgagtactggaatgaaacctctgattctttaacacggtcgggtgtttcgccatttgcaggggggaggagtcctacaaccgatcctgacatccagagaaccagcaatgatattagatttgcccgttctcaattagaaaattgtggtatagctcatcttaacgagatagaacatcgtgttacagtacaaactgataattga

SEQ ID NO: 126279 - DNA, 417 bp, Enterobacter cloacae
atgtatttcaaagcggttgttataagtttaagtttgctattgtgtttatcggcctctgctgatgaacttaagcaaaatattgatagcacattacaaaaatgcaagatggatgcggttagtaccattgactcacagaattgctatattaaagctactacagcgtgggatacggagcttgggaatcaatataaactgctaatgaaagatcagcctgaaaatgtgcgtgctgccctaagagattcacaaaggcaatggataaaatacagagattcgtataataaaggaattgaggctttttatcaaaaagaagaaggtactatctggagtttgattgcggctgaaagcaaaatgaatattatccgcgataaaacattagatctttatcgactcaggaatagtacaaatcttggtggctga

SEQ ID NO: 126280 - DNA, 567 bp, Enterobacter cloacae
atggcacacatcgcttatattcgcgtatccagcttgcaacaaaacagcgagcgacaattagcagatacggggatcacctttgaaaaagtattcactgagaaagtaagtgcgaaagataccaatcgtgaagtattcttagcgatgatggagtacttacgcgaaggcgatactttgcatgtgcatgacatcagccgccttgcccgtaatacaaccgaccttctctcaactgtagatgctttgactaaacggggtgtcgcgatccagtttcatcatgaaggcattaagacgggagataactcacccactggtaaactggttctaactttactttcgggaatttgccaaatggaacgtgaaatgatgctgctcaggcaaagagagggttacgaagcagctaaggctgctggtcgtattgctgggcgtggaaatggtaggcatatcccgcgtactgaaatcctcgcggcattggcatctggcggaagtgttcgctctgtagctgctgacttcggtgtaagtaccaacactattagccgaatcaagaaagaaatgaactgtgcggcatcttaa

SEQ ID NO: 126281 - DNA, 2259 bp, Enterobacter cloacae
atgaatagttatgatttttccagactaaatgataaagactttgaagacctggtaattgatctaattaaaattgaaatgcctggtactaatatagaaagatttatgcctggaagagatagcggtatggatggtagattttatataggtgggaataaggtcattatccaaagcaaacattatgttaactcaagctactctgctttaattaataatttgaaaaaagaagcagcaaaggttgcaagaatcaatccttcacgttatatattggctatcggaaaaggattaacagatgttagaaagaatgagataatcagtatatttggaagtagatatctccggagtgatgatatattttcaattgaagatataacacataaattatctcaatataaaaatatcgaacgtaagtactataagctctggcttaacagcacttcttttttaacatcaatattgcataatgacattattggaaaaagtagtcatattcttgagcaaataaaaataaattcagaaaaatacgtagaaacacgagatttcgccacagctaagaataaaattgaacatttcaacactcttataattaccggcgagccaggtgttggaaaaacaactcttgcggaacaattatgtcttaattatatattagaaggatatcagttagtttatatagaaagcgacatagaggaaggtgacaaaatcattgagccagatacaaaacaacttttcctttatgatgattttcttggaagaaactatttagaagcattaagaaacaaagaggattcaaagatagttagatttataaatagaatccgtttcaaacccgaaaaaaaattaattcttacctccagaacgactatactaaatcaaggaaaagcatcaagtgaattattttttattaataacactgaaaagcatgaatatgagattgaggtaaaaaaccttgatataatagataaagctaaagttctttataatcacttgtggtttagcgaactgccagacgaattcaaagagtgcatttggaaagaaaaaagatatagaaaaataatttcgcataaaaattataacccccggttaatttcattcattacagattatgataaagtttcgcatcttgagccagaacattactgggaatatatagttgagagtttagacaatcccacagctatttgggattatatgcttacgaaacaagtacctaaatgtgtattttatttaacttatcttgtatcgctaaataacggaaaaatatctgaaaaggagctaagtgagaattatgataatttattagaaataataaatttcgatcgctcacgaaatgattatcttgattttaaatcctgcatattacatgcagttaaatcaacattacaacgcaaattggaggaaggcaaagacgcgatatacgatgtgctaaacccatcaatttctgattatttaattgctaaaataaatgataacctatcgcttataccatcatttttcttagcactctcatctatacaatcacttaacaatttaaacacattactaaataaaaaaattgcaccaaatgctgcgaacaaaatcgcagataccttattaagtaacattcatagcaacaaaactgaagactatatcattgaacttattgaattaatgatatctaataataatttatcacatagtgttaaattaaaagcagcaaggattttaaatacaaataccctccccttaagcaaatattttacaaaatataattataggattgcaaaaataattcattggttatctttaaatgatatagattggataggttataaaaaaacacaggaatacacaaagttaacgttactaaccagtggcgacgatcttgattatgaagatttaaatattttaagccatatttccaatgttatcagtgacgatgaattactgggtgatatccgtacctctttattagagtattggtatgattttgtgcatgaatttatttcagaaagtaatgaatttagcgagtattatgatgagcaggagagttatttaattaaatcgaaagcaaaggatatggttaaggatatgttatccgaaagctcgatagtttttaacgaaagtgaaattgatgacattattgataatattgatgtacaatcaataatagagagcaatatcgaaaattattctgattgggatggacaagaatatactcaacatggtggatatcaggataacgggtttgatggtgttgatgacatattttcaagggagtaa

SEQ ID NO: 126282 - DNA, 822 bp, Enterobacter cloacae
atgagttatcccaaaaaacatcattacatccctgcgtgctatctgaaaggctttaccaatcagggtaaaaggacatctttattctgggcatttccaaaaaataagcctggatttaaacatggtacaaaccctaatgatgcatgtgtgagcaataattattataaattagaagaaaatatacatccgttcctaattgaagaatggtacggtaatacagtcgagacacgtataggtgagtttttagagaccatagatacgagtaaaggaattaattccgaagatgaaggtttaatctggttgttatcgtctttatttttaagaaattcacaacatagaaataatatcgaaacacctctaagacaagaacgaaaaatagtcgaatcaatgaaaaaagatcttaatcaaaggaatgttaccttaggcatgtcagtgagggattacattatcgatgatattattgaatatgaactcaaacaaaccaaaattgcctcttattacctccctcaattcaattactcactaatcaaagcaccaaataaaattaataccatcacaagtgactcaccttttattttatctcataatcgattgcaaacatttggattagctactccagggtcaatgatattagccccgttaaataaaaatacatttctttttggatgtaaagaaatgaaattaagtccaattcataacgcaacagataaaacaatcgcagatttaaacacaatgataatgctttcctcgaatgaaaagtgtttttctaataacgatcattttttcatacttgatgcacaagataatatcgcaaggtatccatga

SEQ ID NO: 126283 - DNA, 471 bp, Enterobacter cloacae
atgagtaagaaaagccatgtcatgagcctattcgtccttattattgcctcctttgtctttggcagaagtacttatgttgaatatctgtcatggtactatggaagcgaacatttaatattcagtcaaataaatagcgcattactatctggtttacttaacggactttacttcgcgctatcatcaagcattatttatgcgttactcactctattaaaaacaattccaagaaatatcttgttttcttgtcttctgcaattctttattaacatagggctatatacactttttgttgcagtagatagaggttatagtaaattgcatactttaggctcgggtgctactgatatcacccacagctattttttaggggcgttgctgatgagcacactcctgaccgtcgcgatcgtgagcgttatacatgctaagtttctttcttcaaagcataaagatgggctacataaaggcgtttga

SEQ ID NO: 126284 - DNA, 573 bp, Enterobacter cloacae
atgaacctgcttgcattgacgcatcccgatctggtttttatcaacccgccgcaccgttcgcctgaagcgctaatacgctggctcgccgaaccgctcgccaggcaaaaaatcatcagtgatgaagaaacgttcatccagagcgtgttacaacgcgaaagtgaaggtcctaccgcgctgggtgaggcgctcgccgtcccgcacggtaaaaccgaggcggtgcagcaggcggcattttgtctggcgctctttgacgacccgatacgctggcccgggctggatggtgacgaagaggtgagaatggttttcctgctcgccattccgcccgcggaagcagggagtacccatatgcagctgctgacgacgctgacctgtttattgacggaagatcgggtgcgtgagcgactgctggcggcgcgcacccgggaagaggcgatgtccgcgctgagtgctgaagaaccacaaaaacaggacgatgctcctgaacgctcctttctcatcccggtggtgctgggcagtatcgcaaccgcagcctttttgcaggcgggactgagctgggtctgcggggggagttaa

SEQ ID NO: 126285 - DNA, 732 bp, Enterobacter cloacae
atgaataaaacgtggacccgtattgtgattgtcgtcattgcggctgccgccgtggcgttctgggtgtacttcgacaaacagcgtatgcagcgcacccctgaacagcagcttgataccaccctcaacacgatgcccgcctggcaggtgataaaagagcaggaacccgcgttccagaaacgcatccgcgagcagatcctcaccatgcagaaagcgggcgagtctgaacagcacatcatcgacgtcatccagccgcagattttgaccctgcagatgtcgcgcctgcagcacgccccggacgccaacgtggtggattatatgaaggccaacatggagcagaccgccgccatccagaaggtgagcgacgacgcctgtttccgcttcctctacccggcggtgaaagggggcgttaacccgatgcgggtgctggataaagagatgatggcgcggcgcatgcaggccgacgccgacatgatgcgcgcggcctacggcaaaaaccgccacaccgtgacaccggcagaacgcgaggcggctgtcgaggatgtgcggccgattatgaaggcacttgccgacaagtacggcgaggacatccagctgctgcagatgccggagaaagcggcgggcaaagagaagctctcctgcgatatggtgcaggagatgtgggccaaagtgctggcgctgccggagaagaaggcggcgagggtgattcggctggcggtgtctgagctggagtga

SEQ ID NO: 126286 - DNA, 573 bp, Enterobacter cloacae
atgcgcgcacaggaagggcttaaagccatttacgaagccagatgctcaaggtacgagaagcacctgcacgttggtatggataccacctcaatcatactgaaagggcatcttttcgttgaggaattactttttgatattctgaaattgcattgccgggatagcggcccgattgagaatattaagctcggctttagccataagctaaacctagtgcatgctatgtttggatctcatttaccgggcatggaattccccaaaaatgtttgggctgctttggataaattgaacaagttgcggaattcactggcacataacattgactctccaagagctgccgaagtcttcaagtcctttgtttcatcgtacagccaattggttggcaaagaggtgaaggttagcatcactgatgaaattccggggatagaccgcaagctcggactggagttgattggtatcattatgtatttgctcggattcttagggtgcttgcatggtatagcctatctcaacccaccactcatgtacggcagtgaaatcccagttacgatacccaacaagattgagcacgagtga

SEQ ID NO: 126287 - DNA, 771 bp, Enterobacter cloacae
atggaatacgtggcctttggtgatgagagtggtacgacagggagtgaccgctgttacggcattggtttgctgtgtgtgcgtaaagacacgctgcacatcttcaatgagcgagtccagaagctgaaagacaagtacggcattgtcggtgagttgaagtggtcgaagattaagaacagtgcggggcaggcaaacatctgcattgagctgctggcaatggtgctcaagaactcatgctgctttcactcgattatcgttgtgaagaatatgtacaacaactggcagacggacagggagctggctttctaccaaacgtacacaatgctcgttaagaacgttgctaagcagattaagagtgacgttgaagtcatcattgaccagaaaattgataagtacaaaaagaatgatgaggtgacgggcattgttgctaaccatatgctggctagagcagggatgaagaagctggttaagtctgtgacgatgcacgactctaagcaccatctgggattgcaggttgtggacatcctgactggggcagtgaactccgggtacttgaagtacctgaatccaaggttagaactgtcagtggctaaagagcttgcctttgagcggatggctgccctgcttggttgggatgtgtttcattacgatacgttcccgaataaggatttcaatatttggcacttcccgcaagagatgcgagctatgccgggttccaagagtattcgtccagattacagcgttccgctggttaagcgggaagagctggcctaa

SEQ ID NO: 126288 - DNA, 411 bp, Enterobacter cloacae
atgagttacgatgacctagaccccgcaacaagacgcgtcttgcagcaagcggagtacatgagaagcaatgaggccaaactagcgcagattgccctgataaagcatcacaaagcttatatggactggagaacagacagaggggattttggcgacccttgcccgagtacgaaagaggccagacttgaacttttgtggacgcgtcagaatatgctggggcataagacgctgaatgtgttggggttctctttcgaacaattgtatgaagacctagacagtgcgctatcagatgcgatagcggcaagagatggggttgcgagggaatgggcggctgtgtctgatgtggctgaactgaatgctttatgggagtggttccgagagagattgcctgatgactatgtatcgccgtattag

SEQ ID NO: 126289 - DNA, 2724 bp, Enterobacter cloacae
atgaattttcaacccggtgaacgtgtcagtcattatgaatttggcctgggtgttgttatctcagttgcgggcggttacgcccgtgtcttttttccccaaggtgagcggcaggtgcctttcagcaccttggtggcagcactcagtcataatgagcgcgtggtggccagtattggcaaacatgcggatagcgacacgaaagcgtggctttcctggaaggcgcatgaattgccgcttcaggattcagccagctcactgacttcggccaagattgatttgctaccccatcaggtggtgctgactcatagggttgcctgtgcgagcccgcgtcgttttctgattgccgatgaagtcgggttaggaaaaactattgaaaccgcattggttctgagggagttggccagccgtggtgagctgaaccgggcgttgatggttgttccggcgggtctggttaacaactggcatcgcgagctgaatgaagttttcaatttaaactttgaagtcttcgggcacgaaggcgatgtcagcgatcgccgcagtaatgcgtttgcgaagcataatctgcttattgccagtatcgacaccttaaagcgcccggcgagaatcaagaaaatactcgaggcaccccgttgggacttaatcgtttttgatgaagcacatcactgtactgcatataagcaaggtggcaaaacgcgcaaaacccagaactacaaactggcggaagccttgcgcgaccacagtagagatatgattctgctgtcagccacaccacaccagggcgatcatttccgtttctggaagctgattgatttacttgaccccacgttgttttccagtgaaaccgagatggtggaagaacgtcaccgcttgaatccgattatttttcgccgcaccaaagccgatgcctgcaaagctgatggttccacgctgttcgctaggcgctgggttcataccgaagctttttcgatgtcagagcaagagcgcgatttctataacgccttgaatgaatacttgcgcgacggttttgctctggccaagaagcagggcgggaaaggaactgcgttgggctttgtaatgacgatcttccaaaagattgcagcatccagctttgctgccgtgcatcgcaccttgaggcgacgacttttggccctgactgttcacgaaggcttaatgcacgatgagaatctcgatatcgatgccagagacattgcgtttaacgaggcaaaagcacaaattcgcgtcgaatttgatcttggtaatgatcgtctatctgaccttgagatcgaccgcatactgaatgacatcaagcgtcgtctgctcaaaaagattaatgaagagcagttggcagctgtatccgatactttttccgatgagctggaaactgccgccgctgaagatgcggccatggatgctgtggcttacgcgctaccagaagagcggttccgcattaaagaactactggggctgttcccttcagcccgagaaactaaagtagataagctcattggagctttgggtgtgctgtggcagcaaaacccagaggaacgcattgtgatatttgccacctatctgggtacggtggaaatgttgggtgagcagattgaaaaggcatacccaggccaaggcgttgttgtgctgaaaggtggcgatcacggaagtaagctcgcggcggaaaagcgcttcaagcaagcaaatggccctcgtgtgatgatctgtacagcagccggtcgggaaggtatcaacctgcaacatgcacgggtgctgtttaactttgacctgccgtggaatccaatggatatggaacagcgcattggccgtattcaccgctatgggcagcatgatacggcacaggtgtataacctcgttctgggtgacactattgaaggccgcattttcctgctgcttgatgaaaagctgaaggagattgccaaggcgcttggcaaagtggatgagaagggtcaggtggaagaagatcttcgatcacagatcctcggccaattatcggagcaggttaactatcagcaactttactcgcaggcactgcaagaccctgagctgaagcgtacccggctggagcttgaggcggccatggataatgcccgccatgccaaggatgcggtattcgaactattccaggatctggatggtttcagtttggatgactatgcaccactttcagataccgggaaatccatagatgacctgatcaggtttatgcagaaggcgttaccatacgaaggcgaatccattgagattcgcggacaaaagcaatttgcattggtaaaagatggtttcgaacaaatgctatttaccacggatcgggaagaagcaaccaattcagaaaaattgcatctggttggtttggatcacccattgtttgcagaactgctcgataaataccgcaatcttgatcctgaataccttagtttctattccagtgagctgaattctggtgaaaccgtttctgtgtgggaagtaagggctgccaacgaaaaaggacataacattcactctatcatgaaacttgctgtcgatggagatggtaaccgaatacctcatttagaaaagcaaatagataccgtgtttaaagctaaagggaagaacagcgctcacggagtagattcgcataaaattgaagccgtcttggagcgtgaacttcatcaccggaatatagtgaaacctgagcagtcgtattcagccaagctgatcggtttagcatgtggttga

SEQ ID NO: 126290 - DNA, 507 bp, Enterobacter cloacae
atgagcgatgttctgaccaacgataaatggaaacgacgcggtatctcagtgctctggtgtggcaaaactttggctgaactaaatgctgctagccaagttatcagccttcgtcaattcatcagctactacgaagcgggctggccggatgatatgccactgctaaatgatgatggcttatacgtcgcagggttagacgtagcagtagacgctttatcgccaggagatgcactggaatggctagagtcagagatttacgaaatgatctacgacttccagaaccatgctgatgcggcattgattttctggatgccagatcagggccgctggaaggaagatctgaccaccagtacctaccactggtgcctggctggtaaatacgatgctcagttgtttccgttagggcaatgcatctggaacggtgcacagaaagatgtgcgccgtattgaatcctcctctggtggaaaaactaacgaatggctgggtttatacctagagcggatcagttaa

SEQ ID NO: 126291 - DNA, 3264 bp, Enterobacter cloacae
atggcatctaacaaaacgaaagcacaactgacagaagaattggtggcagaagccgttagtgccggtaaaaaagcacaactggaatcggtcgatttttctgaccccaatcgccctttaacctgtcttgaaattgattttccgattctgccaattaaccaaattgcgcagattgaaggtaatgcgggcaaaccaatctatcagatgagtaagtggtgggcacgtcgccgttccagtgtattccgctctatgttgattgcggctgctaccaaagcgcccgatgaaccatcagaatctgctaaattagtttgggacaactattacgccaatcaccagaacaaccaagcgttcagaaaattgaaagtggctgatattttcatgggaggcggtactacattggtggaaggtgctcggctcggcatgcagatgaccggcaacgatctcaacccggttgcctggctggttgtaaagaacgaattagctgatgtcgatctggatgaggtgaacaagctatttgatcacgtcgaacatgaagtaaaaccccagatcatgccgttttacgcctgtgaaggccctgatggcgaaaaaggcaaatggacacagcgttctacaggcaaagtcatgggcaatgattttgatccactggctctgacacctgaagagcgcaaagattacgcatacgaaggcccggaggtcatttataccttctgggctaagcacggcccttgtgctgcccccggatgcggtcaccgtactccattgatgacatccccagtggtagcggtcaaatctctatcggttaaaacttggcaagatgtcgaatgccaacactgtggatcaagctttgatattgagcgccatgaagcccgcatggctcctaatgttccgctggtcgtaaccgattcagaagctccttacgccatcatggacagtgttggcaactaccaatgccctcattgccagcatccgtatcgcgatgaagctgcggcgcaaaaaggcgaatccccgcatttacttaagaagataagtaaaaataaaaagattgatttgtctctccttgttcatcctgattggctgaaaggttcttcaaatgctgacgatacaggaatatttggcggcacctccttaagcgaagttgaagcaacgcagcgttggaatctacatagaacaaaaacactgaaactgcttgaagtgcggggtaaattgcctgaagaaattatttgtccggattcaggtttggtaataaacactcagcaaggcaccattcctaagaaatctaatttcacttgtcaggaaagcacttgtggtcgtcagcaagatgtactcgacagcatcaaagcttctggacaaacaggcccaatggctgcttacgtattgcagtgttattcacctggtcgtgatgcaacaggtgcaccttataatggccgctactttgctccatcagacagcaatgctgccaagcgacaaaatttggcagtatctgagtggcaaaaaaggaaaaactcggatttgcgaggttattggcccgagtctgaattgccttatggatttatgacacaccacttgcaaggcggcgttcccaatcatggttttacacactggaacaccatgtttaacccgcttcagcttcttattcatgcacagattctcaaggctatcgatacatcttatggattcagtgacaccagtaaagaaatagttttgggtgcatttcagcagtatctgcgcaatcagaatatgttttgcttttggaataacaatgcagacaaaatggagccgatgtttagcaataataactatcaccctaaatccactgtaattgagaattcagtgttttctaatttagggagagggaattgggcatcatgcagagcaaacactctgaaaggtctagaatggtgcaaacagccatgggaaaccgtatctaacgagatgctgagcaatatgtccgacgacatcggcaaattggtcagcgggaaaagctccaaaaccatgccaaatgaccctgtgttaccgggtaccttagtaacctgtggttcatcgacggaattaaaacagtatgttgatcaatcgtatgatctcgtaattactgatccaccatttggtggtctactgcactacgctgagttagctgatttcttctatgtgtggctacgtctgttgttgaaagataaataccctgaggtttacgcaggggaatacacgccaaaaacgctggaagctgtttctaacagagcgcgccatcccgatgatccagatgcgttctataagcgtctgctgaccgaatgttggcgggaggcgaatcgtctgttgaaaccggggggcattttggcttttaccttccatcacagcgaagatgagccatgggttgatgtgttagaaagcttgttcgacgctggctattacctggaagcaacctatcctattcgcagcgatgaaaccaaggggaaaggtgagtttggctccaagactattgaatacgacatcatccatgtatgccgcaagcgtactgaagcccccagcaaaatcagctgggcgcgcctgcgtcgcaagattctcgccgatgtgcgtcagctacaaggcttgttagaacatcaccagtcaaaaggtttgccagtagcagatattcaggtcatcaagcgcggtaaagctttggaatatttctcacgccactatggccaggtgtatgttgaggaaggccgtgaattcacggttaacgaagcgttggtagggattaaccaaatcctagatgaccaatcagaatcagaatcgggcggtaccccggtagtgtgtgagccaaacacccgccaatttctgcgtatttttgcacgccaaccctcagtagaacgcgatcagatgcagaaattcctacgcggtagtggtatagcgccttctacttttgtcgctttgggctgggccactgaaaccactcgtccaaaggcatttcattggcgctcgccactagaattcgcgcaagaacgaatggccagcaatcgcagtgtgagccgtgatttcgatcaggcaatgttgcttgttggtgcctgttacccggaaagcggcatcaacaccaagaaaattctgaatgaagactttaagcctcaccccgcattaggaaacctattggattggcttgttcacaacggagccgactcttctatgcgcaatgcctgtactttggcaaggcaattgtttaatagatgggaagcagatcatcagcagattatgcaggcacaaatatcattgtttggtatggaagatgaactatga

SEQ ID NO: 126292 - DNA, 999 bp, Enterobacter cloacae
atggataagtcactgatcgctgatatacaccgactgcccgcacaggaagtatggccgaaaattttttcggctctctggcccctgtttgcggaacctatcagacaggatctggcggatgcaaaaacaaccgaacgggacagagctatcaaaccattggatgatgtgttggcaggcagtgcatgggatttgtgggcgtcattcgagagtgcatcaccaaaaacagcagatgcactgaaagcattctggcaacgtcatacaacaccgaaagccatcctgattctcgatgcgttatcgctccgcgaagcgccatggataatcgaaggtgcgcagcggcggggctacaccattcacagtgccggcgccacagcctctgagctaccaggtgataccacgccgtttgccagagcaatggggtttggacagcgtactaaattgcaaaacaaccaggggcatagtgctgcgttccctgaggccttcacagaatccaccgacctgccatgggtagattgtgcatccctgatcaaggttgatcccaacattatcttctggcatcactggcctgatgaacgtatgcaccacctggctgaacagggggctggttaccgggtgttggctaaagaagccgcagctgtattaattggcgatgaattctgggctttcatcgacaaacttgccacaggccgtcgtctggttattactgctgaccatgggtattcaaaccctgcgttgtttcctgatgtttacccggaagatcaaaaagcctatctaaaagggcaatttaagtctggccgtaataacgaaataaaagacgcaaaaaccgaacaacattgggttccgccattatctcaggtactgacgacgcaacatggcaactggaacattgtgctgggccgcaaaaaatggcgttcacaaggcggctacccaagccttgcccatggtgggctgagcctgctagaagtggctgtaccctttatcgaactgtcgaaaccgaataattaa

SEQ ID NO: 126293 - DNA, 2682 bp, Enterobacter cloacae
atgctaggactgaagttacgtgaggaattttctggtcgtcgtatcaaaggaacgatgatcgaaatgcataaccggaatggcactggtgcgctcgataagtctgcaagtgaatttctgaaaatcacttatccctcaatcgacatgctcaagactgtggaagctgtacaagctggccgggctgagcctgttgtaattatcggtgcgcggggccaaggtaaatcacaccttatggccgcactgtcacatatgcatcaggataaggatgcaacagtaaactggttaaatgactggtctacccgactgaaaaatccagacattgctgaccttaagttacagtatggcatgcatgtcattaccgaaagcttgcatttgcaacgctataagcatatatgggatgttctgttcgaccagcatccacacggcaacatcatcaaagccaagtgggaagtgcacggtaccgaggtgccgagttatgatctgattctggaaatggcagagaataaaccattcatccttattctggatgaattccagacgtggtttgaaggcttaactaactccaaccagttcaaacgcaagacctgggcatttaacttcatccaaatcctatctgaaatatctgaaaagcaccctgagcttctgacgcttgtggtatctgtgcgcgaaggtaactccgacgcggcacagcagctgttccgcgtaaacccagtgcggatcgattttaaagggccagaagccaaaagagacagacagcgcttgttgctctatcggattttcgaaaacaggatgaacatcccagagtccgacattgcctctctgattaaaacccacgtggatgaatttctgcgtctaagtcatatctcaggctctgagcatgaaaaacacagactgcaattcattgaggcttggccatactcgccaaggcttctgcaattgctggatgatcaggtgcttatcgcaaccgaaactcaagagacacgtgatctcttgcgtattctggtggatgtctttaaggagtcaggtgacgacacggccatactcacaccagcgaatttcagcttaaccagtgaaaaatcaggcgttacctcactactggattcggtagcaagtcagctgcatagggatttgcgtgagaatgcactgcgcaatcttgaagctgttaaaaacggggtacctactgctcaggtgccgcatcttgagtctattctttcagctctctggcttcgttctttgtcattggaaaatcatgccggtgctgaaccgtcagaattgcagctggatattactgagcgcaaagcgatagatgacaacttgtttgccgccgagcttgcagtaattgaggacaacagcttcaacattcaccgccaagccaaccgtttggtgttcaagaatgaggtgaatccacaggccaagctgttagcacatgctaaaaacgacaagctctttcaaaaggatgaagatgtagaacatcttgccaaagagattcgttatgccctagttggagagggcaatcagtcgagtatctatcgaactattgtattgaagaaacagtggcgcactgcgccatggtcggacattgaagaaaaagaccatcctcagcattgggataaccgtattccagtgattgttatgcccaaagcatcgctgggcaacaaagagctgggtgaatggctgaagatccatgtggccaaagcaagaaacaccgtgcgctttctactgccacgtgtgggtactggcgatattttttacgacaagtctatgctggtattagcacgtgcagtttatctcgcaagcgattggaaaaactcagagcgtgagtacgctcaattgcatctgaagtaccagaaggaactgcgtgagcagttgcaatcccgctttgatcgttttgcagtcttggtagtgtggaatttcgcagacccatctcaatgcgattttgagatttcacagcacggcgcagaagggttacagatcctcgaaaaactggatgagaaaatccgcagcgagctgtttattcccgaagaattcgacactatgctgcttgatgccgcaacgaatagccgcagcgtggctgacctcatcgaccagctgaaagagccagccccaaaaggtgcagaaagcattccttggctgggtgaaacagccgttaaagagcgcattggccgagcttgtgcagaaggcaaaattgctattaatgccaaaggcagtctgtacgagaaaaagccctcagaaaccacagaagatgcttggttgcgagtacgtggaaaactgggcagcggtaaagatttggaagatacaacactgcacctgcccggaggctctgtaggctcaggcggttcaatccctgtccagcctgttcccggcatgccagaagaattcactaccggtggggttaacgagctacccgtaggctcaggcaatagcagcactgcatccggagccacaccaacaccaggatcgcttttcgctgtttcaagtggggggatcgttgctcaccacagtgcgcaaaatacctcgacactgagcctgctcggcaagcttgagcaatggggaattaaaaaaggcagtaaggtgaaggacgttaaattattcacctcacagctcactggagcgcaattagagcatctgctgaaaaacttaccggatggtgttacttactctcttgatctggataaagaacaataa

SEQ ID NO: 126294 - DNA, 309 bp, Enterobacter cloacae
gtgttcgacgtcaaccgtggtgtgtcgggtcatgacgtgcagacacaggagaagttaaaggcggaaggcaagcctgtgttggtctgtctgaacaaggtggatatgctgcgcccgattgatcaagatagaatggttcatgtcgccaaaacgcgcctgcagaacccctatgtgattgaaacggcctttgaccctgatccgcgcttgtcgcaggatggtccgattggcacacaggtcgtgtttgactgggaggtgaatcaattagaggcgcagggtaaagagaccgcgcacctgaaagccgagcagaaataa

SEQ ID NO: 126295 - DNA, 765 bp, Enterobacter cloacae
atgcattccgatatcacccagattttgacagacctggtgaaccgcacgttaccgctgggtcagattcatttctcagcgctggctgaacagcatccccgaacctctccctgcctcggcattacccttgacacaccctgcgaggcgattttttctttttttggacaaattacgcatcctgcgcctcacgccctgagcatacatttcggtaagcagcagcttacaatcgagttacagcatgacaatgtgctcttacaacaactccaggttgcccgacgtggtccgcgaacgggggcttttcttctgcaaacgctcaccgaattacagatgcagccagaagagcaggacacagcaaggctggtggttttaagcctgctcagccactgccgggatctgcttggaagcgaaattcacaccgacagccgcagccgggcactgttcgaagccgttcggagctatatcgaagaaaattatgcctctttgttaactcgcgaatccgtggcacaggcgttctacatctcaccaaactacctttcccatctattccagaaagtcggcagcgtcggattcaatgaatatttaacaaaaacgcgcctggaacatgcgcgtcagctgctgaaaggctacgatctcaaaattaaagatatcgccacacgctgtggatttacggacagcaactacttttgccgtctctttcgcaagcacaccgaacgttccccttccgaatatcgacgccagtaccacagccagctgatcgccaaaaagtag

SEQ ID NO: 126296 - DNA, 471 bp, Enterobacter cloacae
atgatgactctccggaaccgtatcattttgctggcggcatttctggcggccgctgtcagcagtggctggttagcttattcgcatttatcgagtacgccgatacgctgtacgggagatgtggaatggacgattggtaaaaaccgatttgtgggtacggtttcctggcggatgcagcatcgggaggggtctacggttattaacggtaaattatttggtcagacggttactgaagttaatcgaaccatctattttcactacagtgaccatgagaacgcgcgcgtgttaaataataatcgtattgttaaaacctttgccgataatgcggatgaggctgatatcaacgcaacgctaccgggtttttaccgcacgccgggtagggagctgagcctgatgatcgatgagtatcggggggcctggatttttgccgcgtcaaacgtcccttcgctttactgtcgtaaaaacgcgccgtaa

SEQ ID NO: 126297 - DNA, 744 bp, Enterobacter cloacae
ttgtatcttattaacaaattggtcgagtatgatccagaaaacaaaaacctggtaaatcatattaccgggcgctcgatacaattgcagcttcctgccaacctctgttttctttatctcatcacccatcccggagaaataatttcgcaaaaccagttaatggtggtgggatggggggagcgcaatgacgtcactacgccgaataccttttaccaggctattttgacattacgcaatgccctcgctgaggtgggcttaccgcgcgatacggtaaaaacgatttcgcgtcgcgggcttatgctttccgaggctaccgaggttgaattatttgtcccaaccgctgagccagtcatagccaataaagacgtgctcgttgccaatggcgccgcgaggcagaggccagcctggctgataataacgaccgcaacgcttttgttgatcgcgcttatcaacgggggaatattatataaaaagcaccagaacatgccgtttagtcactacattcccctttcaacgggcagcacgacccaggcctgccaacttttttatgcacctaacgaacatattcaggatcattacgtgcgcctgctaaacaataatcccggtctgtgtgccaaaaaacgatacgtttttctcgtcggctatagtaaaacggagcgaatcgcggcgtttgtctgtaataacgatgcgcgaagggacgcgacggcgttatgtactacccattatttttgggcgcacgaaaaatga

SEQ ID NO: 126298 - DNA, 618 bp, Enterobacter cloacae
atgatgacatcgtcgcataaggttgtccgctgtatgagctgtgaattgtcctgtcagttatttccagataacgcagtacgttcacaatattgtggaaatgcctcattcgcagtttggccaggtggtaaccatttcctgcagattgcagtagaaaataaaatattgcaaggaaacaagaatcacttattacgcggctttatatttgtagacttttcgttttgcaacctgcgtgtacttgccgatccgcaatggattgaacgtctggtgagaactaacatgaacatcgtgattatcacagaccgcaagctggaagcattggccaattattttttcatgcagcgcagtgaaataaagggaattatttattcgaatgacaacgacattatattaaaggaaaaaatcagccatcttttctccgggagacggttaaatagcagacgcggcagcatgttgaacgctgttgaatttacgttactgaacagatttttgtcaggtgcttgcctccaggagattataaaatcagacggcattgatgttaaaaaaatttatgttcataaaatacgacttgagaggaagttaggcaccagtattcataaagttctcgtttctattttgtaa

SEQ ID NO: 126299 - DNA, 2865 bp, Enterobacter cloacae
atgccatatttaatgaaacactcaccagtcgccgctgcgatttcgctggcgttaacgtcagcgctatttaccgcacatgcagcggtaatagattttgctaatttacctgcctccggagcggtaacggatttgcctgcagaaatacaggcgctgatacccgcaacggcaaacgcgaactttagcaaaaataccggcgatcctaactatgtctaccagtacagcccggggaatatcccgatttacggagatgggatcactctcgaagggcctggggcggaagcctttgagcattccgttaccgttattcagaactccacgtccggcagcccgggggtgatatttggtgacgatctgactattcgcacccagtcaaaagtggctgccaataatggtaaagacgtcgacggtattcgtacccacgggatgaacacgccggccaacccggtatttatcattaccggcgaccgcacccatatctacgttaacggccaaagcggtgacggcatcaatgccgggtacagctccttcagtcagggttctctcggctccgccaatatttatgtgggtgacgatctctatatcgaaaccacgggcagcaccgggcgcgggattagcgcttatgcactgaatgatgcctcaaaggcaaaaaataacgttatcgtcggcgatcgtgcgcatattgtgacgcgcgggacttacgctgagggcattcgtaccaaccagagcggctcatacgtccggctgggcgatgaggcgaccatcgaaacgtacggcacatcggcctatggcctgtacgcgggctctgcgtcaaaaattgagctaggcgaaagcgcgacgattaccaccgacgcggccagtgcctccggggtttattctaccggctcgtcaaccatcacccttgatgaaggcgtcaccatcacgaccaacggtgccagtgcgcacggcgtctacgcgtacaccggtgcggtgaatctgggagataacgtcaccattgcggtaaacagcagcgagaaaaccaacagctccgcgcaggcgccgcatgggatgtatgcctggtcgcgcggcgtgatagcgctcgcgggtggtgcaaccattaccaccgcaggccagcgcgacagcggtagctatgccctgaacgccagtaacggcggggtgattgatgcgtccgcaggaggcaagttcatcctcaacggcgatatcctttccgcaggcggcgtcgcggccaccagcgcgcttccggcacaaaacagtaccattacgctgactatggatgacaactccctgtggaacggagcgtccttcattgagagcaacgccgcgggtaccggtactctcgtactgacgatgaatgatgccgtctggaatctgcgcgacagctccacgctgaccagcctgacgctgaatgcgggcggcacgattaatttccagcatgcagaggatgcggcgtggcaaacgctgaccatcaaggatgattttatcggcaacggcggcaagctggtcttcaataccgtgctgtttgacgacacttcggaaacggacaaactgatcgttgaaggcaacacctccggtcataccggggtggaagtgaacaacattggcggtgccggcgcgcaaaccgtagaagggattgaaattgtcagcgttggcggcaactctgaggggacgtttgagaaggccagccgtatcgtggcggggggatatgactataacgtggtgcaaaaaggtaaaaactggtttttgaccagcctggtcgagcccgttgatcctgtagacccaccggtcgaccccgtagatccacctgttgacccagtggacccggtagatccgcccgttgacccggtgatcccgccgcaagagccggtccccccagccgcaccaccgaaaagcgagcaccagtatcgcccggaatttggcagctatctggcaaacagctatgcggccaatacgctgtttatgacccgtctgcacgatcgtctgggtgaaacgcagtacaccgacatgcttacgggcgagcagaaagtgacgagcctgtggatgcgtaacgtcggcggtcatacgcgttttaacgacggcagcggccagctaaaaaccaccgccaatcgctacgtgctgcagctgggtggcgatgtcgcccagtggagcgccgatggcctggaccgttggcatctcggcctgatggtgggctacggcaacagccagagccggagcgcttccagcctgaccggataccattcacgcggtgaagtgaatggctatagcgtcggtctgtatggtacctggtacgcaaacgaggcggataaaagtggcacctacgttgatagctgggtgctgtataactggttcgacaataaggtaatgggacaggatcaggccactgagagttatcgttccagcggcgtgaccgcctctgtcgaagcgggctatagcgttaaggtgggcgaaagcagccgcaacagctactggatccagccgaaagcgcaggccgtttggatggacgtgcaggctgacgatcatcgcgagcgcaacggcacgcgggtgaaagacgagactcagggcaacctgatgacacgtctcggcgtgaaggcctacatcagcggacataacgcgattgacgacggtaaatcacggaccttccagccgtttatcgaagcgaactggatccacaacacccagaccacgcgtatccgcatggatgacgtcagcaatgacatgcgtggtacgcgcaatatcggtgaactcaagaccggcgtagaggggcagattacgccgcagcttagcgtatggggcaacgtggctcagcagataggcgataaaggctacagcgatacgcaggggatgttaggggtgaaatacagctttaaataa

SEQ ID NO: 126300 - DNA, 897 bp, Enterobacter cloacae
atgtctcgcatcgtttgtgtcggcattaccgtgctggatcgcatctggtatctcgatgatttaccaaaagaaggtgggaaatatgtcgcaaaagactatacggaggtgggcggcggcccggcggcaacggcggcagtggcggcggcgaaactgggcgcggaagtggattttattggccgggtgggtgatgacgataccggcagacggctgctggcggagctggaatccctgggggtgaagacccgctacacgcgcgtgtttaagggtgcccgatcgtcacaatcggcggtgctggtggacgcaggcggagagcgcgtgattgccaactaccccagccccgatctccctgcggcggcagactggctgcatgaaatcgacttctctcagtgggatattgtcttagccgatgtgcgctggcatgacggggcaaaacaggcatttaccctggcccgtcagcagggcgttccgacgttgctggatgcggatgtcaccccgcaggacatcgcggagctgatcgccctaagcgatcacgcggctttctccgcgccggggctgcggcgccttacgcagcgggacgaaacagaaaatgccctgaaaaaagcacaaacgctcacaaatggacatgtgtatgttacgcaggggcgagacgggtgcttctggctggaaaacggcgcattgtgtcatcagccgggctttgaggtgaacgtggtggataccacgggggcgggcgacgtgttccacggtgcgctggcggtcagcctggggcagcaatggcccgccgcagacgccgtgcgttttgccagcgccgtcgcagcgctgaaatgcacgaagcccggtggacgcgcgggtatacctgactgtgatcaaacccgctcttttttgtcactttttgtataa

SEQ ID NO: 126301 - DNA, 585 bp, Enterobacter cloacae
gtgaatgttagccaggaaatcatcggggtcgttctggcaggcggcagagcaacgcgaatgggcggaaaagataaggggcttcagcttcttaatggaaaacccttgtggcagcatgtcgccgatacgctcgcaggtcaggtgacgactatagccatcagcgctaaccggcatatcgacacttaccggcgcagcggctacgccgtttatcaggatagccttgagaattacccgggcccgcttgccggtatgctttcggtcatgcaacagtcgcagggtgagtggtttatcttctgcccctgcgataccccgtttattccgtcctgtcttgtcgagcgtctgttcctgcttcgtggtacagcgcctgtggtttgggtgcatgacggcgaacgtgaccatcctgctgtcgcgttgatgcatcgatcgcttgcacctgctctgctggcctacctggccgcgggagagcgcagagtgatggtctttatgcgtgagtctggcggccattccgttgattttagcgatgtgaaatcagcgtttgtgaacgtaaatacgagtgaagatttgcagatgatgcaggagaaaaaatga

SEQ ID NO: 126302 - DNA, 945 bp, Enterobacter cloacae
atgttcgagggggttgagacaggaacaggacagcgctggtatgtccccatcatggtggcaaaaggcaaaacggacgggaagaaagtcctgctgcaggcgggcgtccacggggatgagctaaacggagtgcgcatcgtccaaaaagtaatggaacaactggaccccgcaaaaatgaacggcagcgttattggcattatcggtccaaaccgttctggacttgaaagggtctcccggacatggtccgtttcaaccgatgggggtgagacgatcgactacaaccgcgtgcacccaggaaaagaaacgggtaaccctgccgagcgtcaggcatggatgatgtggaataaggtttacaaaggaaatgtcgacctggcgattgactatcacacccagtctaccggaacggcttatccgctgttcatttatgccgactaccgcaatgcggatgcccggacgattgcagaactttttccggccgaccaaattaagaaagatcccggcgaagccggctcaatggaaaccacctttattcaaaatggtatcccggcgataacggccgagacgggagagccgaggatttaccagcaggatatgattgaccggggtgtagagggtgccctcaatgtactgattcattacaaggtgattgaaggcaaaatcggcgcaaccgccagcagcaataaaacgtatattggtaatgcgatcagttcaatacgagcgaccacgggcgggtttgcggaagttttcgttaaacccggcgacacggtaaaagcaggacaagaggtcgccctgcagcgaaatgcattcggtgatgttgtcgcgaagaattcagcagagcgggacggcaaagtactgtcagttggaacagatgtcgtgagagaaccccgagccctgctggtaagaatccttgagcaaaacccagcggcaacctgcaaagacggttgctga

SEQ ID NO: 126303 - DNA, 900 bp, Enterobacter cloacae
atgatctttaatattcagcgttactctacccacgacggccccggtatacgtaccgtggtgttcctgaaaggctgctcgctgggctgtcgctggtgccagaacccggaaagccgctcccgcagccgggacgtgctgtttgatacgcgtctgtgcctggacggctgcgacctgtgccagcaggcggcaccgggctgcatcgaacgcgcgctgaatggcctggtcatccaccgcgaaaagctgagtgaagagacgcttgatgccctcaccgactgctgcccgacgcaggcgctgaccgtttgcggcgaagaacagcaggtcgaggagatcatggcgaccgtactgcgcgataaacccttttacgaccgcagcggcggcgggatcaccctctccggcggcgagccgtttatgaacccggagctggcgcacgcgctgtttaaagccagccatgaccagggtatccacaccgccgtcgagacctgccttcacgtgccgtggcactatatcgagccgtcattaccgtacgtcgatctgttcctcgccgacctgaagcacgtcgacggtgacgttttcaagcagtggacggacggttcggctaagcgcatcctggacaacctgaaacgcctggccgccgccgggaaaacgatcaccatccgcgtgccgctgatccagggcttcaacgcggatgaagcctccatcaccgccattaccaacttcgctgccgatgaactcggcgtcgacgatattcattttctgccgtatcacacgctgggcatgaacaaatacaccctgctcggccaaccctactctgcccctgacaaaccgctggataaccctgccctgctggacttcgcgcagcagtacgcctgccagaaagggttaaccgcgaccttacgaggataa

SEQ ID NO: 126304 - DNA, 501 bp, Enterobacter cloacae
atgggaaattattcagattttgagaccgattttattcagcgaacactggcgcttatcgatcaatataacgaaatgattgaggtgcagggcaagccattcagtgagcaatacaactatacgttgaccctaaattgccttctgggtcttatcgtgttaccgaaagagagggcgctctctttcctgcctgccgaccgcttaacgcagcaacttaaagctgaaatgggattacatgagtcacagctgcccggaccggaaatgaacctgcgggagttgatccataagttgcggaattcggtggctcatttctgtgtgcatgtagagtcagtaagcgatgcacaccttgtagactggattgttttcagagaatcccaaggagatgggaatgtctacgccagcttcagcgctcccgagcttttaccctttctgaaatattatgcgaccctgttgctcggcaatatggcccgccgtcgagccccagctgttaacgtcttggatttgtga

SEQ ID NO: 126305 - DNA, 216 bp, Enterobacter cloacae
atgttggttctcgattgctcctcacgatctcaggcgcttctttcactttcttccggttttggttgcagtgtcatggagctaaaaaaggttttgttatctctcgatcttgaacagatttacgagacggatcattccattatgatcgactcgcaacaatatctaagagagtacgtctgtagggaactgggttctccgggcaagttcaccaccgcataa

SEQ ID NO: 126306 - DNA, 483 bp, Enterobacter cloacae
atggatatgctggtaaatctcgcgccagacgctgtggtcaaagagacattgcaggcgtggaattttcatgctggcgtacctgatactctcttccggatgcgcaccagaaacgaaatgcactgggggccatacggacaccttgtacatgaggttcattttcatgcccgcaaactctggcagcacgattatctgcggctacctgagctggtagaagatgtctgcaatgcttaccagaaaaagtatgggcaggatcttacagcacactatcttaaggtactgaaaccctgcatcgtctgtttcagggcagatattgagtatgaaaaaggtgcatttgaagccgcgctgagttacgcgtacacgtccgttagagatttgccgccggatagcggtgcagtgttcggtattgatcgacatggtatatccgtttgtccggacgaaattgtgaacgttgaattcacgaatttgcacgagattgatggctga

SEQ ID NO: 126307 - DNA, 1593 bp, Enterobacter cloacae
atgacatctcttatagtaacttcgttacgcaaaaccggtccttgccttagctctgtacttgtagaggaaatgctgaaaacccagggagttaaccgtgataccgcgcgcaaacagatttcccgggcggcttatgcagggcagatccactgtgttgacaagcttttccccaagcgcgaacgatttatttatctgaaacagcagtatggtaccgggcgcttctggtccagtctcaatacagctctccttgataccgggtcggcctacggtctcgccctgagttgcctccgggctcgcggggggattctgccggccagacattttcctgctgcctgcggttcaccagtagcaatgaaaaacagattatcctggaagtcagttctggacggtctgcttcagtacaaaatggtcagggtcgttacgttaccaggtctgggggagtgtgtggcgctgacagaaaaaaacgataacgggtatcagcgcgcgctacatcccctcaaagccaggctacttacagagtcagttctgatgaaatccctgagtcagtgggttcgtcataacggtatcatcagttacgacacgctgcgcacacgggaagaactcgattcagatcaggatccctgtgtggcaaattttgattttgacgtcactgcagcatcctatcttaatccgcttctgcagttttcccggtcaggggaaattcggcctggtttctttgtctgcgacatgcttttgggctttaagctcagtcttgtgcatctccagccctttattacaaaatgtcgttcaataaacagcctcaggaacagcccaagatgcctgtttatgtttgttgccgacgaatacagcgaagaagcttttctggaaatgaagcgtgccggaataatacccacaacaccggagaatctgttcggaaaagactttgctgatgcactctttcagttaagggatctggttggttcaataacgctcagcttagaagataatatagccgcaatagatgacatcatgtccaagcttgagaatattgccggagtaaccagtcagcttcagggggatttgtttgaatatattgttgctgagaccgtgcgcgtaaacagtaatgatgttgaagttggtagaatatgtaagtcagagaggaaggggactgcagaatgcgatgtcctgagccgacagggaaatactagaatcacctttattgaatgcaagggttataagccctattcgacagtgaaacatgaagatgttaagaaatggattggtaaacaggtgccggtatttttcgattatgccaaaagagaataccccaatgctgaaattaatgttgagttatggactacaggaaagctctgcgatgattccagagagtctcttcgtaagtttcaagaaaataacttaactaaccagcgttataatataactgtcatggagccgcatgaagttcgaaaaagaataaaggcaacctggaatgatgctcttatccgggtttttgaaaagcattttctcagctatccggaaaaaatcgttcgccgtaaacatgttcccgaaccggtcaggcttgctggtcatgatgaggcaacagaattcgatttctga

SEQ ID NO: 126308 - DNA, 1128 bp, Enterobacter cloacae
atggactacacaaaaaatcagcatgtactttcacagtgggtgctacgcaactttcgcagcgatgacaccgccctatctgcaaaagaaaagcagcgagtatggtgtcataccgtttatatgacgcccgataaggaaaacgttctccacacgcaacctctgccaatatccagtgtggcagtatcgaaaaactgctttcgtcttattgatgctgagacaggactgcctttcgatattgaagacgaactgggtgtgtacgagcgcctgaccgccggggtcgtgaacgatataattcacgagcacaatttctcacgcctccgtcacacactgccggaagattttccggtagagaaacttgccagtttcgcggtgatgcagttaatgctcaatttgcacaatccgcaaaataaaaacccgtacaaacatgaactgcttgaacagttccatgctgatatacaggatcatttatcagaatacatctattcgataaatcagttgcctcaaactaatcctgagttaatggaagatcatttctatcgcaaaattttgcgcgttgctaattctgtttcttccgaagaagataaaagcagagcgctgtttgttttgtttgggcttttatcaatcctgaataagccgaccctttacgacaaaatcaataaattaagaaacaaaattttttctggtatcagaaccattgaggttattcatacaggccatgatttcgacagcactgaacacaggccagcattcggaatagcacccaacattttttgtctgtataatgatgaaaatagaatatatcttcccttatcccacaatttcactctgtgcttcattactggtgctgcattgtgtttcagacctcgtatagaagtgttctctccacgtcccgagctgctgaaatgtcgccatgatcggagccttaacttttataaggtctcgtttgattacattgataatgtgatgacaactattgatatgtacaatgtgggttcgtccagtaccttttattctgcctatcagttgagcaagcttaatgagtatctggataagcagaacaaagatcatgactattattacacgccggaaaaccctgtgctgtggcaatctgctcaggcggataaattatga

SEQ ID NO: 126309 - DNA, 291 bp, Enterobacter cloacae
atgaatgccgacaacgaaaggaatttccgcgatcttatcgatgccagaaaattcaatggtaatacgctggtcagtggagaacactggcagaagcccactgtttccgaaatcctgctggtcagggacctcattccccttactgacagacagctggcccaccggctggatgtggacgaacgcaccatccgcaaatggaaatccggccagacacggatggtgtacaccacctggtgctgtctgtgctggctggccggactggggatgccgctcgataacattatcagtgactga

SEQ ID NO: 126310 - DNA, 303 bp, Enterobacter cloacae
atgcaggtatcgaaatacataacagctgacgcgttaattcaggaactccatgatgaaggacacgatgtcatctatgagcgaattactgaatatccggttctgaaaggggtcgcccagatcccaccggcaaaacatttactcactcaggaaggatacgtcgtcgggatcttcgttgaacctatgggaggatggcgccggcgtgaaagcgatgactgcgtcagtgatgaacctggtattgaagacaacccttttaaggtgaagcacgatgttaatgcgtcccggaaaataatccgacgcctgtag

SEQ ID NO: 126311 - DNA, 819 bp, Enterobacter cloacae
atgggaagcatgaaagaccagatgatggatattgaatctgaacgatttgataaatggcttgcggaaaattatccggatgttgtccccggctcagaagaatgggaacaggccgctaacctttattgctgggaacaggagtatctcgccgatcaggctcagtgggatcatgaacacgggctgtttgtggcttccctaaacaatgttcatcagcgttacctacacgccatgcaggagttgaaggggctgtataccctgctcgatacagagcagcctgaactggtgtacaggatgtctttcgtccatgccgtgacggtcatggaggcgtacctgatgtactgcgccagggctctgctggaagaggacttgccgcttacacggttcagggatgagttttatatgaagtccgataaaatcaaaaatccggtaaaacatgctgcccgtgacatggctctttctctgttccggcctgcggcgcagaattttgtttcccggatgacgtttcataacgtaaaaaccattgagcgctatttcgagactgtgcttcatataccgcccgtctggccaactgagccgctgggtatcatcgcagactggcgaaacgatctggtacaccgcaacggtgtggatgagcatgatgtgccacgagtgatatcagcgccgcagctgcagagcgccctgcagaaagtgtcggatctgatagaggctgcagatcattccctgcgtctggaagtggactattttggtaactcgcgtacagaagaaaaccgggaaatcattgcggcagcactgcgcatatccccgggcagagaatcatcctga

SEQ ID NO: 126312 - DNA, 468 bp, Enterobacter cloacae
atgttcagactgacctgtattgaactcgataacggcgagtttgccgtctatatcaatcaccattacctgtggagtgaagatgccagcggagagcgactttctctgggggaggttctggagcagctctcccggctgccgggtgtggaattactgaccctgctggaacccgtaccggacgacgatgactggtgctggaacgacatcgctgatcgcgtcctgccgtcgcgtcctgcatgtcgtgatgatgtgacggtggcagggctcatcgccaggctgaagcagtacccaccggatgcactgtgtatggggacgttctggctggaagatgattttctgtccctcgatggcagtctgtcggaggaggaaattgcagaagccatgcgtatctgcgaccacagccacgatgcaggcatcggttttaactgggacacgctgcagtttgccatcgacagggtgaaggggggttga

SEQ ID NO: 126313 - DNA, 327 bp, Enterobacter cloacae
atgaagtggcgctattccctgcgctggaaattgccacacatgccctgccctggtccactggagctggtttcagttgtcgtggaggcagggcaggcggcacctgaagaggtaatgtcacgctgggtagctggctcaggttacgctgtatgcgtggattttctcggtcagaaacagatccagcgctggagcgatgaacggaaagcagcggtgagaaggcgcaacatgcaggcacggattaatcgtgttgcccctttgtttgccgatgagttaatcgagcgggaactggcagcgcgtccggcgtatttcaatggcaagtctgcccgatga

SEQ ID NO: 126314 - DNA, 303 bp, Enterobacter cloacae
atgaggtactggttgctcgttatattactgtacgcgctgttctttttaatcgtcaggcatgctgcgccagaatgggaaggcacgacaggctattatgctggcctgttcatatgcagtctgatagcgatggttatcacatggcgtgatacgccaggctggttcgataaagtcctgctctgcgtaattaaatacggcgttctgagtgccgggattatcttctttgtctggggcgtcgggtacaagctggcattctgggggcaaggtaattctgaggccgtatttgtaagtgccggggactgttaa

SEQ ID NO: 126315 - DNA, 978 bp, Enterobacter cloacae; identical to SEQ ID NO: 99298

SEQ ID NO: 126316 - DNA, 1380 bp, Enterobacter cloacae
atgatgaacaaaacggagttgctgacgctggcagaggaaaacgttaagcccaagccggtccccctgaaggaggcgttctggttctggatgaagctgggttttatcagctttggcggtcctgccggacagattgcgatcatgcatcaggaactggtcgagaaccggcgctggatttccgagtcccgttttctccacgcactcaatttctgtatggtgctgcccggtccggaagctcagcaacttgccacctacattggctggctgatgcacaggaccttgggcggagtgatagcgggtttgttatttatccttccctcactttttattcttatcgcgttgtcgtggatctatatcgcctggggagacgttgccattattgccggtatcttttacggcattaaacccgccgtggcggcaatcgtgctgcaggcggcgcatcgcatcggctcccgtgcgctgaaacacggtgcccactgggccatagctgctgcggcttttgtggccgttttcgccctgaacgttccttttcccgtcatcgttatttcagcagcgataactggctttatcggcggacgcatcgcgccggaaaaatttcacagcggcagcgggcataacaaacaggagaaagccgccgttgatgctgcggttattgacgatcatacgcccgtaccggcgcatgccctgttcagctgggcgaaactgttaaggattgtggcagcgggtgcactgctctggcttattcccatgacggtgctgacgctggggctgggctgggcgcatccggtgacgcagatgggctggttctttaccaaggctgcgctccttaccttcggtggggcctacgccgtcctgccatacgtttatcagggtgctgtcgtcaattttggctggctgactgccgggcagatgatggacgggctggcgctgggagaaaccacgcccggcccgctgattatggtggtcacgtttgtcggatttgtgggcgggtatacccatgccgtttttggcgcggatatgctgtttgtcggcggcgccgttgccgcctgcatggtgacctggtttacctttctcccgtccttcattttcgtgctggcaggcgggccgtttatcgaaacgacccacaacaaggcgggtttcacggcacctttaaccgccatcacagcggccgtagtgggcgtcattgttaatctggggctgttttttatctggcataccgtatggccggaaggcgcaaagggagggatcgatatccctgccgccctgattgccgtcgccgctgcgtttgcgcttttcagattaaaatggaaggttacgcacgttattgccatggcggctctcgccgggctgatactccgcctgaccgggctgtcagctgtgtga

SEQ ID NO: 126317 - DNA, 690 bp, Enterobacter cloacae
atgtacaacactgatttaccaacacgcgcagaattaccttctgccatcaaactgatgcagtccactatcctcgccgccatcgtggcgctgacgctgctgatcaccgtcgtcatgccttcggaatacggcattgatcctactggcgtgggtcgtttactggggattaagcagatgggagaaatcaaaacgcagcttgccgaagaagctgatgccgataatcaggccagcgctgttcagcaaggacagctggctgcgccagttaatgagcgaccgatcccggataatcctccggcaataacgcagaacacctacccggagctgagcgttccggcgaccacgcgcgcgccggaagtaccatcggctggctcgcaacgtcatcagatgctcatcaccctgaagcctaacgaagctgctgaagttaaactggaaatgcgcaaagatgcccgcgtgacctatcagtggacaagttccggaccggtaaacgtggatgcgcacggcgatccggtcaacgccccgaaaggcttctaccatggctatggtaaagcccggcagatcacatccggagacggcgttttacaggccgcgttcgagggtaaacatggctggttctggcgaaatcgtggttctgagaccatcacgatccagcttgatacaaccggcgactacctgaacatcaaacgggttatctga

SEQ ID NO: 126318 - DNA, 738 bp, Enterobacter cloacae; identical to SEQ ID NO: 99302

SEQ ID NO: 126319 - DNA, 366 bp, Enterobacter cloacae; identical to SEQ ID NO: 99303

SEQ ID NO: 126320 - DNA, 240 bp, Enterobacter cloacae; identical to SEQ ID NO: 99304

SEQ ID NO: 126321 - DNA, 288 bp, Enterobacter cloacae; identical to SEQ ID NO: 84381

SEQ ID NO: 126322 - DNA, 159 bp, Enterobacter cloacae
atgaaactgccacgaaataccctgatctggtgtgtattgattgtgtgtctcacgctgctgatattcacttacctgacacggaaatccctctgcgaaatccgttacagggacacgaacagggaggtggcggctttcatggcttacgaatccgctaagtag

SEQ ID NO: 126323 - DNA, 294 bp, Enterobacter cloacae
atgcacacacgaaacgtcaacgtcaaaaccgccgctcaagaatctaccggaagatgtgattcaaacctcaccacgtcccagttcacggatctgttttgctgggtcctggcagcatcggaaggggagccacaaccggcaatttttacgccgccagagaatgccactgagctgacgttaattaatgacgaatgcccggattatatctctgtctggatcgtagatggtcgcccggtggcagttgcaatgccgctggataattttcaccgcgttatttcttcatcactaactaaataa

SEQ ID NO: 126324 - DNA, 822 bp, Enterobacter cloacae
atggtcagtttcgcaagccgctatcgtatgcctacctcgattcgtaaagaccgtccgctgacgaatgaggaattacagcacatcgttccgagcgcgttctcatcggataaacacgattcacgctctgaacgttatacgtatatcccgaccataaacattcttgatcgcttacgtgatgaaggttttcagccgtattatgcaactcagtcacgtacacgtgaccaggataaacgcgactttacaaagcatatgcttcgcctgcgtcgtcatgaccagattaacggaaaagaagtaccggaaattattctgctgaatagccatgatggttcaagcagctataaaatgatccccggtatgttccgtcagatttgcagtaatggtctggttgcgtggaaggattttggtgaaatccgcgtaccccacaaaggggatattgtcggtcaggttattgaaggcgcttacacggtgctgaaaacatttgacgcggttgatgaaaatattgacctcatgaaaagcattcagctcactttgcctgagcagcgcctttttggtgcgaccgccctggaacttaagtacgatggaaaaccagcgccgattacaccggagcaaattattaacccgcgccgtgtgctcgacagaggccaggatttatggaccacgtttaacgtggttcaggaaaatgtgatccgtgggggaattcgtggcagaacggaaaaagggaagatgaccagaacgcgggaagtcaccggaatagatggtgacatcaaattaaatcaggtgctctggaaaatggctgaagagtttgcaaaactgaaggcctga

SEQ ID NO: 126325 - DNA, 354 bp, Enterobacter cloacae
atgttaaccaaaggcagtgcccttaacgtcggtaagggatgggcggtagcgtccttattccgcaaagctcgtgaaaatcgtctgactaaattttacttaaagacagttggcgcatttctttttgcattcctggtcacacacccggcattcgcatccggtactgaccttctcgcatcacagaacacaacggttaattcaacctttggttctggctcatcaatcgttaaatggttttacctcggggaaattcttttcggtgtcttcatttatatgaaaacccgctccccactcacattcctgggcgtgccgctggtaatcattgcaacacgcattggttttgcgattgcgagctaa

SEQ ID NO: 126326 - DNA, 303 bp, Enterobacter cloacae
atgagcggggaagaggataaatactacttcccggaaacactgaaccagcaggaccgttattttggtttgccattagatgaaattattattgtcgcccctctggctatactgggcatcctcaacaatatgtctattgaactctccatcatagcgggcctgctctggtttctcgtcagatatctgaagaaagggcaggggtcgtactggttacttaatttctgttactggcacctgccatcacttttattcaaagtaacctttcgccagattcctgattcaagtttccggcactggagggcatag

SEQ ID NO: 126327 - DNA, 426 bp, Enterobacter cloacae
atgaaatcctttatccgtgaagcaaagcgtaaagacaacgcgctgacacaaatccgggaggacctcgatgactggagcgccggtcgatcaacgccggtgcagcggtttttcgtaactgcatgggtattcatgattctcacaggaagcggtctcttcctgcattactggccagtatggggatggatatttctggcagtctggttcgtcctgagcaacctgctgctcagaaagctcataccacgcaagacagaatcgtgggaggccgtgtttgacgatacgctgtcatcctacaaaccggttaatcaggcggcctggggaaaactgaaactgcaggttgagagagagggacttacgctgactgcagtcagaagctggtttcaggaagaagcgatgtctgtctggccagaagagagaaccgctaaataa

SEQ ID NO: 126328 - DNA, 465 bp, Enterobacter cloacae
atgcgtgaagaaaaacgtaacaacgacctgctcaggaaaatgcggatgcatattgctgactgggagaccggccggccaacccctgcaggaagcaagtacatgtttttggggtttgtcatctttctctgtgcagggggaccggttctttcgtactgccctccactgtgggcgctgggtatcctgattgtctggctatttctgactcaatggatatgcaggcgaattgtcccccgctacaacgaaagctgggaggaggtattcgacaggatgctgtctgcttatgaacccctgaaccttcctgcctgggagcacctgaagcgtcaggctgaaacagaggggctgacggccagcaacgtcagaaactggtatcagctggaagcgatgagcacctggccagaaaagaaacctgacctgaaatttctcaacaacagtccagaccgtgagaaagagtccgggagcgagtga

SEQ ID NO: 126329 - DNA, 285 bp, Enterobacter cloacae
atgccttcaatcaggacaaattcttcattactcaagatcctgtatgactaccgccacgtcgtctttttagtgcttatttatgcgactgaaatgacggtatgggcgattctgaacctgaagggactcggcgacgaggacttttccacatggcgaatctttctgctcataagcgtggccatcatcgcgtccagtgctgcagcttatggcgatactgataaagcatggatgatgtttgcaggggctctcgcgccctggctcagcgcgtctgtttcaatcatcgtctag

SEQ ID NO: 126330 - DNA, 243 bp, Enterobacter cloacae
atgaacagcctctacatcaacagtaacggtggtctcgatccgttagcccactcacggaaaggaacgatacaaatcaccgccacacagtcagtcgataccgacgatgaaacgctggccgttctgagcgtgagctgtgactggcagatgaaaactgccggtgacgcgctgcacgccgggcaaatgaacgaagagaagctgcgtcgcctggaattaatccgggccgcagcggagggtcgaaaatga

SEQ ID NO: 126331 - DNA, 414 bp, Enterobacter cloacae
atgagtgaacaacaggacaagccatatgacggcgataccgtccgcgacggtgtaacaatcgtaagcaagacatcccgatgggttaaggtcgggatgctggggctggcgggacttctggtcatgacaggcgtcgcgtacgtaacggcgaaagtcgtcacacctgaggtggtggtcttcgacatgaagggcacgatagatctcttcaagcagcagtccgcccagctgcatctcgatgaaggcagcgcaaaagcgatgaccctgcagttcaacgcggcgttgagcggcagcctggatgcgtggcaggcctcacacaacgccatcattctggtgaaaccggcggtaataaacccgcagcgggatatcacgaatgagatccgtgccgacattgcacggcgtacccaggggggccagtga

SEQ ID NO: 126332 - DNA, 393 bp, Enterobacter cloacae
atgagcgcaaccacgttaggtgatctgtttccgcacatgcacgaggccgtcacaacgcatcgccgctacgctaaacaaccccgcaaagcatcagccgttacatcccgcatgggtacggcagagcggctaaagacgctgtatccggagctggattcctggcatccggtactggtgaccaaagcctggctccactggtgtgttcagaaccagcaggacagccgggagccgtcgaaacgtgatgagcgttttccggactacatcattcacctcttactggagaacatgcgggccgaggacagcgcgaaacgtaaaaaaggccagacgatgtcactttctgagcgcctcgacaggttgttcgcgggcgaggagcaggagaacgccgaatgtcactga

SEQ ID NO: 126333 - DNA, 237 bp, Enterobacter cloacae
atgtcactgaagtgcaatgctgaaaccagaggctgtgatgaaaaagtgaaacaactctgccagctgtaccctgaaatcgcatcctggcatccgatgctggtcaccggtgcgtggcgtcagtggtgcgcggagaaccagcgtcagccgatagcgccggaagaacgggatgaggcgtttcccctgtacctcgtcaggcttatccgcaacagaatggaggagatgaacgcatggcgttaa

SEQ ID NO: 126334 - DNA, 546 bp, Enterobacter cloacae
atggcgttaatcagctgcttcaccggacctcagggcttgcaggggatgctcacctgtttgcgcgatactgagggcatgaccggtattctggtcgtggtaacactactcgcgggctggcttgttgttcagcatcttgcagatgcacgccgtgaacgccgggcgtgggagagcagaccgggaatacccgttccgcaggcacagtttggcagtgcccgacatgccgatgcggtacatggctttgccaacagagactattaccagatgctgctcgcagagctggagcaaggtctgaccgaggcaggttatgcactgacgcatgatgaatcacagcgcgtaacgataccgacagcagaccgactggctctcagtcgcaggatttttcgggcgcgtctgcgttataccacaccgagagtctctgagcagacgatgaaagacagcgaagatatagcggtgaacgacgggtatgccggcacgtggctcagtgtgcttatacgtggcagtgagtgcgctggctggtacatcaccagaccgcaaaaaggccattga

SEQ ID NO: 126335 - DNA, 324 bp, Enterobacter cloacae
atgactcaccctgaaaaaatcaggccggtgacggttacccgtgaccgcaacggcttctggacgcacccacactactttacacctgccagtgatgaagccacgcagacagagtttggcgactggatgcgcctgcataaactcacctgcgccacccgctggatggaaaacgatgctcctccccaggtgattaccgcctgggaaaacggtgcgtcggacatcagtgactggcagccgtcagcccccgccggagagggctggtttatcggctccattcatgacactgaagatggtccggtctgtgtctggctgcgggaggtgaaatga

SEQ ID NO: 126336 - DNA, 492 bp, Enterobacter cloacae
atgctaaaaacgcttttcaccctcatccgtgatgcagggcgggttgccctgtattccttcgtcctcggcccggccctggtgctgtatgtgtttgtgatgctggcggcgtcagagggttcactgtcccggcaattcctgacgacctttcatgacctgactgacggcgcacctgccggcaaggtgatggggtgtgttaatgaaaaggtgatggcaggaagcttctcgccaccgaaacccggagaaacgttaaagcctgagccttctgctttagagaaaaaaccacctgaagtcttgtgtcagagaggccccgtggacatcgattcatgggcgcgttcggttgatgcaaccttacgcaacgtctggatgatggtggtgatgttgggctttggagtgtggtttgtatcccgtcgccgatccctggccgccccaaaacgcatttcaccagacacgcattcgattttagtacggcagaacaaggagaaagacgaatga

SEQ ID NO: 126337 - DNA, 219 bp, Enterobacter cloacae
atgaaaccatccattctcgcaggactgattttctggggcacgatggcgcgcgtactgagcgagctgatgaccctgtcagtggagcacactcagcaggggctactgtggctgtgcaatggcatgtgggttggcgcggggggcatggtgatttttgccttatgccgctggctgcgccaggacagaacgcagaagcataatgaggccgatcatgaacattaa

SEQ ID NO: 126338 - DNA, 393 bp, Enterobacter cloacae
atgacattcgccagattcaggacgtatatccgaaacgagctgaagtgcattgtggaagaaacaaagacccgggaatggattgattcattaaaccttaaattgctttacggcattattttttcattcgtggtcgaaagaatttatgtgtggtgggcaggcaatacgctgcgtaccgcaatggatcttaatcgtcccgaacagtttgtcctctcagcccttatccattatccgcagtatctcctttgggctattgcgggaggcctgtttgcactgtttgccctgaatcttctgctgggtctgtgctttagtctggcaacccaactgcaccagcgactgacccgtactgatggcccgggacctgtagccgacagcgcggaggtgacacatgattaa

SEQ ID NO: 126339 - DNA, 714 bp, Enterobacter cloacae
atgctaaaagctaacttatgtaaaatttcttacatccctgtttttagtttatatgcggtgttaccactaattcatgatgtcatgccttaccatagtgattatcacagcgaagattggatcgcactggtaggtatgtatgggttaggtttgcttgtatcctcaccgttatgttacctgctcaataaagcggataaacatggaggcggaggttcgttcgtctcaataatactgctcgcgctactctcacttaccttgcagataatatgcctgtatttgctttgggaaaatgcagtatttttatatcttgcaatgtctgcggttatggctctctcagccgctttgttcgcaatcgggaagaaggaatttaacctgataaaagatagagatacaggctatgtctataaaatacgtgggaataaagcttataggcttactgattccgagatggctggatatcaatcaggtgcgattagcaaaggaataacactggctgagttttcatcaagtcaatattcaggccttgatacaagttcatcagtgcttcctatgcatttcacttctagcaacatcgattgcaatcaaagtaatgcaatcaaccctgcatcaggaatgccgatgatcggtggtatctcaggactggatgtacacggaaacagttggggtacaaacttcaacgaaccttcaaatacgtatgaccccaaccggggatactga

SEQ ID NO: 126340 - DNA, 732 bp, Enterobacter cloacae
atgaaattaaaacaattagccgttgttggtctggtcgcttctgctctcgcgctgtcaggttgtggggccatgtccactgcagtgaagaagcgtaatctcgaggtcaaaacccagatgagtgaaaccatctggctggagccatcctcagagaagacagtctatttgcagatccgcaacacctccgacaaggatatgtcaggtctgcaggcacaaattacgaatgaactggccgcaaaaggctaccgtgtctccagctctccggacaccgcctactactggattcaggcaaatgtgctgaaagccgaaaaaatggatctgcgtgatgcgcagggcttcctgaaaaccggctatgaaggtggtgctatgggggctgctttaggggccggtatcaccgcctacaactccagctctgccggtgcgaccctgggtgtaggcctggccaccgggctgattggtatggctgcagatgcaatggtcgaggacgtcaactacacgatggtgaccgatctgcaaatctccgagcgcagcaaagcagccgtcacgaccgacaatattgctgccctgaagcagggaacgtccggcattaagctgcagacaagcacggagcaggggaaccgtgctaaataccagacccgcgtggtatccaacgccaacaaggtaaacctcaaatttgaagaggctaagcctgttctggaagcgcagctggccaaatccatcgccggcatcatgtaa

SEQ ID NO: 126341 - DNA, 300 bp, Enterobacter cloacae
atgaatacaacattcctctcccgcacaataaacgtgcttttcttttcctttctgacgctggtcagcaccatttatttgctggaaagattcggcgtcgaccttctgaaatggcgggccgggagttcattgcttctggcctatacctcagcgctgtccggtgcgggttttgcgtgggccagtgagctgaacacgattgttattcttctgattttcctgtgcggcggtgtgctggtttccctgctcacggcttatctgtttcgtgttattgggctgttctcggatcaacccaaacgttcgtga

SEQ ID NO: 126342 - DNA, 309 bp, Enterobacter cloacae
atgcgtttcgaaagtacagaaggcgatcttgccggtttattgcaccttatccatctggaaagtgagctggtgatggcggtggcataccttcgggtattcggttcacttccggaaggcgcgggtatgaccctcattgcatactgggccggctatgaatacaccctctatgggctggctcccggtgagtggcattcagcggcttatgctgatgtggccacgtcagtccgctctgttgctgcgggcataaatgaacaggactgggaggacggatgccagcaggccagatatgagctgagccagatggtataa

SEQ ID NO: 126343 - DNA, 2574 bp, Enterobacter cloacae
atgagcttcgcaggaaaaaacctcacccagggcgggcagatgaccgcttaccgctggcgcatgttcattcaggtgaacaactggataggattctggatcttcatcctgttcgccgtgctgactaccgccatttttctctggcgcatccccccggaagcccttgataacggctccctgtggtggtttgccagccttaacagcagttttatcgagctgatgccggcaacgggcacgccaaaaatctatgacgttcactactggtatgcaccaacggcgacggcaatggtactcaaaatgaccctgccgcagatttacgccgacccgtatatgcaggcaatgggcgatttgtgtctgagtgagctgcagtgggcggcctgtgccagtggcgtcttcagcctggtggtgtttctggcggtgacctggtttatcgcggatatcggtcgtaaggaaagtgaggacgagtacatctccggcatggagctgaccgacaagcctgcggaagtgaacaggctgctgcgaaagaacgatgaactctccgatctgcgtgtgggtgacctgcacatggtccggatggcagaagtgctcaactttctgatgcacggcactatcggagtgggtaaatcgaccctcatccgctggcttcttgacttcatccgcaaacgcggtgaccgggccattatttacgactccggctgtaccttcaccgaaacccactataaccctgacactgattttattctctgcgcccatgacgaacgctgtgcaaactggcagatgtggggcgagtgtgtcgacgcggtcgactatgacaacctggccgccagccttatccctgttgaaggggattccgatccgttctgggtatccagctcgcgcaccatctttgccgaccttgcgatacgcatgtctgttgacccggaacgcagcatagagaagttcctcaaaaccctgctttctctcagcatgaaaagcctgcgtggctatctggccaacacaccgtcggccaacctggttgaggagaaaatcgagaaaacggccatttccattcgctcggtggtgaccaactacgccaaagcccttcgctatctgcaggggctggatgacgggacgaagcctccgttcaccatccgtgagtggatgacgcaggagcgctatgacaacagctggctgttcatatcgacccaggcccgtcaccgcaagagcgtgcggccgcttatctcactctgggtgtcgctggccacgctgatgctgcagagcatgggagaaaacagcgaccggcgcgtgtggttcattatcgatgaagcccccagcctgcagcgtatcccggagctggccgagacactggccgaggcgcgtaagttcggcggctgtttcgtgctgggaatgcagaacatggcgcagctggttcacgtctacggccgcgagctggccaaaagtatctttgacctgatgaacacccggatgtacggccgttcgccgagtgcagaaatggccaaagtggttgaagaggagctggggaaccagcgtaaacgaaaaatccgtgagcagaacagctacggtctggaccaggtgcgtgacggtgtgtccctcggcaaggacgaggtgaataacccggtcgttgactatgagcagatcatgcgcctgccaaacctgagtttttacgtgcgtctgccgggcgagtatccggtggtccggctgaagctgaaataccgcgccctgaagaaacgccatgccggactgatagagcgcaatatccgtgatgccctcagcccggaactggagaaggtcattcaggagaacgaacgggcagcaacggcagcaggactgacgttcccgaccggagatgaagtgctggagaagggagatgaaaccatcccgtcatcgggcggtgcagtcgtggtatccgcaggtgccaaagcagcaacgcctgaatccataaaaacgcccgtggacaaaccgatggctgcacctgccgcagatcagaagccagcccgggtggcggtacctgaacagaaacgggtactggccatggagccagtcaaatccggttcagcgacagtcgtgccggaaacggcgactgaaaatcacagcccggtgacacctcctgtcactgcagagaaaaaagacaacgttgtctctctgcgaccatcttctccttcagttaatcgtcctgcagatattgcttcccttaatccggatattcctgcagcgcttcaaaaaatcagggccagaacccaacaggaagaagtacctgaaacatcgccagctggcgcgctggggatgctgaaacggcggctcaataccggagccacctctgggggggcggaagatcagcccagcgacagtgcgggcgaatcaatgagcctggacatgaaggtgactgcactgccagacggcgggctgagtctcacgacggccggtaacaccgtcacgccggaaaaaccggatgaatcacaccgtactcaccgccggctggcgcaggaagaagagaacattttacttcaccgtgacgcggacgacccgggttacgacgaaaacgaccatcactattacgacagagagcatgacctatga

SEQ ID NO: 126344 - DNA, 678 bp, Enterobacter cloacae
ttgaacagcctgaacggggtatttgagcccctgcagtgggagagtgcctttttcggcctgccgtcggccattgtgcgtctgcgcgatgatgcgccggtactggctgaatcggatttcatcgcctggcaacgcattcaggcgaagatcccggcggaccgtaccgacctgcttgatgcgctccagcaacgcggctttcagctggtggaaggtgaggcagacctttccataaccctcacccggcatgatgcacccggcgctgaaatcgcaaccgaacaggatattcccgtgctgcgtcagatggcggctcaggcgtttgcgcagagccgctttcgtgcgccctggtacgcacctgacgatagcggccgtttctatgcccagtggatagagaatgcggttaaaggcacctttgaccacgtctgcctggttttccgcgcaggggacggtcaactccaggggttcgtctcgcttcgcaagctcaacgtgcgcgaggcgcgtattggcttattagccgggcgcggcatgggtgagaaacttatgcaggcggcgctgcactgggcgcagcagcagcaggttgagacgctgcgggtggcgacccaggtgggcaacaccgccgcgcttaaacgttatattgcgagtggtgccaacatcgacgccaccgcctactggttatacaggtga

SEQ ID NO: 126345 - DNA, 1956 bp, Enterobacter cloacae
atgccgctgggatccctcatcatgagtaatatacaaccagaacccttacgtgatgcgccgatgagtatggatgataatggtaaaccaagttggcgggggatgtgttcgcataaaaatatcaaagtacgctccgcctgttatcacccggttcaacttccagggctaattatttttgttcatggggttaactctgaaggtgaatggtatgattcagcagaagcaaatctctgcaacggtctgaatggccgtttaaatttgcctccttatatgaagctcaaagagaatatttatcagacaggtaaaacacaacttcgggaaatcgctaaccctgatgccagtcgttctccggtaattcgcttttactggggatatagtgcagagccgggcaccgaagacaattaccagatcccgctgcgtaacctggcgggtgatgactaccacgacctgaaaaaataccagaagctgcctgatgcgcaaatcgccgcccgcggcccctggtactggggtggcggcccgtttcagaatggctgcaaccagttggtatcgctgtggagcgaccagggcttcagtaaatggctgaaacagacgccgatcccgttcagcgtccagtttgttaactctgaactggatcgcctgctggctaatgcgcctgcccgtcattattacgctcatgccgcacggcggctggcggatttgttggatactatccgcaacacttacccaaaagatacggtgacgctgatttcgcacagccagggtacgatgattgcgatggctgcaacgttgctggcggataaagcgccggatgccctgtttgtgatgaactcgccctatgccatggaacacaaagccatggatcggttttcgtatccttttgcggagtgtatttccacgaaagcgcggcacaagacttttggctcgattgtggaaaaggtggcgaagcaggccgggcatctctcagaagtcgactacagccgtctggtggttggcgtggatgctgatggcaaaagctggaaacccaccggtatggtcaataacgagattcctgagcgggataatcacggaaggacctggatttactgtaatgcccatgaccgggtgatggggatgagcgcactgctgagtattggctggcagggcttgcccaacgatgtggtagggagacctaaccagctactaatcacctaccaggggcatttattccagcggatgatggctcgcgaaacgccctgcggggatataccacggcgggatgccccctttggccgtttgccccccgcaggatcgccgttctgggacgatggcggacagtttggcgtctatgacgcgccgccgcctgaacagaagctgtatatcaacggtgaaaaagtccctgagccgattacggccaaagagatggttggatttgatgctacccgtgtgggattacagaaagagaatgaaaagaatacaggtgaggagggctacggctgggggcaatattctgtcgatagcaatggtaacaaaacttggcatgatgataccttccgctggtatgcctcgttgtacccggagcagtgggtgacggataagggaaccatgagttggtatccacaaaactcaaaagatgagcgtcagaaccggcgacgcgaaacccgcgcggaaaaggatacacggctacggatgtttgtttcccagcccagcgatcacagttctcttccttccaatccgctgttcatgagacgggttgtggcctatgacctgccggtaggtatctgtgaaagctcaaacgataaaagcttcctcgaacagttacgccggatggccgactggcagtattcagacgcctattttcgcaccggcaggcacccgcaatacagcaggcctgccgaggtggatgccgagagtgcaggcggcatcagtccggaagagatggccgaaatgaggaaaatggaagcccggcagggtggtcattaa

SEQ ID NO: 126346 - DNA, 570 bp, Enterobacter cloacae
atgtgtcatattaaagatgcggtttttcggattgcaggaatatccgggatcatattgtcatgcctttctatctccggctgtattacaacatctggcgctgcgttcggcgctgcatcgggggcgatggcggcaaaaggtgttggcaacgattttaagtattacgtttttgatgtgccacctcaggttatttaccgtattgatgatcatcggtttttcaccctggaaaactataaggattgtgaccatggcggtattgtttattatcgtgatgtaaataaaaaaatcaaaagatatattaatggtggttcggacagtaattcaattctgaaagcgaacccgatgttgtcgtggaagggtaagtttatttatgctgcgtcagataaagttcttgcatatatatatcggcgcccactgatgagtgacagggatactcatagtggtgtttttgttgtgtatgaaattgatgggggatatgggaaaattgaagtggctggtgatacagatcctggatttgatgtaacgttattaattacagatgaaaatatttatgtgacgtcgaaaaactattga

SEQ ID NO: 126347 - DNA, 1929 bp, Enterobacter cloacae
atgagtgagcataacactgaaccaacccgtgtgctggagacctgcattgatgctaatggccgcccctcctggaaaagttttacgtcacctaaatcagtgaaagtacgtggagaatgtcaaatcccacctcatttaccaggcattattatttttgtccatggagttaattccactggtgagtggtatgaaattgcagaaaaaaatatttgctcggggttaaatacacgactgggacttaatgacacaagctttaagttacaagaaaatgtgtatagttgtgatagtgggtctgccaacaaagggtttagacggataattcatgaaggacgatctccggtgatacgattttactggggatatcgttctgcggatggagaagaaggcaagtataaaattccgctggtcaatatccataatgaagattaccaccaacttcttgctgagggcatttcagagtcagttattcgtcaaaaagggcctttcttctggggcggtggaccattccagaatgggacgacccagttggtctcattgtggagtaaagaggggtttaaatctaaggttttgggcgtggttcccgttcagaaatttgctcctgaccttgatcgcctattaactgatgcaccacccagagaatactacgcccatgcagcgaaacgccttgcagatttggtagacttaattcgtgaagaatacccgcatgatacagtgagtcttatttctcacagccagggaacgatgattgctatggcggcaacaacgctagctaaaaaagcgcctgatgcgttatttatcctaaattctccatatgccatggaagccaaaacaacagacagtctggctttgtctgctgaggaggtttcctccgataatgcccgtatccaaactttatccgctatcatagataagattgcagcacaggctgggggattgaaaccggaagattataatgcattgtgtgtgggtaaaacggacgataataaacgctggactccaaatgttacattaccttctcaggacggtgaaacaagagtctcggagcgtgataatcatggacggttttatatttactgtaatcctcatgatagggttatgggtgctagtccactcctgagtcttggctggcagggattgaaaaacaccccggatggcaatcctcaccctatgctggaaaagcataagggacatctgtatcagcgtattcttgcacgctggttaccctgtggagatacgccgaatcccagaacctcctttaccccaacagatggtaaaccattctgggatgatgatggagactggttaacctacaataatccggggttctggaccctgaatattaatggtgagaaagtacctaccccaattaaggttgttgagctaacggaactggaacttgatgaaacgcgtgttggcaaagaagaaatacctggcaaggaatatggatatggttgggggcaaaaaaataaagatcagcatgataattttaatatcgatattcctaatgatgatacctatcagaactatatcaatctgtatccgtttgagcaggttttaacaggctatgagcagtcaggcttcactcagattcctcgatatcgtcgtgaaactgtagaagaacgaaatatcagagtggggaaatatatctctcagccaacggatcatagttctttgcccaggaacgaaatgtttatgagtcgggttgttgcctatgatattcctattggtttttgtgatgccagtcgaaataaatcattcatggcaaagcttagggcaatggctgactggacgcaaggatacgactgttatatggaaaaaggggttttagatatccccccaaaacctgacattataaatgatgaatcaacatctgatgttaccgagaacaacaatcgcaatatgggcaggcctgcaacaaaaaatcaatggtaa

SEQ ID NO: 126348 - DNA, 831 bp, Enterobacter cloacae
atgaagaataaaacactaatcatcatagcgggtgtttgctcattatttgttgtcgggttgattatattatccaatttaccaaccgttggcgggagttttggctatggaatggctcgtccggctaaagcgaatagtgatgacagagttgtagtgacagacgctcccccgcaggtggttttcagaattgacgaccaccgttttttgacgctggagaactatatcgcttgtgataaaagcgggcagatttattaccacgatacgaaattgggaataaaaacaagagttgatactgtaaatcgtgaccatcgtaaggatgatgggacgcttataaagaactatcgggtaggtgatgagcaaattcagttaaaaaatgtagaaaatggaattgtagcttatggaggaatattgctgtatgacgccacaaatggggcgcttgcattcccatatgtcaataacacatggagtggatgcgataataatagaggatgctatcagggggctatggtttcaacggatgatggcagaacattttacaatcgtatttacgagaaatcttctaatggcccgtcagttagaacagttatcaccgttaataatgatgttttctacataggtaacgattacggttatggagtgaaaatagttccttttgattatggtgagcttactgggggcgggagtcttacccgaaatgttactgaagacagagatgtaaaatttaataaagagaccttagaaaatagaaagtatgacatccgttttcattgtgataactcgattaaacccacaaaaattcggttcgtgaaatttgaaaggacagctgaagaatga

SEQ ID NO: 126349 - DNA, 1707 bp, Enterobacter cloacae
atgagtcctgtacaacagcgcgggcttgcgctgtgggctgccctgctgagtgctgtggtctgcctggcttttctgccgttatcccggctggcttcagtgctcgttctgctggcgatgatcggggttatcgtcgcgttctggtatatcgccagacctcgtgcggagcatgacgtcaacctgcgtctggatgaccttcctgaaaccacttaccgtcaacctgtggtgctggtttgtggcgatatgcctttgacctggccgcagcagtcaccagtactgatcgtcacgcagggatgctggatccgcgttgaggaccatcaggatctggagcaggttgcccgtcagattctgtggcagcgcccggactgggggcgtcagctgtcggtgatggtcagtgtctgcccgcagaaacatgtcgacagcgaagccctcaccagtcgcctgctggctctgcgctggcaaatcagccagttgcgtaaagaaacgggacagtctgtgccactcattctgaatggtcagattggcagcgcgatgacggatgacatgctctggcaggccgctattccgggtgaagggtggactgtctggcgtgagtcgaatgcgccttgttcgatcgccgcgtgggtcaccactggcggtgcgcctgtaatgcagcagcaggtgctgatgaacagcctgatgagctggttccatcagcatgtccaggcggtattcatcgatgagaatcctgatgttccggtcattgcacctgcagcgctgctgtggggaatgggaccgattcttgccggaagccttgcgtcctctgcctggacggcatggttatcgcgtcatactgccatgcagcaggtagccggctggcaaccggtagggacggacagcacggtgatatcacccttcccggatttcatcctgccgctgctaccggaaggaagtggacttactccccgcgcccgcacctggcgctgtgcccttggtcttttcaccctggcggccatcgccgcgctgctgagcagtggctggaacaatcgccagttgctgcatcgcgtgagcttcgatatagcccgttacgacagtctctccatggatgactacggcctgaaggctagcgccgttgcggcccttcgtgagaatgcggcgctgctggatgactatgcacgtaacggtgtaccgatccggctgggcctcgggctttatcagggggaacgtctacggatacccctactggaagcgatccgctcgtatatgccgccgcctcctaaaccgcagccaaccccaaaaccagtaccgaaaatagtgaggctcgacagcatgtcgctgttcgattccggcaagtacgtgctgaaagcgggttccaccaggatgctggtgaattcactggttggcatcaaagcgaaaccgggctggctgattgtcgtgtctgggcataccgataacaccggcaatccgcaacttaaccagacgctgtctctgaaacgcgccgaagcggtacgcaactggatgcgggacacgggcgacgtgcccgaaagctgttttgcggtgcagggctatggcgaaagccgtcctgtcgcaaccaacgacaccctggaagggcgtgcgctcaaccgccgtgtcgaaatcagtctggtaccgcaggcgaatgcctgtcagatacccggcaaacacccggcgccatcgcaggatgatggcgtctcagaaaataaaacggagtaa

SEQ ID NO: 126350 - DNA, 690 bp, Enterobacter cloacae
atgagtgaacgtaaacacggcgctgtcgtgtctgttgatattgacgcactgctgcaggatacctggcttcaggtcatcagccttcgctatggcccgcagtttcaggaaggcgaaggtcgggtcttgtgggaacgctgtatcgctgatgtggaacgcgttcagcgtgaactgaaagcgagtgaactcgatgaagccagctgtaagcatatcctcactgcacaatgtgcgctgctggatgaagcggtcaaaggtcgcggtgtggaagatgaagcctgtgtgcagtggtatgacattccactgcaggggcacttcctcggcaccatggatgccggcgacacgctgtgcgatcggatgcgcgatgtgctgcgtgaaccggctccagaccacgcagtcgtgacctgcttccagcgggtaatgatgctcggattcctgggaaactttcgtgcgctaaacgatccggaacgccagaagctggtcagcgccctcaatgagcgcgttacaccgttcagctacccgcagacccatcccgttctggtagagagccgcagcggacggggagcgggaggctggctggcgtcatggcccgcgcgtatcggcctgagcgtgattgttcttgccgcactctggtggggactggatcgctggctcgatcatatgctgctgaccctgttgccgggagtcgtaaaatga

SEQ ID NO: 126351 - DNA, 1341 bp, Enterobacter cloacae
atgaaaacggaacaaccgttatggggtaggggcattatggtcgctccccagcattttcagcaacaggtcgcgtatgcggcctggtctgccgagtgtattgcccggctgggcctctcctgcccgtggggggtaataaatgctaccttcgagccggaagcgctcaggcttggacgtcttcaggcccgtcatctgcatgtccgttttcaggacggtacgctgattgatacagacaatgctgattcgctgccaccggtactgtcgcttgaaagcgaatcgcaggaggtgacggtggtgctggcgctcccgctactgcgggcgaacggcggcaactgcctgaaacccgatgaggtggccgagcgtccggtgcgatatcgtcagcgctggcgggatgtacgcaataccttcggggaagatactcgtcagattgccgtgatgcagcctgaactgacgctgcgttttgcccatcagaacaacagcgattatctgacttgtccggtcacccgcctgcagcaagactcgcaggggacatggctattggatgaaacatttcttcctccgctgttgaccctccagggcagccgttggctggttacccaactggaacaactactgacacaactgcgggcgcgactgtgccgtctgatggcaatgcggcgtgaaagcaatgagcgcatggctgatttcgccgtggcagatgtatcactattctggctgctcaacgcgctgaacagtgccgagcccgtgctgggtcagttccagcgtaatcttcaaagcccaccggaacgtctgtatccggaactttctcgccttgcggggagcctgctgaccttttccctggaacatcaggtgagcgccataccggcctggcatcacgagcaactcaatgcggtatttccaccgctgtttgatttgcttggcgatctgcttgaagccagcctgccgtcacgcgtggtggccctggcactcgactatgatccacggctgcacttctggcaggctcgcctgcatgacccgcgtctgcgcgagggggctgattactatctttctgtgcgctcaccgattccggtggcgcaactgcaggagcagtttccgcgccagtgtaaggtgggcagccctgaccatgtgcgggggatcgtcaactcttcccgcgtgggcgtgccgctgacgccgctgcgccatgtgccagccgccattccactgcgcctggaaaatcagtatttcagtctcgatctctcccatcctctggcgactgaaatgctccagagtgggacatgtatgttttacgtcccgggcatgctcggcgagcctgaacttgaactctttgcggtattgagaacatga

SEQ ID NO: 126352 - DNA, 393 bp, Enterobacter cloacae
atgaaaaaattacggagcaaaatgaccacggaagagctggcggagagtttgggcgttgccaggcaaacggttaatcgctggattcgccagcagggctggaaaacagaaggactcaacggcgtgaaaggcggccgcgcgcggctcattcatatcgatgcgcgcgtgaaggaacacattatgagtctcccggcgattcgcaaccgtcaggcggtttaccatctcgcggaggccacctccgcctacaatgccccctctgcaaacctgtttccgggcataattgagacgctggagaatatgactgcagcagagcagaagcgtctggacaccttcctgaagcgcgaaggcattcacggctttcttaagcgtctgggtattgcagaagaagaagcataa

SEQ ID NO: 126353 - DNA, 207 bp, Enterobacter cloacae
atggagcgcttcttcaggagtctgaagaacgaatgggtgccggcgacgggctatgtaagcttcagcgatgcagctcacgcaataacggactatatcgttggatattacagcgcactaagaccgcacgaatataatggtgggttaccgccaaacgaatcagaaaaccgatactggaaaaactctaacgcggtggccagtttttgttga

SEQ ID NO: 126354 - DNA, 1026 bp, Enterobacter cloacae
atgcattcatacgaggaccggattcgggccgtcgaactctattaccggtacggaaagaatgcctccgttgtcgtcatggagctgggatatccttccacaaaacagctgggccgttgggttcggatttatgaagagaagggcgatttacccagggaattaaaaccaagagaacgctattcacgtacacagaaaattgctgctgttgagcattatcttactcacggtggttgcctgtcgtacactcgccgagccatcggctaccccagtaacgaaattctaaagcgctggattgaagagttttacccaaatgcgcgtcccctggtcattcgctcaggcacaagcaaatgcttcagcccggaagagaggtctcaggccgtccgggagctctgtaaccgacgtggaaccgcgcgtaaagttgcacaaagcataggcgtcagcgtcccggtcctgtacaaatggaagaaagaccttatcagtgacgaggcttatcaatccatgcgcaaacgaaaggcagcccctcaggataaaaatcaggatactttactcggtgaaatccagcgtctcaggaagcaggttcatcagctgcagctcgaacgtgacatactgacaaaggcgaatgaactgataaaaaaagatctgggcatcagctttctgaaactgaaaaacagggagaaaaccctgatagttgatgcccttaagaaaaagtaccccgttgctgagttgctaagcgttctgcaacttgcccgcagctgttatttttaccacaaagccagcaaacgtctgtacgataagtatgcggaaatacgcgtgatcatggccgatatctttgaggagaattaccgctgttacggctaccggcgccttcacgcgatgcttcgcagtaacaacagggttatttctgaaaaggttgtccgcagactgatggcagaagagcagctcgttgttaagcgcaccaggcgacgacgatataactcttactgtggcgaaatcggtccggcaccggaaaaatacgctcaacgaacatga

SEQ ID NO: 126355 - DNA, 225 bp, Enterobacter cloacae
atgtcgcgcaaaggatgctcgtcggataatgctgcgtgtgaaggcttcttcgggcgtatcaaaaacgaaatgttctatggcagagactgggcgggtatcacgctggaaaaatttatctgcttcctggacaggtacatacgctggtataacgagaaacgtatcaagctatcattaggtgcaatgagtcctgtgaagtaccggcagcatcttgggatcacaacataa

SEQ ID NO: 126356 - DNA, 132 bp, Enterobacter cloacae
atgggcattaaaactggtccaaaaccaatcgctaaatcaactggaaaagaagataaacgtcagcgtgtaacgccggagaataaaccaaagcatcccggcctgaaggaacacgaccataaaaaaggcgaataa

SEQ ID NO: 126357 - DNA, 840 bp, Enterobacter cloacae
atgcaccttcgctttggtgagactgaatcagcctttgattacatgatggccacccgcgagtatctcgagcaacacggcaagccccttgcgttctacagcgacaagcacggcattttcagggtcaataatggtggttcaaccacaaccggtgttacccagtttggccgcgtgctttctgaactggggatcgaactgatttgtgccaacagtccgcaggctaaaggccgcgtagagcgagcaaatcagacacttcaggatcggcttaccaaggatatgtgtctcgagggaatcagcagtattgaagcagccaacgcctggctggataccttcattgccgacttcaatcgtcgcttcgcaagaccagcaaaataccccaaagatctgcaccgaaccgtggctgaaagcaacgaagagctggatgatatctttgcctggcaggaactgcgtaagctgtctaaaacgctgacattccgctatgacaaaatgatatatctggttgaacctagtgaagaaaatactcgcatcgctggcgaaaaaataacagtcttcgactatccggacggcacgctggcattcaaatacggttaccgttcactcaaatatcaggtgttcgacaaactggaatgtgtcgaccaggggcaaatcgttgataacaagcgtcttggggctgttctgaaactcgctcaggacaagatggacgaactggagcgggacgggaaacgggaccgtagcaagaagatgcctaaaaggcgggcacaggcccgggtgcaggaacaagtaagagctatcaatccggtgctggcaaacccagcggaattcagggccagcctgaaacgttag

SEQ ID NO: 126358 - DNA, 432 bp, Enterobacter cloacae
atgaaaaatatcgtattagcatctttgctgggctttggtttaatttcatcggcctgggccactgaaaccgtgaatatccatgatcgcgtcaacaatgcacaggctcctgctcaccagatgcagtctgctgcggctcctgtcgggctccaggggactgctcctcgtatgaccggtatggaccagcatgaacaggccattattgctcatgaaaccatgacgaacggctcggcggatgcgcaccagaaaatggcggaaagtcatcagaagatgatgggaactggcaccgttaacgcttcccgtccggcgacttcgtttgcggcgatgaatgaacatgaaagagcagctgttgcccatgaatttacgaataacggtcagtccggcccccatcaggctatggctgatgcacaccgccgcatgatcaatgcgggctga

SEQ ID NO: 126359 - DNA, 144 bp, Enterobacter cloacae
atgcttatttttatttttttagcaatgaatgtgaaatactgcctgactatcaatcctgtcatgtggttcagatttatgggggaggattttaatattttaccagcatggcatgtcgatcaatcggttaagtatagcgccaggtaa

SEQ ID NO: 126360 - DNA, 909 bp, Enterobacter cloacae
atgattgaaaaaatatgtgaagtaattgatggtgaatacgtctgtgatatagatattagcgttgaagaatggaagattttattaagggataaaaaagtttttgatgacaaaagtattgcagcgttaaaaaaatggttcattgagccagaccattcctgtacatgtttcgatatcggcaagaagtacgacctgcacagtatgagtgctaatggtgtaatcaatgggttgggtggaagagttcagaagcagcttggccgattcgaggttaaaggagtcggaaagattgcttccgggacaaaattcattacagtcatgaaaagtagagaaattaaaggaaacccaaagcgaaatttatggactatccgtgaagaacttgttcaggcaataaaagaactagatttttttagtacgaacgaaagctcaagcattgatttttactcagataatgatttgatcactgctctagaagaaagtaatcactttgacgttactcagacatttgagtatagcgaaaaagcgaaacctaagaaagctgcaatagaagtcaaaaatggactctcatacccaagaagtaaatctgtttcaaaaaatgcgcttaacaaagctgattataaatgtgaaattaattgcgaccatccaacgttcagaaggcgaaactctcctctaaattacacagaacctcatcacattgtcccgatgtcaaagcaagactattttgagaattcactggatgtggaagagaatatcatatcactatgttgcaactgccataaacaaattcatcttggcaaggggtttgaagatatgttgaggaaaatatatgccgagcggaaagatgtattaaaaaaagcgggaatcgagatattattagaggatttgattcttttttacaagatggaaggtaattaa

SEQ ID NO: 126361 - DNA, 1290 bp, Enterobacter cloacae
atgaccttacccgctatcgcacacgccgtttcaccgtaccgccagctgctggtggggtttagcggtggcctggattccaccgttctgctccatcgtcttaaacgctggcgcgaccaggagcctgacgtccagctgcgggcgatacatattcatcacggattaagtcctcacgcagaggagtgggtggcgcactgcgaagccttgtgtgcggcgtgggtgatcccgcttctcgtcgagcgcgtcacgcttgcggaggaagggctgggcattgaggcgcaggcgcgtaaagcccgctatgccgcctttgccggggcattgcgtacaggagaagccctggtcacagcccagcacctggacgatcagtgtgaaacctttctgctggcgcttaagcggggcagcggaccggcagggctttcagccatgcctgagcgttctgagtttgccggtacaacgttactgcgtccgctgcttggcgagacgcgcgcctcgcttgaggcctgggcgcgagaacatcagctgaactggattgaagatgagagcaaccaggatgacggctatgaccgtaactttctgcgtctgcgcgtcctcccgctattgagcgagcgctggccgcatttcgccgacgcgacggcaagaagcgctatgctgtgcgccgaacaggaatcgctgctggacgagctgttgagtgacgagctggctgaactgatttctgaagacggagcgctggcgattgcaccgctggcagcgatgagcccggtgcgccgcgccgcgctgctacggcgctggctggcctctcatcacgccgcgatgccgtcgcgagcgatgctaaaccgtatctgggacgaggttgccctggcgcgggaggatgcttccccgtgcgtccacctgaacggttttgacgtaaggcgctacaaaggggaactctggtgggtaaaatcaacgccctcactgaccaatgtggtgctcgactggctttcacctgcgcttccgctgatattgcccgctgacgctggacgtgtctctcttataccgtctggtcatgtgaggctgccagaggcaggagaaccggtaacggtacgctttaaggctggcggcatgctgcatattgtcgggcgcaacgggggacgcaagctgaagaaaatctggcaggagtgcaacgtgccgccgtggctgcgcgacaccacgccgctgctgttctatggtgaaacattgattgctgctgcgggcattttcatcacggaagcgggatgggcggaagagggggtcaggtttgagtggcagaaagcgtaa

SEQ ID NO: 126362 - DNA, 666 bp, Enterobacter cloacae
atgagtgcatcatcctcaggagaggaaaaagtgacatgggtgggttatgtggcgtttgtacttaccatcgtttttttctcgggctttttcgccaaaagcaccgaatggtggcgcgtgctggattttaccgtcttaaacggcagctttggcccggtcaacggcgttctgacgtttcgcggaacgggcggaacgggggcgaaagacggtttcctctttgcccttgagctggctccctcggtcattttatcgctcggtatcattgccgtcaccgaaggtctgggcgggttacgtgccgcacagcagcttatgacccccattttacgtccgctgctgggtgtgccgggcgtttgctccctggcgctgatagccaacctgcaaaacaccgatgcggcggcagggatgaccaaagagttaaccgatgaaggcgcgattacggatcaggagcgcgctattttcgccaccttccagaccagcggtagcgccatcattaccaactatttttcttccggtgccgcgctcttcaccgttatcaccatcccggtgattacgccgctggccgttattctggtgtttaaattcgttggtgcgaacgtcctgcgcctgtggatcgcccacatggaaaatcgtcgtcttcaggaggaagaacatgatcgcccagccgcgtaa

SEQ ID NO: 126363 - DNA, 246 bp, Enterobacter cloacae
atgtccgacggcagcctttacaatggcgatctgctggttgtggacagtgcagagaagccccggcacggcgatattgttgtggctagtgtgcagggggagtttacggttaaacggcttctgctgacgccacgactgacgctgcagccaatgaacgccgcctggccgccgatttatcccgacccggacgatctggatatctttggcgtcgtcacgcacatcatccaccgcccgagggagatgtactga

SEQ ID NO: 126364 - DNA, 354 bp, Enterobacter cloacae; identical to SEQ ID NO: 59978

SEQ ID NO: 126365 - DNA, 363 bp, Enterobacter cloacae; identical to SEQ ID NO: 59977

SEQ ID NO: 126366 - DNA, 1752 bp, Enterobacter cloacae; identical to SEQ ID NO: 26691

SEQ ID NO: 126367 - DNA, 426 bp, Enterobacter cloacae
atgagcaacatcaccatttatcacaacccagcctgcggcacgtcgcgtaatacgctggagatgatccgcaacagcggtatcgagccgaccgttattctttaccttgagactccaccttcacgcgatgagctggtcaaactcattgcagatatgggcatttccgtccgtactttgctgcgtaagaacgtcgagccgtatgaggaactgggtcttgcagaagataaatttactgacgaccagctcatcgactttatgctacagcatccgattctgatcaaccgtccgatcgtagtgacgccactgggaactaaactttgccgtccttcagaggttgttctcgatatccttccagatgcccagaaagcggctttcaccaaggaagacggtgaaaaagtcgttgatgattcaggtaaaagactgaaataa

SEQ ID NO: 126368 - DNA, 405 bp, Enterobacter cloacae; identical to SEQ ID NO: 59973

SEQ ID NO: 126369 - DNA, 573 bp, Enterobacter cloacae; identical to SEQ ID NO: 59972

SEQ ID NO: 126370 - DNA, 3009 bp, Enterobacter cloacae
atgcccgtcgattttctgaccactgagcaggaactgaattatggtcgctatgttgcagaacccaatgacgtgcagctggcgcgctattttcatcttgatgagcgggatcttgccttcattaaccagcggcggggaaggcataaccggctgggaattgcgcttcagctcaccaccgcccgttttctgggcacctttctgacagacttaacccgggttctgccaggtgttcagcaatttgtcgcggtgcagcttaatattcgccgtccggaagtccttacccgctacgcagaacgggttaccaccctcagagagcatactgcgctgattaaggaatattacggttaccatgaatttggcgatttcccctggtctttccgcctgaagcgcctgctgtacacccgcgcatggctcagtaatgagcgacccggccttatgtttgattttgccaccgcgtggctgcttcagaataaggtcctgctgcccggagcaaccacacttgtacgtctcgtcagtgaaatacgcgaacgggcaaatcagcggctgtggaagaaactggccgcgttgccggacagctggcagaccgcccgcgtgacggagcttctggacattcctgaggggcagcgtacttcaccgctggagcaactgaaaaagggaccggtcaccgtcagcggcccggcatttaccgaagcgctggagcgatatatccggctgcgaaacctggaattttcccgactgaattttaccggtctgcctgctatacaactgcgtaatttggcccgttacgcaggcatggcgtcggtaaaatatatcgcgcgaatgccacagcagagaaaactggccgtactcacagcattcgttaaagcgcaggagactgcggcgctggatgaggccgttgatgtgctcgatatgctgatactggatatcactcgtgcggcgaagaaaacggggcagaaaaaacggctcaggacgcttaaagatcttgatcgtgctgcgctaatattggcgcgggcatgttcattgttgctggatgaacaggctgacgatgctgaactgagggagaccatattcaacagcataccgaaaagcaggctggcagaatccgtcagcaaggtaaatgagctggcccggcctcagaacaacaatttccatgacgaaatggtggagcagtacgggcgggtaaagcgctttcttccggcggtattgcgcgacctgcatttccaggcagcgccagccggagaacatacgttgtccgccattcattatctgaccgaactgaacggctcgaaaaagcgcatcctggacaatgcgcctgaacatattattaccggcccctggaaacgcctggtatacgatgcggagggccggatacagcgtgccggttactcgctttgtctgctggagcgccttcaggatgcactacgtcgaagggacatctggctcgaaaacagcgatcgctggggaaatccccgcgagaagctgttgcagggggaagaatggcaggctcagcgggtccccgtttgccgggcgctgggacatcccactgatggacataaaggcgtgcaacagttggcggtccagctagatgaaacctggaaaaccgtcgcatcccgctttgaaggaaatgcggaggttcatatttgccatgacggtaaacatccttccctgactatcagcagcctggagaaactggaggagccaccatcgttgcatcgtctcaacagtcgggtaaggctgctactcccgccagtagatttgacggaactgttgcttgaaatagatgccagaacgggatttacacgtgagtttacgcatgtcagtgaatccggggcccgggcacaggatctgcacatcagcctgtgcgcggtcctgatggcagaggcctgcaatatcgggctggaaccgctgataaagcacaatataccggcgctgacgcgccaccggcttagctgggtaaaacagaattacctccgggcagaaacgctggtcagcgccaatgcccgcctggttgattttcagtccacactggagcttgctggccgctggggtggtggcgaagtggcttcagctgatggcatgcgctttgtcacgccggtgaaaaccgtcaattcaggacctaacagaaaatattttggttccggacgtggcatcacctggtacaacttcgtctctgatcagtactctggattccacggcatcgttgtccccggcacattacgagattccatttttgtgctggaaggccttctggagcagcagacagggctgaatccggttgagatcatgacagacacagccggtaccagcgacattatttttggcctcttctggctgctgggataccagttttccccccggcttgccgatgccggtgaagcggtattctggcgagtggataaatcggcaaattacggtgcactggacgaactggcacgtggttgtgccgatctgtcgaaagccgaggatcagtgggatgagatgatgcgaaccgccggttcgctgaaactgggcaccattcatgcttcagaactcattcgctctttgctgaaaagctcgcgcccatcagggctggcacaggcgatcatggaagtggggcgcgtcaacaagacgctgtaccttcttaattatattgatgatgaggattatcgtcggcggatcctgacgcagctaaaccggggggaaggccgccatgctgtggcgagggcgatctgctacgggcagcgcggtgagatcagaaagcgctatcgtgaaggtcaggaagatcagctgggggcactgggcctggtcactaacgcagtggtactgtggaacacactttatatgcaggaagccctgagctggatacgcagtaatggagaagaaatcggggttgaagatatcgcccggttgtccccactgatgcacgggcatatcaatatgctggggcattatacgtttacgctaccggaggatattttgaagggggaactgagagaactaaatttcaatttaaacaatgaattaacttcttag

SEQ ID NO: 126371 - DNA, 303 bp, Enterobacter cloacae
atgaagataatcgctatcaagacactgagggatttctggacggcgaatcccgatgcagagcagccgctaaaagcctgggtagatgaggccagtaaagctgaatggaaaaccccggccgaaatcaaagaacagtaccgtagtgccagtattcttaaaaacaggcgagtggtttttaatattaagggaaatgactatcggttaattgttgcgattgcataccagcgaggatggatgtttataaaattcattggtacgcataaagaatatgacaaaatagatgctgagactgtcagcctggagtaa

SEQ ID NO: 126372 - DNA, 213 bp, Enterobacter cloacae
atgatgaattatcagatgacgctgaacgaactcgttaccaccacagaacaggccagagcgaactaccgccgtcatggtaccgatacatccaaaatgttctatgaagtttggtatgtactgctgggaagggaggctttcgaccaacagacgctgacgctcaggtgtccgcttgcactggaagaaatgtaccgcctggcaattgacgcgccgtag

SEQ ID NO: 126373 - DNA, 492 bp, Enterobacter cloacae
atgtctgtctgttataaaacgcgacctgacgtccatctcatcgtcacctgcacgcgccgcaaaactgtggctgcaggtgatgcggtcttcccggatgaacgtgacgtggagagagcttacaggctctggatggaaagactggcgcaggcccgtcgcggatcgccccccatgaccgccggcgagctatatacaggccagcactggagcagggcagctgcagctgcagcgcgtagtggtgctgagatgtggattttatccgcaggcctggggctacttcatgtctctgatcccgtggtcccgtatgaagcgacgttctccacgatgccgttctgccatcgcacttactgggaaaggctgacaacgcgtccaccttcggaacgacggtgtacctccctgaaggcgctgatgcaggcaaggcctgacgatcggtttgtggtggcggcctccccgcttatctgcgtgccgttgagtcagacctgctcgcaggcatga

SEQ ID NO: 126374 - DNA, 1248 bp, Enterobacter cloacae
atgacagagctccggatgcgccgcccttcaccgctgcagcggcgggtactgattgtgctggccgccctcggtgcgaaaagtccgggaccggtggccacgcgggatattgagcgggtgctggagcagggcggggacgccccggtgtacgggactaacctccgcgcctcctgccggcgcatggaagccgcgggctggctgcgcaccctgcgcgccccgaacatgcaactggccgttgagctgacggacgccggccgggcgctggccgccccgcttctcgctgacgaacaggcgcgtgtcctggcggagcagcgcgcaacggcggtccgggttctgcccctggtcccgcacagccagacagtgaaagctgacgaccgcccggtggcgctcgagggtttatggcacctggcgtgccggggcgactacgttatccgtcttgacggtaccacctgcctgcagctgtggagcgtggccgggcaggtgacgcgcctcgaaggcgatcccctgcaggtcgccgcctggctgcaggcctgccatgaagcggggattgcgttccgggtgcagatcaatgagagcgccgcgccggaggaaggttcaccggacggaaccgcgccggcggacctgaccggcacctggtaccgccagctggacaccgcgctgcaggccctggggatcaccgggctgactgaggatattcgcctggccgtggtcaggcctgaagcgtccctgcagatgcaagcggcacctgcgcgcctgctgcacgttctgcgcgaaagcccggaggcgttcccgctcacggcggccggctgtgaggatgactcgcaggccgcgctggctgacctgctggcccgcgcagggttcacgggcgaccaggcgcaggagctgcagctgcaccgcatccgctggccgcagatgagtcaggaagaagctgaccggcgcgagctgaacagccttctggatgaactggaacagcgacagctgtactgcaaccgcgggcagctgacggagattgtgttttcgccggtccgcaaacccggcgagcgctggacggaacgtctgcagtggctcctgatgacggacgcattcgggttccggagtccgcagtcccgtgacgcaggctccagggctctggcgttcctggccggttacacggggcaggaggtggcggaccatctggccagggtgattgtgtggaacgacgccggagcagtggccggtacgtcttcattccctcgtccgcatgaggaatag

SEQ ID NO: 126375 - DNA, 270 bp, Enterobacter cloacae
atggatgagaaagaagtgacgtttccactcagctatgagcagatgacctcggctgcggaggaagagataacaagactgctgaagaaccaggacaccgccactcttcttaaccggtgggagcaggcatccggagtgcagaccttctggaataatttggcgatcaacttttatgaagccaaagatgctgcccaaaggaacaggatatctgaggacgggagacggctgcagcgcctgctcggattgcgccccgcaggaaacaactcgttatga

SEQ ID NO: 126376 - DNA, 378 bp, Enterobacter cloacae
atgtggctgcttgaccagtgggcagaacgccatattcgtgatgcccaaaaaaaaggtgaattcgacgatcttccgggacgcggtgaaccccttatgcttgacgatgactcgcatattgcgcctgaattacgcgcgggataccgtttactaaagaatgcaggctgtctccctcctgagctcgaacagcgcagagaggctgttgaacttgtcgatctgctaaaagggatccgtcaggacgatccgcgacattctgaacttagccgccgtctcgccgtgcttgaacttaaactgcgtcaggcaggaatgaacactgattttctgcacggtgaatacggtgaatacggtgaacgcttgttgcggaaaataaacgaggagtag

SEQ ID NO: 126377 - DNA, 474 bp, Enterobacter cloacae
atgctgaccaccctcccctttctgctgatctatcttttactgacagccttacttgtaaatgccgatattcgctacggtctacttcccgataaatttctctgtccgctgctatgggcagggctgctctttcagctctgtatccaacctgattttctgccgagtgcggtggcgggtgcgatggccggatatattgcctttgccgttatttactggggctattggtttatctgccggcgtgaagggatgggatatggcgatgtgaagtacctggcggcgcttggtgcatggcatggctggtgcgtactgcctgcgctggcgttgctcgcggcgctgatggcgcttctttgtattctttttttttcggtaatccgctctgataagaaagcaataaaaaacccgctgccttttgggccatttctggcagcagcgggtttatgcgtagggtggaagacgttggttattcttccactttaa

SEQ ID NO: 126378 - DNA, 546 bp, Enterobacter cloacae
atgtcaaactaccgtcgccattacgtccccggtggcacctggtttttcaccgttaacctgcaaaaccgtcagagcgatttgcttacccgccatatcgataacctccgttccgccacctcaacggttaagcgtgcgaagcccttcaccatcaacgcgtgggttattttgcctgaacatatgcactgtatctggaccctaccggacggggacagtgatttttccgcccgctggcgggatatcaaaaagacattcagccgcagcatcgacatgcgctatatctggcagccacgattctgggagcacaccatccgcaacgaagaggactaccggcggcatgtggattacatttatatcaatccgctgaagcacggctatgtgggtaaagtcagcgactggccgtattcaacgtttcatcgggacgtggctgaagggttgtatccggtggattgggcaggagagattgaggattttgccgcggggggagcggaagtgaaaagccgggtggcggctacgccttacccggcctacaaaagctcgatcccgtag

SEQ ID NO: 126379 - DNA, 903 bp, Enterobacter cloacae
atgttaactaaatatgttgtaaaaagattcttcaggatttatccgttgtttattattacgttggcaatattttatttgtttatttcaaacgaagataatttttcattctggagatctgcgttactgatacaggctgactacagccagcaggcaccgttctttggtggcaacatgatagggcaagcgtggacccttacctatgagatttatttttatctgatattcttcgttgcgatgagcatcagtcataaatacagatcatggattgcatcatttatgcttgccgtctctgtgttcagtctgcaactttactttaatggcagcattagcatggaaggtgacaatgcaattgcattacaggcaggaatgccggaaggcttagcggcattcctgcggtttacctcatcgccgatgttaatagaattcatatttggcatgatggtatacgaattaagaaacgtaatatcatcaatccccaaaattaatgtcattgctgttatttcatgctcgttagttttctgtttctactttgctcaatacaaagcagcacacgggccttttaactatggattatgggcgatcctgctgattgcgacacttgttgcctatgaaatgaaaaatgagataaaagagataaagatgctatcatttttcggtgacatctcttattcgttatatctgacgcatattgccattaccatgtatttagataagtttggagcaaatataccaatttacaatcagtgggtaggaatgtccagacttatccttttgttcatcataacgataaccactgcatatattttctacaatgtagtagaaaggccatttatcagattatcaagatctataatatcatgtaaatttccagcattaggaaatgaactaagcagacagagttag

SEQ ID NO: 126380 - DNA, 345 bp, Enterobacter cloacae
atgaatacatatacatctatagatgaattaatagcaagtctttctcagttagagcctggtgaatggatttatactaatataaacacatgggaagcacggcctgaaggtactcacttcttttatattccttgggattatatccaaagtttggagaatgacgaaatatatcttgatgaagaggatctggaaatgcctttagcagtagaaactttttctttgaaaggatggatgttagtcagttctttgaactatattgtgaagaataaaaatagtggaggtcatgggaataaatggtttatcgatgaagtaaattattatagggaaaatgacatatatagaacatga

SEQ ID NO: 126381 - DNA, 471 bp, Enterobacter cloacae
atggccgacagacttacagtagtgtcaggaaatgaaaagcaaaaaaagtggccaaaagaaggcgatgttttttactttcagttaaatgatggtcgattaggctatggtatggtcgccctgggtaaaatagatgttggcccattcaaaaatgctatagttatatatatatatgactattttacatcttcgcttcaagaagatgctgtattggcaaaagataatttgctattgccaccaattattactgataattcatgttggaaaaacggttatttagtaacgtttaaaactatcgaaacgagcgaagtggatattttaccacagcattattttaaaaatcctgtcagaaataaaatatatgatcagcatggagtgccaattgaatcgccgactgagaatataccagtcggtgaagagtcgattcaattctgtaaaagcattataaaatctatagaaagctttgttaactaa

SEQ ID NO: 126382 - DNA, 390 bp, Enterobacter cloacae
atgtggtttgacaacgcaatagggaaagaaaaaattaatttcatgtttgatggggagttaagcatggaattagtcgagttcgatggttttaccttcgaaaggttttctgatatttcatgtcgattttttacaagaaaaatcccatcttgctacccaaaaaaatgggaagagagtgaattcaataccctttgtattgtgttgacatttggggatgtagttgaacttgatgttaaaggaatgaaggtgggttttgtttgctctcctgtaattatttcaacagaaaattatagtaaaatatctataacagatgaaaaattaaatttccattgtcaatcaaactttcttacaattgaaggtatcacaccttatctggacgagcgttgggattga

SEQ ID NO: 126383 - DNA, 402 bp, Enterobacter cloacae
atgaaaatatctataacaaatactattgaaaaaggaaacgagttacacgacagccaaaaatacgccgaggctttagaacaataccaaaaggcctggcaagctcttcctgaaccaaagtccgaatcagaatttgccaactggatctctgcatgcatgtacagcgcatattttgatcttgcggattacgttgaggcaaagaaatggggagagacggctttacggacacgtggatcggatatagacactgcaccgttaatcgacttgggtatggtctgttacgagttgaatcaattcgatgaagcgtataaatattttaacgatgcttataactacggcaaagagcgtgcttttcaggatagacctaaaaaatatcttgagttctatctgcgtaagaaggcgtaa

SEQ ID NO: 126384 - DNA, 789 bp, Enterobacter cloacae
atgtctccgaaagaattgttaaaagtgcgaggagttgtggttgatgtgaaaaaatactataaaggtaacgttgattttattgcaggtgaaggaattattctcaatgaattcataggggaggtggccacacggcaaataaatattatagatggcgattgttatgcatcttcctctttgctagataaaaacgagaaagttggttttctgctgtatgatggtaaaaaaaacgatctggacttaagtgatactgaagaaatttcgaatgaggaatttgaaactttctggaaaacatcaacgagttcattgcaagaaaaaaaacaaataaagctcttgtctggaaatgctgtggaacctttgaaaaaatccatagttattgctcacattgtgaataataaagggaaatggggtaaaggctttgttctgtctctttcaaataaatatccttctgcaaaggaatactatctcaatagcttcaatggaaataacatcccagaattaggtacggttgattttgtcttggttgatgctaaagaacagatatttattgctaatatgtatgcacaagatggtattaagaaaaatgtcaatgacaaaaatcaatacgtatgttatgcatccctggaagtttgtcttgaaaagttatctgactttgctttagtaaatcgcctttcagtacaaatgccaagaataggcgctggcctcggtggaggtgattgggatgttatagagtcattgatacttaaaaagatttgctataagatgatcgattgcaatgtaataatttcataa

SEQ ID NO: 126385 - DNA, 531 bp, Enterobacter cloacae
gtggcggtacccaattcttcctttcgaattataaaaaagttctgggacctattggtcttccatttgatattgggatgtaaaatgaattttgacgcagaaactggtgttcttaaatttaataaaagggttctattaggaccaagagttactaagacagagttgtttaataatacaaatgtaaggtgggaggggtggcctgaaaaaaaagacaataaaacagtctcatacagaactatccttaaaggtgaccatgagttcggagatatatatctaataattgacttcttggttcccaatgatcctaactcaataattcgtagttggcgcttcgccccagaaaaattattgatgggaaaacagaatagacccgaagggaaagtcacccgatgtttaagggaatggttcaaaactaaatctactattgttcttcctgtatcaagggagtggggacatgttgatgctgcttatgaccctcataacctaacaggaacaattctctgccactattgcttagaccctcatgaattgtaa

SEQ ID NO: 126386 - DNA, 243 bp, Enterobacter cloacae
atgaatactaaaggaataaatactagagacgattttattaaatttcttgagaatttatcttcaaattccagaaataatctaagtgagtgggagagcaaagacttaccctcatattttgaatcgatggcatcttgggttgaagatatggatggatattatttaaatcaaaaattacctgttccagaaaatgttaactggacatttattgcagatattttaatggctgcaagagtttatgaataa

SEQ ID NO: 126387 - DNA, 150 bp, Enterobacter cloacae
atggaactcgtttcctttttctacaagagatgtaactttttcatcaaatttatcgaaaccgtttttcatatgcttattcattatcaatcgaaaagagacctccttgcctatataaaagtggttttaagcgaaaaatgttgtcagaagtaa

SEQ ID NO: 126388 - DNA, 357 bp, Enterobacter cloacae
atgaatattatcgatggtatccaattcagtaattctaatgaaagtgttatttttaattactatagttgggttgagttgattaaagcgattattgttaaatatgcgaataaaacagagagtgaggctgaacgtatagtattagcctctccacttgttcgtattaaggaaaatgattacatgtctgtcgctttgcgcagtcatgaaagtgagtatcattgggcaatgttaattgcttatggtgatcaatattggacaaagggagtttctccagatgaacctgacggatactttgagtgggaaaaagaatacagaaaaaaaaataatctggcagaagataactttatttttagtgattaa

SEQ ID NO: 126389 - DNA, 333 bp, Enterobacter cloacae; identical to SEQ ID NO: 26656

SEQ ID NO: 126390 - DNA, 642 bp, Enterobacter cloacae
atgttcatcagagcttatttaagggcatcgacggaagaccagttcgccgatcgggcaaaagagatgctggagcagttcgtccaggaacgggggcataaaatcgccagctactaccgggaaaatatcagtggcacaaaacttgagcgcccggaactagggcgcttactgatggacagtcaccacaatgatattttattggtcgagcagatagaccgtctgacacgtctcagcaacagcgactggatgacgctaaaaaaacagatagaacaacatgagctgcgaattgtcagtcttgatgtgcccacatcatggcaggcactgtcagataaggacccttcgcaggccgacccgataacccgcgcagtaataaccgccatcaataacatgcttatcgatctgatggccgcaatgtcacataaggactggctgagccgccgccagcggcaaaaacagggaatcgagcgggctcatacaattggaaagtaccggggtaagcaggccgatcaggaacggcatcagaaagtcctgtactaccggcaggtaaagaaactgagtatccgggaaacggcggatgctacaggctacagtgcttcacaggtttgccggatacaagcgcttcataaaaataatgaaactgcctga

SEQ ID NO: 126391 - DNA, 231 bp, Enterobacter cloacae
atgcagctaaaacgaaaaaacccggcacggaccgggaaggtattcgaaaatatttatatgaaagccgccattccggcattcttatccaaaagttttatgacaaaaaaaacgcccactggtcaacaagaaaacaaggtaactgctttttatagtggtatcgggcataagcctattctgttcgtgggagaaaggttatctgaacagataacggtgaacgggaacggattttaa

SEQ ID NO: 126392 - DNA, 267 bp, Enterobacter cloacae
atgaatcaaaaatggaagacgctgttaatttcggtattaactccgtctggcatcatatcagggatcgcgctgactgtgctctggggatatttcagtcgtcttgacagactcgatgttttctttgaggtgatgagcatcaagagtctattcgctctggtctgctgcgcagccgtattctcattagcgattctgttatttatcttttttataatctctatattcatgccgattatcattcctcaggaggtaatgactccaacttactga

SEQ ID NO: 126393 - DNA, 978 bp, Enterobacter cloacae
atgatcctgattcccgatgacgaaccggagctgagtctgcccgcagccagtgaggaattcctgccggcgctgtcaggtgagaatgccccggtcagcccggcccgggcctacctgctttcactcaattcccaccgcagccggcagaccatggcctcgttcctgaacatcgtcgccgttatgctcggagctgcctccctggagtcctgcagctggggcagcctgcggcgccatcacgtgatggccgtgaccgaactgctgcgcgacaccggccgggccaccgccaccgtcaacacctatctttcggcactcaagggcgtggcgaaggaagcctggatgctcaggctgatggacgtggagagcttccagcacatccgggcggtccgtaacctgcgcggcagccgtcttccgcgcggccgggccctgccgccggaggagatccgggcgctgttcggtgcttgcgaggccgatgactccagcattggggtgcgcgatgcggcgatgctgggtgtcattctcggctgcggcctgcgacgctcggaggccgtggggctcgatttgtgtgacattgtcacagatgagcgggcgctcagggtactgggtaaggggaacaaggaaaggctggcctatatgccggcgggcacctggcagcggctcagaaagtggatcgatgacgtgcggggagaaaaagacgggccgctgttcacccgtatccgccgctttgacaccctgacgaacgaccggcttaccgaccagacggtgtaccatgtcctgcaggtgcgccagcgcctggctgggattgcaaaatgcgcaccgcacgatttaaggcgaacctttgcgacctccatgctggataacggcgaggacttaatcactgtaaaggatgccatggggcatgccagcgtcaccaccacccagcagtacgatcgccgcggcgaagcgcgcctgcgcacggctcgtgaccgtctggatctgatatga

SEQ ID NO: 126394 - DNA, 906 bp, Enterobacter cloacae
atgcaggatctcaatgacttcgtctggtttgtgaaggtagtggagtacggggggtttgcggcggcgggaagggcgcttgaccaacccaagtccaaactgagccgcaggatcgcgcagctggaggagcggcttggcgtacggttgatacagcgcacgacgcggcagtttacggtgacggaagtggggcacactttctatcagcactgtagggcaatgctgatagaagcagaagcggcagaggaggccgttgctgcgctgcaggctgagccgcgcggcgtcgtcaggatcacctgtcccgtcacgttactgcacgtccacgtgggaccgatgctcgcgcggtttatggcgcgctaccccgggattaatctccagcttgaggccaccaatcgtcgggtcgatcttgttggcgaaggtattgatgtggctatccgcgtgcgtccgcgtccgtttgatgacagcgatctggtgttaagggtgctggctgacagggggcattgcctggtggcaagtccgcagttgattgaacgtatgggtaaaccgcgaatgccttccgagctcagtgaatggcctggattaagtatgggggccggtaaacaggtgcataaatgggagctcagtggtccagaaggggcgaaagcggagatccactacgcaccgcgctttattaccaccgacatgctggcactgcgggaagcagcgatggcgggcgtgggcgttgtacagttgccgatattgatggtgaaggatcagcttgcgtcaggggaactggtacgggtgctggacgcgtgggaaccccgacgggaagtgattcacgcggtttatccttcgcggcgcggcatgctgccgtcggtcaggacgctggtggattttctgactgaagagtatgcgaagatggtggaggagtag

SEQ ID NO: 126395 - DNA, 315 bp, Enterobacter cloacae
atgcacacacgaaacgtcaacgtcaaaaccgccgctcaagaatcttccagaaagatggggggaaaaaccgtgtcgtacacgatcctcgtcgctgagacgaaaaaaaactcagcggaggaagccgacgttctggagttcagcagccttgctgagctgaagaaactgcgcagacgctgccccgaaacgatgcgctgcacctatttctacgccctcagcagcggcgtcgataaacagttccgccatatccatgtggctgaagctgaccacttcaaacagtttgcgcgcctgatcgagcgcgcaggtatcgacatttaa

SEQ ID NO: 126396 - DNA, 1104 bp, Enterobacter cloacae
atggcattattccaacgcgccaccaatacacaggcttttctcaaggccggaattatgggttttgccggtgacggcaagacctacacagccagcgagttagcaattggccttgtgctgctgatgcgacagcgtggtattgcggcaggtgatcgaccggtcatgttccttgatacagaaacaggttctgactgggttaagccaagatttgacgctgaaaacatcgaactgtttactgcaaaaacccgctcattcgtcgatcttcttgaagctgtcaacgaagcagaagccaatggctctgtgatgattattgactccattagccacttttggacggggttatgcgacgaatacgccaaacgacgcaatcgcaagcgcgggcttgagttctcggactgggcatggctcaagcaggaatggcggcggtttacagacagatttgttaacagccaggcgcatatcatcatgtgcggccgagccgggtatgaatacgacttctttgaaggcgatgacggcaagaaacaactggctaaaaccggtgtgaaaatgaaggccgaaaccgaaaccggatatgagccttccatcctgattcagatggaaaagcagatgaatatcgaaaccggtcaggtttggcgtactgctcgtgttttgaaagatcgctcaactcgcattgatggccaggtcttttcaaacccgacattcaaaaacttcctgcctcacattgaatttctgaaccttggcggaacacatttaggcgttgatacatctcgcgataacggcgttctgtttgccgatgatggagttcctgcatggcaaaaagagaagcgcgcgaaagaaatcgcgctggatgaaatagtcgagttgctgaacaagtatcacggcggcacgacaaacgacgccaagcgagcaaaatccaaccttcttgagaaggtttttgcctctcgctcatgggaaagaatcaagggaatggactggcctaccatcaaggctgggcgaaatgctctgtggctggaacttgaaggcgttgagtatgcattccctgatcctcaacctgagacagaaagcgaaattgatactcctgcgtttgatgaagacataccgcaatga

SEQ ID NO: 126397 - DNA, 168 bp, Enterobacter cloacae
atgaaagcatggtcactcgaagtgctggcgctgctgtggcgacactcaaacgccgaagccgcggaaattaccggccgcagcattgaagaggtcggggataagcggctgcaaaccaatattgagcgtaatggctgggatgttaacgatccggagcgggaggatgcatga

SEQ ID NO: 126398 - DNA, 1005 bp, Enterobacter cloacae; identical to SEQ ID NO: 31749

SEQ ID NO: 126399 - DNA, 810 bp, Enterobacter cloacae; identical to SEQ ID NO: 26634

SEQ ID NO: 126400 - DNA, 285 bp, Enterobacter cloacae; identical to SEQ ID NO: 26633

SEQ ID NO: 126401 - DNA, 969 bp, Enterobacter cloacae; identical to SEQ ID NO: 120790

SEQ ID NO: 126402 - DNA, 267 bp, Enterobacter cloacae
atggcgacgctggggcgtcttatgagcctgctgtcaccctttgacgtggtgatatggatgacggatggctggccgctgtatgaatcccgcctgaagggaaagctgcacgtaatcagcaagcgatatacgcagcgaattgagcggcataacctgaatctgaggcagcacctggcacggctgggacggaagtcgctgtcgctcacaaaatcggtggagctgcatgacaaagtcatcgggcattatctgaacataaaacactatcaataa

SEQ ID NO: 126403 - DNA, 294 bp, Enterobacter cloacae
gtggcgcacgtattcggtgaacgcacgttggccacgctggagcgtcttctgagcctgctgtcagcctttgaggtcgtggtatggatgacggatggctggccgctgtatgaatcacgcctgaagggagaactgcacgttatcagcaagcgatatacgcagcgcattgagcggcataacccgaatctgaggcagcatctggcaaggctgggcaggaagtcactgtcgttctcaaaatcggtggagctgcatgacaaagtcatcgggcattatctgaacataaaacactatcagtaa

SEQ ID NO: 126404 - DNA, 255 bp, Enterobacter cloacae
atgaaaaaccttgccgagagcattcgcaattttgacagggaacaggctcgctgtgtggcgcataacttgcctgagcagtacatcgaacgcgaacaagcgcagcaggtggcgcagattatcaacgggttattcgtacagcttgccgctgcattccctgcaagcctggttaatcgcagccaggaagacgtgaacgagattcgccggcagtgggctggccttcatagaaaatgggatcacttccctggagcaggttga

SEQ ID NO: 126405 - DNA, 417 bp, Enterobacter cloacae
atggtacggcgccaggagcgtccattcctaccgtcgccgggccagttcatcaagtggtgcagggaagggcgcagcgtacttgggatcatcaccgctgacgttatggctgaatactggaagtggcgcaagctggtcttccggtacccgagcagtgagcaatatccgtggccgaagccggttttttaccacgtctgtcttcagctgcgtcgccgcggcactgatggccagttgagccataaagaactcgagcgtgaagccagtgacattctggatatgtgggcaaagcgggtgctggccgggaagccaatcccgcctgttcgtagggcgctggcaactccagttgcttctatggggccgacgccagcggaattgctaaaagcgaagtatgagcgaatgaaagctgttagaagggtatga

SEQ ID NO: 126406 - DNA, 816 bp, Enterobacter cloacae
atgctggaaacattcaaagaattattttcatctacgattagtacaactgcacaacgtgtcaagaatcctgcattaggagcattcgcgctgtcttggtgcgcatttaactggaaatcccttttataccttttattcagcgatggtgacattctaaataaaattgagttcatcaccactaacagtacctggaaaacagtagccggttatccgtgcgtttcagtaattgtaatatgtggctttcttccatggataaataatgttatttcaagatggcaagccagaccactcgataataatgactccatagagaattatcgtaaagcaaaacaaattctacgagcaacaagactccaaaggttacaggctaaacaagatgtgacatatgataaggttaaaacaggcgctgaaaaagatatccaagccatgaaagaacaaattatcgagtcaaaagaccgaatgggcattcttacttctgaattgaaagataaagaggaaaaactacggaacgagtcactgttagcaggggaactcaaactaaagcttgagcaatctactaatgttattggtcagcttaaggaatcattagaaaaaatgaataacgcttacaattcattaagcgagcaattcaatttatacaagaaaaatcatccagaagaactccaaactttgggcagcgatggtttgctttctggactaacaagtctgacacctgaaatgataagagagtatattgcaaatcaggaatcagaaaagagtaaattaaataaacaaattttgaataggaacactcaaggaatcttcaccccaaaggaataa

SEQ ID NO: 126407 - DNA, 216 bp, Enterobacter cloacae
atgctaacgatcaaggagaaaaagacaatcttcgcgctgctagatactgacgacgctagtgctgcggcgaagaaaattcatcttttaccaaaaacgatctatacctacaccaacaacatagggcaaaaactcaacctcaattcgatacttcaagtaagacaatttatcaattctgagttcaaactagcccgaatatcaatcgaccaagatctataa

SEQ ID NO: 126408 - DNA, 342 bp, Enterobacter cloacae
gtgaagctgagtaacggcatgaagggcaacaccggaacaccgcgctccgtcaccggggaagccggcgcgaagctgagcggtaagttcagtattggggcaaatgaatttaagccttacctgtcggctgcggtcgtgcaggtgtttgctggctcaaatgaggtcaccatcaacgaacgcaaccgctttgacaacaacgtcaaaggcacatcaggcaagtatggtctgggtgcatcggtcagtgttggcaaagacatcacgctgtacggcgaggctaactatcgtcagggcagccataccgagtcgccgatccagggcgtggccggtatccgtttcggattctga

SEQ ID NO: 126409 - DNA, 1053 bp, Enterobacter cloacae
atgaacggtgggcatgtttccttcctgcacaacagcgatggtgaattcgcgaagctgacgattactaaactgaacggaacagggagcttccttttcaacacctctctggccgaccgcaaagcccactttgtcaccatcgagcagggctccggccagtttggtattgccgttaatgactccggtaaagaaatctcagaccacacagacctgacggtgaacctcatccatgagaaaggcggtgacattgattttgaaatggttacggctaacggacgaagcacctccatggtcgacggcgggacttacatgtacaccctgttcagccagcagaataaggacggtctcaacggcggtaacgtctggtacctggttgcgatgacgaaagaaccgggcggcggtgagaatcccggtggcggtgaaaaccctggtggtgacaacggcaatactagtggtaacggaaacggtggcaagaggccgatgacgaccccggcaacgaacgccatcctgtctatgtcgaatgccggtctgaatgttatccacgccgagctggacgggctgcggacatatcgtgcgaatctggacaagaccggaccggaaagcaacgtctggggccactacctcggcagcaaacatcacgcggataccagtaatggtgcggcttatcagctcagccagtacggcatggaaatcggtgctgatacgcggacggattttgcacgcggcagcctcgtcacaggggcatttatgtcttacaccgacaatacggtgaaacatgcccgcggcggtaaaagcaaaatcgacagttacgggcttggcctgtacgccacgtggttcgatgtcagtggcttctatgctgacggcatggtgaagggtaaccgcctgaacaacaaactgagagccgtcatgaccaacggcggcagtaccggcggtgactggactcagtatggcctcagcgcttctgtggagggtggctatcagttcaatctcagggatgacctgaacctcaccccttatgctcgtctggcgtttgttcagatgagcgtgaggatgtga

SEQ ID NO: 126410 - DNA, 561 bp, Enterobacter cloacae
atggcgagttggctcagcgagaatgctacttctattatctctgctagttctgcattgataggtgttggtattactggattgataaacttttttgttagtaaagcgaatgctcgaactgcaaaagaagcgagagatagtcagaatgaactcgaaagatggaaaaccaaacgcgagttttatatcaataaagccgaggaattatttactttatttgataaatggcatgaagcagtctatcagctttaccttttaacggtttgtagaacaaccgggacgaagaccgcagagcaggttaacgcagaatgggatacttacgttgataaatctatacagccacgtattcacgctttgctcactctttattatccagaacttgctccggcttttcgagagatgacagatataaattcagaaataatgactaactatgctcggtgtgtgtccaataacttaaatcctagtgagtacaatatatcttcattaaaacacatggaaataattagacaaggaagtctcgcgtttaaagaaaatttagcaaaaaagacacagcagcatttataa

SEQ ID NO: 126411 - DNA, 312 bp, Enterobacter cloacae
gtgacagacgtgatgcgtcaggctatttgctcctacgcagcccgcggcgctgaaaagcttcgcggcgaggatcagtactgccgctttatctctgcgttcgtgaaaacctctcccttagcgcttaacgaatcgtattacggtaacagtgcgtccatgaagcttctcaccccaactcaggcttcccgcaacatcattaacgccgcagtaaagtgcctggataaaatctggaaggatggccatcgttaccagaacgccggaataatgttgggtgacttcttcagccagggggggccagctcaaccttttcgatga

SEQ ID NO: 126412 - DNA, 189 bp, Enterobacter cloacae
atgctcgcagacgatggctatcagtggtttgttgagcagggcggcttaacccgcgagaacgggcagacattccgcgaggtgattctgtcgcgcggcaatagtagtgatagagctgaactttaccggaactggcgcggccgcgatccgaggattgaaccgatgctggagaatcgcgggttgagtgcgtag

SEQ ID NO: 126413 - DNA, 474 bp, Enterobacter cloacae
atgctcgcgacgaaaatcattacgcgggagaattatgttgtaaccgtaccgaatgctgtcgtagttagcggcaaaatcactaatctcagcgcgcaaaatccagatggtggcgtgaacctgacgacaggtgtcactatcggatacgacacgccatggcggcaagttcatgccatgctggagattgccgccagacgggcgaaatgtatcgatcagtcacaacagccgctggtaagacaattgagtttgatggactggtatattgcttatgaacttcaggtgaagctgcgtgccgggcaatcactggcggaggcccgcaatgaactgcacagcaatattcaggatgtctttaacgagtttaatgtacaaatcatgtcgccaaactttgtgatgcaaccagaaggcgcggtcgtcgtgacggaagataactggtatgcagcgccggcagagaagccagagaataaacagcgtgagtga

SEQ ID NO: 126414 - DNA, 900 bp, Enterobacter cloacae
atgaataacgctctttataatcagatccgcatctttcagagcattgcacgtgaaggaaatatctcggcagccgcgaggaaacttgaaatcacgccgccctccgtcagcaatgcgcttaagttgctggaagagcatattggtcatccgctttttgtgcgcacgacccggcgtattgagctgaccgaaaccgggcaacagttgctggaacaaacggccgccgcggtggattcgctggaaaaatcgctggaaagcattcgcgatcggaatcaggaaccctctggtgtggtaagaattacgctctcgcgtttcgcctatctgttaattctcaagcctgcaatggctgcgttctgtcagcaatacccaaggatccaactggagatttcggtcttcgacggtaccgtgaatattatcgaggagcgttttgacctggggattcgttttggcgatattctggagggtggggtggtagcacggccattaatgaaaccgtttcgtgaagggttatacgcatcctctgcctatctcgctgaacagggtatgcctgaggtgccggcagatctcagtcatcaccgattgattggttaccgttttatcactaacaaccgcatccttccgttgatcctgaacgatcgcggagaacagttaaccgttgagatgcccggacagttaatcagcaacgatattgacgttatggcagacggaattcgtaacggactgggaattgggcgcttgttcgaacccatctggcggttacagccagatcgggaacaatttgtacctgtgatggagagattctggaaaacctatccgccagtgtatctctattacccgaaaaacgcggggaaaacgaaaagggtgaaagccctgattgattttctgatctccgcgaccgagcgataa

SEQ ID NO: 126415 - DNA, 732 bp, Enterobacter cloacae
atgaaaaagagtctcatgtttttaactttcctgctaataagcagccctgcctttgcagaaagtcagggcatacaggatacgcccgtgatgaatatcgttgagataagcatcacacccgatcgggacaggcattttgatgaggttgccaggcaaacaatcaccgcttcggttgatcatgaggcgggcacgctggcgatgtacgcgctgaaacgcagtgacaaggcgcgtcaggcatatatggttgagctttatgcaagcgagttggcctaccgcaaacatctggatgcctctccatataaagcgtttgttactcaagcacctgatatgattgatcggaagctgaaaatcacactggtgccgcaatttacaggggacaaacacatcatacccgatgagcggaccatcaataatctggtggtagttgaggtgaagccggaatatcagactgaattcaaaaacattgtccttcctgaaatggctcagtcgctcaacatagaaaaaggcgtgcttgccatgtatgccgcgacagacgtagatgatccccaccgctggtatttttatgagatttacgccagtgaggaagattatcaactccacagacagacgccgcactttagggattatctaaagcaaacggcgcacatgagtacccgtaaaacgtctattcctgtcaaaccactatttctgcgtaataaaggcgggataaccgcagaaatcgcccctggcggctaa

SEQ ID NO: 126416 - DNA, 579 bp, Enterobacter cloacae
atgacggttgtcacaacgcccacaaaacaccgttccattgccgctggacttgctcggcggcatcctttgcgtatgaataatctaaattctctgcaggaaatcgcacgtacgatccgcaacctaatccgcaccggcatcgtgaccgccgtcaaccacgacgagggattgtgtcgcgttcagaccggcggcattgaaactacctggctaaactggcttacctctcgcgccggtcgttcccgcatgtggtgggctccctcggtaggtgagcaggtgttattgctggccatcggcggtgaactcgataccgcttttgtgctgcagggcattttctctgatgaccatcccgcaccctcgtcctcacccgatacgtttcatgtgtgctttcctgatggcgctgtcatcgagtatgaacccgaaaacggcgcgctcaccgtgtcaggcatcaaaaccgccgacgtcaccgcgtcagattccattacggcgaccgtgccggtggtactggtgaaagcctcgacccgcacacccgaggtggtatgcaccaacaagctgaccaccgtctgcgcattcagcagaccttag

SEQ ID NO: 126417 - DNA, 1485 bp, Enterobacter cloacae
atggaaattaaggatttcgtaagtcaatataaaaaccaccctgtcctatttatcggcactggttttagtctccgctacctagaaaactcttatagttgggatgatttattaatgaaggccgcggtagacttaactggaaaccccgaattttactacgacctgaaagctgacagcctagaaggtgatgaatatagatatgaccttttagccaccaaacttgaggatattttcaatcaaacactggctttagatcgcaatggtaaatttgaaaccattaatgatattttctacgaaaacatgaaacaggggaaaaagctcagtcgatttaaaatctatctaacatcaatattaaaagagcttaaaatcaaagaacatatgaaagaggaagttaacgcccttattaaaacaaggaaaaacattggctccgttatcacaacaaattatgaccaacttattgagaatattttcgacttcatccctttaattggcaataacatattattaagcaacccttatggctcagtctacaaaattcatggatgtgttagcgatccgaacaatataatcatcaccctcgacgactataaaaattttgacaataaatatgagttaataagagctcaattactttcaattttcatacacaacccaataatattcattggatatagcataagtgacaaaaacatcaaatatcttttgcaaactattttctcttatgttgatctaaataccgttcttgccaaacgcataaaggataattttcttttggttgagtatgaagaaaataatttctccacgacaatatccgagcacgacattaacattgaaggtttatctattattagaatcaacaaaataaaaacagataactacaaagctgtgtatgaagcaatatcaaatttagttctacctgtatctgcaatggacattagaaaagtacaaaaagtttggaatacgataaaaagtggtggagagataaaagtaaaaattactgaaaaccttgacgagttaagaaacgaggaaatggttatcgctgttggctctgaaaggacagtccaatatgtatatcaaacaaaatctgaaatgcttcaaaattacttcaagatagtagaagaagccaattctcaacttatctccctacttaataagcaaacaataggtaaccacgagcacttcccattttatgcatttagctctatttgccctgagttagaaaacattgcagcagccaaagatagacaactagataaaattgtcagccagatagaaagatctcgcgctgtttgccgctctgactttaagtcaatcgacgaaatcataagccaaacacccgcatggaaagtcgcaggaactatcacatgctgtatttttgacaacaatatagatattgaacaactaaaaaattatttactagcaaactcacataatgttaacactgggtatcgtcaattactctgcctatacgacttccttgccaattaa

SEQ ID NO: 126418 - DNA, 603 bp, Enterobacter cloacae
atgcatgacgatgctctattagttttaactattgattctagcgggttatatcacctgcttaattatggatgtgataccgaggagtttgaggatctggttgaatcgttcggtttttattatgaaatgggctatgcttggagtctggggttttatcctttggaaggttatgattattcgaggttgtcaggtagttatactcagaagttaaaggatattcgatggaagaataagtcagctctagtgaagcgcagagctcaagaacgttgccaagactgcggtatgaaaagcgttttggaagcacaccactgctattatacaaatatgcgtgaaggctatgaaccgtgggaatatccgctgagtgcatttagggcgctatgtagatcctgtcatgagaaaagacctgtgcctgaaatcagaattagggcttttctagctcaattaacacaacaacaattaacggaattaattgatgggcttgataacgcatttaatcgttttgaaacggattcattcttagcctttttgcaaaaggtttctttccatgaccatttgctcgattctgcaattaagttattgaaaaaaaacactgatatatatgattag

SEQ ID NO: 126419 - DNA, 204 bp, Enterobacter cloacae
gtgagcgccgccgacctgctcgacgcgcaccgcgtgccgttccagcccatgggcggcaagctcgagaatatcggctcaatgggtgatattgagaaggtggcgcgagtgttcgtgcgtaatgaactgtcgccgctgcaggagcatttcaaagagataaacaactgtattgacaggactccgaggcacggccatgccgctttttaa

SEQ ID NO: 126420 - DNA, 180 bp, Enterobacter cloacae
gtgcaggcgctcaaagagcaggttgaacagaaggtcacggcaacccacagcatcatgccggttccgtcctgcgacaacgtcgacgactgggaggcggtaaagcgggtcgttgagaaactgcaaaacgtgaattatgggtgcaaaagcgtgtttgaggcgtgttttggggcgaaaaaatag

SEQ ID NO: 126421 - DNA, 189 bp, Enterobacter cloacae
atgaagatggcaggaaattatgaggacagtttatctctctctttgtcagttcttaaactcaataaaattctgacactccgcgcatgcctgacaaccgggaacggcatcgcgccgaggctgcggtatatcttcggcgcattcttcacaatgttcagcggatacggcgttgcggttgagacggtgaactga

SEQ ID NO: 126422 - DNA, 483 bp, Enterobacter cloacae
atgagctggagccatactgactatattaatttgattgcatctataggaggggttggttcagctatttttgctgcttacacagcctttcaggcaaaaacgactattgaattaagcacaaaagaaagtgaaaaatcacgaacactggatgagctttataaacttgcggaatggtgtaataaatgtgttggtgaggactcttacgtcatagagaaaaccgaaaagcttattgagctcgcaactgcttgctactatgcagaacaagccatcataaaatcgaatgttacagaaagtgaaaaagaatccttaagagaagtctttactcgccaattgcgtccatcaattaatggtgaaataggttctgcgcgtgcactaaaaaaaattaaagaagcatatgaacttgacgttctccgcgaaatgtatagggatgctcaagtatttttgcaaacgaatgatagagaacctttgccagagaaacttccttaa

SEQ ID NO: 126423 - DNA, 405 bp, Enterobacter cloacae
atggcacaggtcattttcaataaagagtgggttgttgaaagaatcggcctttgtgaagggcaaatcaaaagttatcggctgaaattgtggatcgaaggcgtccatttttcaaagagcgctatatcttatggctggaaagtcgggatggagcgggcaaaaaacagaacgcgcgatccgtaccagtctcgccatacttacgcgtgttggtcactttcagcgggtgcaaacccttcttttatcgcttcccagatgggccatgaagacgcgcgtatggtctacgaagtatattcaaaatggatcggggatatgaatagcgatcaggtggatatgctcaattcccggatgccgactgctatgcccccaggatgccccaaagctaagtatctgcttaaaaaagtgttgtga

SEQ ID NO: 126424 - DNA, 150 bp, Enterobacter cloacae
atgggtttctttaaacttacccttaacgacaccgtcataaattttccttttgagatgattcacacatttactgagccgacaggcgcgaagagagggaaatatgatgggagagaagaggagggctggcttcaggcgtcgcaacgaaaataa

SEQ ID NO: 126425 - DNA, 669 bp, Enterobacter cloacae
atgtgtggacgttttgcacaagcacaaacccgtgaagaatatctggcttacctggccgacgaagccgatcgtgacattgtctatgacccggaacctattggccggtacaacgtcgcgccaggtaccaaagtcctgctgctgagcgaacgcgacgagaaactgcatcttgatccagttttctggggttacgcgcccgggtggtggggtaagccgccactgattaacgcgcgcgtcgagacggcggccactagcagaatgtttaaacctctctggcagcatggccgggcaatttgcttcgctgatggttggttcgaatggaagaaagatggtgacaagaaacagccttattttatccatcgggcagacggccagccgatttttatggcggcgatcggcagcacaccatttgagcgaggcgatgaagctgagggttttctcatcgtgacatctgcagctgacaaaggcctggtcgatattcacgaccgccggccactggttctttctcctgaagcggctcgcgagttgatgcgccaggatataggcgggaaagaagctgaagagatagcggcctacggtgctgtccccgccgacaagtttatctggtacgcagtgacgcgcgcagtgggtagtgtgaagaatcaaagccaggatttgattcttcctctttga

SEQ ID NO: 126426 - DNA, 942 bp, Enterobacter cloacae
atggctaataaaccagaacatctctataagtatttaacttttagtgaaaacacacttaatcttttatgcatgcagcaagcctattattcagatccatcgcaatttaatgaccctttagattgtcaacctatagttgctaatgacttggaattgtcacaattaagggatgttttctcaagtgtgttacttaaaaaaatggaaaagcaatttgctgccagtttaaaaaaattaaaattctcaaaagagaaaactgcacaaagggcatatcttcttgccaatagcgaggtggaacgagctatatccaactttgaatactatgcgacagaatttgaacaggatatgcaagctaattacttaactaacagttacacaagagtaattcaagaagaaatcgttaacactttcaaaaaaggggtgttgtgtcttagtaagaaatttaatagcccattgatgtggtctcattatgctaaccaacacaaagggatatgcattgaatatgacatgcgtactgtgaaagatgaactggtccatgaagtaatttatggtgaatcaagaaagatacttacaagcgagataaaagcatggcttgataatacagagaatgaaagtcggataaaaaatgtttgtcttttaacgaaatctggagaatggagatatgaatcggaatggaggattttcggtcctgtagggctaggaaactcattgccacctatcaagtcagtcatatttggatttaaatgtcccgatgtaactatttatacagtaatgaaagcaatgatgtcagataagaggaagatgaagttttggaaaatggctaatgaaggcgatggttttgatttaaagagaaaattaataaacacggatgattattttgagagtatgccatatatttattctgtcagtgaaaaagatttagaagatgaagaatttcttctcgactaa

SEQ ID NO: 126427 - DNA, 1269 bp, Enterobacter cloacae
atgtttgcgctctgtgatgtgaattcgttctacgcatcatgcgagactgtattcaggccggacctgagggggcggccggttgtcgttctctcaaataacgatggctgtgttatcgcacgcagcgccgaggccaaggccgctggaattacaatgggagagccttttttcaagcaaaaggacttatttcggcgcgctggggttgtttgcttcagcagcaactacgagctgtacgcagacatgtcgaaccgggtaatgacgacgcttgaggaaatgagcccccgcgtcgaaatttacagtatcgatgaagctttttgcgacctgacaggtgttcgcaattgccgggacctgaccgagttcggcaaggagatccgcgctacggttctgaagcgtacgcacctcaccgttggcgttggcattgcccagacaaaaacactcgctaaactcgccaaccacgccgcgaagaaatggcagtggcaaacgggcggggtagtggacctgtccaatattgatcgccagcgtcggttgttggctattgtgcctgtggaggatgtatggggcgtcggcaggcgcatcagtaagaagctgaacgccatgggtatccaaacggctctggatctctcagaacaaagcacatggattatccgtaaacattttaacgtggtactcgagcgaacggtccgggagttgcgcggcgagccttgtcttgagctggaagagtttgcgccagcaaagcaggaaatcgtatgcagtcggtcattcggcgatcgtgtcaccgagtacgaacagatgcgccaggctatctgcagttatgcagcccgcggcgccgaaaagcttcgcggtgagcatcagtattgccagttcatctcggcgttcgttaagacctctccctttgcgctgaatgaaccgtattacggtaatagcgcatcaatgaagcttcttacaccaactcaggattcacgcgatatcatcaacgccgcggtaaagtgcctggacaaaatctggaaggatggccaccgctatcaaaaggctggaatcatgcttggtgattttttcagccagggcgttgcgcagttgaaccttttcgatgagaacgccccacgcgctggaagcgataagttgatggaagtgctcgatcaactgaacgcaaaagacggaaaaggaacactctacttcgccgggcagggcattcagcagcaatggcagatgaagcgcgaaatgctttcacctcggtatacaactcgatttagtgatttacttattgtaaagtaa

SEQ ID NO: 126428 - DNA, 687 bp, Enterobacter cloacae
atgctatataaattccttgaggaacagtatctgaatgcttttttttctcgtggttcgcttaggataggcacaatttatgacttcaaagatacggttgcacatacttctgccagggccgattcaggcgaaggctggcatcaactatccagaagttttacttccccggttgaatttactaatattgagaatgaaccaatcattaatgaatttttcgaaatcagtggtggcactgtaatttcttttgaaaatatgtcatttaccaccaccagagattctggcgatgggtttattttctgtactagtcggtattattcaaaagaattattcttgaaatggcatatagattcttctaacaatgatgcctgttatgccatcatgaatccaggtacattttttgatgcaatcaccaataaaattcgcaattcagtttgtcatttcttcaatgcaaatattgtttatactactgatccaatactgtacgactcaccagatgcaaagcaaagcccagcaataactaaagaaatgaataaatattcttggcagtgtgaaaatcgttctgtatggtcaccaagattaccaccatttcgagtgaggccatttattatagaagtaccagaggcaatacaatattgcaagccactctcatatattaaagatggtagcataattgagtataaacaatcctga

SEQ ID NO: 126429 - DNA, 1338 bp, Enterobacter cloacae
atgctttataacactggcactatcgcaattaacggaaatacggcaaccggcaccggcacgaactggacggcacccgccagccaggttcgggctggccagacgattattgttatgtctaacccggtgcagatgttccagatttcatccgtgaacagcgccacgacaatgacggtaacgccagctgcttccccggcgctcagcggccagaagtacggcattctgttatcagacaatatctcggtcgacggactggcccaggccatgtcacagctcatcaaagagtatgacgagaatattggtgcctgggagacgttcgccactacctcggcaaaccagagcatcaccgttaccatcaacggcacccctgtaacgatccccggcattgggaaactggcccagaaagggagcaacggttcgcttgcaattactgacggcggtactggggcaacgaaggcagaagatgctcgcacaaacctcggtttaggaacagctgctacatccaataccttgaccaacgttatagaccaaagcgccggggcgcttgtaagaaacagggatttcggtatcggtggtaatgctggcgcaggggaaggtgtgcctattggaagctatggtaataatgcaaactacatggcactcaatggctggtacggtggtgcgggtgttaacgctacaaaccattttgacggcttctccccattattaacaatgtgccggttcgctggcggttacattggacaaatccagattactaactccggtaaaatgggtgttcgtggaggaactggggcgacagtatcaaaccagggtacatggacaccctggtatgaagtttacagcactggtaacacaacaaaagccagcgacggtacactgaaggctgcgtccccggttgcccgtattgtcgctagccaggagacctgccagcgcgccgatatagcagaggatggtttctcctggtgcggctgtggaacggcgaatgtcgaggctgaaggtatcacaatctctcggctcgatatcggcgtttacgtcctagcgggctctgctggtcttgcgtcggaaggctggcagctactgccgccaatggacccttgcggcatgggagaactgggtgtggttgagtcagagcgaaccggcaatggcgagcttacaatccgcctgtttaagcgcaaatacatgctgagtgaagacggagagatcatcaaaacgaaaggagaactgatggatgtcccggcgaacagttggatcgacgtaagactcgacatgcctgaaaacagtgcatggaatcagcgtcagagagaagctatggaaactggggagaatgattttgcggtatag

SEQ ID NO: 126430 - DNA, 630 bp, Enterobacter cloacae
atggctgcattactcaatgttgagccgatccgcacaattcgattgtacggcgtgctaggcgccactttcgggcgtgaatatcgtttatcagtagcttcacctaaagaggccatccgcgccctgagcgttatcgtgccgggttttgaacgtttcctgaataccagtaagcaacgaggtttaacttatgcggtattcagcgggaaacggaacctcttaaacgatgagctcagtatggacaggagcacagatgaaatccgcatcgcgccggtgatcatcggcagtaagcgagccggggtgtttcagacaatcctcggggttgcccttgtcgctgttgctgcgttcgtcacgggaggggccgcgattgggattggtggtaccgctttcgctggtggatggggcgctgtagcggggattggggcatcaatggcaatcggcggcgtagtccagatgctttctccacagacaaccgggctagccagtaagcaatctgcggataaccaagccagctacgcctttggtggagtaacaaacacgacagcccaggggaatccggtaccacttctttatggccgccggcgaatcggtggcgcgattatttctgccgggatttatgtcgaagatcagcaataa

SEQ ID NO: 126431 - DNA, 684 bp, Enterobacter cloacae
atgagaaaattactagggctgacaattctgactttactggttgccggatgtactacgccagctagaaactatgtaccccaaacgaaagagataagtataccgccgcttaatacgactacgactacctatgttggtgaagatatggttagacagggtatcgacgccagtattgatgctattcatttcaatcaggcagttgagatcggatccataggggtatatacaatccctgcaggtgactacgtaaaaattggcgaggattccaaatctgagtttttctctaatgtagaaagatcatcaggtgctctagtaccgaatcgatttatggtcaacgatccaactcaaagtattcagctcaaaaaaaatggtgagatctgtattgtgacaatctatggtgcgaccaaatgtgatacagggaaaccatattcaaaagtgaaatttcaaacagaacagcagtcggcttttcaacaaaccttgatttataatggtaaggttggtaataagataaatattggttatcgtgagtttcaggggggattggcaagagctgccttctcaaatgaagtggaatatgacctttctgaatcaaaaaccatacgctataaaggtgctgttttagatatccttgaggcgaataaccagtcaatcacttttaagcttacgcgaaactttaataccaattga

SEQ ID NO: 126432 - DNA, 777 bp, Enterobacter cloacae
atgttaattcgaaacatgctcattaaatattattcggcggctggtgaagaagataaatcaggcggcggtggtggcgctcctgaaatcactcccgacattcagaagctgattgatgagcaggtgtcggctcaggttacagggctgaaaaacaaaaacactgaactgctcggaaagctcaaagagtcaaccgagtccctcaaacgctttgacggtatcgaccctgacgcagtgcgcggcatcctgcaacgtttttccgacgacgaagaggcgcagcttatcgctggtggaaaaattgatgaggttctgaataagcgcactgaacgccttcgcgccgattcggataagcagatcaaagcagcaaacgaacgtgcggataaagccgaagcgttctccaacaaattccgggatcgcgttctgggtgatgctattcgtgccgcagcgctgaaagctggcgcgctggctgaagcatccgacgatctgatcctgcgtgccaaaggcacattccagctcaacgacgaaggcgaggccgtagcagttgatgcaaatggtgatgttctgttcggtaaagacggcaaaaccccactaagcccgcttgagtgggcggagtctcttaaggagacggctccgcatctgttcccacgcgcagaaggcaccggcgcgggcggacacaaaccaaacggtggtggcaacctgaaacgttccgaaatgagtgccagcgacaaagcggactacatccgcaagcatggccagcaggccttcctcaaacttccgaaataa

SEQ ID NO: 126433 - DNA, 207 bp, Enterobacter cloacae
atgagcgataatcgtcctgtaccgtggccgtttgaaagtgagtttgtatcaccaactattgacgagctgaaaggcagagtttgccggtttgttcggcgtagtgatctaatcactcaagaagttattccggggagagtaacgttctatcttgaggacgattaccgcctggtaggggtaatcgtagaaccagatttaccaagcgagtaa

SEQ ID NO: 126434 - DNA, 237 bp, Enterobacter cloacae
atgtctgatcgctatttcgaactagttgaaaacatatctattgaagataatcgagagttgcacgcccaatttttacaccatcttaaacatgtgattaatgtatcatttgtaccagatggtaagggcaagcgcgtgagagtgactggcaggcctggagagtcaatagcggagattttcgggggaagtaacgggatcttctctaatctttatcatattgaagaatatgaggttttttag

SEQ ID NO: 126435 - DNA, 354 bp, Enterobacter cloacae
atgaagagcaacgagctgaccaagcttcaacatgatctcgcagaatttgcttctgaacgagactgggacaagtttcattctcccaaaaacttatcgatggctatgtctgtagaggccggagagttagttgaaatttttcagtggctaactgaggaagagagtcgatctttatctcataagcagcagctaagagctgaggaagagatagcggacgtcttcctttacttgctccgaattgcagataaacttaatgttgatctggtaaaggctgcaaatgaaaagcttgctatcaatgctaagaaatatccagtagaagcgatttatgggagttctaagaaatacactgaactgtga

SEQ ID NO: 126436 - DNA, 864 bp, Enterobacter cloacae
atgatctgggtcatatacgtctctgataaaccacattcgaagaagaactttagaattgggctagatcagaaggtctggggtgttaaggaaacaaagaaagaaacaatcgaaaaggtatccgaaggcgatctggttgcattcgtttactccatttcttggttaaaggcagaaggcccaccgcctaagggtttctcgcgtgttagcaaaaatgacctagaaaaatttcgaggtgcagtccaaagcatcaccctggctaaagtcagtaaatcctattacacctctcgacaaaaggtgtggccagatgatgattatccacaccgctttgacttcgataatgtaactacatacggcacagatgttttttttggaaccgagttttttaatcctgattttgttgaggctgtacgatattcagcatgtacgcagggttcagtcacacaagcatcgagcatagaaaccatctcggacctttctttggtcaaggttgaagatacggaagaagcactgccagtaaccggtagtgaggggcggcctatactccggcttcatctttcccgagaacgagatccttctttagtaaagaaaaagaaacagtcggtgttcgaaaagactggaaaactggcatgtgaaatatgttcagttgacttcaaaaatacctatggcgaactaggccaaggatttgccgagtgccaccacaagagtcccttgagtttgcgtgacgacaaccaagaaacaaagcttgaagacctggctatagtttgcgcaaactgtcacaggatgcttcatcgccgccggccatggttaacgattgatggacttaagaaaatttatgaagagcaacgagctgaccaagcttcaacatga

SEQ ID NO: 126437 - DNA, 567 bp, Enterobacter cloacae
atgactacttactacacagcagacagatcaagacagttgcaaacaggcatggcactgcctctgtatcagttaccacaaaatttatacagtgcacacttagttcaggatatgtatgaccttagtgacctggagagcatgcttgcggatcagtacccatcagggatttcacttcacggtatgaggtatcttttaaataacgagaattacctgtacgacaatggtcgccctactacatacgttacatattcacctgcagtggaaataatttttgagaattttcgccgggcgcactttccagaaaggccatcgagattccaatgtgtgttcggttgcaaatctccagatgaaactctcagatttttcggagacactagcctacctgtcttcgaaatcagcacaactaaaagagtatttattgcagacgaaacttttctaaaaattggaccaaatcatctggcaacccatgccttagccaaaaagtactggtctggtgatgtttcaaccaccccaaggcttgaagtgatgattgaatgtgaggctcaagttggggccaaggtcaggaactaa

SEQ ID NO: 126438 - DNA, 369 bp, Enterobacter cloacae
atgtcatccttagtaatcgttttggataaagtcgtaaaagaagaggttgttagtaagtcactatctctttacgaatcaataaaagtgatttatggcgcactcacaaatgggtgcactggtatgcaaaagtgtgaatatttccttgagatatcgtactcagataccgaaaaggaaagggttgtatataaaacaaccaaaaaatatatgcccgcaggagaagaaaaattacttgaaggaacagaagatttgagggatgagaaaataatcatgcttgcacataaattatcatccaagggatataaactcgacgagtctcagcttgccctattcatgaacgacaaaattcatcgtttcattgcaaagaagtaa

SEQ ID NO: 126439 - DNA, 786 bp, Enterobacter cloacae
atgtacatttttgaattggtaaaaccgggcagccgtattaagtctgaagatagagagtttgcttggaaatttgagagcctgctaaggcatttggaaactgctttctatgacgcaaatatttcgttaaatttttttgagcatgaaagaaactctcaatcgcatcgcgatgcttcatcacacgaacagtggacaagtgatttccaaagacgacaaatcttagagcaacaggtacgtgaggagtttggttatcaaccttatgaaaatcaagatgttgtaaggtttgaagctgaagttcgattaaaaagagaaaagtggggacgcggtagtattcctttgaatcaccagcatcagtttatctttttgcatgctaaatcttttctgtatgcgatggatactatcgacaagtttctgaaagttttatccgaagaacctggttccccccacaaaattcgagatttacatgcccaaattggaaaagatttccctgatttacgagctgtaagaaattctgcccagcatcttgaagatagagctcgtggacttggcgcaggccgagtacctaaaccgttagaattaaaaccattagataatgggtttattaatgctcctcaaggtgcgctgatgcttaataacttattcggtaccaaatttggatgcaccatggcagatggacactatggtgaagttgatatatcggctgaatcattacataaattgcaattagtaattcaagaagttttcaattcttttgaatgggaaggtcctaaagatcaccttccaagataa

SEQ ID NO: 126440 - DNA, 783 bp, Enterobacter cloacae
atgaaactagaatcaacattaaaacacttcagccctcagggaatgcacatcagcgatagtgtaaaaagtacttctccggatcgcctcaacggcaccgatgtaatggtggccattggtaccaccagcagtcgtgcgcgattcggcttggctgccttcttcggtaaagcgggaatcagcaaaacggatgaacagctcgcagttcaagcgctggcgcgatatgcgatggatgtcgcaccgaagaatgttcgcaaagcagctggtgagcagtacggatggtgtatgcagatgctggcacaatttgcctttgctgattactcacgttctgcggctaccagcgtgacgtgtcacagttgcagtggtaccgggtttatctgcgagaatgaggatgtggttaaacatcctggtattttcgacgccgacggtgccgaagtggtggccccgaagattaaaaatgagttggtgaaaagggtttgcagaacatgcggagggaagaaagtgatccttgcccggtgcaggtgtggtggtaaaggcgaagtgttggaccgcaaagcgactaaagaccgcggcgcgccggttttcaaaacttgtgaacggtgctttggtaatggcttctctgctatctcctcggcgacggtacaccgtgccattctgaagcgtctcccggacctgcatcaatcctcatggtcgcgtaactggaaaccattctttgaaatgctggtggacacgctgcgccagggtgagcgtcacgctgctaaagaattcgagaaggcaacagcttgctaa

SEQ ID NO: 126441 - DNA, 138 bp, Enterobacter cloacae
atgaagccagaaacgcttgaggtaatccgcgcgcgctggcagcgccttcgaatttaccgctaccggggatcggtgctggtggattatcgcatcttccgtaattacatcagaattgaatcgaagcagaggggcacatga

SEQ ID NO: 126442 - DNA, 603 bp, Enterobacter cloacae
atggcgctagaattacaacttatcaaacaccactcaggaatactgatcccggctacgcccgagaccagcgatattctgcaatccaaaacccggctcggcgatgttcttgttgccgagttcaggcgggtacgtaaccctgcatttcaccggcgctttttcgcgcttctcaatctcggtttcgaatactgggaaccaaccggcggggctatttctagtaacgagcggaagctgattaccggctacgccaaattcctagcttcttatggcgggaatgagggcgcgctaatcgatgctgctgagcagtatcttgagcaggttgcttatcggcgcgtcacaaatggcattagcctgtgcaaatccttcgatgcttaccgctcatgggtgatcgtcgaggcagggcacttcgatgctattcagctacctgacggcacactcaaaaagcatcctcgcagcatttcattcgccaacatggacgagctcgaattccagcagctctataaagctgcgctcgatgtcctctggcgctgggtcctatcacgttcattccgcagctgtgacgaggccgaaaacgtcgccgcgcagctgcttggctttgcggggtga

SEQ ID NO: 126443 - DNA, 225 bp, Enterobacter cloacae
atgaaaatcgaactaaccattgatcgcatgaagaaacttcctgatggagctatatctgcgctcgagtcagaactgcttaaaagactcagcgaacagttcgatgaatgccagctgacaataaagcgagccagtactgatggtctgaccgtttttggaggcgacaagaaagaggtcgagcagatacttcaggagacctgggaaagcgcggacgagtggttttattaa

SEQ ID NO: 126444 - DNA, 675 bp, Enterobacter cloacae
atggataaagataccaagcctatttgttattattgtggtgagccagccactagtgttgagcatgttccgccaaaatgttttttcccagaaggccaacgagtagagctttttaccgttccgtcatgcaatgttcataataacaataaatcacatgatgatgaatatgtaaaggttgttctagcgacatccgcaaaagtcatgtttaagagtgttttaaaaccagtaattgataaaagctttagggctttggatagaagtcctggctttgcctctgcagtgttcaaaaatccagaaccagcagttatccagctttcagatggcaggcagtttatgagtaaatctcatgagattgaactggatagattttatagattttttgagtctttaggaagggcgttatatttccaccatgaaagaaagatatgggaaggcggcgtccagattgcacctcattttttattaaatgatacgccagaagaaaaagacctgcagatgcataatgaattgattgaactttttgatagagcaaattcctggggagagaataagaatattttctattataactttgtgactgtttattcagatgaaaagacaaaacgcattattctttatgttctgtccgtatgtttgtttgatgaatttgaagcttcaattatattagtcccatcttag

SEQ ID NO: 126445 - DNA, 219 bp, Enterobacter cloacae
atgaaattacgcatcacaagagcaatcggcctcatcaagttctcgccacgttgggttaaggttatctgtttacgattgactaaatacgaaattgagcgctccctcaacgcacttctggccacaattgatgaatatgagctctctacggagcaagtcaaagcattaagagaatgcgttgagagaattaacatcgcaaggggaaaggggatgaaggcatga

SEQ ID NO: 126446 - DNA, 654 bp, Enterobacter cloacae
ttgaactataagatagatggaataaccattcgttcagaaaatgcggccaagccgcatacaatgccatctggttatctttgcaattatattaaaaactctaaaaaaaatggcaaagcccttgatttcggatgtggaaaacttagatattcagaacaattagtaaataaatttaatgttgtgacttttcttgattcacgaaaacagcttgaaagagttcaaattattaggggtgtaaaaaccacaattccagaatatgtggctaataactataaaaattctaatgctgttccttttgaaaatgtagataaaataacagatcaatacgacttcatactctgcgccaacgtgctttccgcaattccatgtaaaaccacaatttacaaaatcatcagttccattagagagttgttaaagagtgatggcgaggcaatgattgttaatcaatacaaaagctcttatttcaagaagtatgaaactggaattaaacatttgcatggatatatataccaaaactttcgaaatgcttcctactatggtctgttggatgaaagggttgtgagtgaaatttgcttagaaaacaatttgtcaataatcaagtcatggagcaaagcaggcagttcatatgtaattgttggtaaaaataaagagatttag

SEQ ID NO: 126447 - DNA, 696 bp, Enterobacter cloacae
atgttagagccaccaaagagttataatgaaatgttgcctctgctacataaggcaacttttattacaacgtttatattttattttttattggttatttatggctacatcccattggttggcattaatgccaaatacattcctcccatcaaagactacgaagagtttattaaatggatcttaacattcggtatattgccaattgcattttcgattttttggtccgtgattagtggggccttagatcttcataataacgttgcaaaaattcttggaataagaaaggtctgggataaatatctaattattagaccattagccaaagttgcaggcgtgacgagagaattaactagtgatgaatcatataaggtaatgagtaaactgtattacccagaagtcaaagagttaaaagataaacattacgttgagcttttctggaataaagtttattacttttgggttttctttgaacatacagtaattgcatttattactgttttggtgattagtttcgctaaattaactgatttgttatctgttactggttctttgaataatctttggttgtgggttattttccttgtaatattcaaccttcttattttcttagcatctgtcaaaccaagaactgaaagtcaagtaagacagatatctgatgaaaaaataaaagaattctttaatgtcaataatattttttaa

SEQ ID NO: 126448 - DNA, 252 bp, Enterobacter cloacae
ttgcgccagcaggtagcacaggcggcgaagaatcacttcgaagaaattgagttttacggcctgctgccgtcctggtttgcgtgcgaaatcaatcattctcaccctcgtttgccttatcgccggccagcggaacgtttaaacctgatgcgcgttaatctctccacctcatccgactattcgtatgccgtcggcggctacttcgtgggctccatgcctgggtggttcgtagtgcgtcttggtgagttagattaa

SEQ ID NO: 126449 - DNA, 2919 bp, Enterobacter cloacae
atggaatttttctatgtagttaaggctacgcagaaatctggcaaagaagacgcagtgatttggttcactgcgaaatctgaagcccgtgccaacctgcagctcgatgttgagctggaagatgcttgtattgaaaccggacgcggtaaggattacgccaaacctgttcgcaccaatttccctgtttacaacgatctgcctgaagaaagcacagtggattacacctggtgcaaacgctacgaactgcaggacgatggacgcacctggctgccaaaggctgttgctgagtctactggagccatggacaacaccgcggcaccggaaacgtccgttaatgtcgaaactaccgtcgagagtgtcccgcttgaaaaccgcactccagcggtccggtttgccgtccacctaaccggcgacaaataccagtcacacatcactaaagagcagcagttggctgccagcgaaatgtcactggatgaaggcaacacctatctccagaacctgctgctggcgaagaacgacatccctgaagttgccgatctcagcctgaacgctgagtggaaactggtccaggcgattaagcaggtattcgcgccagatgaagcgcacgaagctgaagttatcgctgcattcatggctgattgggcgagagcagatgtcggagaccgcaatcagttaattgaagagtggagaagcggaaagcttgctcttctcaaatcagaaaacaccagcgacgccaatgttacagccgatcaggttccagaattcgaaaacggtattcagattgacgagaatgatgacgaaaccactcgttatccagtcgttcgtatgccgttccggaagcagctactcgcccagtttaccgccgacgaactgcgtcaccacttaacccgcgaagaatacgaaggtatcagcgcgatggagatggacactgacaacagctatgtccagaacctgctactagcggctgagaactgcgaagaggttaagggttacgataccaaagacctgtggcgctataccgatgctattcgcaaagtgttcagccaggataagcgtcacgaactcgctttggttctccgattcacccaaatctgggcggagactgattacattgaccgtggcgttctggttcgcgaatgggctaccggaaaccgcatcggtaatattcagcgcactgattctggtaccaatgcagacggtggctatgtaacggatcgcggcgaaggcgcgcatcacactctggacacactcgatcttgagatcgcatgtgccctactgcctatggacttccaccacttcgaaattccttcgagcgtgttacgacgtgccaaagaaatcgtggcgaagaaagaagaaccatggaaatcatggagcgccatcctgcgtaatcagcccggcatactggcggtgaaccgtgcggcaatcttcaatctgatccgtatcgcaccagagaacatccaccacacgccagcggctcatcttgagtttgtgaataaaaccatgacggctgagtttaactctgctgtggagttactgccgttaccagctcctgctgttgagaccgaagcccaagttgaacaaccgaaggttgcaaatctcggcagcggcatgttctccatcgatggtctgattggtggaaataacgatccgcgcatcaataccacctcaaatgaagtcgaaaaaacggaaaacacagctgagaccgacagcgatgtgcagatggaagcggctaagccagagaaagacgaagatgttggttcggtacaaccaggcgaaggcgctgatgcagctaatacgcagacagattccgtagcgttggaagaacagcaagcagaaccggtaattgaatacccggcttacttcgagcctggccgctacgaaggcctaccgaatgacgtttatcacgcagcaaacggtattagctcaacccaggtgaaagatgcccgcgtcagcctgatgtacttcaacgcacgccatgtggctaaaaccatcccgcgaacaacatccaaagtgctggacatggggaacctggtgcacgcccttgcactgcagccggaaaacctcgaagcagagttcagcgtagaacctgagatcccggagggtgctttcaccaccaccgcaactatgcgcgagttcatcgacgcgtacaacgccagcctgccggcgctgctaagcgctgaagagattaaagctttgcttgaagaacataacgcatcccttcccgctcaagtgccgcttggcgccagcctggaagaaacggctcaaagctatatggctcttcctgctgagtaccagcgtattgaagaaggccagaagcagacagcaacggcaatgaaggcatgcattaaagagtacaacgccaccctacccgtgccggttaaaaccagcggcagccgtgatgcgctactcgagcaattagcgattatcaaacctgatctggtggcgcaggaatcgcagaaaccgatgccgctgaaagtgtccggcaccaaagcagacatgatccaggcggttaaatcagttaagcccgatgccgtgttcgcagacgagctgctggatgcctggcgcgacaaccctggcgaaaagattctggttacccgccagcagcttgccacagcgcgggcaattcagtctgcactactggcacacccgaccgcgggcatgctgctgacacatccaagccgcggcgtagaagtgagctacttcggtttcgacgacgaaaccggattagaagtgcgtgtacgccctgacctcgagattgaactggacggcgtgcgcatcggtgctgacctgaaaaccatcagcatgtggaatgtgaagcaggaaagcctgcgcgccaggctgcaccgggaaatcattgatcgggactaccacctcagtgcggctatgtattgcgagaccgcggcgctggaccagttcttctga

SEQ ID NO: 126450 - DNA, 141 bp, Enterobacter cloacae
atgggaaaaacagaaataatactcaccataattattttattcgttattatatttggcttctggtttattttcagcggtgagatctggtttctggtggaataccttgagaacagtatctaccccaccttcgatgcgctatga

SEQ ID NO: 126451 - DNA, 177 bp, Enterobacter cloacae
atggcgttaagagagatgcaacgtattatattgggcgctacaacgtttgcttttgagaatagaagtccgctctccctgtggcgttcaactcatcgtcacaggaagattggcgtgtttatcgtgctctctaaataccagaatcatttctggcgggggagcgaccggaaagagcagtag

SEQ ID NO: 126452 - DNA, 207 bp, Enterobacter cloacae
atgaatcaaattcttccgtcagtgtgtattactgctgtgcttgccggatgtgttccccttacccctaaacgctgtcacaaacaacgtgcccccgatgcctgtacttataagcattccggtaaagtctcggataacaatatccacgggccacaggcctgcgccattgagcaatcactggacgccgcactgaccgatcctcacgcatga

SEQ ID NO: 126453 - DNA, 843 bp, Enterobacter cloacae
atgcaatcactacaacgtaaagttctgcgcaccatctgtcccgatcaaaaagggctgatcgcacgaattaccaacatttgttacaagcatgaactgaatatcgtgcagaacaacgagttcgttgaccaccgtaccggacgcttctttatgcgtaccgaactcgaagggattttcaacgacaccaccctgcttgccgatctcgacagcgcgctgcctgaaggctccgtgcgtgaactgacacccgcaggccgtcgtcgcgtggttattcttgtgacgaaagaagcccactgtcttggcgatctattgatgaaagcaaactacggtggcctcgatgttgaaatcgctgccgttatcggtaaccacgagacgctgcgcacgctggttgaacgttttgatattccgtttgagctggtcagccatgaaggccatacccgtgaagaacatgacaacctgatggccaatgctatcgaagcgcataacccggattacgtggtactggcgaaatacatgcgtgtgctgaccccatccttcgtggcacgtttcccgaacaagatcatcaacatccatcactcattcctgccagcctttatcggtgcacgtccttatcaccaggcgtacgaacgcggtgtgaaaatcatcggcgccaccgcgcactacgtgaatgacaacctggacgaaggcccaatcattatgcaggacgtgattcacgtggatcacacctataccgcagaagatatgatgcgcgccgggcgtgacgtagagaagaacgtactcagtcgtgcgctttatcaggtgctggcgcaacgtgtgttcgtttacggtaacagaacgattattctttaa

SEQ ID NO: 126454 - DNA, 897 bp, Enterobacter cloacae
atgggtgatgtgcaaaaaggcgtctggcagatgagcctggcgatgttaatttccggctcgattggcgcgtttgttctgctttccggcctgccggtgacggaagtggttttctggcgatgcctgatcggggcgatggccctttttattttcatccgaataagtcgaaaaccatttagtcaactcacccgtttcacgctactgctggcaattctgggcggtgttgcgttagtggtgaactggttgctgctgttcgcggcttatgaacgtatttcaatcggcctttctaccgtggtttataacactcagccgtttatgctggtattgatggggatgtttttaggtgaacgcgtgagcctggtgaaatggggttggctcgttctagcctttggcggcgtggtcatcctgctctccagtgagctgaatggcgcacagggcgaaggctggctcgcaggaatcggtctggcgatgggggccgctttcttctacgcactgacagccataatcgcccgcagacttaaatcagttgcgccccagcatatcgcctttattcaggtactgaccggcgtggtcatgctgttgcccttcgcccaccagccggcattttcagctgatttcccatggccgattttactgacggtaggtgtcgtccataccgggatcatgtatcagttgctgtatagcgcgatccagaagctcccgacgcccgttaccggttctctgtcttttatctatcccgtggtggccataattgtcgataacgtggtgttcggacactcgctgaatatcacgcaactggcagggggtgcattgatactgtttgcggcggcaggtaataacctgggctggggcgagaaaaaaacccgcgagtgcggggttgggatcaaatcagcaaattag

SEQ ID NO: 126455 - DNA, 1233 bp, Enterobacter cloacae
atgtcagcgatttataaatcaaatacggaaatagagtctgatatgcaacgcttgtttgatctgattcctgacaacgtcacgcgaattgatttgttggccccgccattttccggacatttgcatcccgtgctggcaatggggagggcgctttcagcgcattatcaggtccggattatcagtactcgcggtgccagcgcgcggattgcagcgtccggactgcaaggactcattcttgacggcgatttcgatacaccgttagtgtctatcgccaatccaaaatatgccgtcaagacgcatcctgtgaggctttatcgtcagtttcgttcagtcgtgggcctgcttaagggttttgctgacgaacttgagagggcgtggcatcgggaaggcgtgccggatttggccattgccgactttacacttcccgtcgtggggcctgtctgtacccggatgaatgttctctggtggagtagcttgccgtcgccctgcgttcttgaagcgccggacggcccacccgcttattgtggtgggctgatgccggccatcaccgcgtgggaacggataagccacctgatccacaggaaaaaagtcaggttgttcaagagtcttgttttttggttttttcgcggtgtgattcgtcagacgggcataacccggctatatcggcctgacggcagtgaaacggcatattcacccttgcgcattcttgctctgggcgaaaaagagatggaatttgagcggacctggcctgaatcggtagcctttattggacctgcgctgtacacaccgcctgcagatggagagaaaccgaccttcattgaaggaaagcggcatgtcctgattacgctgggtacacatctggactggcataaagatgacgtagcgaaagcggcaacagctctggcgaaaacgatgccagactgggtgttccatttcacggatggcagcctggaaagtgcggaatgtgagcgggcagggaatttcttacgtatgcattgggttgattatgatgcctggttatctcgttacgatgtcgtgattcaccacggcggggcggggattatgtggcactgtattcaaaaagggatcccggccctggtgtacccggttgactacgatcagttcgatcatgccgctcgggtcgagtttttcagaaaaggtatctggctgcgcggcggactcaggcaacttgaacaggctcgtgaacatctcctcacgttaatccgcaaggattag

SEQ ID NO: 126456 - DNA, 552 bp, Enterobacter cloacae
atgcgacttaatatcgcttttatcacgggaagaagccgtcccggcaaccttgcgctcagcccggtgcagagtttgttcctccagtctttgctgacggagggggccatgcctgtcactgaaaatttcccctggatacctcaaacccagccatggtgtgatacgggtttattgcgtgcaagttgcagcaatgcgcgggactacctcacttctcgcagggcagcgtttggcgagcgctatcgaaacattgcgatcgcgttgctggaatcggcggatcacacgctgttactttccggaagctgtggattggaactctttaataatcttcacctgccgtcctcagtcctgtctcgcgtgagtatttttgcttacggccccgtggctcgtcagcgtcctgactgccatcatcttttggttcaggggcagcaagactggatttctcgcctttggtttcaccaggcggacgagcgcataccctgcggtcatatggactatctctcgcagccggagctggtctgtttatgtcagcgatttataaatcaaatacggaaatag

SEQ ID NO: 126457 - DNA, 1125 bp, Enterobacter cloacae
gtgttaattatcgcaatagcatggctggccattctgcttttcaaagtctgtatcacgcagaaaatgcttacagccacaagggataacatctctcgctctttcagcgacattacggtcatgcaacccatactcagcggtgatcctgcattagagacggtgttggccgcgagtcttcaaaatttgcctggcgcaacgtttctttggctgactgacgtggacgacgcggaggccgcaagggtaacgcagcggttgcaggcgcgttaccctcagagcgctattcatatctgcgcataccctgaagcgccggaagggataaatccaaagttatataagcttgagcaaggaagaaagcaggttaacaccctgacggtcctgattttagatgacgatgcggtactgacggcgacatcgctgaacacgatgcttgccgcgcttgatgatcattcgcttgtcaccgcgctaccctggtatgtggctaccgacaacttaccgtcgcgactgctggcacaatttgttaatgataactcagcgctgacgtatctgccgttgctgccttttgtcagaccgttaacgctaaatggcatgtgctacctgttacctttacgtgtgctggaaaacgtggggggattttcgcccatccttcgacatctgaccgatgatctcgcgctggcaacgcttcttactcagcaaggggtaaacatcgtacagtctgtcgcgccagtgagcgtacaaaccagcgtacctgacgtcagacggtattttcgtcagatgcaccgctggtttttgttcgccacattgttgatgcgtgagaagccggccggtacgaatctggcaatctttcttcttcagggtttacatccgttactgctttgggcgatggtggtgctcgcattcagtggggggataaattgcgtgttactggcggtggtccttctcgttcgccacgttgccttgcgccgtatacagcgtttagtgtcagagactatttccgcaaggccggtgatgtcggtgttatcagagctgttgcagcctgtgcatttaattcatgccttgttcaaccggaatattcactggcgttcgcgtcgctatcgcgttttcagtaatgaccgcttcagctcattgtga

SEQ ID NO: 126458 - DNA, 969 bp, Enterobacter cloacae
gtgaagattatggtaaccggagcatcgggtttcattggcggggcttttatccggcgttttgctgatactgacggcgtttcgctgtgcggcgtcgggcgccgtgaacatgtcgcgttgcccgcatcagttgagtatttcgcacttgggttagaccagcttcatacgcttgatgtcgtacccgatgtggttattcacgcggcaggaaggacttcgccctggggtagtgagcacgattattaccgggataacgttgagacgacccggcatgttatcgatttttgccgtcatcgtggctttccacgactcatatttatttcaagcgcggcggtttattaccgttttgcgcaccagccaggactgcgtgaatgtgatgctatcggccccgaatttagcagccaatatgggcgcacaaaacgtcaggcagagtgccttgttgagacgtatcagggtgagaaaaccatttttcgcccttgtgccgtatttggtgaaggcgatcgcttgctcttaccgcctctgttggctgcggctaaaaaaggaaagctgccctctatccttagccgcggtgtaaaagtgcaggccgacattatgcacgtcgatgtgctaggggattacctgatgcgtgccgtgaaacgcagtcatctccgcccgtgctataacatctccgccagtcaatctgtcgaaatccatcggctgttatgtgacgtcttgcagcagttgggtttgcctcaaccgcataaaaccgtgcgcctgggaacagcgatgtgttttgctggcatacttgagaggctgtggcgctggctgccgttgccgggagaaccgccgattacccgttttggcgttgccgtctttggctacactaacaccctgaatgttacgcgtatgctggatgactttggtccaccatcaatggattttgacgtcagtctgcgtacgtttttacaacaactcaaggaagagcgcctgtgttaa

SEQ ID NO: 126459 - DNA, 1113 bp, Enterobacter cloacae
gtgaaccagtttaatcctgacaagcggttgacctttcccgccgatccccccaggctggttgcagcacttcacagcgaaacacgcgcgttgttaacagaacggggcgatcatcgctatgcagatggccgaatgctggttaaaacagtgatgctggctggcggctgtattggaagttatgcgttagcgcttcatcagagtgacctgcccctgtatttttcatggtattttgccgccatcgttttcgcgatgttgctgaccgtgaacgtcgtgcatgatgcgtctcataatgcctttctgaaaagtaaaaaagctaacgcgtgggtaaaccgtattgtcgctatccctctcggcctggatcccgattgctggcgcgttcgccatgtcagatttcatcatggattcaccaacatagaatgttacgatccggacaccgcagaaaatggtcttatgcgccagacaccctggcagcgctggcgcccctttatgcgggcgcagcgctactactggccgttggtcgccgcattaaccttcccctggtatatctggattgttgactggctcgacagagggggatataccccggtgacgcctcatctggcgcagcagggtattatcggctggacgttttttttgacgggtaaagccttgcacgcagcgttcagcctcgtgttacccatgtggttgttggccgacagatttagcgccggttcaattttgttgacctatatgctctgtcagatgatctcttctctgatattcgtcatgctcgtcatcgggacgcactgggcaaagggcagcgctcagctcccccctgacgggggcaaaatggctcaaggcaggctttcccatacctttgcaacgacctttgactggtcgacacggcccgcgttcatgggttattggctgggcggcctcaatcttcatctgactcaccatcttttcccgcactggagtcatcgccattatcctcagttgagccgaatcatcgaggatgtcgccgcgcgagaagggctggattatcgacgactcaccctcgccgatttaatgtctctccagcagcgttttctcaggcgcatgggtgaacgccctgagcgacacggagaatggtcgtga

SEQ ID NO: 126460 - DNA, 1128 bp, Enterobacter cloacae
gtgagtgaactcctgtttcccgttctttttatgctgtttttcgtgtgtgctgaggcctgtattcttcagttcacacggcggcagaatattgactggctcgatatcattttcaatctcaattccgggcacattatgctgtggtttttccggtgcctggaggtgctttgctacggatttgtgctggaacactttagcctgaatctttttgagggatggtctgccgtcggggtatggctctttacattgttagcatgggacgttggtttctactggcttcatcgtctccatcaccagcttcggctactgtgggctgttcacgttgttcaccatcagggggagaactataacctgtcgctgggggtgcgaaattcctggtactcgtcattaacgtcaatccctttctttttggtgttagcgctggctggcgtaccgctgagtgtctttctggcggtttccatcgtgcattacagcattcagttttttaaccataacgcattaacgccaacgctggggtggctggaaaaggtatttgttaccccgacacatcatcgcgttcatcaccttaataataagcgctatgccgacaccaactacggcggcacctttattttctgggataaattattcggtacgttctgcgagatgccctcgcaggagaagtcgacctatggggtaaaaggcaggaagccatcgttaaacccgatgcaggaaagtaatctgccttttttgcaaatggcaggtattttgaaaacggttcgcctccgacatcgccagtttgactgttcgatattaatgacaggtgtcggggctattctgttgtttgcgctcgttctgggctacatccagcgctacggatacagtatagataacgtgggcgctgcgcagtccctgttgtttatattgctggcagctggctctgtcgcattgggtgggatcagcgagggtcagcgctggggagtgatgatgtggtgtctggtcacgctctctttaccgctgcttttcttgggttactggggctggaatcacgtctattgggttgcagttatggcggccctggccgcacacggtattgcactcacctatggccttgggcgcaggacaaaaagggggataagtgaaccagtttaa

SEQ ID NO: 126461 - DNA, 618 bp, Enterobacter cloacae
atgagtgagtttctgcaacgcctcaagcagatgctattggggtgggggtcggtcggggtcgtttattcgctttgcgacaggttccagggtgaaggttatcgtttaaccccactacgggttgacgcgttaattcccttttcgcctgatgcggtgtggctctacttgtcctttttcttgattgtcccgttgggatatttattaacgccgtatgaccgagtgcggtggcttgcccggtccatgcaattttcggcgctgggggctggcatcatatatctgttatggccgaccaccatggtgtatcccacgctggcaggagagggtgtttcttccagaatattaggatggttggtctctgtcgattcccgtcaaaattgctttccctctttgcacgctgcgctgacggcactcgccgtctgggcgatagcggcagggcgtttacgctggatggcggttgcaagcgtcatctgggcgtgtgctattgcttactctatccttcagctgagaaggcatctgtttattgatttaatggcgggtgttttgctggcaggggccagtgtatggctggcagggcatctggacgtgcgcagacaaaaatataaaggaatacccggtgagtga

SEQ ID NO: 126462 - DNA, 1287 bp, Enterobacter cloacae
gtgaacctcattatgttgatgtggcgctatttctgcacccgcagacggcgttttaccgaacgtgaaaaactggagagatggcaggaaaaaaaactgcatcgcttcaggcggaacgtgttatcgaaaagcccatggtttcaacgatttctagcggtgccgttcggacagtggccgctgatggacaaggcgctgatgatgacgcatttcgatgagatgaacactgaaagtcttaaacgtgacgcgctgatggcctgcgcgctgaaaagtgaacagagccgggacttcagtccgaaaataggccgatttagcgtgggcctgtcatcaggtacttccggcagacgcgggttatttgttgtcagtccgaaggagcagcaaatttgggctgcagggatgcttgccagggccttaccggacggtctttttgcccgggaacgggttgcactgtttctgagggcaaataataacctttaccagagtgtgagcagccgctggttgagcctggaattttacgatttactggcgccgtttcagccgcaattgcgccatgtacaacagttttccccgacgatcattgttgcccccgcacaggtattacgtgcgctggcgctggcggtactggacggaacgctgcggctgaatgtcaaaaaggtgatttctgtcgccgaagttctggaggaacaggacagggcacttatccaccagatatttggtagcgtgggtgaaatctaccaggcaacagagggttttttagcttcaacctgttcttttgggacgttacatctgaacgaggagtttattcacgtcgagccccactggctggatgagaagcgctttacgcctgttatcaccgatttcacccgcagcacgcagcccatcgtccgttaccgccttgatgacatactggttgcccgcgaggcgcggtgcccgtgtggaagtgcggcgcgcgcgattgagcgtattgagggtcgacaggacgatcaactccttctcccggatagcacgggcaaaccgcaggttatttttgccgacccctgcagccgcgtgctggccgtcacgctcccacttaccgcagactatcgcctggtacaaacagaagcagagagactgtgtcttaccgcggattgtgacgcagcaatacttcctcactgccgcgacgcgctgaatgagctgtttacgttacagggaatagacacttcccggctggtatgggtgctgcagtcccgaagcgtatcaccgaactttgacgcaaaacgacggcgtatagtccgtgaatggggaaaagaatga

SEQ ID NO: 126463 - DNA, 807 bp, Enterobacter cloacae
atggcaaagattaccgcgtttgaaacaggatattgcacccatatcggctgcatggctctaaaaggcgctggtctcagggtgtgcaaatttccctctcgagcctggctcctggaagtcggttcacaccgatggctatgggataccggctattcctcctggtttgaacactacacgcgctcgggcatttttcgcatttaccggcaagtcacgccggtctatttcgacctcaaacagtccctggctcaacagctttacgcacaaggcctggtcgggggcgatatcgatgcgattatcttgtcgcacttccatgccgatcacgtcgcagggctgcgtgatttccccgatgttagctgtatttgttctggtgagggctggcagcaggtgagagcgctgagaggatttgccgccctgcgtcaggcatttgtgccaggacttttcccctctgagtttgagtcgtcattgcgcttcattgaaggtttcgaaaccctgaggctgcccgaggcgcttgctccgtttgagcggggctatgttttgccggacagtcagggcgaaattattttgatcccgcttgcaggccatgcggccggacacttcggggcattcgtcctgacagaggacggctggacacttttggccgcagatgcggcctggtctcctgacaattaccgggagatgcgcggtccttcacggcttgccagtctggtgatgtccgatccctctgcttattaccagacgctccggcaactcaatcaactctggaaaaacggtaaagtggatattcgtctgtgtcatgagggcgatttgtga

SEQ ID NO: 126464 - DNA, 1017 bp, Enterobacter cloacae
atgaagatcctggtgacaggggcaaccagcgggctggggcgtaacgctgtccactatttgctggaacgtggctttagcgtagtggcgacggggcgtaatcaggtcgaaggtgcacatttaaagcatgtgggcgcgacgtttatccctctcgacttgtccctggcgtctctggaccaatgcgccaggctcatggaggggtgcgatgccgtgtggcactgcgcagcgaaatcttctccgtggggagggcgggacgctttctggcaggctaacgtcattgcaacaaaaaaactggcgatggctgctggcaccgcgggcattccgcgttttgtccacatttctacccctgcggtctacttcgattttcaacatcactacgatcttccggaaacctacctggcgaacacattttccagccactatgccagcagcaaacgtgcagccgaacgcatcattgaagatgcggtggcaaacttcagcgcgacaacgttcatcattttgcgcccgcgtgggcttttcggtccccatgataaggtgatcgttcctcgcctgctgcgtcagctccatcaggacggaggggtactgctcctgcccaggggaggagaagcgcttctggatttgaccttcgtacaaaacgtggtctttgctatggaacgtgcaaccttgggccagcttctttattccggcagcatctataacgtgaccaatcaccagccggagcggctggttgatatgcttgacgcgttgctgcgtcagcagctggggttacgctatcagatccggtcaattccctggccggtggtgtcactggccgcgcgtggcatggaattagtcggaaagtgcatcaataaggaacctcccgtcacccgttacagtgcgggaacggtttgtttcgatatgacgctgagcgctaaaaaagccgtagaggagttgggctatacccctcgcttttcaatggcagaaggcatcgcgctaacgggagaatggctgaggacgaatggcaaagattaccgcgtttga

SEQ ID NO: 126465 - DNA, 1008 bp, Enterobacter cloacae
gtgggtcaatcaacagagccggaaatttcggccgcaataaaaattatctcaacaggcattgccttgcctgctgaaagactgacatccagcgatctggattcatggttaggaaaaccgcctggctacgttgaaaatcggtccggtattcttacccgctaccacgcttctcacaccgccagccaggccgggttggccgcacaggcgctacataacgcgctacatgccggaatgatatcacctgcttccatagacctgttgatttgtgcatcggctattgccatacaagcgcttccctgcagtgcggttcatattatcaaggcggcgggtatgcccgcgggtatggcagggtttgatattaacagcagctgtgtcagctttatttccgctttagaagttgccgcaggtttattgaatacaggcgcatatcgtcgcatcgccattgtttcagctgatttagcatcgcgcggcattgactggagtcacgaagagtcttcgttgattttcggtgatggtgcggcgtgtgcgatcgtggagcgtggtgacggcaacagcgggattatcaccagcctaatcgagatgtacccggatggcagcgaactctgtgaaatccgtgcgggaggaacgcgtcgcaaccccagagcgggcatgagcgacagtgattttatgttccatatgcagggtaaggcgctgttccggtatgcctcttcgctgattgatgactacttcgcgcggctgctgggaaaatgcggtctgcaactgtcggatatcggtaccgtcattccgcatcaggccagccatctttctcttgaacacatgcgtaagcggctgggcgtccctgaatccatcttaattgatgtttaccgtcactacggcaaccaggtggccgcctccatccctacggcgctgcatgaagcggtaacccatggtcgtttcacgccgggaaaacccgcgatgcttattggtactgcagcaggcctgacgctggctggcatggtacttatgccatga

SEQ ID NO: 126466 - DNA, 3303 bp, Enterobacter cloacae
atgggtaagagtttaggcggcttttttggagccattgtaacggcggtagtagttgctgctgcggtttattttagtggaggtactgctttagctgcggttggttggggtgctgctgctggtgctgtttcacttgtagctacatctatgctagctcaagtaggggtaacgggttatggggatgtatcggatagtctaagccgttcaacaagccctacaaccggattaccagtaatatacggtggacagtacccacataaaaacggtacatcaggcggttcattcgtactaactggtagtattgtaacctggtataacgtacagaataatgaatcacagtatttgttttcagaacaaactgtagcttatgctggtactgaaaaacatattgaacaaatttatattgataatgagcctgtactatcagccccaattacacaagatggtattgtaccgaaaacttcaatttctggtaagtatgcggattatcttcaattggaagtacgctttggtggtgattatacaagtactaaatccctagctactcaatatgctggtccgaaatggaataataaatttcttggtaaaggtgttgttagtatcagtactgttatcaagaaaactcaaaaatcacttgaaaataacattctagttaatgatcagtttgctttaacttgtgaactgaaaggacaggtgatctatgatttcgtagatggtgaatatcgtgcttcaagtaatccaccttcaattatatatgattatctaactaatacaacatatggtagaggtattagccctgaactaattaatactgatacattcgcagaagcggcggcatattgtgacgcttttgaattgtatgctaatggggcaattagttatcaaagtactttcatggaaaacattgaaaatatttgtcagagttttggcggtattatgtatgtacacgctggacaaatctgtattaccactgatcgtaaaactgtatctgtagcgtcatttaatgagcgtaatatggttggttcggtacagattagtacttcaggtggtactgactactttaatacagtagattgtaagtatactaatcctgaatcaatgtacactactgatgtagtacgtattccatctgatattaccattgatgaagctatccaacatgatgggcaagtaatcgctctatcacgtgattactcttggagttatgatccagaagttattgctaaaatggctaacgttgatgtactaaaggcaaaatatgctctacgtactgtaacctttactacatcagaaggatgggatctaaaaatatgggatgctatcaatataagtaatgatgaatttgatatatcaggtaaatttaaaatactaaacaaagatatcagtactgatcaagagaacattggttacgttactattactgcggtggaagcaccagatcagatgtatgatggcgttgatccaggtatctggtcgcctggtggcgttattcaattccctgaactaacagtacttccaccttctaacctacaggctgttaagaaaggtaatactactgctggttcgattgtcaatctaacgtgggatgcttcaccagatccatacctacgtggttattatgtttattatcgcttgaatggttctagtacttggacatatgcgggtagtactggtgtacagaaaacaagttatgaactatttggattaactgatactggttcatatgatttagcagtggaagcattcaataacttgggtttagtatcggtcaagctatcgttacttggacttgtaccaacatataactttgctctacctgctgtaactggtgtagtactcgcaaataaaacagaatcagcacttgttactgatgcccctgattttaatatacgttgggattcgcaaaagaatatacaggttaatggacgttcatttagtgagtactttaaatattatgttattaacatctataatggtactaccttagttgatacattctatacacaaagtaatacattcaatttaactcttgctttaaacagattgaaagtacgtaaacctaccattggaattatcgcacaaggctttaacaatggtacatactcacaggaagttaaaataaccgtagagaacaaacaggcaggtttagtaactggtgttagctttactggtggttttggtaatctatttgcctcatggactaaatcaactgaacgcgattatgctggtgctgttatcagtattgtttccggtacaactacaaggctttacacaagttacgcccctgaatttgacagtatacctaatattactgatggtacatatcaagttaaaatgggattctttgatgtttttggtactgataatattcaatatagcccagtacagacaatcagcattaactctaagtatcaatttacacaagaagatgctgatgctattaatggtattcttgatttagatgatcgtctaactgatacgttaaatgatgctgtaaatattgccaattcaaatacaagtactgtaattagtcaatcagaagcacgtacagatgataaaatttcagcaagtgaacaaacattaagtactcaaattgctggtgttaatagttcactatcacaacgtttaactactgtagaaagtacagcaaatggaaacaaatcaagtattcaaactttatcgcaaacagtaacagataataacactgctcaaacacaatccgtaacacaattacgcagtgatgttaatggacagatagcaacggttaaccaacaaatgagtactaaagcaacggcaagtactgtagattctcaatactcactttctgttaatgctaatggtactgtagctggaattcgtctagttgcttcacaaggtgcgagtaataacagtgctatatattttgctgctgataagtttattgttagtggtactagtgctgctactgtaggtggtactgctccatttgcgattgttaacggtactacatatttgaaaaccgcaatgatccaggcggcaagtatcggtactgcctatattgccaatggtgctattacttcagctaagatcgccaatgctcaaatcaacaatgctcacattatagatggttctattgattctgcttcaatcgcaaatactatacagagtactaactatgtagcaaatacttcaggttggcagattaacaaggctggtactattttgataaatggtagtggtggtactggtagaatggtaatcagtaataacataattcagatatatgataacaataacgtgttacgtgtacgtatgggattatggtaa

SEQ ID NO: 126467 - DNA, 135 bp, Enterobacter cloacae
atgaatatcaaacaatctaccaattacaattataaaagtacgaaagtttcacctacacgcgttgtcattactgaaaaacatattgaagtatacgattcagaagggaagctaagagtacgcatgaataaggattaa

SEQ ID NO: 126468 - DNA, 657 bp, Enterobacter cloacae
atgtcaggatttgaagtatataattcagcgggtgctttaaccatagacagtactaacaaatcaatcatgactggtggtgtaaaagctatgggtacattaatcgatcagggttactacactggtattacttgtgcctttggtaatggtggtgctcttggtttcttgaatagtaatgtaattgttaatagaaacactacacagtattggttccaactacaaacagacggtgcctggtgttttcctggtgcttatctctttatgcctaattctggtcgattcatgacaagcacacatacagctacgcctacttctggttatctggatgtattcaatgcttccggtactcttatatggtctgctgctagtgctgctactatgccccgtatagttgggttcttatcggcgggtgctggcgtagatctatctagtgtagttacggttacttctccggttgctaatccgtggttttgttggtcacaatgtccaggtaacgtatctgatgatggaacagtattaggttattcaggtttagtaattaaacgtaattcaagcacatcatttagttttcagtacattaataaactacaaagatcatatactcaggcaatgggtaataatggtattcaaatagcattagctacgtttactggtttttaa

SEQ ID NO: 126469 - DNA, 273 bp, Enterobacter cloacae
atggatattggtaatattttggcacttgttatttctggttgtgtattcttatatactatcttccgtgataatacaaaagatacagatgatctacttactcgtgttagtgaacttgaaactaaacaggcggtacaggaatcaagtattgatcgtattgaatcggatcaagataaaatgagggattcactagctaaactggaagcacagatccatgatttagatgtgaagattgaaaagattattacaattcttgaacagaagcagaaacaataa

SEQ ID NO: 126470 - DNA, 450 bp, Enterobacter cloacae
atgagtgatttaaaaacgagattaaaagaatatgaaggtactaaagcgtaccaggcaaaattaaagtactatcgaaatgaaaaattttatccatatgctgattcattaggttttcaaactatcggttacggtcatttgattacacgaggtgaaagctatccagacggtattacagaagtacaggcagaagaattactagatcatgacattatgatcgcacaacataacctagatactctcgatatctggcttcctaatgattggcgtgactttatggtaattatgattttccaattaggtttagctggtgtatgtaagtttaaacttatgctaaaagcactaaaggaaaagaactaccctgaagcaattaaacaggctaaaaattcccgttggtatcaacaaacaccaaaccgagtagatcaaatgatcgccgcattaactaacaagtaa

SEQ ID NO: 126471 - DNA, 447 bp, Enterobacter cloacae
atggatattcagatcccccaacaatgggaatttacagaagattgggataaacgtactttaactaatggtgattacgttgggtttgtttatctatttcaatttgaagatggtagtacatacgtaggttcaaaacagatgtataaaagaataaaagaggttaagaaactcaaagctacttcagaaagtaacaattgggaaaactatacaagtagttcaaagatagttaatcaaaaaatagcagatggtgaaaagtactgtaaaactattctatatgctttccctactatgcgtgaaacactactagtagaatccattttgatactacatgaaatgttaaaaccaaattgtttaaacctcgcaatgatgactaagatcagatcacctaatgctaaagataagaaacatcttttaggcatagtacaagagctattggaatatttgaggtaa

SEQ ID NO: 126472 - DNA, 579 bp, Enterobacter cloacae
atggcaagcagaataaacgggataggtaacactaaaacctatataaacaaacagggaacagcactaaagaaacagtttcaagaagagatcataaaaaggtcacgtgtcctatcccaaaaagtacaagcagatttaaataacgcagtagataaaggtgctgtagcattcacacagcgatcaatactatacatgttccgtaaaggtggtactacaagtgtacgctgtacaatcttagtaaaaagtattcaggcaaagtatctgtatgaagtcattgtagatccaaaagcacttgataagtttatacctaccagtactgctaaactaactaaacagggtaacatttctggtttgaaaaagaatctttcaaatggtcgttataaagtagttaaaggaaaaaatggcaaagaacgcctaatagatactagtaaaagagatactaagagaaaaactaaacgtgtaattggtttacgtgaagaaaagaaacgtaaaatgatttatgatttctatggtgaagttgataaaggttttcgtgtagtcatatcagatctacgtggtatctttgtaatcaaaaggaattga

SEQ ID NO: 126473 - DNA, 312 bp, Enterobacter cloacae
atgtattttgaagaacattatgaagaactaacaagtgaaattagattagatggtgttacacctgatgctaattcaatgccaatgaataaaatgtttcttggtaaaaagtttcaaaagatcattaagaatagtactcacaatgtggatagctacatgaatgtgatctttgaaaaaaagcaaacctttaaaaatggtgatgtactcgaatgggaactacaaggtgaagtactaccagtattcctaattgaatataaaaagctattcgtaaaaggtaaacactttcatgtatacgcagtggggattattgaatga

SEQ ID NO: 126474 - DNA, 294 bp, Enterobacter cloacae
atgattggtgtaattttagaactactatctaaagggatggacttctttatcaaaagaaaaaccattcaagcagatgtagaaaaaacaaatgccgaagggcagatagaaacaaacaaagaagagattgaaaaggtatcattccattggcgtaatgctcttggattcgtgattaccctaatcatcctctataactggatcatagtaccagtactagatgcctttggtatcgtagtaattcaagtaccattaggacaattactacaagtacttctaatcatggttggtggttcataa

SEQ ID NO: 126475 - DNA, 210 bp, Enterobacter cloacae
atgactgaagaacaatttgaacgtaactaccccaaagagcagtacaactacgtccataaaagcagtaggactaaggggccaatgggagaaactgaaattgatgtttatgacattgtttcaaaggaaacagggaaagttgtactaacagcgacacgcacagagcatacccagatacgaggacttagaaccactaccaattgggattggtaa

SEQ ID NO: 126476 - DNA, 138 bp, Enterobacter cloacae
atgctcaggaaaccgattaaaaatatcgttttcagaaattttgcacgctaccgcccctggcttaacagctaccagtgcactgagcgaatgttgaataaagattttgggagtctgataacagacaaaaactggcgttaa

SEQ ID NO: 126477 - DNA, 744 bp, Enterobacter cloacae
atgcttgcgggtataagagatattttaattattacgacacccgaagatcaggacgggtttatacgtcttctggatgatggagcaaaactgggcttgaatttacagtatgcaattcagccttcgccagacggattggcacaagcattcattattggtgaagaattcatcggtaatgattctgtttgtctggtattaggtgataatattttttatggacaagggttctctcctaaactaagagaagctgcagtccgtgcgacatctaaggcgacggtgtttggatatcaggttaaagatccagagcgtttcggcgttgtccaatttgatgaggatcgcaatgtgttatcgatagaagagaagcccgctaaaccaaaaagtaattatgcagttaccgggctttatttttatacaaacgaagtcgtagaatacgcaaaacaggttaaaccatcagaacgtggtgagcttgagattacgtcaatcaaccaaatgtatcttgagaagggtaaccttgtggttgaaatgctgggccgtggttttgcctggcttgacactgggactcatgaaagccttttgcaagcagctcaattcgttgagactatcgaagttagacaggggtttaaagtcgcttgtcttgaagagattgcatttaacaatggatggttagctaaggcagacgtattaaaacaagctgccttaatgtccaaaaatggatatggccaatacctgtcccaacttattaagtaa

SEQ ID NO: 126478 - DNA, 1428 bp, Enterobacter cloacae
gtgtctgaactaaaaaataaaacagtcaatggtctaaaatggagtgccctagagcgaatactttctcagggcattcagctcattctgatgctgattctagctcgtctgttagggccaaaagcctttggtctcattggaatgttagcaatgtttattgcaataggtcaggtatttatagatagcggcttcagttcagcactgataagaaagaccgatcgcacgaatactgattattcgactgcattctattttaatattatagttgctatctgttgctatcttttgctgtatttttctgcaggatatatcgctaatttttatcagcaacccgaattagtgttattagcgaaagtcattggcttatcattaatagcgaatagcttctcagttgtgccaagaactattttgacagtgtcaatgaacttcaaagcgcaagcgaaagcgtcgatttgctctgttattctgggggggggcgttgcgttgattttcgcctggaaagggtatggtgtgtgggcgctggttgcgcaaactctgtctgtctctgttttgagcgcattgtttcttaatataataacacgttgggttccagcactaattttctcaaaaaaatcatttaactatctgtttggttttggcggtaaattattggtatccgggttacttgatacgacatataataatgtctatcaactcatcattggcaagaaattcagtgctgaaaatgttggtcagtttacgcaggccaaccaggtatcaagcattcctgccatgacaatgactaatattattcagcgcgtaacctatcctatgtttagtcatatgcaggaagatagtcacaagatggacgaatattacctgctcacaatgaaagtggctgcgctgttcatctttccattgatggccggtgttgccatactcgcacaacctttgctgcaacttgtgttaggttcgcaatggcatgaagcggcaggacttgtaacaatccttgcccttgcttatatgctttatccaatccatgccataaatctgaatgttttacaggtaaaaggtcgaagtgatttgttcctgaagctggaaataattaaaaaaatcattgggatttcaatcgttaccgtaacaatgaattacagcatttacataatgtgctttggtttattgattcattcttactttgcactcgtattaaatacgtattacaccggaaaactgactggtttaacggtctggcgacagttcaaagaagtgtcacctatctggttaattactatgctttcttgctttattgccaaaattattgcgatgaatctatcagcgcaaaacatttggcagattataattatgttaactttagcgcctggtatatatattggaatgatttaccttacgcaaagaaacttatttaagattgtattgtctatcagagaatag

SEQ ID NO: 126479 - DNA, 1101 bp, Enterobacter cloacae
atgaaaaatataccagtgactcaaccctttcttcctgaattaagtgaatttattccttatcttgaaaaaatctgggataataagtggttaacaaataatggtccattccatcagcagcttgaaaaagaattgtgtgagtatttaggcgttgattatatttctctttttaataacgcaacaatcgcgttaatcactgcacttcaggcattacgtatttcgggtgaagtgattaccacaccgtactcattcattgccaccagtcattctattctgtggaacggcctgaagccggtattcgtcgacattgatcccgacacgttcaacatcgacccgaagaaaatcgaagcggctattacgcctaatactaccgcgattatgcccgtgcactgctattccagcccatgcgaagtagaagcaattcaggaaattgctgataattacgggcttcgcgtgatctatgatgctgcacatgcatttggcgtaaattataaggggcagagcatattacgctatggcgatatgtccatcctaagtttccatgctacaaaggtcttcaacacctttgaaggcggtgcgataatttgtcaagatgccaagaccaagcagcgtattgatagattgaagaattttggtattgccgatgagttaacagtcactgcgccgggcatcaacggtaaaatgagtgagatcaatgctgcttttggtttagttcagttgaaacatatcaacagtgccattgagcagcgtagaaggattgatctggcttatcgccaggagcttacgcaaatcaaaggtattactgttcctgcagcttctgaacactctaacagtaactattcatatttcccagttctcattgaacctgagttccgcatgaccagggatgagctctatttcgaactgaaaaagaataatattttatcgcgtcgctatttctatcctttgatcagcaacatgcctatgtaccgcggaattgaatcagcagctattgagaatctgcctttgtctaatgccgtttcggataaagtactgtgtctgcccatttttaacgaaatggatgagaatgatttttctcgtattataaatattatccgaggataa

SEQ ID NO: 126480 - DNA, 594 bp, Enterobacter cloacae
atggctatcttaacccgtgaagaaattgaacagatgggatttgcctccgtaggggaaaatgttcttatctcaacgaaagcgtcattctacggtgtatctagaatccatatcggaaacaatgtccggatagacgacttctgtgttatttccgcaggagatggaggcgtttttattggtaattacattcatatagcggtgtattcttccctgattggtgccggaaaaatttcattaatggattttgcaaatatttcatcacgggtttctatttacgctagtaacgatgattactctggaaattacatgagtaatcctatggtaccgacggatttcacaaatgtcacacatgattcggttgtcgtaggaaaacatgtcattattggctcaggaagtatcgttttaccgggagtaactctgaatgacggatgtgcaattggtgcccattcattggttaaaaatagctgtgaaaccttttcaatatatgctggtaatcctgcgcgcaaaatacgagaaagaagcaggaaacttttagagtttgaagcccagttaaatgaagatattcaacgtgctccgacaggtaaaacagatgtataa

SEQ ID NO: 126481 - DNA, 1005 bp, Enterobacter cloacae
atgtataacgaaagccaagaattgattcaaaaaaattggcaaagttttgagattaaagtatcaatttgctgtataacgtataaccatgaaaaatatatcgctgcagcgatagacagttttttagcgcagcgaacaaactttgcgtttgaaatattaattggtgaagataaggggggcgatggcacacttactatcatcaatgaatatcaagaaaaattcccagggattgttaaagttattaccgctgaaaaaaatcttggtgcaaatggcaatatcagaaatgtcatttcacatgcgcagggaagttatatagctttttgtgaaggcgatgattattggctggatcccaataaaatccaaaaacaatacgatgcgatgattctgcatccagaaattaacttctgctttcatcctgcctttgcgttaaatccagatggaagcaaagtaaagcgctttgacaaaggtgatttggttcgtcgtttcaacgttgaggatgttctaaataaaaatgggcaattctctccaacgtcttcctatatgttcaaaaaagaggtagtggcatcgcttccggcatggtttgaaaatgcacctgttggcgatctctttattgaactttatgcaatgaaagaggcgggtgggttatatttaccttctacgatgtctgtgtatcgtttgttcgctgataactcttggtcaagtgctatcaaaaaggatttcaccaaaaatattgaaacgcagaaaaatatcatcaaatatactaagttaagtattgcagattttgatgagtacgaaaagatttatgatcttcgcttttcaaggatttattgcgatattgcgactaagtttcttattagaaaagattatatctcttttgaaaaatatctggtaaagtcttactcttgtcatccacactcttctagaaaacaggagttgtatttaagattcaaggcttttcccgttttattaaattattttcataagcttaagtcaatgttaaataaataa

SEQ ID NO: 126482 - DNA, 1086 bp, Enterobacter cloacae
atgaaaaaaatttgttttttcttgacagacgcttctgatgaaggtggaattcaacgtgtcattaccgagctttctaatcacttcgttaatggctacgagatatggatcgttagcattttctataaagatagtaatgatatcagtatattgccgtataaattaaataagaacgttaatttcaaaggttttattaataagagcacgacgcataataaaatcatcaaaaagataaagaccctctttgcaatttctaaactttatttttttttgaaaaaacaaaaaattgatgttttgattgctaacggtatggaaagtgttatgtggtcttttctgccggcatgtttaaatagattaaaatacatttgctgcgatcatactagcttcgacagaaaaccactctgggctcgactggggcgaaaattatctttaatgtttgcccactctatcgttgtgctgacagcgagtgatgcgcgagcttggaataatgttaaagtaaatattatacctaatccttctccttattctgatgaaactatttctgctccttactctcaaagaactaaaagaataatcgccgtagggcgtttggtacaggttaagggttttgatcggcttttaaatatatggaaaaaattcgttacacaacatccggatacaccttattgtcttgagataattggtagcgggccattaagagaatctttaagtaacagaatagaaaatgtaggtatagcgaatgcaacaatatcaacgtttacctcagatattgcaaagatctacaatgacagccagcttatattaatgacctcataccatgagggattggctatggttctaatagaggcacaagcctttggacttcccgcgcttgcttacgatgtcagcgggccttccgaagttatcgtcgatggtgaaacaggttatctggtagaaaacggcgatgaagaacagttcatcagtaaattgtccactctgttgaataatgatgctttgcgaaacgagatgtcaggaaaatgccctgaatatttatatcgctttaaaattgatgtcattgctgagaaatggaaacgcttatttgaggcttaa

SEQ ID NO: 126483 - DNA, 1266 bp, Enterobacter cloacae
atgtcttatgaacaaaatcaagccttactgataagaaggtactttttaaagatttatattttctttaacgtaatttgcggtatttattttatttacgatggtaatctggggggggactttcaaggggtatatcctaccgaaccgaccctgatgattattgccattatacttgtactcgctattttttattttgtactattactcttgtttccgttttttgaaaaagtaagagtgagagaattaacatattgcagaagcaaactcctcgattattttatacttgtattattggtattatccatttatgcagcaattaaccttaatgtaggaatctctgggctaaagcttgatgagcctgacggtagctctaagttttatttctttttaatctccatatttcaacctgtaaacttagcacttatctatcttttctatagagtaataccatgccgtgtaaataggttattattattgaatgtgtgtttatatgttgtttatgttattgttagtgctcagacagttaacatcttgacgttatttgccttatttattgtttatcttcaacttaaacagattagggtttccggaaggaaactatttatgttcaccgcattaggattggcaatttatccagtcattaggtttttaaaatatgcaattgtcagtagcggtcgacaaaatatggaattagttaacactttccagagtaatttaggtggcggtgcgacagatatatattttgattttttctttaaaagtattgagcgttttcaaatggtcgctaatatacaattcatcatggaaaagtgggcggctttatcttatgcatacaataacgctgtgagtggatatagtttcctatcctcatactggttcattgatgcaatactaagaagagtttttggagagaatttttttgccacaggtatggcgccacaagattttatggcaacggcaataaatggtcaagatacttggtcttcacacatcagttttttggggtatattccattcttcggtttttacagcatattggtttatacattgatgataatctttgttttcattagtataatcctttccagaaagttaatgtccaatcgttactttttaacattaacttggctcatgtgtttatttctggtatgccacggttggtttattccatttattaattacattcaatcattagtggtttttattttcgtcattattacattgcaagtttttaatgtgggacgaaaacagttacaacatatcaggtaa

SEQ ID NO: 126484 - DNA, 813 bp, Enterobacter cloacae
atgactggtaaacttgcagtaattatgtcaatttataaatctgatgacccggaagcacttaaagtggcattagatagtctgataaatcagacctacccatgtgacattttcctttatcaagatggtgaaatcccttctgaacttaacactgttttgcaagattatctccattttaatcaagtgaagttgactaccagcccggtaaataaaggactggctcatggactcaatacccttatcgactgcgttcttaaggaggattacgctttcattgccagaatggacagcgatgatatttcacgtgttaatagaatgtccgagcaggtttctttccttgagaaccaccctgaggttgatctctgtggaacatattgtcaggagttcggtagcacctatgcattaacagaaaaatgtcttcctaaagcgcatgaggatttggttaaattcagtattgccagatgtcctttcattcatccaactgtgattttccgacgtcacatttttgaaagcggccatcgttaccctacgcataccacctacacagaagatatggcattatggtttgagctgatcaaaggcggttatacgcttggcaacgtcgatagggtgttacttgattaccgcctgactgaagatactattttgcggcgtcgtggctttaaaaagtcgataagtgaagtgagattacgctttaaatacatgataattctgaaacaacttacggttaaaaacattttattaattacatcgcgagttgtatttcatctgttgcctgtttcatttatgcgctttatgtatcgcaacatgcgctaa

SEQ ID NO: 126485 - DNA, 882 bp, Enterobacter cloacae
atgttttcaattgtaattacaacaaaaaacagactggcttttcttcgaagagccgtaagtagtattcttaattcatcgttgcttccgaacgagattatcatcgttaatgatggtggtgaaaaacctgatttttcagatatagattttggcactgtcagtttaattatcaaaaataatgactcaagtttgggggctaattattcccgcaataaaggaattgaactttcctcagccgaaaacgtttttttgttagacgatgatgatgctgttgaagaagattcatttcaaaaacgcatgaatgtcctcttaaaggatgaacggattgggcttgtttttaccggtatcaaaattgttttaagttcagatcttaataacgttagacgaaccgtatttcctcgtgaatattctgattacacagaggctcttttctccaaaggaaatgtcatcggctcgacatcaagggtgttgattcgtaaaaaattcttcatggcggcgggaaaatttgatgagacgttaccttgcatgcaggattacgatctttggatcagaatgtctcagcattgcaagatcaaacatgataatagcgcgacagtaatttataccgttcataacaataagaggcaaataagctctaattttatgaagtatcttgaaactggggaggtattgctgagtaaatacagtgcgctaattaatgaaagtcagcgtaagcagtttatggctaatctgtacttccgcgtcgcgctatcgtccgcttcaacgtcatatattcacagaatgcgttacgctttactatctttaacttcagtgttttcacttaaaggactcatattactcttgactccctatacaatattgaaacgcacatatctctttgcgtag

SEQ ID NO: 126486 - DNA, 1773 bp, Enterobacter cloacae
atgcacaccccatcacgcttatcggccctgcgccgatggctacaggaaaacaatcttgatggcatgatcgtgccgcgcgccgatgcctggcagagtgagtactgcgcgccgtacgatgaaaagctggcctggctgacgggctttgatggctccgcaggtctggcgttgatactgaaaaacacagccctgctgtttgtcgatggccgctatcaggttcaggctcgccttcaggtcaatatggatgaaattgaaatccaccatttgcacaatgaaccgctggccgaatggctcacagccaacgtcgggtctggcatgcgtattgggtttgaagcactgctgatgaccaatacggagttcgggcaactgtctgcaacaccctgtgaactggttccgctcagtcagtcgccgtttgataccttatggcacgatcgccctgccgcgccggcgggacgtattcgagaaatgccggtggaggtcagtggcgaaagcagcctcgccaaacgccagcgcgttgccgccgtgctggccgcacacgatgccgattatctggccgtgactctgccggataacatcgcctggctgttgaacgtgcgtggcgccgacattccatccagtcctgttcccctctcgtttgcccttcttgaccgtgacggtagcgtggagtggtttgttaacgacaataagctcagcgagctacccgagagcgtgagaaacgcgttcaggattgcgccacaggatgcctttatcgaacgctgccagcgcctgtcacaaggcaagcgggtgatggttgatgccgattccgcaccggtcgccctgcgctttgccattgagccagagggcgaaatagtctggcgaaccgatcccatcactctgatgaaagccactaaaaacccggtcgaacttgccgggtatcgcgagtgtcatcaccaggacggtgctgcctgggtgaatttcctggcctggctaagccgtgaagtccccctgcgtgaggcggcgggaaaaccgctgacggagctggaagcgcaggcgcagcagctcgcgttccgtaaacagcagcctggatttattgagcaaagttttgccaccatctccgcctcctccagtaatgcggcgatgtgccactatcactcaagcgaagccagcaataagcccatcggtcatcatcatttttaccttaatgattccggcggtcagtaccataacggcaccactgacgccacgcgtacgctggcatggggtagcgtgccgccacagcagaagttgcactacaccgccgtactgagagggtttctgtcgttgataaccttgcagttcccctccggcagccagggccatcagcttgatgccttcgcgcgtcgcccgctgtgggaaatggggctggattacgatcacgggacagggcatggggtaggacatcagttgcttatccatgagaacccgcatcgtcttgccaaaaaggttaacccgtggcccctggtggccggcaccatcatgactatcgagcctggatattatctggcggacagccatgggatccgcattgaaaaccaggtggagattgtcgaaagccgtccgggattctgcacgttttcctcactgacgctgatcccgatcgacctgagccaggtcgagttacagctgttgaacgaacaggaaaaacagtggctggataattatcatcagcaggtgcgtgaggccctgttaccgttggtcgacagcgacgcgcggcaatggttgcttgaggcgacgatgccggttcgggttaaccactag

SEQ ID NO: 126487 - DNA, 900 bp, Enterobacter cloacae
atgtgtcgtataaatgtgttgagttgtcttgctgcattacttatcagccagagcgttcaggcggtaagttatcctttaccgccgacaggcagtcggctggtgggcacttcgcaaaccattaccgtgccggatcacaatacgctaccgctcgaagcgtttgccgcgcaatacgggcagggtctgagcaatatgctggaagcgaacccgggcgtggatccttttttgcctaaatccggtacgcaactggtgataccccagcagctgattttgcctgacaccgtccgcgagggaattatcgttaatgcggcagaaatgcgcctctactattacccaccgggaagcaacactgttgaagtgttacccatcggcattggtcaggccgggcgcgaaaccccgcgaaactgggtcacagcggtagaacgtaagcaggaaggccccacctggtctcctacgccgaatacgcgccgtgcctatgcggcagaggggaaaacgctgcctgcattcgtgcccgccgggcccgataacccaatgggactgtatgcgatttatattggcaggctgtatgccattcacgggacaaactccaattttggcatcggactgcgggtgagccaggggtgtattcgtctgcgcaataacgacattaaatatcttttcgataacgtcccggtaggcacccgtgtacagcttatcgatcagcccgttaaagtgacgacagagccggacggcagccgctgggttgaggtgcatgaaccgctatcacggaaccgggcggaatttgaatcgacccggaaagtgcctttgccgatatctgcctcgctgcgaaccgagcttgtcaacgagggggcgggcgcggaactggaacgtcggtcagggatgccggttaagctcggcaactga

SEQ ID NO: 126488 - DNA, 729 bp, Enterobacter cloacae
atggttaggggattgttactattcggaattattttgatggtaattattttgatggggtacttctcttttttaccggcctcacaatggtggtttatcaaaaatatcatatcaaattttgattttgtaaaagcgctcctttcaattctaatattatcattgattactatatttttgtttttcggtattttagagaaaaaatactcattaaagttagaaaaattaactttcggtgggttaaatgttttatttgatagttctgacttgctatataaaagatctgttcgcaatttccttgatactaaaagaagtgtgttcaaaattgatccacattttgattcatttgaagaggtttttaactctttatatgatatctataattttattcgtgttgaaataagagtgctggatgttaagcggaaaagagatatggagttgtatggtatatctaataaaatgctaaaaaaactgaatcaactgcttaccaaacatcagaataattacaggcgttggcataagtacatctcaacaaacgatattgtattgacgagggataaagattctaacggtgaaaatgtttctttgatttatcatttaacaccgattggagtaatccagactcattattatcatttcagccagttgatggctgattttgaatgcattaataaattcttctgtgaggaagttagtgttgtatttaacatcgatattgctaagtgggatgagtaa

SEQ ID NO: 126489 - DNA, 612 bp, Enterobacter cloacae
atgcataaaacttttctgagttatcatcatgcaaacgaacaggatttgaagaacggaatcattgaagcatttgctggtgcgtcatttattgacaagtccgtcagtgacggggatatcagcactaatgtcagtgaagattacattatgcggaaaattcgggaggactatcttggtgactctaccgtaacagtagtactcataggtacagaaactgccagcagaccttttgttaactcagaaattcaagcatctttatggggggagaatcctggtggattaatcggggtaattcgagatgaaatatattcgagcgtgtttagctcgggtgtgtgtagtgatacctcttgcaattgcgggattggaattagaaccattgattggggttatgaacattatctcccttggttaattaaaaaaaatcatagtttttcaaaactcgtcccccactatgatgatatggatgtttattgctccctggttaagtattcagattttatagggaatagtgaattttatattaaccaggcatttgataaaagaaatattatggaacctgcagcaaagaaaaatcccgctgatgttcctgctataagaactaatttactatggtga

SEQ ID NO: 126490 - DNA, 513 bp, Enterobacter cloacae
atgtataataccaaaataattaaaagaaaagtttttttaagctaccaccatgatggtgaccaatattactatgatgaattctcaagaaaatttcatgatgaatatgaggctgtaacggataattctcttgatcgtcgagttgacagtgacgatattgactatgtcatgcgacgtattcgtgagtattatatcgcagggacttcatgttccattgtcttggtcggtaatgaatcatggggaagaaaatatattgactgggaaattaaatcgacgcttgataaacaacatggacttattggtgtccagttgccaacattgttatcaaattcttatggacaagtgactgtgcccgctcgactcagtgataatattgattctggatatgcgctgtgggtaagttgggctgattttacagctagcatttcatcgtgtagggaatatatcgaacaagccaattgtcgtagtaatactctgataagaaacactcgtgaacgccgcttaaggaatgcataa

SEQ ID NO: 126491 - DNA, 1194 bp, Enterobacter cloacae
atgcttgagacgaatttggcaaaaccatttctggttgtttatatcatttggcacccggatttcgccggtggtgctggactggccgaaatattgcgtggacactttcgtcgggaactctatcagaatgttgctggaggaaccggtttaagtgttatttttcgttctgagcctctacctaaaacggggaagccgctgccgatcaatttttcagaatcagagaccaccgcagtcctcatacttgcagaatcatgtatggcaaatgatcctgaatgggggacttaccttcgggagctatccacgcagtcggaaatagctggactaggtacacatcttttccccattgctattgatggagaaggattgaatctgggactggaagagcaggcattacgctgggaccaatggatacaggatgggagcaacgatactgcaaaccttcatatacgattgattagtgagcttacatacgaattttgcaggatgctgcgccattacctggaacatctgaaacaaccagaaaaagatgaagatgagttgcttaattatctcaagaaagttcagatattccttagccattctaaacatgataaagatggagagcggattgctcatttgatacgtgagcaattacatagtggacatgggttaagttcattctttgatgtccatgatatccctgccgggcttcggtttcatcaggtgctattgaaacagctggcgcaaagcgcagttgttgctatacataccgactcttattcttcgcgtgaatggtgtcgccgagagattatagaagctaaacgtaatagtgtacctttagttgttgccaactgtattagcgaattggatgaaaggggatttccttatatgggaaatgtccccatagtgagaatggatccacagcaggctgaacgaattaatatcattattgcacgactgcttgatgaggttctgaaagattttctgtggcgctgtcgtatacaattggttaataccgaacaaagtgcagtgcagtttgttccgcgtgcgccggagttaatctcacttgctggcttaaagttccacggtatcgggcagcctacaattgtatatcccgacccacccttaagttcggaagaggagcgcttatttgaagaagttaaacccggtatcaggcttagaagttttaccgaatggctggcagagggaacatcatga

SEQ ID NO: 126492 - DNA, 819 bp, Enterobacter cloacae
atgacttatcgtgaaatgcttagtcagcatgttattgcaatatctacatcagatagctcagatatgcctgtattggggttaagtcaacagcatttatatgacgcgatgacagaaattgcgcgtcatttattagccttgggagcccggattgtttatggaggagatttacgtgctaacggttttactgaactgttatttgagttagtagcacgccatagaagagatgcggatgagggggatgaacgttccagtatattgaactatctggcatggccggtgcatatgcaaaaagattccagtgacttggaaaggctcagtgcggacctgaaaggaatggcaaggcttgttttattcaatcgggatggcgagtcgttgccaatggcagaacgagcccattacatagcaactattccttctgatgaagattgggaaaaaggtttgacagcaatgcgacatgctatgttacaagacacacatgcccgtattattcttggcgggcaggtagatatgtataagggggcaatgcctggtatagcagaagaggctatattatcacttcgcgctaaacaaccccttttcattatggggggctttggtggatgtgcaaaagatatcaccgagtctctgaatattgtggcatctgacggaatgcagaaacgcaactggagaggtcgggaagaattttctggtttctctttccaggatcttaataacggactcactgaggaagaaaatactgtgctagcacagactccgcatgtggaccaagctatcgccatgattttgagaggacttttccgattagtaaaacgttgctga

SEQ ID NO: 126493 - DNA, 1788 bp, Enterobacter cloacae
atgaaacttgaaaaactaatcttaaagaactttcgtggctatcatggagaacatagcattgacattaactcactaactgcattagttggtcgtaatgatgttggtaaaacaactatcttagacgcacttggtgtcttctttgaacataaactatgtaaatatgatgctaccgataaatgtgtcgatagcgtggaaaatgaagacgtgtcaattggatgtatcttttcaggagctgatatacctatagttttggatgccacatctataactaaccttaaagaagaatatttattaaatagtaatggaaagctagaaatatatagagtatttgcaaaaggtaagggatctggcagcgttcaagctaaatgtatggctccctcagcaaaaggcgcgaaatctttacttgctaaaaaaaatgatgaacttaaagtaattgccgaatctattggtgttgatggagctgataaaaggtccaatgttagtttaagacaagaaatttacaggaaaattggagatttaaagctcaaagaaatcttcgttaaattaaatgctgaggagggcaaggttatttgtgaaaaaatatatgacaaactccctcactttgcattattccgcgcagacaggcctagtaccgatgaagaatcagaagtacaggatcctatgaagtcagcggttcaaacagcattgcagaagattgacattcaacttgaatccattaaagaaagcgtaaaagaacatgcagttgaagtggctgaaaacacaattaaacatttacatgatatatctcctaatcttgctgccgggttagtcccaaagtttaaagtggaacctaagtgggaaaatattttcaagctaacattggaagatgatagaggaatagctatcaataaacgtggtagtggtgttagacgtttagtcctgattagtttttttaaagcggaagcagaaagattgcaaaaagaattcccagataaaggagttatttatgcaattgaagaacctgaaacatctcaacacccatctaatcaaagacttcttattgatgcatttcaagaattagcaaatgctgataaatgccaagtattgattaccacccacgtccctgcacttgtggaaaagatacctacagaatctctacgccatataacccgaacactcgatgatggtttagaggttaaaaatggtaatgatgatgtgctaaagaacatagcgaatgatcttggcgtataccctgatagtagggcatctgttcttgtatgcgttgaaggccctaatgatataaactttttaaagaatatcggtaaaatttatctcgaccaaggtgttccaaatgttcctgatatgataaatgatccgcgtatagttttcattccaatggggggacatactcttaaagattgggttaataataattacttaaaaattctaaataaacctgagattcacatctatgatagagatgttgccatccctcctcagtatgaaaaagaatgtaagtcagtaaatgctagaaatgatggttccatagcattcatgactgaaaaaagggaaatggaaaattatttacatcctgatgctattcaggcggtgtttggtgtaaaaataaccatagatgatacgacagatgtatcaacagaggtatctgctttaacacgttataatgaaagtaaagcgaagaagaagataaataaatttgctacagcaaaaatgagttatcaaatgctcactgcaagtgatgcaaaaggcgagacattaacttggtttaatgctatatatgcgaaattataa

SEQ ID NO: 126494 - DNA, 663 bp, Enterobacter cloacae
atgctaattgatcccaactcacacctttatgtttatgcaataacgagagactttggttttgcacctaatccatttcatggaagttgtaccttggcaacatgcaaacctggaattagaaagtcggctaaagtgggtgattggatactcggagttggtggagccaatttaaaatcagctaaaaaaaaatgtatcctattaatgaaagtttcagaaaaaattagtttcaatggttattgggaggataccaggttctctctcaaaaagcctgctagaaatggtagtcatgtaaaaattctgggcgataatatctaccatcaaaatgaaaacaatgaatggatacaagaagattctcatcatagcaatgctgatggttcatttaacatgacaaatcttgaacgagatactagctccaataacgtgttgatttcagatcatttttattatttcggtaataaagcgattgaagtagacttagactcaattgaatatcacagaattagaaactataaaaaaatccctttaaattcgactataccagccattgatcttataaaaaaaatagaatttgattttcgtagtgataaaaactcagttatatctgacccatgtaatttttctgatttctataaacgtgtagatcagggaactggagaactttactaa

SEQ ID NO: 126495 - DNA, 492 bp, Enterobacter cloacae; identical to SEQ ID NO: 83795

SEQ ID NO: 126496 - DNA, 1032 bp, Enterobacter cloacae
gtgaacagtaaaaacgatcaacttttttgtaatgtcagagaaatgaaaattaaaaccgctaaacctatcttgaatgaagctgttatcagggaatggttttatcatcaacgagagaggacatccatatattacaagaaagagatacttaaccttccgccatattggacagacgacaaaatattgagaaactataaatttgtaaatactaaaagaacatgggacaaagaaaccaaatggttattgaaaaatataacaaacaacaataaattaacttatgaaaataaaatactcaattcatttttgtttagagtaataaataaaagcgatacattaaatgaacttgatgcgccctttgatttcacaaaaatgactattcgcgacatcaatgaaaagatcagagaaaagacaataaatatatcattaaaaaaaccaggctacgtattttttagtgcagcctatattttaggaggtccgaagtttaacttcggaaaatacttaaaaaatatagaaggaataccggaaaatgatatggtaattagaatgataaaatttgtttattataaccaagataaaatcgttaatggtgtaaaatcatcaggaaatcagttcgaagtttttgaacatttaaaatcattctcagggattggggattttctagcatatcaaattttcatagatctgacatacatacccaactttccgtttacagaattgaactttgttatttcaggtcctggttgtgaaagaggaattaattggattttttctaatagagatggaatgaatagcgaagagtgtttattctggttcactataaaccaaaataacatcgctgaaaagtatagtgaaaattggaacatggatgaaatattccatttcctgcctaaagaagaaagagtttacactttaatggacatggaaaatagtggtgcatgcgagatagataaaagatgccgaactaaatttaacaataaaaggcctaaacaaaaatatcattatcaaagcaataatatagaattattttataattag

SEQ ID NO: 126497 - DNA, 558 bp, Enterobacter cloacae
atgaaaattgcattcatgggcatatcgggtagtggaaaagactttcttgccaattatctgatatccaactatggatttattagattatcatttagcgatcaactcaaaaaattggccaattacatttatccttggatggaaaaggattacccccctgaaaataaaatgttaccactcaatataaccttacctaccggcgactttatcagccattcaccaagagatatatggctgagcttagacagcctaaggaaaattgaagaaaaaatatttattagaatgctatcagaagagttgaaaattttagaaaaaaatggagggatgaataaaaatataataattactgacataagatcaaatgaagaattagcatggtgtaagaacaatcagttcactatagtacatatagaacgggaaaataacaattataaaaaatacgaaatcgacaagtatgtcactgagaataaaacaaaatcagaatatcattttgacaacaatgtgaacggaattgatagttttaaacatttcttcgaaaaggtattattaagtgaacagtaa

SEQ ID NO: 126498 - DNA, 1086 bp, Enterobacter cloacae
atgcacgtcatttacggagaaactattaacgatgtaataatgaaactcctagaaaaagtgcttaatgaaggagttcgtatttcaacaaggaatggggatgctataactatttatgatgttagtatgatcttacgaaaccctagatcaaggcatttaagtttagcgggtcgaaaaaataatatattttccacatttgctgaagctatatgggtttttgctggcgacaacagaattaaaccatatctaaatttttttttaccaagagcacctaaatactcagatgatggtgtcatttggcgagcagcttatggggaaagactatacgctcacgggcaacttgaaaatgtcgtgcaacaattcaaaaaagaaggaatatttacaagaagagcagtcattagcttatacatgcctgacagagatacgaatgaaagcctcataaaagtatacaacatagaacatagtgtcgatattccttgtaataacttaattcatttctttatcactcctgacaaaaatttaaacattaaaatagttcaaagaagcggcgatctaatatttggagtgagcaatataaatcttttcgagtttagtttacttcaagagatagtactttcaatattacagagggaagttgatagcgagattaaactgggatacttacatcagtcagtaacaaatcttcatatatatgatgatagagtaggacaagccaatgaaatatacgaaagaaaagaagaacaaatgacagatttgataaacgatgatgaaatatcattccctccatcgttacaaaatataaaatcattattctgtgatatagtttcgttccttgaaagaataataacagaaaatgaacataaaatagacacaatagatatggaaaccgaaaatctaaaaaaaatatttattaaacactttgtagaaactgaaaggaatttactttggggatatgcagaagcagctctatcatatgttttccaggaaagattcaaccaaccaatagtgttaaaaactaagttaagcaatgatttcaatctaagcgtaacttctaattattttaataattctaataaggacagtctatga

SEQ ID NO: 126499 - DNA, 306 bp, Enterobacter cloacae
atgaccaaaccgggttttattcagcatccctggacacatcagcgcggggattccatgcgcgcagcccgtgttattgagcacattgaaaatgaggcaatgcacggatgcggcctttattatgaaatttatcactaccgggttatatgccggttattgcaattactacaaacgctgaacggcaccgacagaataacgctgaccgaggaagctaacctacgtggatttacgctggatgaaaccagcattaaagaaagtcgtcagtgttattcagacgtcatcagagaaatccacgagagccaatattaa

SEQ ID NO: 126500 - DNA, 303 bp, Enterobacter cloacae
atgaaaaaagtaatatcctccgcattattactcagcgctatggcgtcatattcaacctccgtcatggccgctgacgcctgtgaagtggtgctatgcatgtacggtaaagccaccgggaacggcggcggcaatgaatgccattcggccgaacgtgcattctttaatatcgtgaaaaagaacaagcacggttttctgcaggaccatactgccgatgccagaaaatcgttcttacttgagtgtgattcggcagacccggcaattatcagccagattatcagtaaatttggccgcatgcgtggttaa

SEQ ID NO: 126501 - DNA, 1029 bp, Enterobacter cloacae
atgaacgctgaaaacctgtcgctggattttatgaaaaaccagctgtttggtgattttattgcgcaggacggcctgacggaaattgccgttaaccggccgggtgaactgcataccaaaatccgggggaaatggcgaagacatgaagccccgattacgctgcgccagtgttacgcctttgccagagcgctggcgtcctggcaggaagataatatcgacgacacctcgccgatcctttccgccacgcttgaatcaggcgagcgaattcaggccattattcccccggcctgtgagcgtaataccgtgtctattacgctgcgcaagcccgcatttgggcagaaaacgcatcagtcatggattgatgcgggattttataaccgggtaagcggtaaggagcgaacggaaggcaaagatgttgaattgacccgctactatcaaggtggggatatttcccgctttatggaaaaagcggtggaatacggcaagacgatttttatcgtcggtgaaaccggctccggtaaaaccacctatatgaaaacgctgctgcactctattccccggcacctcaggctgaccaccatcgaggataatcccgaaatccggttttatcaccacaccaactatgtccatctcttttatccggcagacgccggggataatgccattgtcacgcccggcagactgatacgcgctaattatcgtatgaaccctgaccggatattactggctgaaattcgcggacaagaagcctgggatgcgctgaaaatcgtcggttccgggcatgagggattgatgacctccctgcatgcgggcagcccggaagaatgtattgaagggttaattgaccgctgctatgaaaaccccgactgccggaacatgcctttcgacgtgctgttacgcaaggtgcttaagagcgttgatgtgatagtcagcattgatattcacggtgacatacgccgtatgagtgatgtttattttaaaccccttcatctcaatggcatgagaggtgtattcagcaaagggctcaagtaa

SEQ ID NO: 126502 - DNA, 888 bp, Enterobacter cloacae
atgctgaaaaacatcctgctcctgacgggcttactggcatcatgcgcggcatggagtgccgccaccccgcttggcagcggctatgacagccggatgcagaacgtatcgtataacagccagaacgccaccgtggtgaatacccgccctggctacgtcaccacactgctgtttgacgacgatgaagctgtgattgatgcgcaagcgggttttcccaaaggctggacggtgacgaagagtgataaccgggtaggcgtcagcccgaaccccatcacccagccggtgacggacgccagcggcaacaacatcagccaggtgttcctgcccacggcaaaggactggaagaccaacctcttcgtggtgacctcaaagcgtgattacagcctggaactgaacgtgctggaccacgattcccccgcgcaggcgttcgttatccgttaccactatccggccgaggctcgccagcaatccgccgccgccagcgccgcacgtcagacgcagcagcgtgaaagacaggagaagcagcagatagcggcagcattcggagaggccagcacgccacgcaactggcgctacaccaaacgggtcgccgccggttcggcctccatcgcaccggattttgcctgggacgatggccgcttcacctggctcggattctcgcatctcagaaccctgccttccgttttccgggtggttaacggacgggagcaggcggtcacgcccaggacggttaaacagggtaactacatcgtgatggtggttccggcatcaccacaactggtgctgcgttacggcacttcggtggtggggatcgaaaacgacggattcgggcgcatcccgataacccgccgcgacaccgtttcaccgtccgttacgctggaggccaaatga

SEQ ID NO: 126503 - DNA, 141 bp, Enterobacter cloacae
atgaaattcagcatcttgcttctgatgctgtgcgcgcttacgggctgcgcgcagcatcagggcaacctcccgccggtgtccggcgatccccagccggttaattcccccgccatcattcaggagcagactcaccatgtctga

SEQ ID NO: 126504 - DNA, 1032 bp, Enterobacter cloacae
atgtcaggtggtatgtttgttggaatgaacaacactatcactggcggtttaaatgccgtattacagggacaaacttccgtgtacggcaatatgatcagtgttatcgccgtcagttcatttacattatttatcacttatcgtgggtatcagactctggcaggaaaacttcaaaccccgatagaagatgtcgtatgggatgtcggacgaatgttgttgatcatgacgttcgttttaaatcttggcagttggctggatttagccatctcagccattaatggattaaaagatggtgtcagcggcgacgataatgtctgggcattgctcgataccgtatgggaaaaagcacaggcaatcggacaaaaactttatcaaaatgatgattccaactatgtaaaacttaacggagggattgctgaaattctggtctggggaggcgctattgttaccctgctattctgctcgaccgttaatcttttagccgaaatcacaatagtattaatgaccactaccgcgccgatttttattttctgcctgctatatagattcctaacctccatgttcaataactggttgaaaactatatttaccgttattctgacgattatgttttcagcattatcaatcaggatagtgattaattatctgaacgaaatattggataaggcggtcaatttcgcggataacgccaatatcatcacgctcggcgttcagtgctgtgtcgccggtgttatttcaggcgtcatcatctacttctcagcaaaagttgccagcacattaggcggtgccgccgtgcaggccgtgttacagggtgcagccatgagcggactgcgcgggctggcgagcaaatctgccgacgtcgccagacccggcataaaggccgggggccgactgaccgccaaaggtggcatggtagcagccgcgacaaccggcaggttcattgccgcaggggcaggcaaagcggtgaacgcctggcagaaacgtgccaccgccatcgaaagcatgaaacgccagaatcagcagcgtcaccgttaa

SEQ ID NO: 126505 - DNA, 279 bp, Enterobacter cloacae
atgagcagcaactcgccgcgcctgttcctgattttaatgattgagagggcaaacatgaaaacatcaattttgttgattccaattatttcaggattcttattactgacaggatgtgataacccgaaatcaacgcaatggtataaagaacaccaggatgaaatgaatatccgatataagacgtgcgaatcatccggtgatgattccatggattgtaaaaacgcacgtgaggcacgatttgaactccgtcaggggaatgcaaaggttcccgatttaaattaa

SEQ ID NO: 126506 - DNA, 717 bp, Enterobacter cloacae
atgcggttcagaaaactcatactggcattatcgttgtttatttccacccaggcgatgagcgccggaataccggtattcgacgccgtacagaataccgaatccatgaatcagtggatccagaaactccagcagtggcaggaaaccgttacccattacagaagtgaacttgatgcctacaagcagcaattagccacggcaacgggcgtgcgggacgttcaggcatttctccgcgaggccaaaagtctgagaaccgatattgataatcttcgtcaaaacggtatttcactggatgacctgctgagcaaccaaaacgggtcatattcgtctgaactaaatagcttgtataacaaatataaatcgttcgatacctgtaacccctccagcgcttcacaacgctatctggacagctgcaaacagatgatcctgaatcaggctgtagcgatagaaaatacgtccgaggttgaaaacaagatcgcgggcacgctcggcgatatatcagatttatcggaccgtattgctaatgcgcaggatacgaaagagtcacaggacctggctaacgccatcgcagccaaaagcgtacaattgaatgcgctgaccagccagtgggaaatgtcagtcaaacaggcagagcaacgttccactatgctgactcagcagcggcaaaaggctttcaatgagcagcaactcgccgcgcctgttcctgattttaatgattga

SEQ ID NO: 126507 - DNA, 2748 bp, Enterobacter cloacae
atggctacgctgaacaaagcgctgacgcggcctgccgccatagccggcattcccctcgtgccgttcgtgatggtcagcggggccatcgtcctgctggcggtctatgtcagctattacctgatattactgcttattccggcctggctggagatgaaggcaaaggccagaaccgatattcactatttcggcctgctctggctggcctttaaaacccgtggccgttttggcaccaataaacattttggtgccaatgccctgctggcaaaccgctatgacgctgtcgacgtctcggagtttattgaaaagatgaagttaaacgagcgcgttacgctggataaatacattccgtattcctcccatattcacccgcacgtcatcagaaaccgccagggtgatttggttgccagctgggagctggagggcaccgtttttgaatgcgaggacgaacatcacctgacgttaatggcgtcgcatctcaataacgttattcgtgcgtatgaaggcctgccggttactttttatcttcaccgtatccgggaaaagtaccacgatgtctttgacgcgaattcaggcattcccttttctgatgaagtgacccggctgtattaccagccgatcagcgaaaaaccgttctggcggcaccggctgtttttcaccgtctgctacgcgcccttctctccgctggagaaaaaggccatgaaggcgcagagttccggcaaacgcaaagcggcgctggatgaggctctgaaagtgatgctggaacaccgggatgcgctggcatcggcgctgtcccgctatacggcaacgcagctggggatgtatgaagacaacgggcgggtgtattccacccagatttccttgtatcaccgcctgctcaccggccagtggcaaaaggtggcggtcacgcgtgcgccgttttatgaaacattaagtacgccggatgtcttttttaccaccgacactgccgagtgccagacggtcggcggctcccgttttttccgcagtctggaaatcaaagattactcgcctgaaaccgcgaccggcctgctggacgcgctgctgtatgccgaaagtgagtatgtgctgacacagtccttcacctgcatggcccgcgatgaggcgcagaagcatattcgtctggcggaaaagcgcctgagttcggcggatgacgacgccatttcgcagcgggaagagctgattgtcctgcgcgacctgctccagtccgggcatgtctcctgcgggaaataccacttttccctgctggtatcttcagacagccccgagcaggtggtgaaggatgccaacgcgctggcgcagcctttcgccgacctcggcatcatgacaacgctgtccacgctgtcgctgcccgccgcgtatctggcgcaactgccgggggtgtatacgctgcgcccccgtctggtggccgtcagcagccagaactttgccgacctggcgagcctgcacaattttcatcctcacaaacgaaacggcaatccctggggcgatgccatcgccatcctcaaatcccccggcggcggcgggtattatctgaacctgcatgacagccagagcggacgggatgacttcaacgaaaaaacgccgggtactacggcgattatcggtaaaaccggctcagggaaaacgatgctgatgaccatgatgcagcaactgatgcagaagtaccgcaatccggcgacgttctctgaatcagcccctcttaagcaattgactaccgtgtatttcgacaaggaccgggcggcggagatggcgatacgtcagatgggcggacgctacttccgtattcgcaccggtgtgcctaccgggttcaatccttttgcgctggccccaacccggcggaatatcagctttatcaaacggctggtgcgcatgctgtgccgccgcaacggcaagccgctcgatccgcgcgatgaggagcggatcagtgccgccgtagataccattatgctcgactacccgccggaataccgcaagttcggtatcacccggctgctggaagtcctgccggagccgcccactaccgacgcccgcctcaacgggctacgtattcgccttaaacagtgggcgcagggcggcgagttcggctgggtattcgacaatgaggaggacaccttcaacatcagcaacattgataacgtgggtatcgacggtacggaatttctcgatgatgacgatattcgcggccccatcacattttatctgctttaccgcgtcaccggcctgctggatggtcgccggctggtgatgttcatggacgagttctggaaatggctggccgatgtcgaattttcccgcttctcgctcaatatgctgaaggtgatccgcaagctgaacggcatcttcgtccccgccacccagtcacctgacgaaatcgtcaaacaccctattgctccggcgattatcgagcagtgcggcacgcagatttttctcgccaacccgaaggccagccgggaggattacgtggaaaagatgaaagtgcctgaaagcgtgtacgacatcgtcagaaacctcgatccgggtgagcgctacatggtggttctgaaaacgccgttacgcgcaggtgaaacccggccttttatggcgatggcgaaaatggatttatcgggcctcgggaaactcaccaaaatgctgagcggcagcgaagacaacctgaaactgttcgacaccctgtatcaggaaggaatgcagcctgatgactggaaagccgccttccttgaacaagccctgtaa

SEQ ID NO: 126508 - DNA, 282 bp, Enterobacter cloacae
atgatgaaaagaaaagagtatgactggcccgtcctctcttccttgttaatggcaagcccggtgctggcagcagacagcggatttaataaagccaatgagacgctgagtaacacttccacaggcctgctcggactggccgccgtcaccatcacgcttgccaccatgtgggtaggatacaaagtcttgtttgacggcaagagcctccatgacgtgcgcaacgtcatcattggcgccatccttatcgtcggtgcgtcaggtttcggtgcctactgggcgtcataa

SEQ ID NO: 126509 - DNA, 636 bp, Enterobacter cloacae
atgctttccaccaccgtatttctggcggcggccatgcagtgcgccgccagcgttcacccgtcgacggcacttgatgtggcgcgggtcgaatccggtttgaatccgtatgccatcgctgaaattctgcccggtggcaaaggcgtgacttcacatttccccacaagcaaggatgaggccgtcagtctaaccggacggctggcggcacagggccgacgttattcggtcgggctgatgcaaatcaccagcaccaatttccgtcattaccgcgtgagtgcccgtgaccttcttaacccctgtaccaacctgtccgtttttgagcgcatcctcaccgactgctaccgccgcggcggttccctcaagcgtgcgctcagttgctactactcaggaaatttcacgaccggccaacagccggaatccgcgtttaaccacaccagctacatccagcgcatcggctacgccgtgccgtcgacgcaggaagaccggcagcgacctcccgccgaaaagctcatgccggaaatccattaccccaccgccgtcatgcgtggcgagcttaccgataacgccacgccagtactggcatccctgcgctaccccaatgccgtgatacgcggcgcgttacccattcccggcccctag

SEQ ID NO: 126510 - DNA, 222 bp, Enterobacter cloacae
atgcgaaaacccatttatcaggtatttgtcacccatgaaagtcagcccgacccgcagggtgaaaaaaacacctggtggacgaaagtcggcgtggcttttgcccatcacggtaaacccggcctgaacgtggtactgacacccggcattgccgtttccggcaagttagtgctccttgagcccagggatgacggcgacgcgacacaggatactcagcccatttaa

SEQ ID NO: 126511 - DNA, 588 bp, Enterobacter cloacae
atgattatcccatcacttaattacgccgtattaaccgatgccctgcatgcattgaaggagggcaacattcgttactgtgaatcgctaggattcactttcgacgaaatgaatgccctcaaccaattatcactagacgagctgtttatcatcagtcgggagtctgcgcagtttttggctgtgacggttcatcacgacgcattacacctgcttctggcgaaatcccgtgaggaggttctgcagcagcaacgtatcaaccacgctatccggctgggtgggtcaattgcgctactcaacaagtattttggcctcacctccaacgaagtttgccttcgccgccgcttactgggcgtccgtgtgccttatggccggacgccagagccggacgaagagacggatgcggccatctggcggcaatggcaacaatgccgggtggccaacctggaatcgaccgatgcgttggccgccatgatgcaggtaacgcaaaccctgctgccgaaagtcgaagggttgtcactgaccatcgtctggaagcgtatcgcactttgcgaacaggaggcgtcagaccggagggccgcccatgccagatga

SEQ ID NO: 126512 - DNA, 195 bp, Enterobacter cloacae
gtgacatctcatcagttattacgtctgaaacaggttgaggaaaaaacgggcctgaagcgctctcaaatctatctgtatatgaaagacggcaccttcccccgctcaatcaagattggcccggccagtgtcgcctggctcgaatcggaaattgacgaatggatcaatattaaattagtccgccgctcaataggctga

SEQ ID NO: 126513 - DNA, 927 bp, Enterobacter cloacae
atgtcagacaatccaacttgcctaaacattagagatggaattccagactggataactataagggaggcggtaagacttctcaatgcattgaatgggtgtaaaataagaaaaagtgatttttatcgatttgctctgcaagggaaaattcggttttcaatatattttcaatccccagtaatattgaggaaaattaaatcacgaaatcataaattaaagctaagaccaataaaaaattcgtcaacgatgaaatcattcatgcctaccgaaagttcctttgtcaacgagaacaatttaactttcagtactgaaggaagatatatccaccctgtacaaagagtcattgacacaacattactcggctatgaatatgtccttatacagcgtttacttgcacattcattaaagataccatcacctgtaacaggagcaaagtcgaataattatggtattaccgtctgtttattgggggaatcgtttcaacttttcgaaaagatgacatggcatgaaagaatcgaacgacacgtaaaaaggctacctaaagatatttcatcagatgattacgaagatataatattaaacgctacaaagaaagattcgcataaatattattttcctatgcatgaattaccgagtgatgcctgctttgtcctcagaaaaagtgaacttgataagttgatcaacaaaccgatcgaaaaagaaatacttcaaccgtctccaactcggatatccacccctctatcacgcctcttctggcttgcctgcaaaaataatgaaactatcagtccgttaatcatgcaaccgtataaattattgtccatttttgaacaatgggcatctgaggaaggcattactgatcgattcagtggcgacacgctgaagacagcgcttgagcgcggctcgccctcttccatatcggcacaaaagtaa

SEQ ID NO: 126514 - DNA, 1194 bp, Enterobacter cloacae
atgaaagaacgcatgccttttgttatatatgtctttgcactctgcgcttttgctttgggattcactgaatttgtcacgatcggcttagtttccaggatatcagctgatctaaacgtcagtgtcagtcatgtaggtacagcggtgacagcctacgccctcggtgccgtaattggtgctccgggattaactgcgttggcaacacgatggcctcgtaaaagattattacttgttgctatgggcctgtttacagttggcaatggtatcgtcggtgcgtctgagtccctaacgcctatgttgattgcacgatttgcttccggtttagggcacggagtgtttcttgctgttgcttcaagtgtggcaacccaactggctgggcgacatcgtgctggcgccgctgtttcggtcgtttttggcggtcttacaattgcgttggcattaggcgtaccacttggtacctacatcggtagtctgttgagttggcagtctatattcatggcagtaacggcaagtggagcgatcggtttcattggattggcaatgctgatgcccacggatcaaaatgatccctccttgcaagcaaatgccatggacggtttaaaagccatgttcaacccactactgcttgcgggagcaggaattacagttttggcctatgcaggatcttttgccctgtatacgtatatttccccgattctacttcaggtaacgcatgtagacgagcgtacgagtagtttgcttatgttggtctacggcgtgatggccgctatcgggaatgtctggggtggtcgcctgactgacaagcaaggtgcagatcgtgccgtgatgacaattcttattggtctggcgatcgtcctctttgctatgtggttctctgtctcatccttaatgttaatggcactgtttattgggttgcttggagcattgacatacgcagcggtcccctcaatgcaagcaagagtgatagggctatctcacatacatgcacctgaagctccagctgtggcagcaggactgaatattgccggttttaacggaggaattgcattagggtcgctattggggggggtagcactgaatgttactggtcttacaagccctacttgggttggaggcggagtagtaatcgttggtattttatggatgttattacaaataaattctaataaaaaacgcaccacctccgattactcctga

SEQ ID NO: 126515 - DNA, 705 bp, Enterobacter cloacae
atgcccaaacgtatcctgtttgtattgaccagccatgaccgtaaaggtcaagccgagagtaaagatgccgcacccagtggtttctatctttctgaggtgtctcacccctacgatgtactcacaaaagaaggatatgaaattgatttcgtgagtcccaagggaggcaagacacatgttgacggtttagacctcagcgatccggttaacgcctccttttggaataatgattccttacgcgaggcaactaaaaccacattaaaaccctcgcagattgatcctgacgtctatgacgccgtctactatgcaggagggcatgcgacgatgtgggatctccctgacaatatagagttggcgggtgtttcatcacgaatttatgaaaagggtggcgttgtcgctgcggtttgtcatggccccgccggattggtgaatattcggctttccgataatgaatatctggttgcgggcaaaaaggtgtcagcttttaccaacgatgaagaacgtgctgtagggttgtacgacattgttccattcttacttgaagacacgctgaagcaaagaggtgctgagcatcttgcagccgcaaattttcagccacaggtgattgtcagcgagagattagtgaccggacagaatcccgcttccgcaaaaggagtcgctgaggcaatgctgcctttgttggcttctattgaaaatagaagagcctga

SEQ ID NO: 126516 - DNA, 1011 bp, Enterobacter cloacae
atgcgacataacagacttgtcatattgagtcttattgtggaacaatctatttatcctttaaatagacctaaacggacaaacacttaccccaaaatgaacaaaataaacttgagaaatgacgaccttgaagtgtttttacacgtcgtcgacagaaacaatttctctgccgcagcacgagacctacagatactccccaagatggtgagcaagcagatagccaggctggaaactgcacttggcactacactttttgaaagaaacacccgtaatctacgtattacagacgagggcagagctatagctgagagggctcgcgtagcgttggccgttctggatgagatgaaggaactttcccgaggggatagtgaggagttaagcggaaatattcgtttgactgcgcccgcaccgtttggccgaaaatatgttgctcctgcgatcgctgcattctgccaagtacatccgagggtgggctttgatttaaggttatctgaccaaatccaggatctttacagtggtgatttcgatctggctattcgtatgggggatctggctgattctcgccttctggccagaaaaatagcaaataatagacgtattctcatcgcatcgtccgaatatctgaagaatcatccacccattgagcgaccagaagatcttttaaatcacaactgcttagtattcgcttacccgggttttttacacaattcatggacgttacgtaaagccggtcatgaaagaagcatcagcgttactggcaaccttatcagtgacaacggagacgtattgcatgcctggagtttggcggggcttggcatatctcttcgagaaacttgggatattcatgatgaattgagagctgggaaactttgccgagttctgcctgattgggaagcaaacacatctcagatcagtgttgtccgggcgcggcgagaaccaataccccgtaggctaagtgtatttattgatttcatgactgaaaaatggaaacgggcaccatgggatgatgattaa

SEQ ID NO: 126517 - DNA, 696 bp, Enterobacter cloacae
atgagctatctggttcagttacgaagttttgttgaagtatacaaagctggttcgatttcaaaagcggcaatgcggttgggcataagccagcctgcaatgtctgcccacattcattcacttgaggcttttaccgggtgtgttctctttactcgtcgttcacatggtgtggtggctacagtggatggggaggaattggcgagattggtggcttcagatttagaaacgattgaactgaagttgtcgatgcttagatcacgtacaagaaagtcctcggggacagtatctttcatcgggccagcagaattaatgtggtcaaaattaccgtacttggtgaaaatattattcaatgaaggtattaaatttaaagttttgacaggaaataggaagcgcatatacagctgtcttctggacggaagttgtcaactaggtttcacaacttctatgccggataaacaaaaatttggatatgctgaaattggaatggaaaagttaatagttgtggtagcgtcactcatagcagacaacttcaaagaaaatgaggacgtgattgatacgctgtcgaagcttcctctaatagcttacgatgaacagttacccttgataagggaagttttccaggattcttcgcgattttttgcactgcttcgtccgtctattactgtaccggatttgcggattttagaaagaatgatctga

SEQ ID NO: 126518 - DNA, 882 bp, Enterobacter cloacae
atggcgaaagaaatactatgtggttttggagtgggtgtagatgccgttgcaggctggctatcttcttatgggggagaagattctccaagcgatatatctcgcggtatgttcgctggcgaagtaggtactccacgtcttctgaatctatttgaccagtttaatatccccaccacctggtttatgcctggtcattccatcgaaacctttcctcggcaaatggaagcagttgtcaatgctggacatgaggtaggggttcataattacagtcatgaaaacccaatatctatgtcgcctgaccaagaaagagaagtccttctaaaaggcattgacatggtcacaaaattaacagggaagagacctactgggtatgtcgctccatggtgggaattttctcctgtaaccacagatcttctattagaaaatggcatcaaatatgaccattcactaatgcatcatgatcatcagccttattatgtcaggaaaggtgattcctggaccaagatagattattccaagacaccgaccgaatggatgaaaccgctggtacgcggagaagagacggaccttattgaattacccgccagttggacaatcgacgatattcctcctttcatgttcatgaaaacaaaacccaacagccaaggtttcatgaatcccagggacatcgaacagttgtggagagatcaattcgattgggtctaccgtgagcatgaatatgcgatctttacttttacgattcacccggacgtatctggacgcccgcacgtgttaatgatgctcgaacgcctcttaactcatatgcttggtcatccaggggtgaaattcctaaaattgaatgacattgcagatgactttgccaagcgatctccacggataaaataa

SEQ ID NO: 126519 - DNA, 678 bp, Enterobacter cloacae
atgctaattacatggaatgtattacatgacagacctctcagtgattttaaccaagatgtacttcaaaacatcccacgcctgatggctaaacgattcaggaaattaaggaattttgtacgccatgacggtcactttattgcctcattcactgaatttggtaatgaagctatagataatgacagattcactgctatatatgaatcaattccaactgaagataagaaaatattcagggataagttcatccattataggaagctggcaagaagtctctaccctgatttttgggctgaactacaccgtccgctattggatgtttcaaatttatttgaaacagctaatgatatctatattgtatcaggaaaggatgaagagtctatattatacattctaagtaaatatggtttaaacatacccgcgaataaaatatatgggaggatgactgacaaaaacaagactcttaccttgctaaaatcaatagccttagataaaaacgaggatattctatttattgatgacaatatccaaaatgttattgatgcattagatcatggcattcaatcattttgggctaattggggatacaacatccctgagcataaattaatggcacttcaaaaaggaattaatgaattagataccgaggatctcttgaaattagtcaagaaaccctcttaa

SEQ ID NO: 126520 - DNA, 576 bp, Enterobacter cloacae
atgtctaatccgacacgagtagtgataatcactggtccaggttttcaggatcacgatgtagtttatacttactatcgttctaaagaggaaggatacgatatatctattgcaacaaaggatggaagtgcagtgacagggaaatatggcatcactgttcctatggataaaagatccaaagacaatattaattttgatcaactcaacgccactgattttgatgctgttattctcactggcggtcatgaagcgcctgatagagttcgccaagatcagagagttaaagattttctaaagcagatggtaatacaggggaaagttgtggctgggctctgccatggtccctggattatgatttctgccggtattctaagagacaaactcacctgcgcttatgttggtctgaaagacgatatggttaattccggcgccaatgtaattgaagcagatgtagttgtcgacgggaatatcataacttgctcctattatgctgaatgtggaaaatttatgcgtcagacattcgatgcaatagatagatggaagcgcggcgaaactcttaaagaaccgctggtggtataa

SEQ ID NO: 126521 - DNA, 720 bp, Enterobacter cloacae
atggaaatccacaaccggactccaaatgtatatgacttgcttgaaataaacaaaatcctactttcaacttcaaataatggtgagtcatttgagaaagacttacatctcaatggattcatagaaaaaccatggggatatgagtatagagtttattgtgattctatttttgatgtatggcgccttcatatatcaaagaatcaatccacgtcaatgcattgtcatatactcaaagacaccgtccttatatgcctacatggtgatggcgagaccagatttcttgatggtacacatcaggcgttaaaatctggggacagcatatatattgcaaaaggtgtattccatcagactatttcgggaaaatcaggcatcgaattaatcgaagttgaaaatccaagaaacaaattcgacttactcagacttaaagataattatggccggcaaaatatggcatatgaaaagaaatcacaggaacatgatcttttacctcctttgcaacagatagctgcaggcacattgatcagagaacatgacctacacaaattagcatacttttccgtcaaaaatcttgatagaaaaatgttgaatgacgaggatgattttatttttatttcattagatgtaaaaagccatctaatgggaaagattcatatcctacgagctaaagatgccatctcagaaatgtactgtggtcagaatgtatttttaattaacgtcccgtaa

SEQ ID NO: 126522 - DNA, 558 bp, Enterobacter cloacae
atgactaattcaaaaaaaccttttgctgacgctaatgttattcgcggtacacgagaagctattcgccagcagccagagctgggcaatctcacctttaacatgaagagtaaatccaacggtggggtatccgtccgtgtggaaactcatgcgactatccagaacggccaggttgataccagtcgctccggaaaatttgctaatgttggcgatgaacctgctgatttatcgggtactgatagcggtatgggcccagctgagtacattttgcaggcacttgccggctgttataccgcgactctgactgtgatggcggcagaaaagggcattgagcttgatggtattgaacttgacctgaacttcgacattaatctgaacggtttcctgggtcttgacgaaaaagttcgcaacggggcgaaagcgatccgtgttggcgttaagctctccagtccgaccgccagccgtgaacagcttgaagaaatggttcgtgcactgccagaaagctcgccgatccacgatacgttggcgaacccggtcagtattgatacccggttggtgtag

SEQ ID NO: 126523 - DNA, 570 bp, Enterobacter cloacae
atgtcagtcatgacacgagaaaggcttctgaatgaagcggaccatctgatgcgcgaacggggttactctgcattcagctatgctgatttgtcaaagagcattggtatcaccaaggccagtattcaccaccacttcccaacaaaagacgttttgggcgaacaagtggtgattcaggcccataccgataccaaaaaccgatttgaacagattgaagcgacggagaatacggttgcgcagatgcttaccgcctatgtagagcttttcatcgaaagctatcgcacgtcgcgtatgccgctatgctgtgctttgtcttcggaaatggccaatctgccaccgaatatcagagtacaggcgaccgaatatttcgatatgcagattgcctggttgaccaagattgtcagccgtggcgttgatgcaggggagctgactgctgacctgctgccatcaaaaatggctctgcttattttgaatttatgcgagggcgcaagcgttgtttcccgggcgattaataagcctgagcttttcaacgatacgcttgaacagatcctaatgattgttaaaagaaaataa

SEQ ID NO: 126524 - DNA, 342 bp, Enterobacter cloacae
atgttagattggaatgaataccgctcagaagtgatgcaacgtgttggtgatctgggtaagttgaccccggaaacactaaaaggcgtcatggctttgggcaacgccggcaataagaccaacctcctgggcgcgaaagtgcgtgaactgattgcactggcttgtgcggtgacgactcgctgtgatggttgcatcgccgtccatgccgaagctgccgttaaagctggcgccacagaagaagaaattgctgaagccctgggtgtggcaatcaacctgaatgcaggcgctgccgttgtctattccgcacgtacgctggatgcgattaagcaactgaaagcgcaatag

SEQ ID NO: 126525 - DNA, 903 bp, Enterobacter cloacae
atgctcgctcaacagaacatactggcactattgcatacgtttgaaacggcagcactgcatatgagctttactaaggcggcgactaccctcaatctgacgcaaggggccgttagccaacgcattcgttctcttgaatccatgctcggattcagactatttatcagaatgaccagaaagcttcagttgaccgatgaaggggagcgtttacttggcgtactcgcgttttcacttaaacgcatcagtgatgaaatagaagatattcgcgtgcaggggctgagaggaaccttgtctgtcggccttccacctaccttcgcttttctctggctgatgccgcgcttaccggtatttaccgaacggtggccggggctgaatatcaatttcagagtgagagccggtctggtagattttaatcttgaacgggtagatgtcgctatctactacagtaatctgaaataccccgatctctactgcgaacggttatctgaagagacgctggttcccgtctgtattccatctcttgcaaaaaaaatcaggcaagcaaaccattggttagctgaagtcccattcattcatacgtctgaatccgttgactcccagaatgttttttccgaatggcgagaatggtgcagggagtctggcaaaaacctgcctgttgaagataattttttgagcttcaacaattgtcagatgtcgattgaagcggcactcaatggcggcggtatcatcatgggcagaaaacgactcattcgacattacctcgatgagggccgactgattgccccttttgaaatagaaatacccgccgggcgaggatatgacctcattatgccacgagaaaaccttaaccgaccaggcgttcaggctttggccgaatgggtaagaaatgtgtttaacgaggaataa

SEQ ID NO: 126526 - DNA, 1320 bp, Enterobacter cloacae
atgaagggtcttaagttagtggttattggagcgggttcaagctacacacctgaactgatggaaggcattatcaagcgtcaaaatgaatttccgatccgcgagttttggctggttgatattgaggatggccgtgaaaaaatggcgatcattgctggcctcacccgacggatgctggaaaaaaatgggctggatataccggtttatgaaacccttgaccgcacagaagcactgctcggtgccgattttgtttgttctcagttcagggccggctgcctggaagcacggatcagcgacgaaaggatatcgctgaaatacgacatgatcggtcaggaaaccaatgggctgggtgggtttgccaatgcatgccgcactatcccgattgcattggctatagcgaaagaaatggaacaactgtgcccggatgcctggttgctgaactttaccaacccgtcgggaatggtcactgaagcgatactgaaatacagcaaagtcaaaaccgtagggctgtgcaatgtgcctgttatcatgcaaaaaggtattgccagtgctttaggtgtcagtgacatcaatgaatttatcatgcaggtcgcgggacttaatcacttcatttttgcgcgccatatttttcatgaaggtaaggataagctgcctcaggttattgagctgatttcagaggggaatgatcctttggtgcctaaaaatattcctcctttcaaatggccggatcggttgttggcgaatatgggaatgataccttgcccctacctgcgttattactacatgagcgacgacatgtaccgtcaggagcttggcgaagcacaaggggaagggactcgtggtgagatcgtaaaggagctcgaaagagaactattcgaaatttatcgaaacccggaactcgccgagaaaccgaaagcgctggaaggtcggggagggcagtactattcggatgcggcatgtgaattgatgagcgcaatatataacgacaaacgcatcatcatgcatgtcaatacgcgaaacgatggtgcgattgcgggcctgccggatgactgtgcggttgaggtcagttcaatgatcacccgttcaggacctataccactgaatgtcgaacctttcccggaagatgtacttcgtctgattcaactgatgaaaagctttgagcaattgaccattgaggcagccatcagtggtaatcggtatacggcatggcgtgccttggttattaatcccctagtcaaaagcggtcaactgcttgaaaatgcattggatgaagtgatcgaacataacaaagcgttgatgccggccttccaacgcaataaataa

SEQ ID NO: 126527 - DNA, 330 bp, Enterobacter cloacae
atgcgtgaattaaccctttacaatgaagataattttagagaaatcgagaggcatgaaggggttgcggtggtgcgcttctctgccccctggtgcccaccttgtcagatgagcgaagacatttttaaccattttgccgagcagatagaaagcgacgtcaaagtcggcaaagtgaatgtggatctggcaccggtactgaccaccaaatatgaaatttggggactgccttccgtactcatgttcaaggatgggcagttggtccagcgtataccgggtgttaaatcggcagggttttatcagcaagcattgtcagagctgaaaaaagggcagtga

SEQ ID NO: 126528 - DNA, 795 bp, Enterobacter cloacae
gtgctgcatacgcagcccctgatgatgcgccatatcactatagatgaacccacaatcatcctggtccgccatggcaggaaaataatccgctgggcgcaagaggagataacgctggaagcgggggacgcggtggtcatcggggaggggcactcttttgatatcatcaatacaccatcacctttaacgggtacgtacgaagcatcatggctgagtttttgtgccgatttcgtccaaaactactgcttcatgcatgccccacgtatgagcatgaacgaagcaaataaaatggcagagccaggcaacagttttcgccaggccttttatcacactgcggaggccattacagatactgaaaacatacctgaaagtatcgtggccaggcgtatggaagagatgctgagttggctggatgaataccgaattttcttcgcgctgaaacaacataccggactggcgataaaaatccgcaaactcgttgcagcagacatatcacaagactggaatactgcgcaggtggcggctgaattgggtatgtcggccaccaccctgagacgccatctgcatgccgaaaatacgtcattcacccatctggtgactgacattcgcatgtgccgcgccctgacacttttgcaggtgaccgatctttcagtcacccgcatatccctggaagtcggctatgaaaatccgtctaagttcgccgccagatttcgaactcgcttcggattcagccccagcctggtccgggtttccggccaggctatcggcaacctggctgcggttagcggccctgcgtaa

SEQ ID NO: 126529 - DNA, 564 bp, Enterobacter cloacae
atgtccaaacttcaccttactgttatcagtacattatgcctggcgttgtcgagccaggtcgctttttcagccagttttacgctgacaagtcatgagcttgaaaaaaaccgtttccccgcagctcagaccctgagttcaccttatggatttgggtgcagcggtggaaaccttgccccctcttttaactggagtggcgcgccggcaggaactcaaagcttcgctctcaaaatttatgatagggatgcgccgacaggcctcggttggatccactggcaggtggtgaatattccctcatctcttcactcgttaccggctgggataacggcggataacaaaaatctcccgcaaggggctcttcagacccggactgatttcggtatcccgggttatggcggcccttgcccgccgaagggtgaaacgcaccgttatgagatcacgctgacggcacttcgtgtcgacaaacttccgggaataacggcggactcgacgcccgccctggtcggctttatggcaaaagcgaactcactgggcgaagcgcatcttcagattacgcagggccgctaa

SEQ ID NO: 126530 - DNA, 1107 bp, Enterobacter cloacae
atgagtaagttgttcaccccctacaatctgtcaggcatgcagttaaaaaaccgcgtggtcatggccccgatgacccgcacccgcacaatgaacgacgtgccggatgacgtcgttgcactttactacgcccagcgcgcctctgcggggctgcttatcaccgaaggcatgcctgtttctgaagaagggcgcggctatctgtataccccggggatctacaacgctgcacacgttcagggctggcgcaaagtgaccgatgcggtacatgcgaagggcggccgtatttttgctcagttgtggcatgtgggccggatgtctcatacctcaattcagccgggcaacatcgcgccagtttccgccggtaccgtacaagcggttaacaccaccgtctttgcactgaccgagtctggcgaaccgggacctgtcgttccaagccagccgcgtgcactggaaaccgcagaagttcgacgcgttaccgctgactttgtccattcagcgcgtctggcaatggaggccgggtttgacggcgtggaaatcatggcggcgaacggcttcattttcgaccagttcctcagcagtgaactgaaccctcgcactgatgaatacggtggctctgtggaaaaccgtcagcggttcctgctggaaacggttgatgccatctctgcggctattggtagcaataaggtgggcttgcgcatttcaccgttcgggcggatttacgacctggcgccttatgaaggtgaagaagagatttgggccagtatcgctgcggccctcggccaacgtgagctggcttatgtgcacctctattatcaacctgtttatacccaggcaccggtacctgccggtttcaaagccgcgttccgtaaaactctggggggcaccgttattgccgccggcggcttcacccgcgagattgccgaaaccgcacttgaggcagacgaactggatcttgttgcgtttggcgtgccgtacatcgccaaccctgatctggtcgaaagaatgcagaacggctggccgctggctgaaagcgatcgctcgacgtattacggcgtgacggggtcgccggaaaaaggctacaccgattatcccgcctgggaagccaactaa

SEQ ID NO: 126531 - DNA, 702 bp, Enterobacter cloacae
atgcaaacccttaagccgattattacgatagatatctggtcagatctggtctgcccctggtgttggattgccaaaaagcgtttcgaacagggccttgccgcctttgaacacaaggaacaggtcgtggtccgccaccacagtttccgtatttccggcgaccggcctgccgtgccgttccgcaaagccctttacaagaagtttggcggggaacatggggcggaactgatgatgaatcaggtgggcacggccgggaaggcagaagggctccagtataactttgacaccatgctctttggcgataccgaagatgcccatacgctgctcgcggctgcacgtcacgccaatatgggcgacgccatggcagaacggttttatcgggccagtgtgactgaggggcgttccattttcgatccgcaggagctcattgcgttagctacagaagtgggcatgtccagagccgacgctgaaagtgcccttgccaatgaggccttccgtgcatcggtggctgaagatgaagcccatgcccggtcgatcggggtcagcggtgtcccgctgttcctgctcaatgaaaaatatgccatcagcggcgcgcaatctgcggacaacttcctgaacgcgttgaagcaagtctgggaagaaaaagcggccgaattggcaaaaaccgacggccagacctgcggcgctgacggttgcagcatctga

SEQ ID NO: 126532 - DNA, 816 bp, Enterobacter cloacae
atgactgccggcaaatctaccctgcaaataacggagttcaaaatgagcgattactttaaaggcaaaaaaatgcttgtcgtgggtggcaccagcggcatgggtctggaaacggcgcgtatggtgctgaaagccggtggcagcgtggtactgacgggcaataaaaaagacaaggcagaagcggttcagaaagagctgagcccactgggttccgtgtccgtgattgcggcaaacctgatgaccgaagagggcatgaacgccattcgtcaggagattaatgctaatcatcgcgatattagcctgatggtcaatgcggccgggatcttcatgccgaaaggctttaccgagcatttggaagccgattacgacatgtacctgatgttgaaccgggcaaccttcttcatcacgcaggacgtggtgaagaacatgctggccgacggccgtgaaggggcgattgtgaacgtgggctccattggcgcgcaagccgcactcggcgactcaccggcttccgcgtactccatggccaaagccggtctccacgccttgacacgcaacctggccattgagctggccagtgcgggtatccgcgtgaacgcggtctcgccagggatcgtgcataccccgatttatgaaggcttcatggcgaaagaagacattgccggcgcaatgcaatcgctgaacgctttccatccgctggggcgtgtcggcacgccggaagatgtggccaataccatcttcttcctgttgtccgacaaagcctcttgggtgactggcgcaatctgggatgtcgatgccggtatcatggccgttcgcagataa

SEQ ID NO: 126533 - DNA, 495 bp, Enterobacter cloacae
atgcaagatttcaacgtactgctcgaagcagcatcagattataacgaatttgttggcagcggagcagaagaagaccgcaatgcattacggcattttgaggggcttgccaacgaggcattacctgacgatgtcattagtaagctctcgcaacttccgggttcgtacagcattctggtagctgctgaaatgtggtgccccgactgccataaaaacttgcctgtaatccatgccattgccgcgtcagcgccggcaatacgtctgggtattatcacccgcgacaaggctgaagccgtctttaaggcacactttggtgtcgataaagtcaaaattccgtttgccgtggtactggatgagaacgcgactccgctggggcagtttattgaacgacctgaaaatgctaccggcaacaatggagaagtgagcgagaggtacaaaaacggtgagcttctggtcgataccgcccgcgaagtgacttcaatttttccaggaaaataa

SEQ ID NO: 126534 - DNA, 849 bp, Enterobacter cloacae
atggggcggtctgttggattcaagatagtgatagcaatgatggcattcgcagccaattctgtgctctgtcggattgcgttgaaaggcgaacatattgacccggtgacgttcagtgaccttcgcctgatgagcggggcggtggtcttattaccactgttgttgagacgtgaggggaaaaagcagggcgtctggagcttgaaaagcgggttctttcttatggcctacgccctgtgtttctcccttgcctatatccatttggatacaggaacaggtgctttgctcttgtttggcgttgtgcaactggcgatggtggcccatggccttttccatggggaaaggctgtctttttccagagcaacggggcttgggctggctgtagccggcatggctgctcttctcttacctggtgccaaaacgccccccttgggcagcgctgttctgatggcgctttcaggccttgcctgggcggcttataccctctgcggaaagcgctctcccagcgcagcgcaggccactgcggcaaatttcatccttgctgtaccttttgccctggtgttgtcgccgttcattagccagggagcgcacttcgacggtatcggaattctcctggcagtgctctctggtgcgggtgcttctgccggagcctatgtgctgtggtattcacttttacctcgtcttgagtctgttgcagccagtacggttcagttgagtgtgccctgtctggcgatgctgggaggcgtaacatttttgggcgagtcactgagcctcagaatggcattttcaacgctggcagtccttgcgggcattatgttggtgatcaaggcaccggggcagaaaatacggcactga

SEQ ID NO: 126535 - DNA, 1224 bp, Enterobacter cloacae
atgaaatacgattttgatgaagcagtggacagggcagggacagacagcttaaccgtcgacggctggcgtgaatatatgtttggtgcccatgaaggccccgcgccggaagtaccggccaatggttttataaacctctgggtagcagatatggctttttccacccccgagccggtgcttgaagccatacgttcccggttagataaaaaaattcttggctacacccgcatttatgacagggattactatgagatttttggggcctggtgtgaaaggaattacggatatcggtttcaggaagaaagcattgttttctcccctggtattatccctgcgcttaaccgattggtgccgttactgacccacgaagaagacagcatcctcatcctgaccccttcttacgcaccgtttaaaaaagccggagactatagcggtcgtcgcgtcgtcgattgcccgcttagaaataacgaaggccactgggcggtagattttgaggcaatggaacaagccctgagcgatgagcagcagcgaattaaagccttctttctctgtaacccgcataatcccaccgggcgagtttggcgacgtgatgagttgcagaaaatgatagcgttatgccttaaacatgatgtgtgggttatttctgatgaaatccactgtgatttatcccgctcgggtgtcacgcatatccccgccgcgtcaatttttcctgaaaatcataaaattatcacctgcatgtcgaccagcaaaacgttcaacctggcgggtaacctgcttgcaaacatcatgatccctgatgcctcagtgagagccgaatggcttcgcctgcatgatgattttatctctccgctgagcctggtggctaacaaggccgcctggtccgagtgcgatgagtggttgactcaggtcaggcactacattgacgagaacttccgttttctgcaggactacctggggacatatcatccgctggcccgttttatcattccggaagggacttatcttgcctggattgatatctctcgtttggtagatgtcagtaatcaggaagaggtaaccctcttttttgccagacatgcgggtgtattgcttgaaggggggcaaatgtttgtcagtaacggcgacgggcacatccgccttaatctggcttgtccacgcgctatgcttgctgaggggctcaaccgcataagcaaggcattgagtgcgagttctggcgatgctacctga

SEQ ID NO: 126536 - DNA, 1353 bp, Enterobacter cloacae
atgacgaaacactatgactatatcgcgattggtggtggtagcggtggtatcgcctcaatcaaccgtgcggcgatgtatgggcagaaatgcgctttgattgaagcgcgggagttgggcgggacttgcgtcaatgtggggtgtgtaccgaaaaaaataatgtggcacgctgcgcaaatcgcagaggccattcatctttatggcccagactatggcttcgataccacattaaaccgccttgactgggctaacttgctaaaaaaccgcagtgcctatatcgatcgtattcatacttcatacgaaaatgtgttaggtaaaaacaaggtagatgtcatcaaaggttttgcccggtttgtggacgcgcatacggtggaggtcaacggggaaacgattaccgctgaccatatattgatagccaccggtggtcgccctagccattcctctattccgggagcggaatacggaattgattcagatggtttttttgcgcttgaggcgctaccggagcgcactgcagttgttggtgcaggctacattgctgttgaactggcaggtgttctcaatgcattggggtcaaaaacccatttgttcgtacgtaagcatgcgcctttgcgcagttttgacccgttgctcacagaaacactggttgaagtcatgaacgtcgaaggcccaacgttgcacacccaagcgatccccactgcagtggtcaaaaaccaggacggcagcctgacactgaagctggaagatggtcgtgaacaaacggttgactgtttgatctgggcgattggccgtgagccagccaatgacaagttgaacgttgagatggcgggtgttgaactcgatgaaaaagggtacgtcaaagttgataaatatcagaataccaacgtgccgggtgtttacgcggtgggtgataataccggtgcggttgagttaacaccggcagctgttgctgcgggccgtcgcctttcagaacgcttgtttaacaacaagccggatgagtatctggattacaacaatatccccacagtcgtctttagccacccaacaataggtaccgttggcctgactgaaccccaggcgcgtgaggaatatggtgatgatcaggtgaaagtttatcagtcatcttttaccgccatgtacaccggcgtgacgcgtcatcgccagccatcccgcatgaagctggtatgtgtggggttggaagagaaaatcgtcggtatccacggtatcggtttaggcatggatgaaatactgcaaggctttgctgttgcgctgaaaatgggagcaacgaagagagacttcgacaataccgtggcaattcacccaactgcggcagaagaatttgtcacgatgagataa

SEQ ID NO: 126537 - DNA, 762 bp, Enterobacter cloacae
atgaacaaatacatcctcgcgttatctgctgcacttatcggctcgcaggttcaggcagcaacgcccgcagcgcttcccgcaccgatcaagcagttggaaaaacaaggtatagaaataatcaaacccttcacggctcccggtggggttcagggctggttgggaaaatatcagggaacgggggtgacaatttatctgacccccgataaaaaacatgccatatcaggttatatgtacgatgagaatggaagtaacctcagcgaacaggtcataaaagaggagatttacatccctgctggccgcgagatgtggaaaacactgtccaaagctgccggtatcacggaaggcagcaataatgcaaattgtcagattgtcgtgtttgccgatcctttttgtccttactgtacaaaattcagacaggaagtgcagccctatattaaggacaataaaatcgctttgaaaacgcagttagtgggtgtcatgcagcccgacagtggccgttacgcggctgcgatattgtcttctgaaaaccccgcgaaggtctggcaggatttcgagttgtcgggtggcaaaaacaagcctgcacttttggagaaaacgccgcagccgattttctcgcagatccaatacaaccagaaattgatggaagatgtgggggcaagcggtacgccagcaatttattatcttaaccacgccaacatgcttcaacagatcgtcggtctgccggaccaggaacagatggccaatcttatagcgtgtaaatag

SEQ ID NO: 126538 - DNA, 969 bp, Enterobacter cloacae
atgcctaaacgtataaaaaacagccgctggtcaggttacgatccccgctatatctattctctcgtcgtccgacgttactttgttgagatgaagaccaaaactgagattgctgaagaactcgagatttcgagatttaaagcggcgcgtcttatcgatgaggcaataaaggaagagtatgtgaagtttctctttccaaagcagcaactgcttgacgaagagatcgcacttaatctctgcggaaagtatggtctgcagaaggcaatcgtgctttccgtgtcagaatcctggtccaatcaggaagaactgaatgagaagctggggggtatcactgcaagttatctcaacaataatctcgctgagggaatgaaggttggtattgcctggggacgcgttttatccagcacagtgagtcaactcaccagcttgccggcattagatgttgttcagctatctggcgttcatcccggcattgaatttagccagggtccgatcgaccttatccacagactgtcgactatctctcagggcaaggctcatcctatgtatgtgccgatgtgggtggatgatgaaagcctggcccaaaaactggccagtgatccggctgtggtggatacccaacaatattattctcagctggatgttgtcatcaccggtattggcgcctggaaaacgggctcatccagtttgtgtgatatttttcccgagtcgtggcaaaaaaatctgtttgagaaagatatcgctgcggatgtctgcattactctcgttaacagtaaaggcgagatccttgatagcccgatgagccgtcttgggtttggtatttcaaccgaacaattgcgtaacacgaaaaccgtgattggtgtggcggggggagaacagaagtatgaaggcatcgtcgcttccctcaagtcaggccttttagatgtgttaatcactgacttcgatactgcggtgaagcttgtcaattcctga

SEQ ID NO: 126539 - DNA, 450 bp, Enterobacter cloacae
gtgagtacagtcgctattaatgttgcagatggtgcagcattcaaaaattacgatgaggtgctgcagcacatccatgaaaagctgtattcagaagggatagtgaaaaagacctatctggcagcactgcgcgaacgcgaagccatgtatccaaccggtattttgcttgatggttattctgtggcgatcccacattgcgacagcaaccaggccaacagcccgtcgatttatattattcgcttacctgaaccggttcaggttgatcaggctgatggcgacgataaattgtgggtcaaactcattatcaatttggtcgttaccgatccggctaatcagttgcaactgctgaaggccctttttagtaatcttcaaatggaagacttttatcaaaatttacttgagcttccttccgagaaagcgcaggcactttttatttccaccgtcatgcaataa

SEQ ID NO: 126540 - DNA, 294 bp, Enterobacter cloacae
atgattaatatcctcgtagcctgcgggagcggtgtcgcaacgtcaactatcgctgctgatgaagtgaaatccgtgtgtacagaatatggcattactcagttcaaaataaataaatgcagcatgtcagaacttccttctgaattacagaatgctgatgtgattttaaccacgaataactacaaaggtgatatcggaaaaccgcatatgagtgtggccgggtttatcaccgggattaatgaagctgtgttacgaaaaaaactaggggatttattaacagagctggctaaaaactaa

SEQ ID NO: 126541 - DNA, 1254 bp, Enterobacter cloacae
atggacatgttaaaaaacataatgctaacgataacaagcatgggggcaacggcaatcctaccacttgtcatcttcattttgggtttggttttccgcatgaaagtcggtgctgccattaagtctggtatcaccgtgggtatcggttttattggtttaggtttggttgttaatctgttgagtacatccctgcagccggcaattgcctactattcaaaactgggaagcggattcactgtggctgatatcggatggcctgcggtgggcgcggccgcatgggtggcaccctttgccgctttagttgttccagtgggtattattcttaatttgctacttgttcggcttaaattaaccaaaacgctgaacgttgatatctggaattatatgcacttcctggttcccggcgcgctggcctatttcgtgtttgacagcttctttatcggttttggcgtggcagtcgcacttagcgttatcgctctgtttattggcgatttaattgctccccgttggcagaaatattatggcctggaagggacgacctgtaccaccatgatccatataggctggacattaccttttgcactgctggtcaataaaattatcgacctgatccccggcctgaacaagctcgacgttgatttggagagcgtacagaaacgtctgggtgtgtttggtgaacccgctatcatcggtgtcattgtaggttgtctgcttggactgctgacgaaacagcctgtgaccactattgtcccgatggcaatgggggtggctgcggtaatggtgctcctgcctaaagtggtgggtgtcctgatggaaggactgtctccaattgggaaaagtgccaaagagattatgcaaaagcagatgggtaaagacgccgaactgaacatcggtatggattgtgccctggcactgggcgacccagcgaccatcaccgtcaccgttatcaccattccgttgaccatgctttgcgcactgattttaccggggatcatgattttccccatcggcgttctgatgtcaatcatctatatgacaaccatgaccgtaatggccagcaacggaaacgtcatccgctcaattatttcaaccttactgttcagtattgtcgtgatgtatttaggagggtatgtggctccgggtgcaacccaattcctgcatggcgcaggcgtcggcttgcaggggcagggtactgactttgtactgactggcccgtgggaagtattgacgtattggttgagcactgtattccattga

SEQ ID NO: 126542 - DNA, 645 bp, Enterobacter cloacae
atggcacagattttaccatcaatttttggcgcgaatatcttaagtctgcaagatgagctccgttttttagaagaagagaacactgaaatattgcatgttgatttaatggatggaaccttcgtaaataatattgcctttgggccgaatcaaatttctgcaatgaaaaaagccagcaaaatgactttcgacgtacacatgatgctggctaatcctgaaagacatattgatgatgttatcaatactggcgcagaaatgatctcagtgcattatgaatcaacgccgcatgtgcattttattttacagaaaataaaaaaggccgggcgaaaagccggtgtggtcatcaatccgggtacgcctgaaagtgttctggaatatttgttggacgatattgattacatcctgattatgaccattaacccggggcaacccgggcagactttcatcgagaaaagcctcgagaaaatcaggaaaaccagagaaatgattgctggccgacacattcaaattgaagtcgacggtggcgttaatctggaaatagcggaaaaagtacaggaggcgggtgctgatttaattgttgtcggtggcgcgttatttaatgacaaccctaaagcaagctatcaggcattaaagtctgtcatgcattaa

SEQ ID NO: 126543 - DNA, 753 bp, Enterobacter cloacae
atgagtcattttgaaggtaaagttgcgctaattaccggtggtgcgcatgggattggtaaaggaattgcaaaacaattcgccgaacgcggtgcgcatactgtcattgtcgattataacgaggctaatggcatcaaaactgcggaagaactaacctttggcaatgttaaatcgctctttgtcaaaactgacgtctctgatccgcaggcactggctgaagtgcgcaaaaaagttatcgaggcttatggccgtatcgacattctggttttgaacgcaggtgtcgcttttgccaataaagtcaaagacattacttttgacgagtggaacaaaacactctcaatcaacctgacgggtttattcaatacggtcaaagccttctacgatgacttcttaactaaccagggttcaatcgtttacatctcctccggttctgcgctgtcaggtactggcgggggggtgagctatccggccagtaaagcggggggtgaaggccttattcgtggtctggcaaaggagttgggtccaaaaggtgttaacgtcaacgctatcgcgccgcgtcttatcgacaccggcgaaatgatgcgtgttaattacccgacgcaggcagatttagacgcagtcctggagaaaattccggtccgtcgtctgggcacaattgatgatgtcgcaaacctggccattttccttgctgataagtcaaattcttacatccagggacagacgatcctcatggatggtggccgtacaattgcctga

SEQ ID NO: 126544 - DNA, 561 bp, Enterobacter cloacae
atgggtgttcaagaaaatactgtcagtattctcagggaactagaacaaaacgcgctcaatatcgacaatgatcaggcgcagcattttatcgggcagatccgtaatgcgaagcatattttcctgcaaggtgcagggcgcagcggtattgccatccgcgcgttcgctaaccgtttattgcatttaggcttctcggtcagcgtagtcggggaaatttcatcacctcatacgaaagcgggtgatttgttaattattggttcaggcagtggcgaaacaggcagtctcaagagccttgcgcagaaagccgttgagtgtggtgtcgacgtggcgctggtcaccatgaagaaagactctgcgattggccagttggccaactgcgtgctggtattaccgggaacggtcaaaactgaaaacgatcgcactcttggccagttttcgcagccaatgggttcctctttcgagcaactctgctttatcacctacgatgccatcgtgctggaactcatggaccaactgcgtgaaaccagtgaaaccatgtttaaacgacacgctgattttgagtaa

SEQ ID NO: 126545 - DNA, 285 bp, Enterobacter cloacae
atggcagacttttacatctcgggtatacgcagagacaatgcagggcaacacattcagtacgttaaaatcatcaaagccggtaatggggggaaggacgcatcaattaactcgcatcagtttgtcgctgagttgataaatgccggtaagacaagctttcaaacaattacctacgtgaatgacaagtgggtttatggggcaatggttcatgttattgatgggatttacctcacgaccgatcctaatgataccaaacgcgataacctgggtaatttgcccactttttaa

SEQ ID NO: 126546 - DNA, 1512 bp, Enterobacter cloacae
atgatgaattatgtggcgaagcaggtcaaaatcggtttttcgggtgtgcaggttctccacggtgtggatttcagcgtaaagcctggcgagatccacggcctctttggccataatggggcgggtaaatcaacgctactgaaaatcctggcgggcgttaacacgcaggatagtggagagctgatgatcggcgaaacgccggtgcaccttgcttcgccacgggatgcactcaacaaaggtattgcttgtgtgtatcaggaactccgtctcattcccggcatgagcgtctggcaaaatctttttctcggacgtgaatgtcgtaaaggcagtggctttatagatgatgcaagtatgatcgcgcataccgagaaagtactaaatgattaccatctgagtttcagcgctaccgcgctggtcaaaaatctgtcacatcctgaaaagcagatgctggaagtggtttctaaccttgatcgcgacgcccgttttcttttcctcgatgaaccgacgaccgcgctggaaggtgcgcaggcagaagaactgctgcaggcagtacaacgtatcgcacgcgaaaagcagattggcgtagtgctggtctctcataaattagacgaagtgttgggtgtttgtgatgaagcaaccgtcatgtgcggcggccgagtgatttataacgaaggcaaaaagacgctgagcaaaagcgccatcattgacgctattgtgggcgatgcaaatgcttatcaggcgccgtctaacagccgtagtctgatccgcggcgcgatgggcaaaccctggctctcggtcacaaacctgcagactgatcgcctgaaaggcatcaaccttgaggcatatcgcggggaaattttgggtatatacgggctggccggcgcaggccgaacgcgcttgtgccagacgctgtttgggttggaaaccgttaccggtggtgacatccggctgggtcacaaagaataccatccttcttcaccggcaaaagccattgataaggggattgcttacctgacagaagaacgtaaaaaagatggcttcattcctcagatgtcgagttatgccaacgccatgctgccggttctgaaaaaattccgttctggcggatttgtcagtcacagcgcggcaaggcaggccgccgctgagttgctgagcaagatgaatacgctgggaacgctgagcggaccgattaaatcgctttccggcggcaatcagcaaaaagttctgctcgccagggtcattgcgcaaaacgccaatctggtattgctggatgagccgaccaaaggcgtcgacattggggcaaaagcggatatttatcgcatcatccatcagttggcagataaaggctgctgcgtcatcgtggtatcgagtgaggaagaggaattgctggacgtggcagataccattacggtgttccgacagggtaaatgcgatggtgtgatcattcctgcacgcgaccttaaacccgcagatcttcgcaaagccgcatgggagcatgctgaagcccaggcttag

SEQ ID NO: 126547 - DNA, 981 bp, Enterobacter cloacae
atgaaactccgtaccacaatcaccgcaggtgcagcgatagtcgcactgtcctgcatgctcgccggctgtaaccgtgaggatactgagagcactgtgggtgccggcaaaaaaacattgggcgttacgctgccgaacctcaccaacccttattacgttgccatgaaaaaaagctttgaagacaatgcagcggcacagggcttgaacgtaaaaatttcgattgctgataatgacgacgccaagcaactttcgcaggtgcagaacttcattgaacagaaggtggatgcggtcgcagtgaactgcgtctcctcaggcccgtgcgtgtcgatcataaaccagcttaatcaggcaaaaattccggcgtttgccatcaacatccttccggataccgaggggatgaagcagcaaaacgtcacgctgattcaaggtgttcagaccgatcagcgtgaaggcggtaagctcattggtcagcaactgttgaaagacattggtgaaaatggcactgcgacagtgggtatcgtgggagagccaacatccattgccgcgaacgcacgtgatgaaggcttcaaggaagccgtggcatccaacaaaaacattaagttcgtcgcgctggtcaatggcaaagtagaagaaacaacctccctgaaagtcaccactgaaatgctgcagggcaggccagaaattaacgtcgtgtactcagacaccgaaccttccgcgctcgggtcactggcggcaatccagcaactgggggtcagtgacaaagtgaagctgtatgcgtttgtggataaagaaggcgtcaaagccgttcagaacaacagcatattgaaagccggtgcgattcaggagccggttaaactggctcagttgctggttgaaaatgccaagaagagtctgaacggtgaacaggttccagccatgatcaacaacccaccgctgctggtcaccaaagacaacgcagcatcggtaatgggttcagcatactga

SEQ ID NO: 126548 - DNA, 1026 bp, Enterobacter cloacae
atgagttcaataactacccctgcaaaaatcaaaccgcctaagcagccgctcaaagtccctgcagaagcgggtatcgccgttgttttcttactggtcatgctgggcgggtttatcgccacgcctaacttcctgactgtttcgaacatgatggtgttgcttctgaacggcgcggtcatcggcttcctttgcctgggacaatcctttgtcctgctgaccgggggtatcgacctctcctgcggctccatcgtggcgatgacctgcgtggttgcggctttgctgatggagaaatttggcattccgtggcagcttgccgtacccatcgtgttggcggtgggtgcgctgagtgggctggtaaatggtctgataatcgaacgcactggggtgccgccattcattgtcacctttgcgatgatgggggttgcggcatccataccacaaattatcaccggcgccgaatcgatacgcgtgacgcaaattggttacagcctcatcggtcagtcaaaaccgttgggcattccgttccctgtcgtagcgctgctgctggccattgttattggtgtcatcttcctgcgccgcaccatcaccggaactcacatctatgcggtaggcggtaacgcagatgctgcacgcttatcggggatcagcattccacgcatcaccctgttggtgtatgcaatttccgggctttgtgcggcatgcggcggcctgatttatggatcgcgtctgatgacgggctatccgacggcgggccgtggtgacgaactgttcttctcaatagcgggtgcggtggtaggtggcgtcagtctgtttggcggcaccggcagccttatcggcgccatgattggcgccatgcttattgcctcaatatcgaatctgatgaacgtgctgaacgtcagtgcttactggcagccgctggtcatcggcctgatcattctgttcggcgtcaccttcgataccttacgtacctcgaaaaaaatcgtgatcccctggctcaaagtcaggaagtcacgcaaaacacaacaataa

SEQ ID NO: 126549 - DNA, 1449 bp, Enterobacter cloacae
atgaaacaggaccttgttgcgggtatagattcctccacccagtcttgtaccgtcatgctgcgtagtcttgaaaatggcaaggtgatcgcacaggctcgtaagttgcatccaccgaccacaccgccgtgtagcgagcaggatccgcaagcctggtgggatgcattagtctccgcgctcactgaattaaaacaatggtggccacgtattgcaggtctggctgtcggtggccaggggcacggcctcgtcatgcttgataatcacgatcgcccgctgcgtcctgcgaagctgtggaatgacacggagtctgcaccgcaagcgcgtgaattgtgcgagaagattgctccggaagaatgggcacgcctgacgggctccgttccggggccagcaatgaccatttctaaactggcctggacagaacaaaattatccggggctgctggaaaaagcccaccgcatcatgctgccgtttgattatctggtttaccgtctgagcggtagctttgtgtgcgagcgcggcggggcatccggtacgggttacttcaaccccttcaccaatagctgggaaccacagctggcagcggtggttaacagtcaaattgactggatttcccgctggcccactatcatcccgtcgcatcaacctgcaggcgtggtgaagttgatgcctgagctggaggaactggcgggtgcaatcgtgggtgtcgggaccggcgataacatgtctgccgcactgggtatgaacctgaaaaccggtgataccggtatctctatcgggaccagcggtacgttatatggcatcaccaggaaagggattaccgacagcaccggcaccatcaacggttatgccgatgcggccgatcgctttatccccatgattactacattgaactccgccaaagtcaccgatacatttcgcaaaatgctgcgcgttacccctgacgaattcgacgagctcgcgctgagttcgccacccggcgccaacggtcttcagcttgttccgtggctggacggcgagcgcacccccaaccttcctgacgccacgggacacatgcgcggattacgtaccaccacaacgatgcaggatatggctcgcgccaccgtggaaggcgtactgtgcggccttctggcgggcggtctggtactgaaacaacatggcttcactgacgacggtcgcattgttgtcaccggcggcggcgcaaagtcacgagcctatcgtcagattctggctgacctgacgggcaagcccgtttggatttctccggtgggtgaaacggcagccgcgggtgcagccattcaggctgctgctgccgtgctgggatgcacaaatattgaaatggccgatcgctggagtgtgccgcttgagaaagtggcggagccacaacaagatgcgcgccatgtcctggacgcttacgttacctatgccaatgcattatcaggagagctgcaatga

SEQ ID NO: 126550 - DNA, 216 bp, Enterobacter cloacae
atggaccctgttttaatttgcataaacagccatagaaatgatcggtccacagtcatttctcatagccagataggcattctcaccacgcattttttgccgcaggatatctcggtaacatcagaaatgtggaaacaagatctggttgaggcgaaaagttcatttaactcaacaatcccccctgaggttattatcatagtgccgtttgatttcggataa

SEQ ID NO: 126551 - DNA, 1251 bp, Enterobacter cloacae
atgtctcttaacgacacaaaaatccgcaacttaaaaccatccgctaaacccttcaaaatttccgattcccatggtctgtacctgttggttaatccaggcggttcacgtctctggtatctcaaatatcgtatcaatagaaaagaatctcgccttggcttaggcgcctaccctgacgtgtctttagctaatgctcgtcaacagcgtgatggtatccgtaaactcctcgcgcaaaatatcaatccagcacaacagcgctctgctgaaagaaccacttccacaccagaaaaaaccttcaaacatgtggcactggagtggcataacagcaaccgaacatggtctgagaaccacgcatcccgcctgcttgccagcatgaacaatcatatattccctgtgattggacacttgccggtagctgaactgaaacctcgtcactttatcgacctgctgaaaagcattgagaaaaaaggtctgctggaagtcgcagcacgtacccggcagcatatgtgcaacataatgcgtcatgctgtgcatcaggagttgatagagcacaatcccgcggcaaatctggagggtatcatcgccccgccagttaaacgtcattaccccgcccttcagttggagcgactaccggaactgttggcacgcattgaggactacaagcaaggacgagagttaacccgcctggctgtctcactcacccttcacctattcatccgttccagcgaactgcgtttcgcccgttggtttgagatcgatttcaaaaatagaatctggaccattcctgccactcgcgagtccatccccggcgtccgctactctggccgtggtgcaaaaatgcgtactccacatatcgttccactctcctgtcagtctattgctattctgaaacagatacgggaaatatccggacatcaggaacttatattccccggcgatcataatccgtataaaccgatgtgcgaaaacacggtcaataaggcgctacgcctgatgggctatgacacaaaagatgaaatctgcggccacggatttcgggcaatggcatgtagtgccctgatggagtctggcctatgggcgcaggatgcggttgaacggcagatgagtcaccaggagcgtaacagcgttcgagcggcttacatccataaagcagaatatctcgatgcccgtaaagcgatgatgcaatggtggtcagattatttggacagatgcagagaggaattcgtgccaccctatgtcaggggccgccagtag

SEQ ID NO: 126552 - DNA, 381 bp, Enterobacter cloacae
atgctgttcagaaaaatcgctttcgttgctgttcctttacttttttcctccgttgcatgggctgatgttggtgcgccatgttgccctttcagcgatgaaaatctgaaagaaaatatcaagccactggatcattctctggaaaaaatcctcaaactgaaaggcgtttcttatacgtggaaagaggataaaacaggggatgtcggcttaattgctcaggatgttgagaaggtctatccggagctggttaaaactaaaggtgaaatcaaacaggttgattatcaaaagcttgtcgcgccattgattgaagccgtacgtgagcagcagaatgaaatcaacgcgctgaaagcagacgtcgcgcaatgtgcacgtaaagcaaactag

SEQ ID NO: 126553 - DNA, 1206 bp, Enterobacter cloacae
atgaataataaattactcacacagtctctcattgccgcaggtctgattgcggcaattccttacgccagcgcgtccagcaatggttttgacgcacgtagctccgccatgggcggggtcggtgttgcttcggcacacttcggtgctgccccgctgaccaacccggcgctgctggcgacctctcgcgagcaggataaaatcagcctgattgcaccgtcaatcggtgcgcaggccagcgatccggcgaatctgattgatggttttgatgacgtaacgacggcatgggataacctggaaaacgcactgggtagtggcaatgaggcggaagctgctggcaaactggctgatagcgtagcgggcctggcgggtgaacatgccaacgcgaacctgggattaagcatggtgctggcggtgccggatgacgaattaccggtggccttatctgtcaacagctgggcgaaagggcatgcacgcgccctggtcagccagtctgatttggattatctggatgatgtcgccaaaggtattatcattccgggaaaagatgaccttgataaactcacttcccgtgcggaaggcatggcggcgctggtgacggaatatggcgtgacggttgcgcatccttttacgctcggcgaactgccggtgggtgttgggatcacgcctaaaatccagcgtattgaaacctggaactataacgtcgccattaataattatgattcatcggatctgcgcgacggcaactggcagcatcaaacgatgagcgccaatattgacgcaggcttttttgcctccgtcacgccagagtggatggtagccctttccgcgcagaacctgtttgaaaacaaagtgaaaacgcgagaaatcaacggttatcagccggcgtttatcattcgtcccgagctgacggctggtacggcctggaataacgagcgcgtaaccctgagtgcagatatcgacctcaccccggtgagcaatttccagtatgtcgataaaaaccagtatgcagcctttggggcagaactgcgtgcagcggactgggtgcaattgcgggtgggctaccggctggatatgcgcggtaacgatcgtcgtgttgtcaccggtggggttggcttatccgccggagaggccatgcagtttgatttaacggctatggccgggcgagatcgcacgattggcggtgtcgcacaatttacgttccatttctga

SEQ ID NO: 126554 - DNA, 672 bp, Enterobacter cloacae
gtgaaaaaagaaacaaatgatggaataaaagtttatacaccgctcgcattgaaattctatgactggtgggtgttaaacatatcaaatcgctacgcctggaaatgcgccacagagcgtcatcttattccgtatttcagaaacaacatgagaaatcatcatctggatatcggggtgggaacggggttctacctgaattatgccccgtccctttgcactgtatctttgttggatttaaacagagcaagtctcgatgcggcaaatgctcgcgtgggcagagacaggatcaaagaatctattcttcatgatgttttcaatccctttccatctcatctgcatgaccagtttgactctgtttctctgttttatctgcttcattgcctgcccggcacgatgaaagagaaatccccggttatccgcaacgctgccactgcattaaccgatgaaggctgcctgtttggcgcgaccatcctcggcgacgatatcggccataacgctttcgggcgtaaactgatggccgtttataataaaaaaggcatattttctaacagaaccgacaatatcgacgatttgcagacgatcctgtcagaggcttttcatcaggttgacattaaagtagaaggtaaagtcgccctgtttaaggctgcgaataaaaaacaggccgcataccggtga

SEQ ID NO: 126555 - DNA, 2139 bp, Enterobacter cloacae
atgaaaccattatatcaatactctcttctgcgcagagccattctggtcgccatgctgggtgtaaccggtacctcatctgctactaccctcattgataaagacacttttatcgacgctaattctcctgtgaatgaaaactaccgcatcgaaaacggtgcaacattgtcagtcaacggtgccactaccggaaatattactatctctgacgggcatttagccatgaacgggggaagcgtaaattttctatacggtgaatatggtgctacagcagatatagcggatgcgacgcttaagactgcagcattgcagggggattcccggctttctcgcacggtgattgagggacagttgagtatatggtttatgaacctctctgcgaacagtattagcgcacagcaattttatgctgccggagcgcaaagcaccgtcgaaaaagggtatttcgaacagactgagagaatgtacgcgggcgcagtctacctcacctccagcgaaggtatatttactgacagcttgatcaaggggataaaaaccgcggtctacctggaaggaaatggtactgttgatctgattcgatcaagtatttgggcaacagaaggttctgcgtttgatatcgcccgaggtaaccaaaaaatcctgctgcagggcagtagcgcaagctcgcaaactggtgagttgttggttgcccgaacggggagccgcgttgacttagcacttgatgccagccacgcagcaggcgatatccgtgccgaaggttctgccattgttgacgtggcattaacaaacggaagcgttctttcaggtggtatgaccaacgttaactcgctgatgctgggcaatgcttcactttatgaaatgacatccagttctgacatcaggacgctgtcaatggcaggggggatggtgaaatttgccccggcagatgcaggtgagcatcacacgctgaccctcggttctcttgaagggaacggccactttatgatgaacattgataccgaaaacgggagcagcgacctgctggatgtgaccggtcatgcggaaggttcgcacaccctgcacctggcggccagcggacgtgaagctgaaaacaccgacccgttgactcttgtccgcaccggcggtggtgacgctgaatttgcgctgaacggcggtcgggtggacatgggggcctggcagcaagagctggtgcgtaacggcaatcagtgggagttggttcaggcgaggggcgcgacctcggcctccaccgatgcaatgctggcgatggcctcggcaccccagtttatgcatcagggcgaactgaaagtcctgcgatcccgtcttgcagttaaagacactgacagtgccgctggcgtctggggcgccatgctgtacaaccgcagcgacattgagggagcacagggttccgcttatcgcctgacgcagaacggcatgatacttggtggcgataaggtcaccggcacccgcgcaggtgagctgactacaggcgcctatcttagccagtcgacgggtaacattaagcatgcccgcggcggagacagcaaggtcaccggctacggcggtggcgtatatgcccgcctgagtgcagagaatggcgcgtatgccagtacctctgcgcaaatcggtcacttcagcaataaacttaatgcccgcatgagcgatggtggtacggcgcgcgctgactggaacagcctgggctacggcctgatggtcgagacgggccgccagattacagtgggggaaaccacaagcctgacgccgttcgtaggggtaaacgcatggttgacaccttccgaaaacgttacgctgagcaacggtatgacggcagaaacaggtgacaaccgctccctgatggcagaaacgggggtacgcatgagtacccgtctggacgtggctgagatggcggtaacaccctacgtgacccttgcagtgcagcaggaacttgtaaaaagtggcagcacgcaaattaatgatgcgtatgacttcaccaacgatttcaccggcacgggcggtaccattgcaggagggatcagcgtggcaattgccccaacggcgagtgtctggctggaagcggagtatggtaaaagtgagcagacggaatcagcgttagcggggaacgttggtttccgcgtcgcgttctaa

SEQ ID NO: 126556 - DNA, 411 bp, Enterobacter cloacae
atgagtaaaccatatctggcgggactccttctgatctcgccgtgggcgctggccgccagcggcagctggagcagcgagagctttggcggtacgatgacgcgcggccaacagtccgtaaaaagtaaaccgctccagagcccttctccccttcctcctggggcacgcgcgacgactgttcactggaagataaaaacggatggccttacgccttcaggattgcgcattcgactgtgcaacgcggcacgctgtgtgaaattagccgggtgggcgggagaaatgcccctcccggccgggattgcgccagaaggaccgtttcggtttgaatatcgtgcctctgaagcgggtacgcttcgttccccgttgaccatactgagcaatcagttgacggtgagttatcactccagccattaa

SEQ ID NO: 126557 - DNA, 324 bp, Enterobacter cloacae
atgtcagcaactttaatgcgtggcgtactcgatcaaattcagacgcaggcgcagcaggtcagcggcccgtcgaacctgcgtaaaacctcgcacggcgacatgccctcgttttctgatgcgttatttaacagcattaatgaaataaataaaacgcaggtcgatgcgaaaaccaaaacacagcaatggatgtccgggagtagcgatatcggcctgaatgatgtaatgctggcaatgcagaaatcttctatttcattcagttttggcatgcaggcgcgtaataaaatgatcggcgcctatcaggaaataatgaacaccccggtttaa

SEQ ID NO: 126558 - DNA, 705 bp, Enterobacter cloacae
atgcctacgtttaatgataacaacgctcagggatggcgcagctggcagccggagaacctgctcggcgatattgccgagcccccactgccaacgctggataacacccagtcggatgcacagctgaaggcagaactggcgcgcctgcgtaagcaggcggagcagcaaggatttgctcaggggcaacagcaggggcaggaagagggccgcaaacaaggctatgaagttgggctaaaagagggccgtgacgctggatttgcacagggagtcgaacaggcgcgcgtcgagcagcaggcgctgctgcgccaggccggggagtgggtgagcaacctcaaactgtcgctggaaaacctcgacagcctgatcccgggtcgcctcgtccagctgtcactgacggcagtacagcagctgtatggctcgatccgtgttgcggataaccacgcgctggttacccaaatccgcaccctcatgaagcaggatccgctgctgaatggcacgttccagctgtacgtcagcccggaagagtttccggcggttgaacaggcgctgggcgagacactcacggcaatgggctggacgcttcatcgtgacgcgcagctggcagccggcggttgtcgggttgtttcaccggatgttgaagtggatgccagcatggaaacacgctggcaggcactctgtcagctggcgcgagaggaactctcgcaatga

SEQ ID NO: 126559 - DNA, 1050 bp, Enterobacter cloacae
atgaatattgatatcgccaccctgctattgggtggaacgcagggtaaaccaaaggcgggaagggtggctgatgaaggttttagccttgcgatggatgacaaactggcggaactgatccaggtatttcccggtctcgatcctcaggcgctggcggcagcgttaccggtagaaggacagttgcaggagacgctcaggcagacaatgaccgacctccccgcagtcgacggtgagttactggcagcgaacccgcagataacagacgttctggcgggtgcgatgtcgggtgatggcgagagcgaagagaatccattgtggcagttacagcaactggtcatgcgcagtgtgaacgggagtggggtgcccgcgcggcctgattcagctaaaccggtggcgacggtgtccggtgataagcccgctgcacaaagtgctgctgcgccgacagcgcgggtggctactgacaaaacgccagccgcaaacagtgctgcgccgctttcacaacccattcccgttacgaatgacgatgttgtagcgcctgagttcgcgtctgttcccaacgctgcacctttccctgccgcagtgcatacccgcgtcgcccatgcgccacagcaggtggtgaccgtcaaccatccacccgagacgccagagtggaagcagtccgttagccagcatattgcgctgtttagtcgcaacggcctgcacagtgcggagatccgtctgcatccggaagaactgggcgcgctgcatatttcattacgtatgcagcacgaccaggcgcagatccatatcgtcagcgatcatgcgcatgttcgtcaggcgatggagcaggccatgccgcaactgcgtgcagccatggcggattcgggtatccagctgggccaggcaaacgtcagcgcggacggccagggtgcgacaggtgaacgcggcgagacggcgcagggtgagcatgcacatcagcgtgaaggcgaagatgagcaggctgataccgaaatcgtcccaacactgttaacaaccacaccgggcaatatatacggaataaatactttcgcctga

SEQ ID NO: 126560 - DNA, 507 bp, Enterobacter cloacae
atgagtaataaaaataaaaaggtcgccagcggcggaggttctcgttcgcttctgatgacgttcctgtttttgactgccgttgcggcgtgcggaatttccggctacctgttctgggaaatgaaattcgcgaaacccgcagatgtggcagtggaaggtgcggttaaagagccgccagcaccggtgcccgttgagcctctgtatgcctcgatgaatacctttaccgtgagcctgaaaccgacggcaaacgaatcggatcgtgttttatatctggggctgtctattcgtgtggcagaacagaagtcgcttactgtgctggaaaaatatttaccggaataccgtagccgaatatttatgttgttgacccatcagacgtatgaagatttagccacggatgaaggaaaacgccatctgattacaacgattcaaaacgagctaaataaaccgctggcgtttaaccagtccattcgcgtcactgacgtgctcattaatgaatttattctgcggtaa

SEQ ID NO: 126561 - DNA, 372 bp, Enterobacter cloacae
atgaacgcaacagattccctcccggccaccagctcggtactgatgacggtaaccggcgcgctggccctgattgtcctgctgatggtcgtactggcctgggccgtccgccgcagtggactgacgcgtcgtctaaacgcggctcagggcacgataaccctggtggcaacgcaatcgctggggccgcgagagcggctggtcgtggtggatgtgggcgagcagcgcctggtgctgggcgtcaccgcctcgcagatcgcgtgtctcacgacgcagccgcgtccggaaaacgcccagcagacaacggcgccggcggcaacatttccgctgatgctggaaaagctgcgccagacgtatcgtcagggaggtgatcggtga

SEQ ID NO: 126562 - DNA, 525 bp, Enterobacter cloacae
atgactgtgaatcgttctattttcgcctctactaaattcaggctcgcgctgctgttcaccgctggcgcgttagtggggcttggcgggaaagtattttacgggatttattattcgccgtttaaatccacgtgcgtcgcgccaacttcctattacaccattgaggacgctaacaatgcgacgctggtacgcggaatatatcgttcgtatcgcgacagtctctttagcgggcacaccacctatattggcagtcttagccactttaaggagggtaagctggcaggacgacccacggcgatacaccgtgaagtgcgttttgacacggatgtggaagggaaacgcatccacctgacggtcacgagccagcaccgcaagctgggggatcagagtagcgatcgggaagtcaaagactatgtctacccgcatatagaccggggagaggttgcaaccagcaccatctatatgctggataataaagtgctggccagtggtaccgaatccgttgcccgtatcgcctgtaccaactga

SEQ ID NO: 126563 - DNA, 807 bp, Enterobacter cloacae
atgctcaattacatcgcgattggaacaggcgtgacgctggatcttcagacgcgcacgcttgcccgcacagaccgggaagccaacgtcacgctcccccaaagtgcctgcctgtgcctcgccgccatggcggaagcacagggcgaggtgctgtctcaggaacagctgatggatacaggctggcgcagcgctggcgtggaagtcacagaaaacagtgtgcgagtgatgataacaaaacttcgccgcgcatttgcccagcttgaggtgcacgaaacagtcaccctcgtggccgtgacgcgcagcggttaccggctggtcgtacgggaaaacggtgcggagcagcctgcaccagacgcgaagtcacctgtgctgctcgccgaaacagacacgacaacctccccaaccgttgcccctaccctaccgcgcgcacgtcaatccattacgcttgctgtgggtgtcaccctcgccggtctgttcgcgggcgtgggtctgactattttactgcgaaaccttttcttctttagtccaatccctgtgcattttgtcccgtggaatggacccggcataccgcctggtgcggaagtgctggttcagcagagcgaccagaacaaacaagcgcttattgaagccacgctgcaaacctataagcaacacgtgctggacagacgcgcagatgaacaatctgccccggtgctttacgtcacgaccggctcagaaaaaatgagcaagttccaggggctgattgcctgtcaacaacgcttaaaggactcagggaatgactgtgaatcgttctattttcgcctctactaa

SEQ ID NO: 126564 - DNA, 492 bp, Enterobacter cloacae
atgttcactctcacgcgttgtttacagacgtcagatacccctgcgatgttgccggtctttatttgccgcctggtgatgggggtctttttctttacggctgggtttaataagctatttgttcctgagaaccagttgctgatgctggataccctgcacgatgccggtattccttttcctgcggtgatggcggtggtcgtggcatttcttgaatgttttatggggatgctgttaacgctgggtttattcacccgttttagtgcactgacgctgatgataatcagcagcgtcgcactggtcacgattggtatttacactattccaccggggcttaacctgatagcctggctgagctggctcttttacctgccagaagcgctttatatcgttctggggctggtactgatgagcctgggcggaacctgctatagcgtcgatggctggctggttaagcgctggcagagtgtgcgcaaaattatttttatcgatggataa

SEQ ID NO: 126565 - DNA, 1164 bp, Enterobacter cloacae
atggttttcacagtcatactgatcattatctttattacactcctgattctggtgcagaccggcattatgccctggtttatccgcaccgaagggcagcgcctgcgcacgcaggttgacaccctcgcgacccagttacgtgaacagctcgatcgtgttgaagcacagcagcgcacggtgaccgaaagtgtcgtgaccctgaaaagcttcgccatggacaaggggcctccgggggaaaccgacgtggcggaagaggcggggagccatcgtcagttcttcaatgcgctggttaaagagatgggcgagcgtctggggggccgggcctggatggtggaggatacgggacgcattattggtgatgccgcaggggcgtccaatgtgcaatcccttaacgataccgacctgccgatggcggtgccgctacgttcgcttctggctcagtccggagaggggttgcgacatacccgttttcgtagcgccagcggtgaacatacgctggtggtcctgccaattgctgatacgccgtggcagctggccattgacgtacccacccgtcgcatgggggaacgaccaggcattctcctgcataagccctggccgctggcggccctgctgctggtttctacgctcacgctactgcgaagcctcaaccttcatctttctcgtctgaatgaagaactccccgcacagttaaaaagcgatcagggagcgcatttaccaccgctgatgaaagatatcggcgagcaggtgaatgtgattgcacgcgctgccatgaccattgcccaggaaaatgagcgtttgctgcgggttcctgaggccaatccgaataccctggcaacgctgagcgaaagtgcgacccatgtcgtccaggcgatgggggcgttgaatgatgctgctctgaacattgccaacagcagcggcacgttggtacagcttgccagccgggcctacagctactcgatggataatgaagagagtgtttttgctgtggagtcacgcaatctggccagccgttgcgcgcgctcttcgaaagagctcagagccttaattgacgatgcgatgatgcaggcacaaagcggtgtgccatccgttgcgcacaataacagcgtgttgattgaagaagtgtatacggtggcgaatgcgttaacgcagcgggtgaagggctga

SEQ ID NO: 126566 - DNA, 1896 bp, Enterobacter cloacae
atgtttacgtcacttcaaagtagagccttcttactggtctctgctttctttttattgcttacggcactcaccgtctgggtcgtgctgaattttgtcgccccccaattgctgaaaaacgaataccgtcgcgtccaccatgaaattggtgagcaggctgccgccattacgcaactgatgtctcgcgtagaggcgcagcagcgcactattactgaagccgtctcgcggctggatagcgcggatatcgatcgtttgctccctgcgctggttgatcagtacggcgatgccactctctttggcggcggcgtgtggccgctgccgggaaagcgagagcctggtatcgaaaagtacagcaccttctttgcccgcgacgcgcaaaaaacgctgcgtctgaataccacctggaatcagcctgatgccccggcctactggcagcagccgtggtttaaggcggggatgcgcgcggcgaaaggacagtgcgcctgggctgaggcctatatggatgcggcgagtcctcagccgcgcaccaactgcgcgatgcccatttatcgtgatggccagctatggggagtggcgacgcttgacgtcacgctgggcttcttcaatcagcttgcccgtaaaatggctgaacctctggaaggtggcgtgctgattgtagaggccagcggcaaaattgtggcttacagccgtgcaacggataatacgccggcgctgaaaaacatcagcgagatccccggcaaagagattgccctgctgcaggcgatgttaagccggcaggtggacggtcacagtgagcaaacctatgacgctgaggatggcgaacacaccatctttctctatccgattgccggcagtccgtggtttgtggcgaccgatacccggagcagcgtgctaagcaagcagacccgcgatattttagtgcgtctggcgatggtgcagatcccgcttctgcttctgctggctggcgtactgctcctgagcgttcacatcctgatgcgtaatcttcagggggtgggagagcgtctcgctgcgctctctgctggcggtgctgatttgaggcgccgccttcctgagagcggtacacaggagctgaacgcgattgccacccacgtgaacacgtttatgaattatctccagggccttttgcaacaggtcggggccagcacccggaccattgccgcggcgtcgcaccagattgccgacggcaacctgtcgctttcgtcgcgtaccgaagagcagtctgcttcgctcacgcaaacggcagcgtcgatggaggagattgccggtatcgtggccaacaatgcggataacgcggagcatgccgacaggctggcgacgcaggcagcaggaattgcccggcgcggcgcagcgctaatgaacgcggcggtggacaaaatgggccatattgaatcgtcttcagcgcgggtggcggatattgtcggcgtgattgacggtatcgcctaccagaccaatattctggcgctgaatgcggcggtggaggccgcgcgtgccggtgagcagggacgcgggtttgccgtggtagcaacagaagtccgtaacctcgccttgcgttcctccagctccgcgaaggagatccgcgagctgattaacgaggccgtgagcggcgtacaggacggcagtcgcctggtgcaggatgccggagagacgatgaatgcgctggtgacgtccgtgggtgaggtctccaccctgatggaagaggtcaagaccgccagccgtgaacaacgtgcgggtatcgaacaggtcaacgtcgcggtttgccagctcgaaggggcgacccagcaaaacacgacgctggtagcggaactgtcgtcggcggcgaaagcgatggaagagcagtccatggagctggaaaacgtggtgaagcggtttaacgtttaa

SEQ ID NO: 126567 - DNA, 435 bp, Enterobacter cloacae
atggctttacaacatctcttcatcatcccgttcgaccaccactccgatttcaccgatcttgccgaccactgcgaacgtttttgcgatgcgctgttggaagagcgcgatcccgtcgtaaaagcagcattatgcggtcgcttaggcgcctgtctggccatactgaaaccgacgctaaccgatccggttccgccccatctggtggactttttgactgtagacagtgaacccgtaacgtacccggaatttaacccggaaaccgatcagctttgccgctactgcgaagtgattacccaacagctgctggggggagggctctctgacaatagcgagcgggtgatgatggatttactgtatgaccttaccggctattttgccgaacgactgaagttcccgcgctggatacgcacgcaagaagggcgggtgtttatcgaataa

SEQ ID NO: 126568 - DNA, 1533 bp, Enterobacter cloacae
atggcacaggtcattaataccaacgcactgagcctgatggctcagaataaccttaacaaatcccagtcttccctgggcaccgcgattcagcgcctctcttccggtatgcgtatcaacagcgcaaaagacgatgctgcgggtctggcgatttccaaccgcttcacctcttctatccgtggtatgacacaggcagcgcgtaatgccaacgacggtatctccctggcgcagaccaccgaaggcgcgctggaagaagtgaccgaaaacatgcagcgtatccgcgagctgaccgtgcaggcgaaaaacggcaccaactccaccagcgacctggactccatcaaaaaagaaattggtacccgtctggaagagatcagccgcgtggcagaagtgaccaacttcaacggcgtaaaagtgttcgacggttctcaggacaaaatttccattcagatcggtgataaagacggcgacaccatcgacatcaaactgaacaagctggacatggaaaccctgggtctggacaaattcatggatgatttcgcggatatcggcattaccgtgaatggggcaggtattgcgagcagccaatatgatcaagcagcaactaagcttacagctgatctcgtcactgacatcgactcaccagctaatggcaagtggaaatacactgctgcagaagctgatttattcaaaacggcaatagaaaacaaatcaggcacagctcctgccggtgctgttgaagtgtatcagctcgatggcgaagtttttgcttacgatgttgccgctgaaaaaatgtataaagtcgatgttactgcaattacattcgctgagcacgatgtcgataacacaaaagctaaagtgactgcagtgaatggaactggcctggaagaactcggagctgaagatacggacatgctgctgaaaggcccgactgacttcactgaaggctcgtcgtcgccacttgcagagggggctaccgttaaaaatacggctggtgtagatatggctcttgatgctgccaaactcaacgaaattgctgtagcagccttcggtgctacttcaacacctgaaagttctggcatgaaaatgatcatgatgaacgatggcacaaccgaccgttactttgcgtatggcgaggatactagcggtgctaaggttctgaaagaaatcacctttaatagtgctgctggtaatgcagcggttgccaatgacgttcgccctgccgatgctgatgttgttctgaaagagtttggtgcagccgctgccgatggcctactggcagacctggatgccgcactgaccaaagtcgccgacttccgtgccgacctgggtgccgttcagaaccgcttcagctccatcattgcgaacctgaacaccaatatcattaacaccaccgaagcgcgctcccgtattcaggacgctgacttctccgtggaagtgtccgccatgagccgtgcaaacatcctgcagcaggcaggcgtgtccgtactggcccaggccaaccaggttccgcagaacgtactgtccctgctgcgttaa

SEQ ID NO: 126569 - DNA, 1470 bp, Enterobacter cloacae
atggcatcaaccaatttcttaggcgttggctctaacctgccgttcgaccagtggctggcggtggaacgtgagggtattagccaaaagctgaacccctatttgcaaaagcaaagcacctttcaggggcagatttccgcctgggggtctatctccagcgcgttgagtaccatgaaggacaatctcggtaagcttgagaatgaagggttcaacggcgtcagcgtcagcgacaataaaaccttcaaggccacggcaggtagtggggcgatccctaacagctattctgttgccgtaaaacagctggcgaaagcgcatcagttggcggtcgagaataacacgcgtgatgaaccgatgggtaaggcgagtgcgaaggtgacaatcaccctgaaagagggtgaaaaaccgctggaggtgaatttagctcaggatgaaacctctctcgatcagattgcaaaaaaaattaatgagcagaaaggtgatgtggttgcggaagtaatcaccctcgaggacgggaagcataagctggtgctgacctcgaaaaagaccggtgaggccggtgatatgactatcaacgtgacgagcactgatactgatttccagaagaagctcgaaggtgcggacgttgaaaccgaatcgcagaatgccgaacttgttctgaacggaaaactcgttacccgcagttcaaacaccatcaacgatatgatcaccggtgtgacgctggaactacgagaagtctccgaattgaaggaccctggactccccgcagacgacccgcagagctacaaaaccgaatctctcaccatcaccgaagacacctcaaaagtgaaaacgctgattgaggagttcgtaaagaattacaacagctacctcagcaccgtcgccagcgccaccaaatataccgcgccggatcgcgacagccagtcaacggctcccgcaactaccaacggcgcgctcttcagcgatggctcacttcgccgcctcaccagtcagcttaaagcgaccgtgggggggaactatcccgatgccgacgccgttatacagtcgctcggcagtatcggtattaccgtgaagtttgatggcaagattggcgacgagcgtggcgggaatctgggggagttgtcgattgataccaaaaagctggatgcggcgctgaaagacaaccctaaagcggtggaagcgctgttcctgggcaaagacggtaaagagggtatcaaagatcgcatggagggtatttttgatacctacctcggggataaagacgccatcaccaaaaaagagggcgtgatcgaaacagcccttgagtcgctgcgagagcaggataaacgtatcggcaaacaaatcacggctatggaacggcgtattgaagaggctatggcgcgcaaggaaaaagagtttcagcgtctcgacaaggtgataagcgatatgaacaacatgagcagtcagctacagggttcgctggcagggttgatttaa

SEQ ID NO: 126570 - DNA, 408 bp, Enterobacter cloacae
atgtacaccaataatggctataacgcctataccgctgtctcgctggacagccagattgcgggcgccacaccgcatcaactgattgtcttgctgtatgacggtgccattaacgccatgcgccgggcggaaatctactttcagtccggcaatattgcccgccgtggggagatgatctcccgcgcgattaacattatcgacaacggcctgcgtgccgggctggaccacgaaaagggcgggcagattgccgccgagctggagagcctgtacgaatatatttcgcgcacgctgctggagacgaatctcaacaaatccggtgaaaatctgccgcatctgatttcgctgatgacggagatgcaggaaacctggcaggccatcaacccggaaaacaagcaggtgaaacatggataa

SEQ ID NO: 126571 - DNA, 321 bp, Enterobacter cloacae
atggataacgcagtactgtcacttattgagcagatgctggtgagcaatgcgacgctcctgcgacaggccgaagacggtgagtgggacgcatttgtagaggagtcggcggcctattccatcggcatgagaacgctgtgtgaaatcgatttgacccagctggcgcaacacaataaacagcaggtggtggggcagctggggcagctgctggatgtcgatgcacgcctctcgcgtgccattcaggaccgcctctcaacgcttggcaccgaactgtccaccatgcgtaaatccagcgcctcagcgaaagcgtataccgcggtttaa

SEQ ID NO: 126572 - DNA, 444 bp, Enterobacter cloacae
atggacaagctttatcccattctcacgcaaatgaaaacgtctctggatgaactggaggcgatcatgattgaagaggtcaatcagctcaaccgtgcgcagataaacccggtttctctgcaggtgctggcagacaataaaaatcagcttctgacgaccattcaatattatgacgacatgcgccgccagcaggagcagcacagtgccacgcaggccccctaccctggccacggaaaactgttctcgagctggcagcaggtcaatgaaaaagtgcgcaacacgaaagcgctcaatcaacaggtggaatcgctgctgcagagtcatatgaagaaaaaccagcacattcaaaaagcgattgaccacgtagggcgcaacagttcgctttacggcccggcgggggaatccagccaggtttctggcggccacaaatacaacatcaccatctga

SEQ ID NO: 126573 - DNA, 300 bp, Enterobacter cloacae
atgagcatctccagcagccagaacactgcgccgattacgaaaatcgcgcccactcaggatttgcgcgcgcgtattcatccgcaggatggcgacgtgtcagctaacgtgacgcagcctcgtcaggatgacaaaaccgacgtcaccctgaccacactgacgaaaaagatccagaacgatgacagccgcgatattgactacgcgcgcgtcgaggcgatccgcaccgcgctggcgacagggtcgctgcgcatagagcctgagaaaattgcgcaggccatggtgcaggatatatttcagttttaa

SEQ ID NO: 126574 - DNA, 699 bp, Enterobacter cloacae
atgaagttgcgattattcagcccgacagtagccgttttactgtgttcggcctccgccctcgccagcgttccgtcaacccaaacggcaaaacagcgcctgttgctcaagctggatgccttgattcagcaacccgagtcgggggctgatatcgttcgcacggtttcgctgctcgccacccccgcgcagctgcaggccgtctgcgataacccggaactgagcctggtcgggcgcgacagtcgccttaccggcaaacgcaccgtgttggcgcagtgtgggcctcgtcgccacttccttcccgtgcgcctcagtgctcagggcacgtggtggattgccagccagagtctgccgggtggggccattgttcagcgcagcgatattgagcccgtaacaggcaatcttgaccaccagcccaccggcctgatcttcaatcccgatgagatagtgggccagcgcctgacgcgcgctgttgtcgccggtaaaccgctgctggaaagccagctccggcagcagtggcggttgcgcgccgggcagacagtggacctggtcaccaccggctccggctttcgtattcgcagccagggaaaggcgttaaacaatgcggcggtggatgagacgctgaaagtgaaaaccgctggcgggcgcaccgtgagcgggaaagtcgattcgtcaggacaggtcatcattatttcacaacaataa

SEQ ID NO: 126575 - DNA, 708 bp, Enterobacter cloacae
atggcggtctcttcaattaacaacaacgacggctcaagtggcattggtagcggcaacagcgcggcagacctgtcaaatcagtttatgaccctgctggtcgcgcagatgaaaaatcaggatcccaccaacccgatggataacaaccagcttacctcgcagctggcgcagatcaacatgactgcgggtgtggagaaacttaacagctccgtggcgggtgtgcaggcgatgatggttcagctcggtagcatgagcgcctcctcctgggtagggcgcagcgtgctgattgaaggggaggcgaaggtctccttcggcgagccagagggcattggtattcatcaggtcggtgcggatcgtcctggcggctcggacgacttccacttcgtattagcgggtgatgccgaaacggtggccgtcaccctgcacgacggcgacaaggcgtataccgcagagctgaaaaatgtgaagaaggggattaatacctacaacctcgacgacctggaaaacttcaagccggagccggggccgccgcatgacagggaatacaccctctcctttgaagccagcaaccctgagggggaaaaaccggaagtggttggtctggtaccggaccaggtgcagggcgtcacgatggatccgaacgggccgattctgcatctggtgaacaacgatccgatcggcatgggccaggttgttgtcattcaaaaatag

SEQ ID NO: 126576 - DNA, 1203 bp, Enterobacter cloacae
atgggtttttcacaaggtcttagcggtctgagtgccgcggcaaaagcgctggatgtagtgggtaacaatattgccaactcccagaccgtagggtttaaagcaggctccgtctccttcgccgatatctttgccggttcgaccgggatgggggtgcaggttgcgggcgtcaatcagaatatgggcgacggcgggctaatgaacggcgcctccccgctggatatggggatttccggtcgcggctttttccgcatggtcgatcaggcgggcagcgtgttctatggccgtaacggtcagtttgagcaagaccagaacggctttatcgtcaacaaaaccaacgggatgtttttaaccggctaccaggcgacggacggggtgatcaacccgggcgcgcaggtggggccgatccgcattccaaaggacgacatgccgccagcggcgtcaaccgcaggctccgtgaccggcaacctgaagtctgatgataaaattatccccgcgacatcggtctttaatcctgacaatccagacacctacaactatgtcagtgaagtcaccgccaccgacagcctgggtaataagcatgcaattaaggtgtactacgtgcataccgcggaagggaagtggcaggcacacgcccaggattccaccgcgccgggcacgggtacggatgcgtggagtgtgcagacgcttacctttgggaccgatggcaaacttaccgcgccggtgacattgaacgtcaaagggtccgcttacaacggctcagcagcgctgaatgtgaatattgatctgaatattacccaaaacgccagcgatacccaagtcatgctcgacgaaattgacggtcaggctcccggtaaatttaatacctatcaggtcagtgacacgggcgaagtgattgccatctacggtaacggcaagcgtcagaccgtcgcgcaggtggtgctggcagactttgccaattcgggcggtctggaacagcagggcaacaacctgtgggcggaaaccgtgcagtccggccagccgtttctgggaacatcgggcaccggcagcttcggagatatcgatggcggtatgctggagtcctccaacgtgaacctgggcgacgagatggtcaacatgatcgtctaccagcgtaactaccagtccaactcgcaaaccatcaaaacccagtctgagatcctgcagacgctggttaacctgcgttaa

SEQ ID NO: 126577 - DNA, 1644 bp, Enterobacter cloacae
atgaataacctatttaatttagccagaaacggcatcagcgtggcgcaggctgcgatccgggtgaccggcgataacctgaccaacggtatgtctaccaactacagtcgtcgcaacctgattatcggtgagctcggcggcatgtcgaccgcgcagggcttttatggctatggcgcccgcgccagcggcgtggagcgtgcctatgatgcgtttgccaacaatcagctgcgggattcgctgtccggctacgcctccctgaccggacggatggagcagctggcggatatcgacaatatgctggcggacgagtcggataacgtctcggtttcactgggcaagctgtttaaggatatggcgacgctgagcggcgatccggcggatggcccggcgcgtgcggcggtatttacctccctcgacgtgctggccaaccgctataacgccagcgccaagcgcctgtccggccttgaaaaaagcaccaatacccagattgagcgcagcgccaaggagattaacagcttcaccgaacagctggcagagatcaacaaacagctggagcgcgtacaggggaacggcacgccgcccgccgatctgcttgaccagcgtgacatgctgctggaagggctgagcgagcatctggggattactgtcaccgaggatcaggtttctggccgcgtgagcgtcaccctggctgatgggcgtccactggtctctggcggcaccgcgtatcagctgcaaacctcgccgtcggatgccgatcccaacaagaccattgtctcctacgtggatgctaacggcaacgcatcgccgctggatgaaaacgccattaccaaagggcgtctgggcgggttgttcaaattccgcaatgaggatcttaccgtcgcgcgtcaggatctggatcagatcgcctttatgatggcgcaccggatgaacgagcagaaccgcgcaggattcaccccggacggtgaggcgggtggcgatctcttctctctgccggatatcaaagccattgcgaacgccaaaaacaggggtaccgatgcgctggaaaatatcagggtcactgatttcaaagaggtgaagtcggaaaattatgacatcagttttgacggttcagactgggtcgtgaaaggggccgatggtcgtatcatccctctcgatcccgccgcgccattaggggtgttaaagtttgagggcatcgaaattacccttcccttcccttcaactgccgaagcgggggataaattcacccttaatcctatggccggggccgccgaaggcatcagccgtaagataaccaatggccaggagtttgcggcatctgacgacgctgcgggtggcccgggaaataacaaaaacctccaggaaatgctgaatatccaggaggaggcgctgatcggcaacgacacgctgagtgcggcctatgcgagcctggcgggcaagatcggtgaaagcgcccgcgaggtgaaatcctatgccagtagcgccgaaagtgatttacgcaccaaatttgacaccaaacaggcactctccggggtcaacatggatgaggaatatatcaacctggacatgttccgtcagtactacaacggtagcgcgcagctgctgaaaacggcgaccgccatgtttgatgccctgctggccatccgataa

SEQ ID NO: 126578 - DNA, 894 bp, Enterobacter cloacae
atgcgattaagtacgctttatatgtacaagcaaagttcggagtcgatgacaaagcgcatgagtcagagtaatgacgcttatctgcggatgtcagcaggtaaaacgctactcaaagcctcagacgacccgaccgccgcaaccgatgcggtaaaacatcaggacgcgctggcgaagcttgagatgtacagcagcgtgcgctcccgcgcgcgcagcgcactggagtttcaggacaatgttctgaacggtgtcggtaatctcatgacgaccaccctgaaagaaaaaattgttgctgcaaaaaacggtacctattctgatgaagatcttcgggcactgggtgaagagataaaagggatccgtgaaaacctgctggatttagcaaacagtcgtgacagtagcggtcgctatattttctccggatttaaaaccgatacgcccgcgtttgatgaagtcggtaattatcgtggcggtaatgaagcgcgcgcacagaccgttgccgatggaacggaaatgcaaacgggccatctcggcgatgagatttttgatgatatttttagggtactgaatgatgccgtcgccgcattaacgacgctgccggatgatcgggacatgttggatgcggcacttagcgccgccagcaacgccatcgatgcgggtattgaccgccttggcaaagcccaggccgaactggggacgaacctgcagcaacttgacgcgctggatctcaccggagacgtgttgattaacgacaccattgtcaaagtgcaggatgccatcggcgccgataccagcatgctggtgacgctggtgtcggaatcacagatgtccgagctcgcctttaatgcctctatgtacgtctacaaaaatatgcagaagatgaatctgtttaatatgtga

SEQ ID NO: 126579 - DNA, 1629 bp, Enterobacter cloacae
atgttaacgaaacttaaaatctataccgcagtcagccttattattgggctgtttgctgctttgctgtttggtattaccgtctattcagtttatgacgccgtcaaaaataacaataattttaaacgtattgttgtcgcctctgaaaataacgatcagatgcgtgatgcggtctataacatcagcgctgtaatggccaacaccaacggcttaatgctccaggctgcgatggggaatccggtctcgcagaacgtgacgacccacacgcaaaacgtcgtgaaatttgcccgccggaatatggatgactttatggcatcgccgttcaatacgccggaggagagtcgtcttgcggcggaagtgaatgcggcgtttaacgaagtctacaaagcggcggaagcgaagcttggctacctgaacaatccgacaggctataccggctcactggagcacgacatgaacctgcgcacggagctgcgtaataaggttgagcagtatacggatgccagtgcccgtctgaatgaaagttatattcatgaatcagagcgtggctacaagattatgctcggcgttgggctggtcgtgattctgcttggggtgggaatgctgtttgccgttcgcttctggctgcgcaataccctggtccgtcgtatggaaaccacggtggagacgctgcgtcgcgtggcagcgggcgatctgagtcaggcgatcgaaagcggaagccagaatgaaattggcagcatgctgtccgagctggaaacgatgcgcacttccctgacctgcaccattctgggcattcgtgaaagcgtgcagcgcattcacagtaacgcccaggaaattgcccacggtaataacgatctctcttcccgtacggaagagcaggcggccgcgctgcaggagacagcggccagcatggagcagatcaaaactaccgtgcgtcagaatgccgataacgcgcatgcggcccgtgagctggcggaaagcgccagtaccaatgcccataacggtggcgaagtcatgcacagtcttgagcaaatcatggcgcagatcaccaccagttcccgacagattgctgacattaacggcgtgatcgacagcattgcgaaccagaccaatattcttgccctgaacgcggcggtagaagcagcacgcgccggtgaacaggggcgtggttttgccgtggttgcagaagaggtgcgtaatctggctaaacgcagcgcggacgctgccaaagagattaatcagctcatcaacaccagcgtcaataatattgataccggttcacgccaggtcgggcaggccagtaacgtgatgcaggaaattgtgacatcggtggcgcaggtgacccaaattatgggcgagatcacctcggcatcagatgaacagagcgcggggattaatcagatttcgcaagcggtaaatgaaatggatctggtgacgcagcaaaatgccgcgatggttgaagaggcggccctcgccgccggtgatcttgaagcacaatctgattccctggaaaaactggtctcacaattcaggctgaatgaaggcagtgccgctgcaaaagtattgcctgtatccagtagaccacagcgtcaaaaagatgattctgctcttgcgcagtgggaaaccttttaa

SEQ ID NO: 126580 - DNA, 726 bp, Enterobacter cloacae
gtggatggtatatatacagccgaagggctggaagacaaaacagtcgtctggtcaaaatatcattatcttgtgcggcaggaagcattgcgtctacataagcggcttcctgccagcgtggagctggatgatttgattcaggcaggttcgatgggttttttaaacgcggtagaaaccttcgatccgaaaaaaggaatagcgctcagcgcgtggataacacaacgcgtaaaatgggcattgttagatgagttgagagaaagtgactgggtcccgcgacgggtaagaacgcatacgcgagaaattgtcagtattattcaacaaatcgagcaggaaaaagggggggaggccaccgaagcggatattgccgggcgtatgggcgtgtcgctaaaagagtttcagcaaatgctggcggataataacaacagccaaatgtattctgtcgatgagttacaggagaattttgccgacagctgggagtcctgcgacgatgaaaacgagtcgcttaatcctgtccatcatgctgtcaggcagaatttaattgagcaaattacagaacatttgcagtacatacctgaacgagagcaggtcttacttcagctttattatcttcaggatatgaacatgaaagagattgggctggtgttcggcatcacggaaacgcgtgtgagccagttgcacagtctggcactcaaaagattgagaagccggatggaatcgtcttcaagataa

SEQ ID NO: 126581 - DNA, 897 bp, Enterobacter cloacae
gtgttagttattgttggctatcttgttgtcatactgaccgtttttggtggttttatcctttccggcggcaatattatgtcgctgttccagccgctggagctgctgattatcggcggtgccggggtcggtgcctttatcgtcggcaacaacgtcaaatcactcaaagccaccggcaaagcgctggtgaaattgtttgtcggtaaacggtacaacaaagcggtctatatggacctgatggcgttaatgttcctgctgctgtcgcaaagccgtgttcacgggctgatgtcacttgagaaggacattgaagatccgcagaacagcgacatttttaatgcttatccgcgcctgatgagcgacccgatgctcagcaactttatcctcgactatttccgcctgatgattggcggcagcatgaattcacacgaaatcgaagccttaatggatgaagagatcgaaacctgtgaagaggagctggaagttccggcgcacagcctgaataccgtgggcgacgcgtttccggcgtttgggattgtcgcagcggtgatgggggtggtgaacgccctagggtcagccgatcgccctgccgcagagctgggaatgctgattggccatgcgctggtgggtaccttcctcggcattctgattgcctatggctttgtgttaccgctggcaacgctgctgcgccagaagagctccgatcaggtcaagattttacagtgtattaaagtgacgttgctttccagcctgaacggctatgccccgcaaattgctgtggaattcggccgtaagaccatttttaccagtgaacgtccgtcgtttgaggagctggaggagcacgttcgtgaagtgaaatccaacgccacgctgaaaaccaaatcggcggacaacgcagcatga

SEQ ID NO: 126582 - DNA, 1935 bp, Enterobacter cloacae
atggacatgaatgatttctcgcagatcttctttaccgaagcagaagaactgcttgccgaaatggaacaggagcttttacagctcgatgttgcttctcccgaccaggagcaactgaacgccatttttcgcgccgcgcactcactgaaagggggcgcagccaccttcggttttagcgcattacaggagacaacgcatcttcttgagaacttgctcgatcaggcgagggccggtgagcgcgcgttgagccggacgatcgttaacctttttctggaatgtaaggacattatgcaagcgcagctggaagcctatcagtcttcgcaggagcctgatgaagcaagctttcgctatatttgcgaggctttaagagagatcgcgctggacagtaaagcatccgttgcgccagccccggaacccgtcccgcaggtgggggcagacgaagacgtcgcgctactgataacgctcagtaacgtggatgcccacgagcaggcgatgttacgtgaagagctaacccatataggggagctggtggccgcggaggccagcgcggacagcctgacggtaacgctgatgaccagtgcgtcggccgacgacatcactgccgtgctttgctttgtgctggaggctgaacagattaaggtcacaccagccgctcagacgcaagccattgcgtcgccgcctgttgcggaaaaacctgcgcccgctccggcggccagaaaaatcgccgcggcgcctcgtgcggcaaatcaggagtcgggtagcattcgtgtggcggtcagtaaagtcgatcagattattaatcaggtcggcgaactgatcatcacacaggccatgctctcgcagctatcgcgaacgctcgacccggccagctacgatctgctttccggctgtgttgcgcagatggagcgcaatacccgcgagctgcaggagtcggtgatgtcaatccgtatgatgcccatggattatgtctttagccgcttcccgcgactggtgcatgacctcgggtcccgcctgaataaacaggttgaactgacgctcaagggcggctccgccgagctggataaaagcctgattgaacgcatcatcgatccgctcacgcatctggtacgtaacagcctggaccatggcatcgaagagaaagagatgcgcgtggccaaagggaaatctgaggtcgggaatctgacgctgtcggctgagcaccatggtggcaacatcgtgattgaagtcagcgacgacggcgcaggacttaatcgcgagaaaattctcgccaaagcacgagcccaggggatgacgctcagcgactcaatgagcgatgaagacgtgtggatgctgatttttgccgccggtttctcgacggcagagagcgtgacggacgtctccgggcgcggcgttggcatggacgtggtacgacgaaatattctggcgatgggcgggcacgtcgatgtgctttccacgccgggcacgggcaccaccattcgcattattctgccgctgacgctggcaattctcgacggcatgctggtgaaagtgggcgacgagatttatgtcctgccgctgggcgcggtaatggagtcgcttcgtccgaacgaagagatgctgtgccgctttgtcggtgaggaacggttgttgcaggtgcgcggtgagtatctgccactggttctgctgcgccaacggctcagcgtggcgggagaggtacccgccgatgacggcattgttgtgatcgtacaaagcgcgggctgccgctatgcgctgtgggttgaccagcttattggtcagcagcaggtcgtggtgaaaaatcttgaacagaactaccgcaaagttccgggcgtctcagcggcaaccatccttggcgatggcagcgtggcgctgatccttgacgtggttgaactctcaacgctcaacgttccacaaccccgaagggagggggtaaaagcatga

SEQ ID NO: 126583 - DNA, 789 bp, Enterobacter cloacae
atgagactgattcctcgactgaccaccagcgcgttgatactgaccgtcctgagcttcagtgcctcagcgaaagaggtgacggtcatgatctcaggcggtttcaaagccgcccttgaaaagctggcaccggaatatgaacgccagaccggagataacattgtgctcattcccggcccgtctatgggaacgactccgcaggcaattcctaaccggcttgcgcgtggggaaaaagccgacgtggtgatcatggtgggcgatgcgctggcaacacttgaaaaggacaacctgactcagcctggctcgcgcacggaacttgcggactcccctgtcggtatggtggtaaaaaaaggcgcagacgtcccggatatcagtaacgaggcaaaacttcgccatacgctgcttcaggcggagtccatcgcctactccgacagcgccagcggcagatacgtcagccagacgctgttcaaaacgctggggattgaaaaagaggcgatgggtaaagcaacgaaggttgagcgcatccccgtcgccgaagaagtggcgaaagggaaatacgcggtaggtttccagcaggtcagcgaactgctgccgattccaggggtgacgtttattggcaaactcccggacaacctgcaatacatcacccgctttgctggtgccgtgacccgccacgccgaccatcctggcgaagggaaagcgctgctggattacctttcctcgacacagtccagcgccgtgattcgcgacacggggatgagccccgtcacgtcccgcggtactgctcagtaa

SEQ ID NO: 126584 - DNA, 894 bp, Enterobacter cloacae
gtgtcgacggtaatttattcctttgcccaactggaagcgtttaccgccgtggtggaatacggtggcctggcaaaagcggcgatgaagctcgggaaagatcgtacgacgctgcgcgacctgattgattttctcgaagatggattagggtacaggctgtttgtgcgtgaaggacgcacgctgcgtctgacccctgagggcgagcagctgcagcggcaggcgcacctgctgatgcgccaggtgaaagcctttgaggcatttgccagcgcggtgccggatcgtgctacgcaggacatcacgctggtttacgatccctttacctcaaggccatttttgcaggcgctgattggcgagatggcgaagcgacatttacgtctgagcctggtcagcgcctcccgggatgaggctgaagcgatgctggccagcgggcaggcggatctgggcatttgccaggcacgtaatcgcagtgtgggtaatgaaatggagtggcgggcgctcggggcgatcgatatggatttctacgcctgcaacacgctgttcgccgaaaccacgcagccgctgtcgctgcttgagttatcgctggtgccgcaggtgattatgcacgccgcctcggatgagccggtggcacgtcgtctgcagatttcggggcacaccctttttaccaacgagctggagatgttgcggggcctgctggagcagggatgcggctgggggtttttaccgacgcatttccagccgaccgggtggaaaaaggtaaaaaggctgcacaccgaagtgggcagccaggggataagtcagacgatggtgaccatctggaagccgggaagcgacaagcgagagaggatcgctgaaacgctgtcgctgttaccggcgttgtggaaaaaatcagcgctgtga

SEQ ID NO: 126585 - DNA, 1008 bp, Enterobacter cloacae
atgaccgtacgtaaacttccctctggcaaatggctgttgcaatgcttcccatacggacgtgatgggaaacgcatacgtaagcaatttgctaccaaaggcgaggcgctctcctatgagcgccgtttaatgaataactctttaaaccagtctgtaaatgacaatgctgtgactctttcggcatttgttgaacgctggtacgaaatgcatggcaaaacgctctcttctggcgatgagcgaaaagtgaagctattggctatttgtgagcgcctcggtgaccctctcgcctcccacttcgataaaaatacgtttgctgtataccgcgaacggcgcttaagcggggagtggaatcagaaaggcaagaagaagttaagtgaagcgacagtaaaccgcgagcagtcatacctgcatgctgtattctcggagatgaaacggctgggtgagtgggaaggagataacccgctttcaggtatcaggcagtttaaggaaggagatcaggagctggcttttctttacgaggaggagattgatcggctacttgaagcttgtgaccagtcagcaaacaaagatttgggaattatcgtgcgtatttgcctggccacaggtgcacgctggagtgaagcgcaggatttaaaacaatctcaaattcttcccggacgtctgacctttacgcagaccaaaagcaaaaaaaaccgaacagtacccatttcgccgcagttacaagaaatgcttcccaaaaaacgcggttcactcttctccccggcatatgaggcattcaaatcagcacttacacgggccggaatagagttgcctaaaggtcagcgcacccatgtgctcagacatacctttgccagccactttatgatgcgtggaggaaacattcttgtattacagcaaattctcgggcatagcacgatcatgatgacgatgagatacgctcacttcgctccaaatcatcttgatgcagccgtggcactcaacccctttgataatcgggcagagaaaaattaa

SEQ ID NO: 126586 - DNA, 879 bp, Enterobacter cloacae
atgagtgagcactctcgtttccattacttcagtaacagggataaagctttcactaatctcatcagtatcattgatggaatacttagtgatggcgaagtgacccaaaaagaaatgctttatctcgatacctggctacttgaatcacaggaaataagtgataactattgcgttaaagccatacggcatcgcatagcagatgttctctctgacggtgtcatcgatccgacagaaatgaaattcctcaaagcagacctcattaaaatacagaaagacttaatcgacctcccttatcttcaactcgactccattgaatcagacaggcacttgcttgaagggttatgcaaggggatcttggctgatgctcagcttaatgacgacgaaatcaaatatcttcgatggtttttatcagtcaatggagcgctcaaaaacaactaccccggcaaggagctctacaccctcgtagaagatatccttcgtgacggtgagatcaccgaagatgaaagagctcaacttcgccaggcccttatctcatttactggatgcgatctggaatcaggaattgtggatggcctatcgactcagctccccatagatacgattgaatctttaaatcttgccggagctaacgtttgtctgacgggagaatttctgcatggtaagcgctccgtgtgtgctgaggagatccggagtcatggagctaatgtgattgacaatatcactcagaaattggatttcctgattgtaggcactctgagttcaaaagactggagatacaaagcacacggtcggaaaattgaaaaggcggtgtcttacagggatgagaaaggtattccgttgaagataatcagcgaggagcaatggaagagcttttataaatga

SEQ ID NO: 126587 - DNA, 630 bp, Enterobacter cloacae
atggaagtgaattcctcaggagatcaaaaccggatagctggacgcgacttcacagaaaaccgcgttcaaatagataaatttgatggtcgtcacaccatcaacatcgcgatcccctcagatactcatgacgagcggccgctcgtcaaggcgcaaagaaaagagctgaatgcccttgtcgcggcagtctctgagctctctaattctgaagcatatgaagtctggcaaaaagtacatgctgagattggtgtttcaagtatcgaagagatgaccgtcaatcaatatcagacagctgttagctacctgcaagcaatggctgatcgcggtaaagacaaggatgcgagcaaggcacttgttagtttactgcttcgtaacagcactgataacgatttgcgccaaaagttaatccgtttctgtcacgtgaatttcgggaccggcagactgaatgatcttacccggccacaactccaaatgactctttcctggctcgatcaacaaactcaagcggcatcgcaagttactgatgagctaaccacatcgaagctcaatttcattgagtttttaaaaacttatccaaaagaaattgctgcctgctttattgctggcttccttgtgggttcctttttcttttaa

SEQ ID NO: 126588 - DNA, 384 bp, Enterobacter cloacae
atgcaaacgagtacaggagaacgtctcaaagaagagcgcgtacgcttgggactgagtcaggctgcgcttggcgagataggtggtgttagaaaacaagctcagctcaattatgaaaaaggagagcgaaatcctgattccacatacctttccgcaatagcaaaatttggtgcggatatccagtacatcgttacagggataaggtctgcggagagcctttctccagatgagcaggagttgattaatctatttagacaagctccgctagcggtcaaagcagcggcgctagcagcgttaaacgcaggcaatgccgcttcggattcaataactgtgtctggtagtggtaaccgagtggctggcagggattacaacgaaaacaataaatag

SEQ ID NO: 126589 - DNA, 204 bp, Enterobacter cloacae
atgacgggcgtaaccatcaatatgaatgttgcagctccttatatatctctgaaggagtattccaggataaccgggattccattcgaaacatgtcggctaatggttcgtgacggaagaataattatcagacctaaagagttaacggggggcaaggtggaagtaaatatgatagccatgctcaaggatgctattgcaaacagttaa

SEQ ID NO: 126590 - DNA, 201 bp, Enterobacter cloacae
atgcatcagctcattcaacttaatcgacatagttatgtctatcgcggattcactattcatatgtgtccaagaagatcgcgcactatgcagagagcctatagcgttttaaatgacggtaactacttcggcagagactttgcattagcagaggcaatacagacaattgataaactaagacgtggtggaagaaatgaagcttga

SEQ ID NO: 126591 - DNA, 228 bp, Enterobacter cloacae
atgaacgaagagattccatcacttgcaagcctcctgaaaaatggttgtcaggttacgcactaccgtaatacgcggggctggattgaatgcccggacgggcgtttctttaagccggagcctaataaggttcgttttgttaagggaatgagcaaaccttttatttatacaaaaaagataaataaaggcgtgctggctaccctggcaagagcatttaaaaaactcttgtaa

SEQ ID NO: 126592 - DNA, 273 bp, Enterobacter cloacae
atgtttactgaagagaaaacatcgtgggaacgggaaatgctgatccgcgaggcggtagaaaatgcggagcagggttttaccgtaattttgaaaaacggaaatcgcattatcgttgcaccagatagcccatctattgatctgattatttacgggctggagaaaacaattagaggtaatcacgagcgtgcgcgaatgacctttattgattttctttactactggcacgaaaggttgtttaaacaggttaaaagaaaacctcgccctaaccactaa

SEQ ID NO: 126593 - DNA, 225 bp, Enterobacter cloacae
atgtcggttaagtcaataaagctggatggcgaaataagtgatccggagtttgtagagataagcaccaacgcacgaaaacacgaacgcgcccacattttggggttgcttcgtatttttgtcagccagctgaaaaaggaaagtgccacaccagaagagatttattcatcagtcgagcggtggatcgcaagccgcgaattaaccattaacgagggtaacaaacaatga

SEQ ID NO: 126594 - DNA, 549 bp, Enterobacter cloacae
atgaataacttcatgttagatattcgcgcgctggggaaagcgccagactcgccgatctttgcaattgagtgcgtattcttcgagccatcaacggggaagattggaccgcaatactatcgagcaatcgacattagaactgtgggtagcgttaatcctgaggctgttttccaactcatgaagggggactcggcacagcgagcagagatcatccacgcaacctgtagcgaggccggagctgtggagggggcatgtcggtttattagtgaaacggcatcaaaacatgaaaccctcatttgctggaccgccggagactccgcagatgttactaagcttgcgtacgctctgtctcgctatgggatgggcccgcgtctgccacccttcgaaattcgctatctctcaacgttaatccacatcgccggtgtcaccggatatacaccgcacccgcgccgctcgacggcaacctacatgctgaccgatgccgtatatcgggcagagcaggtttgcgaggtctggcagcgtctgaccagccctcactttgaatccctgtga

SEQ ID NO: 126595 - DNA, 228 bp, Enterobacter cloacae
atgcatacgcgtctttcagtcgtttgcagcgcgccattgcctgtatgcaccagggcgattgccgccctgaaatgtttttcacgtggtcagcgcaacttcacccgcatcaagccgcacgcctatctcgtgatccgtattggccgccgctggcgcttgcttagcaagaacggcggcgctcagtggcgactcatgacccatgaaacctacaaccaggagtttcgcaaatga

SEQ ID NO: 126596 - DNA, 966 bp, Enterobacter cloacae
atgatcagatcgccaattaaatgggcgggaggaaaaacccgcgttatgccgcagctgcttaagcatttgccgaaagcggattgtctgattgagccgtttgtgggtagtggaactgtgtttatgaacacggattaccgccgctacgttctctgcgacagcaatatcgcgctgattaattttttccgacaattaaccggccgcaaagaggacgctattgccgcctgccgctgggctttcaaaggcggaaacagtgcggaggaatactacagacggcgcacagagttcaattcactggcccgccaggctgactccgatccggacgcagcaatgctttatgccgcgtatttcctgtatctgaatcgccatggctataacggcctgtatcgcgttaaccagaagggtgaattcaacgttccattcggtaagtatgccgaaccttactttcctgaagcggaaatgcgcttattcgccgaaaaggccagcgacacaaaagcggtctttatccatagtgatttccgccaatctatccctgacgttatgcaactcgcgcatgacgcggtgatttattgtgacccaccctatatccctgcgagcgacaccgccaatttcaccgcatacggcaaaccctttaccctagatgatcatcgcgctctggtagcggctcttgtggctgttaaccgtcagtacgccacccgctcgatcatctcaaacagcgacacgcctgatacccgagaaatttattccgccttcaaccttcactccctgagtgtccgccgctctgtgagcgccaaaagccgcgatatggctggcgaggttattggcgttcttcgcgtgtgtgatggctgcgatcgtgctggcggtggttgctgtccggattgtgggccggtaatggggaatgcgacttacggtgagatgtttttaggcttcgaccctgccaagggctttgaaacgcaggagcctttctga

SEQ ID NO: 126597 - DNA, 207 bp, Enterobacter cloacae
atgaccattaaaaagactcatacgggcatcgttattaccaaagacggcccgcagcgcaagaagctgcaccagacggaatccatgtgggtagtcggcaaaacagagtgctaccggaaagacaccggcaaacgtcactttgccgaacatacccgccgtcgattactgcttgactcaatcgaagagattcgggaggtcgccacccgatga

SEQ ID NO: 126598 - DNA, 174 bp, Enterobacter cloacae
atgaacacagttgatgcagtgatcactcgcgtgctcgacgttcgcccataccgccatttctggatcgttgaggtggaggtattgagctggggcaggtacagccgtacgaccattatccgtgataccgaaaaagatgctcgccaggttcagcccggtgacacagtgacggtttag

SEQ ID NO: 126599 - DNA, 2631 bp, Enterobacter cloacae
atgtcagatctcaccgccttagcatgggaatggaataccaaacggcaggccatcaacccccataaaaccgaaagttcagccattgagtatctgacaccgaaaggcgagcgcagggcgctcgcttatggtgatctggttgatacggtctaccgcgcactattgcgcccgcgcgagggcgatgcgcgtgaggcatttgatcgaaatggccgcgctaactacctccgccgccgggtgcaaacgctcccggcgtttatccgtaagcgcttctcgcagcaccttgaaaacctcgaacgcagcaaaccaaaagacgtcgtgcgttggctgttcggtacgtttgagcgtcatgtcttacgccgtgttgatgcggttaacgcgcaatacctcccacaaagtacgctcccggcgcttcttcttccgctgcgtgatgaatttcacctgctgccgtgggcggataaaaagcgtttgaaaagactggcgtatatgcttgcgaatctgatgaaaagcgagtttatgcgcgagtttgattttcagtatgagcaaacatccgatctcgagttttcgtcgatttacgcgtacggggctatagcgagcaaagcggcgacgctcaatatcgcgatccccggatgggcgcgttattgcgacgaagaactggacgccgacgaggcgctgcgtgccgctggcagacttcattccgaaaaatggtggcttaacaaaatccgccgcatccatgactgctggcgcgaacatctaatgatcgcgaccggctacgtcagcaaagtggcttcaccatattgctctgatccctgcttcagggaatgggcggcgcagaaaaaagcgaacttcgaattccttcaggcgatggagctggaagaccaggacaccggcgagcgcagctcattactggataaggtgatgggtagtgtttccaacccgaagatcgcgcggcatgagctgatggtgcgcatgcgcgggtttgaggatatggcgaatgaaatggggctggttggcatgttctacacgctgacagcgccgtcgcgttaccactcaacgcatgtccagtcaggcagacgaaacgataagtaccagcacaccagcccgcgacagacgcaaaaatacctttgcaaagtctgggcgcgcgtcagagccaaatggagtcgtgaaggtatccgcacgtttggttttcgtgttgcagagccacaccacgatggaacccctcactggcacctgctgctcttcctccgtcctgaggaggtggagtatgcaacagccattttccgtaagcatgccatgagagaagacgggcaggagccgggggcacaggagcaccgctttaccgttaagccaatcgacgagcaatttggctcggcgacgggctacatcgccaaatacatttccaaaaatatcgacggatacggcatggatggtgagcttgatcttgagtcaggccagccagtcagggatatggcaaagcgcgtgcgtgcctgggcttcacgatggaatatccgccagtttcagcagattggcggcgcgccggtgaccacctggcgggagctgcgccggttaggtgaccgtgagctggtattgcatccggagctggaagcggcacgcgccgcagccgatgcgccagactggccgggatataccaacgctcagggcgggccatttgtcgcgcgcgattgcctgcgcgttcggcttaactatgaattcaccgaaaacggcaatgattatggtgacacggtcgccaaaattactggcgtttattgcccttatacgggtagcgaatcagtcattttcacccgtaccaccgattacaagattgtgccgaagcgtaagccgtcgccggtcgagattttgaccttagaaggccgcgcagcggcccctcggagttctgtcaataactgtacggggtcctacggaacggacaaaaaaccaacgttaaaagtgtcggtgccagctggtaccacaccttcaaaacagacgatgcatgccaggattgatcatccggacagccaaatgacagaacttccgctgaatatcgaagatttgcgccgaaattcacgccagcagcggcgggaaatcaccagcagactgaaaaactttggccgtgaaagctcagatcaagccttcgagcgtaccgcgcgcggtctgcgcacgtctgttgatgataaaactgcgttgatgtgggggccaaaagtggccgctgcgaaagatatgagcctgacaccagaagaggcagaacagctttggcgacaacagctgcggaccgaagcggagcgacgtgcggataactatgccgccgcaattgcggaataccagaagaaaaaagctgaggcggcactgcgccagttacagcaaagagatgctgaaaaacaagccgtagtttgtcaggaaaccatcgccagcatcggagcgcagttgcgtagttgcaggattttcgtcagcgatgacgttgttaggtcgattgctggcggtgcccgcgttcgccatggtggcggattggttgccatggacaatggccgattgcgcgaagttagggcatggcgtgccggtgagaaagataagccgacatcggaatatgtggcggtgtgtgaccttgtcacacgttggaagaaagcagccgggcggaagtaa

SEQ ID NO: 126600 - DNA, 321 bp, Enterobacter cloacae
atggccaagataactaaagaagaacttctttataacgattacaactggaaagcaaaacaacagggcgatgatcctaagaaaaagaaatccgatggggagcgttttagccgtcatgaaggatatgaaatgctatatctccttaatgaaggattttctaacagtgatgaactttcaattgaaacaaaacaacgtattgaatggtcaatccggaaatttcttccagaaggcactcagtcacgcagtgatgtcgtaacttgggttgtcgacaataatgacgcacataaacaagcatatcaaaagcacctggatggaaagagctga

SEQ ID NO: 126601 - DNA, 222 bp, Enterobacter cloacae
atgcgtaagagcatctttagaaaagttattcgtcaatatacggatgcagtggcggctcatgttgatactaatctcgagcaaactgatcgttatcgccttactgttgatgcaaacggtaatgccactttgaatacagaaaatccagaggtccaggcggatatcatcaggaagatgaagcatctcagtagactgcacaatcgtatgagcaaggatattgcttaa

SEQ ID NO: 126602 - DNA, 807 bp, Enterobacter cloacae
atgagcccattgatcatcacggtgattctcgtgtgtggcttttggtacaccgagaatcactaccaatcaagaattcatcatgcaaggacaaacggttgggcttcatatttttacgttgccatgcatggctgccgatttgtcgcgcagggctttcttttgatgctttgcatctacttccttatttgggtattgggcatcattccgtttgtgatcaacctttttagagataccccccttaagtgggatgtccttgaatggctggtcgacgaaaaggtaatggaactgccacttttcgttctgatctctatagttgccgcctgcgctattgcgtactcggaaggtaaagatgcgcgcaaagaaatggagaacgaggagacccggcaaaaagcataccgggagatggcatcgaaggattctcttgaaaatttattaatacaggcaattgataccgagatgctgatctttgtgacgcttaagtcccgaaaagtatacatcggttatgtcgctgcgccgcgagttgagttccacagtagcgctcaccttgagatcattccgttcatcagtggttacagggataaggactcactacgttatatagagcagcatcgttactacgatctatatctagacaagggtatcacgtttgattctaagccgttaaatttacagcatttcaggcacgtaattccgaacgaacagattgaagcagtgtcccttttcgatgagaacacatatggtgattttgataagttctctgaacctcttgcagggccgaaaaagacgctgaatcagcaaccatcaagttag

SEQ ID NO: 126603 - DNA, 1059 bp, Enterobacter cloacae
atgaagaagcgcacctacacaaacaaaaacactgccagcagaggcagtgccggacagcctgatatttctgatgcgctcagaagcgatccggcgctcagtgccttcacgtttgacgggccatattcagtaacagacggctacgatctgctggacagcatgtgctgcgtcgataacggacggtactacgaaacaccaatagactggaaagggttaacccgtgcgttcgcacaatccccgctgcatcagtcggcgctttacttcaaacgcaatgtgctgaccgggtgctatattcctcacccattactctcacgtcaggccttctctgcttttgcgctggactggtttgtcttcggcaatgcctaccttgaacgtcgctctaacctcctgggcgcaccgctcaaactccagcatgttccggccctgaatacacggcgggggagtgaccttgatacttactggtttatccggcagtggaaagatgaatacgagtttaagacggggcagatctgccacatcatgaacccggatattcatcaggaaatctatggtatgcctgaatacatgggggcgctgctgtccgccagcctgtcccattctgccgacaggtttcgcaaactctactatgacaacggctctcacgccggatgcattctctatgtcggttcggagaaggtggatcaggaaagcataaaggtggtgcagaagacgctgtcgcaggccagaggtaaaggctccttcaaaaacgtgctgatccacgcaccgggtggcggcaaagacggcgtgcaactgttgccgttcagccagatatcggcaaaggatgagtttcttaacatcaaatcagcaacgcgcaacgatttgcgcgacgctcaccgcatccctccacagctaatgggcgcaatgccggaaggcaacggatcgctcggtgatgttgagaaggccgcgcgtgtcttcgccatcaacgaaatgttgccagtaatggaagcgatgaagggcatcaatgactggctcggtcaggaagtgatccgcttcaatccctacgctctgctcaaagacgagtga

SEQ ID NO: 126604 - DNA, 1731 bp, Enterobacter cloacae
atgatacaggacgcttttgtacgtcagagagcaaaacaactttactggcagggctaccctccagcggagatcgcgcgtctgatgggaattaatcagaacacaatttattcatggaaaaaacgcgatgaatgggatgaaacgccgcccgtccagcgcgtcagccagtctatggatgcccgcctcatccaactgacggacaagaaagacaagacagggggagacttcaaagagattgatctgcttacccggcaactgaaaaagctgtctgacggacagccggcagagactggagcgggcaaaaagccgcgaaagcgcaagcagaaaaatcacttcaccgaagaacagatcgtcgcgctgcgggagaaaatactggattcgctgtcgtggcatcaacgtggctggtatgagcaacgccaccaccgaaaccgcatgatactgaagtcccgccagattggcgcaacctggtactttgcccgcgaggcgttacttgatgcgctgcgtgatgatgtgaaatacccgtaccagcgcaaccagatatttctgtctgcatcccgtcgccaggctcaccagttcaggggattcattcagagagttgccgaagaggtagatgttgagcttaaggggggcgacaaaattgtactgagtaacggcgcagagctgcatttcctcggcacgtctgcggcgacggcgcagtcctatacgggcaacctgaagtttgacgaattcttttgggtcagcaactttaccaacctgcgaaaggttgctggagcgatggcaacgctgaaggggctaacgcgtacctacttttccacgccgtcaggtgaaacccatgaggcttacccgttctggacgggcgaccgctggaatgagaaacgcccgaaggcacagcgcaaagcgtttgatgtgggctggaaaacgctgaacagcgggctgttatgcccggataaaacctggcgtcagatagtcaccctgaaggacgtgatagaccacggctgggaatacaccgaccttgaagaaattcaggatgaaaacagcgaggatgaattccgcaacctgtacatgtgcgagttcgttcgcgatggcgagtctgcattcaaccttaacgccctgattggctgcggggcagatggttacgacgaatggccggactggaagcctttcgcgtccaggccgatgggtaaccgcccggtatggattggatatgacgccaacggcagcagcggcaacggtgacagcggcgcgatttgcgttgtggttccgccactggtgccgggcggtaaattccgcacggtggaaacggaacaggtgcgcggccttgaatttgaagagcaggcgaaagttatcgaaaacttcaccttcaaatacaacgttcagcatgtcggcatcgacgtgacgggcggtaatggtgaagccgtttaccagatagtgaagaagtttttcccgatggcgatgccctacaccatgtcaatgacgtcaaagcgcgccctggtgctgaaaatgctacagctgatccgcgccgggcgatgggaatatgaccgcagcgagcgcgccctgatcaacgcctttaactctgttcgcaaggtaaagacgccgggcggattcatcacctatgacactgaccgctcgcgcggcgtcagccacggggatttagcctgggcgaatatgctcgccattattaacgaaccgctgggccaggagagtggcagcggtgggtttgctatggagttctga

SEQ ID NO: 126605 - DNA, 837 bp, Enterobacter cloacae
atggctagcgcagctaaaccagcccgtaagaaatttcgcgttgctgtctccggtgccaccgttgacggacgtgaaattcgccctgagcaccttcgtgatgcagcagcaaactacagcccggacgtgtacggcgcacgcgtcaacgtggagcactatctttcgcctttccccggcagtgatttcggtgcgatgggggatgttacggcgctgagtgctgaagatatcagcgaaggcccgctcgccggacgcaccgcgctttacgctgagattgaaccttctgagcgcatgaagaagctgacggaggaaggtaagaaaatttactccagcattgagctgcacccgcagtttgcgcttaacggcaaggcttatgtcatggggctggcaatgaccgataccccggcgagcctcggcaccgagcgcctgaagtttgccgcgcagcagcgtcagcaggttatgtccttcaacaatcagcagggtgaagccccgctgttcaccgatgccattgaggcagaaatcatcgaactggctgagcagcgcagcgatgagggtaaacagtggttcgcgcgcgtcatggggattatcggcaaaggccgtaaatctgacggtgagcaattcagccaggtgcgtgacgccgtggagaacgtcgcccagtcccatgccgatctgctggacagcttcaacgacctgagccgcgcccgtgagcaggacagccaggccattcagaagctgacctccgaccttgccgcgctgaccagcaagctgggaagcacagacggcaatttcagccagcgggcacccgcgagcggtagcgctaacgcgcaactggctgattactga

SEQ ID NO: 126606 - DNA, 1050 bp, Enterobacter cloacae
atggataacaatacccgccagctatttgatcagtacatcgcccggcaggcacagctcaacggcgtatcaaccgccgccgttgctgcaaaattcgccgtagatccgacgcgtcagcagcgccttgagcaggccgcacagcaggatgattctttcctgagcaaaattaacgtgtttggcgtcaaccaacagatcggtcagaaagtcctgatcggcagcaaaggcccgatggctggcgtaaacaacagtgttaccagtcgtcgcaaccctggctcaaatcattcaatggagccgttcgattacatgtgccgcaaggtcaactatgactacggcatcagctatgaacagcttgatgcgtgggcgcacatgccggagttccaaccgctgatcagtaaggcgatggcccgccagatgtcgcttgaccgcatcatgattggctttaacggcgtgaagtacagcgacccgtctgaccgtgccgctaacccgctgttgcaggactgtggcattggctggctggaaaaaatccgccaggaagcgccgcaccgcgtcatttccagtgtgacgatcacctcgcgcgatgaagataacaagattgtcgcaaaaggcacctacggcaaccttggcgctgcggtgtacgacgccaaaaacagcctgatggatgaatggcacaaacgtaacccggataacgtggtgattctggcgggcgacctgctgacgagcagcaatttctcggccatcaacgcgttaagccagaccaacccgaataccgaaatgctggccggtcagctgattgtcgcgcaggagcgcgtaggcaatatgccgacctttatcgcgccttacttcccggtgaatggcgtgctgatcacgccgttcaaaaacctgtcggtgtactaccagcgcggcggtctgcgccggacgatcaaagaagagccggaatacaaccgtgtcgcaacgtatcagtcttcaaacgatgacttcgtcattgaagactacggcaatgttgcgttcattgacggcattcagttcgcccaggccgaagcggcaggcgagtga

SEQ ID NO: 126607 - DNA, 858 bp, Enterobacter cloacae
atgttaacaccggcacaacgacattttcagagggtcatggcagaacgccggggcctggcggatgaagaatccgatatccagcgtaccgcgcatgagcaaattctgcatcgcctgcgtatggacttgtcccgcctcagcggcgtgcagtccgaagaaaccaaagccgaaatgaaaaaatccatgctgcctgaatatgaggggtggattgaaggcacgctcgacggcgacagtgggcggcaggatgaagtcattaccaggctgatggtctgggcgattgactgccgtgactatgcgcttgcgttgaggctggggcgctatgtggtgcgccacggattgacgctgccggataacttcaaccgtacggcagcgaccttcctgaccgaagaaatgagcaaaccggtgctgacgtttgccgcagctgatgctgacgctgatttatcggccagtaccgcagtgcttgatgaagtggcggacattgtcgccgacagtgatatgccggatatggtacgcgccaaattgtgcaaagcccgcgcgcttgcccgccgtggtgcgactgatatcacgaccaaagctgaggcgctggcgctgttccgcgaggcgctgacgcgaaaccctaatgccggggttaaaaaagagatcgcaacacttgcccgtgaagttaagaagctgtctgcggatagcggcacgggtgaaggtgacgcggccagcaccgacaaaactgacggtactgctgatcccgtccctgaaaaaagcgccaccgccagcgcagcaggtaaagcgacgacgcgtaaaaccacgaccagggcggcaacaggcaaagcgacaaaacgcaagcctgccagccagaaaaagaattaa

SEQ ID NO: 126608 - DNA, 525 bp, Enterobacter cloacae
atgagcagccttgtggcaaataagcgcgtgttgcctgccgacagcgatacgcccgatgttgatgatggtgataccaccgtcagcgccggggacttctggccggtgattaagctggccgatcttcgtctggccgcgcgcatcactggcggcatcaccacgtccaggctgatgcacgtaaccacggaagcggtagcccatgtcactacgcagttgcttgactggcgtgccggtcaggtcaaagcaggttttcagacgctggaagatgtgccttcagccctgccatcaggtgagatggaaaagctggttatcaatggtgaaaacgtgaaggtgtaccgcttccgccgcgcagtctattcgattgccagggcgctggtacttgaaggctatcgcgacgttgataccacggcgaaaggcgataaagacgccgccgcgcttgacctgcaacgggatgatctctggcgggatgcccgctggagtattgctgacattcgcgacaccccgcgcctctatgcggagctttgctga

SEQ ID NO: 126609 - DNA, 201 bp, Enterobacter cloacae
atgaaagtgaaagcattgcagggggatacggtggatttgctttgctggcgtcactacggcaccacgcagggcgtgaccgaaaaagtgttgtctgccaatcccggactgagccagcaggtttttcttgatgccggtcaggagattgaactgccggaaatcgcgcgtaaagcgacacaggagatggtgcagctatgggattaa

SEQ ID NO: 126610 - DNA, 303 bp, Enterobacter cloacae
atgggattaagtttttttcagcgcctgaatgactggctgacattcacgatgtcagcgatggtcacgagtatcggcgtcatgacactgagcgaaaagattgcgctggccggtcttctcgtcgggatggtttttggtgcccgtggatggctctatcgcgcccgcatcgaacgggggcagaagcgtcgaaacgaactgattaaccagatccttgagcaggcagaacacagacagatgagtgagtcagagcgccgggcgcttgaccttctgcaacagaatgagccggaagatgaaacagcttattaa

SEQ ID NO: 126611 - DNA, 546 bp, Enterobacter cloacae
atgaaacagcttattaaaaaatgctccattgcggccattgttgcgctgggtataacgctgagtcctggcgcgttgcgcacaacgcctgaaggccagcagaagattgctggctgggaagactgccggaatacgccctactactgcaccgctggcgtgctgacggttggaattggttcgacgggacgtgttgaaaagcgtgagtacagcgacagcgagatcgccggtcgctggattaacgatatgcggcacgctgaaaactgcattaaccagaattttgaaggcgcgcatatgccgcagtctgcctttgaggccatgacggatgccggtcttaatgtggggtgtactggactgatgtggttcacggacggccagaagcgaaagcagcgcacgaccatctggaagaaggcgcaggcgcatgaatggcaggcgatgtgtaaccggctgacggactttgtaaacagcggcggtaaacgcagccaggggctggttaaccggagaacggattttgaggcgtggtgcctgcgtgacgtggaggctgttaagtga

SEQ ID NO: 126612 - DNA, 438 bp, Enterobacter cloacae
gtgaagattacagccattttatgtgcgctactggcgctggcctctggtggcctgctctggcaaacgcatcaacgcggtaaagactccgtgcgcactgaagcactttcacgcgaggtaaagagtaatggtgaggtgctgggtgagctgcgggcactgactactgacgcccgcgaagtccttgcacagttgcgggcagccgaacagcaaagaaacgccgagggagaaaagcgacgtgaatacatgcgcgatgccatcaaagacgatacgtgtgccagtactgttgtgcctgcttctgtcagtaacagcctgcaacaccgtaccgccgcagccgcaaatgaaaatcttgcacgaaccggtgccggaaagcctgacggcagcaacgccagcgccggaactgaccgccccggtaacgtggggcgcgatagccatctggagtga

SEQ ID NO: 126613 - DNA, 471 bp, Enterobacter cloacae
atgctgaaagctgactcactgcgagagaccctgacgcgcgctaacaaatggtgcagggccaatcctgaagccttcaccgtatttgtggaagaagggaatatcgagacgaccggcgaaacaccgtcgtttatgtaccgctataccctggtgctgtttgtgatgaattttgccggtgatattgatgatttcacgttgcctttaatggcatggctctggcacaaccagcccgatctgctgctgaacccagagaagaaccggaacgttaaatttacgacccttatcaacaacgacgataccgccgacattctttttgaaatgccgctgcacgagcgcgtaaaggtcactctggacgcaaaaggcattcccagggcggagcatttaccggaacctaaaccgcgcataccgtcagccgacggcgactggagcaccatctttgaagatgtaacgtgggaggctgacgtgcatgagtaa

SEQ ID NO: 126614 - DNA, 639 bp, Enterobacter cloacae
atgagtaacgatctcttccgtgagctggatcaggtattcagcgacatactcgcgggcacctctcaggccggacgtgttcgcaccgcccgcgcggttggccaggcactgcgaaagagccagcaacagcgcatcaaagcacagcaaaaccccgaaggttcgccgtatcctgcccgacgccgcagggtgctgcgctctcagcagggcattgtgtttgtctggcagggtgagatccgccgcctgaaaaactggcacggtggccgggggaaatacgggcgcaccattaccggctttgacgaagagcgcaacgatattcgcaccttttaccgcagcgatattgagcgttacatcgagatcaatacgcgctcagtgcgccgcagcactgcgaaaaaggtgccgatgtttcagcggctgcgcagttatcgctttctcaaaatgcgcgctgatgcagggggcacatccgtgggttatgacggcgtggcggcacgcattgcgcgtgtgcaccagtacggccagcgcgatcaggttgggccgggtgcctttgctaaatatcctgtgcgtgagctactgggctttaccgctggcgatgagcatatgattacggaacaggtgcttaacagcctggggagtgccgcgcgatga

SEQ ID NO: 126615 - DNA, 582 bp, Enterobacter cloacae
atgagtgctgaacttatccgcctgctggaaaatatcctccgcgtcggcgtcgttattgccgttgatgaagagagctggcgcgtgcgcgtgcaaagcggcgaacttcagaccgactggctgcgctggaacgccacgcgcgccggagcattcagtatctggatgccgccttccgtgggtgagcaggtctggctgggctgtatcggtggcaaccctgaaacggcggtcattatcggcagtctctacagcagtgacaaccctgcaccgggcagcagcctgcaagagattgtactgacagcaccagacggcgcgtctttccgctatgacgcggaggccagcgcgctggaagctcagggcatgaaaacagcacatatcaaagcctctgccagcgtcacgcttgaaacgccggtggtggaatgcactgaacacctgaaagcgcggacgttcgaactgacggagggcggcacgatgaagggcacaatcactcattcaggcggatcgctttcgtctaatggggtgacggttcattcgcacgtgcatggcggtgtgcagggtggcagcagcaacacaggggggccgaaatga

SEQ ID NO: 126616 - DNA, 369 bp, Enterobacter cloacae
atgacagtccgctacaccggcatgaacccggacggcacgggccagcttaccgataccgatcagctttggaattcagtacgcgacatactgaccacgccgctggcaagccgggtgatgcgccgggattacggcagtatgctccccgatcttctggatgaaccgcaaaacgaagtgacgcgcctgcaatgtatgagtgcggcggtgatcgccctgacgatgtgggaaccgcgtattgccctgaacggcatcagtatcagtttttcaaaggatggcgctgtcaccgctgaactggtcggcattatcaccgaaaccatgcagacggctggcagttcgttgacgctcaggagtggcagcaatggcaacagttga

SEQ ID NO: 126617 - DNA, 897 bp, Enterobacter cloacae
atggcaacagttgatttatcgcagctaccgcagccgcaaattatcaaagtcctggactttgaagtcatactcagcgaggtcaaagccgtcatgcttgcggcattcccgcaggaacagcaaccatctgttgccgccgcgctggagctggaatccgaaccgctgaacgtgatcgctcaggtgattgcctaccgtgaaatgacgctacgccagcgcatcaatgagggcgcagcggcatgtatgctgagccatgccgtatcgtccgatcttgataaccttgcggccaatctgaataccgagcgtctgatcatcaccccggaaacgacaacggctgacgcggaaacggaaagtgataccgcgctgcgcctgcgtgctcagtctgcatttgaaggcctgagcgtggccggacccaccggggcatatgaatattttgcaaagagcgtcagcggaaaagtggcggacgcgagagcaaccagcccgtcgcccgctgtcgtgatcgtttctgtgctttccactgaaggtgacggtacggcatcggcagagttactgaatgacgtcaaaaatgccctcaatgacgaaaacatacgaccagtcggcgacaggctcactgtgcaaagtgctgcaattattgattatcaaatcagggcgcagctttatttttatcccggtcctgaatctgagccgatccttaccgctgcgcaaaatgcccttcagtcctggctgaatcagcagggcaaaattggtcgcgatgtcgcccgttcggccatcatggcggccttgcatgttcagggtgtgcagcgggtggagttgcaggagcctgccagcgatattgtgattgatgatacgcagtcggcgcgctgcacgtccttcgctatcagcaaagggggaaccgatgagtaa

SEQ ID NO: 126618 - DNA, 528 bp, Enterobacter cloacae
atgagtaatagcctgctgcctccatcggcaagtgatttcatgcgaaacgcggagaaggtgacggagaagattaccgatattccggtaatgcttcacaccttgtggaacgcagatacctgcccggtgagtcttctgccctatctggcttgggcgctttcagtagacaggtgggataaggactggccggagcagaccaaacggcaatctatccgtgacgcctggctgattcaccgacacaaaggcaccatcggcgcattacgccgtgttgttgagccactcggatacatcatcaatgttacagagtggtgggaaaccaacgatcccccaggcacatttcgccttgatatcggtgttttagagtctggtatcaccgaggaaatgtactacgaaatggagcggctcattgccgatgccaagcccgccagccgccatcttatcggtctaaatattatccaggacatacccggctacctctacaccggtgccctgacctatgacggcgacatcatcacggtttaccccggataa

SEQ ID NO: 126619 - DNA, 2283 bp, Enterobacter cloacae
atggcagtgaaatttaaaacagttatcaccaaagccggtgctgaaaaactcgcggcagcaaccgttccgaacggaaaaaaggtgaactttacgacaatggccgtgggcgacggtggcggcacgctgccgacccctgatccgaaccagacaaaacttgtcaaagaggtctggcgtcacgcgctgaataaaatcagcctggacaagaagaataaaaattatgtcgtggcggagctggttatcccgcctgagactggcggtttctggatgcgcgaaatggggctttatgatgacgccggtacgctgatcgcggtcggcaatatggccgaaagctacaagccagcgctggcggagggttcaggccgtgcgcagaccgtccggatggttatcatggtaagcgacatcaagtccgtcgaactgaccattgatacctctactgtgatggcaacgcaggattacgttgacgacaaactcgcggagcatgagcagtcccgccgccatcctgacgctacgctcaccgcaaagggtttcacgcagttaagcagtgcgaccgacagcgcgtcggagagcgttgcagcaacgccgaaagcggttaaaacggcgtacgaccttgccaatgggaaatacaccgctcaggacgccaccacggcgcgaaagggtatcgtccagctcagtagctcgaccgaaagcacatctgagacgctcgcagcgacgccgaaagcggttaaagcggcgtatgaccttgccagtgggaaatatacggcgcaggacgccaccacggcgcgaaagggcattgttcagctcagcagcgcgatcgacagcgcctcggagacggtggcggcgacgccaaaggcagtgagcacagcggctaaagcgattaaagacactctcggaacgtctgcatctaaagatattgtcacctcaaagaccgatacgacaacaggccacgtgctgaccactggctggatgagtctaggcgggtatggcacagataatttaattgccgctgcggatgcgcgaaaaccactgcgaaatggattttacgccgtgcaaagtgagccgacttatggcaattccgccctcatcagttttggctacgactctggctctcaggttcacatcattgcgaagcagggcggacagaatccattattgggcgtgtgtggttcaacccctcagggcgcgttcgggagctggggcaagatatacacagagtttcagaagccaaccgctctggatgtcggagctgttccttatcaggttgcgctcgggactgatgatttaaactccatcacgggtacaaaatatgggagatactgtcagccattaacggcaaatgccacagcagcacggcattaccctattactgaagctggtgcgctggacgtgcatcaaacaagcgcaaacggtgcggaagcttgcgttcaggaatatcgctcatttagttccagacgtattttcctgcgtacatacaatccagctggggcggtctggactgactggtgtgaattctatacaacctcgaaaaagccaactgcgtcagatgtgggtgccattcctcttgctggcagtacaggcgttacggggattgtgcgcagtagcgcagagttacaaagcctctcagctaatagttttcgcatcggttatggcggctatgggacgttctggcgaaatgatggtgcaaatctttatttgatgctgacaaatcaaaatgacccgtggggcggttacaacgacctgaggcctttccgcgtgagtctcggtactggcgatgtcactatttcgaagctggggctgactgactataccaatttcgacgcacgctattataccaaagcacaatccgatgctgggtatatggcaaaaactggcgcgtataccaaagcagagagcgacgcccgttttcagcctaaaggaagttacacgccatctggaacagcctataccaaagctgagagcgatgctcgttactacacaaaagcgcaaagtgatgcgggttacaatgccaaaaacatcgcttctctttctactgccggagggtggcagcaggacaattcgaccggtctgattatacagatgggaacagtaacccgaacgggctacaacacagccgtcaattttcctaaggcgttccctaatttctgcatgggcgtcctgcttacgctcagcgatgcaggcacaggtaacctttccgactcatcaagcaacatcagatcgttaagccatagtaaaactggttttaattatggtgcgaacggcaatcctgaaaaacggcgttctgggtag

SEQ ID NO: 126620 - DNA, 420 bp, Enterobacter cloacae
atgaaagacagatatttctggagtgcaaaagagaacggcttttatcctgagtcaatgaaagaactttatgagaacagccctgatggctggccggaggacgccgtagaaattagcgaagaactgtatgattcacttcttgaggggcaaggccggggaaaagtgatcacctctggcagcgacggtaagccactactttcggatccagttattgaccacattgcgattgctgaagctgaaaaaagccttctcgtgagcgaggctgaagaaataattttacctctacagagggccgtcaaatatgacatagcgtcagatgaagaaaatcagcgccttaaagcatgggaaatttatactgtaaagctcagccgtattgatacttctgcggcaccagaaattgaatggcctgaaaaaccgacataa

SEQ ID NO: 126621 - DNA, 489 bp, Enterobacter cloacae
atgatgatgatatacgggatgttcgtttttgaactgaagacactgccttatcagcagttgcgccactcgctgaactggcgacatgtgaaaaacgatcgtattaaccgatcggcgaaatggcaatacatcggcgcaggagagacgcaaatcaatctggacggggtgctttaccctgaaattacgggcggcgacgtgtctcttaccgtcctggctactcaggcatacaccgggcgtccctggcctttaatcagcggagcggggcaaatttacggcatgtacgtgctgaccgggctacaggccacgcatacggagtttgaccgttacggaaaggcgaaaaaaatagagttctctatcagttttcagcgctgtgacgaagatttacgcgaacgcttacaggcctcatccgttggcgatctgctttctgggctaaaggataaagccacgtccgcctacaactctgccagtagtacgctgtcgggcctgttctga

SEQ ID NO: 126622 - DNA, 2988 bp, Enterobacter cloacae
gtgaaaagccttaatatccgcgtcgcgttcagcgcgatcgataaacttacccgcccggtcaattccgcccgccagagtgcgggcggtttgtctgagtccctcaaaaaaacgcagtccagcattaaagatctggacaggcagtcccgcactttcaaccggctgcgcgacagcgtacaaaagacctcccgcaaaatcgacgacgccagccggacccttgaaggcctgaatcaggcgcagcgggaaggtactcagctcacagataagcagaaagcccatatggcagcgcttgccgcaaagctggagcgcctgaattctgcacgcacgcaggaaatgatcaagctgcgcgccgcttcacaggcgctgcgcggccacggcgtttcactggtcggcagtgaccgcaccattcagagcgccatccgtcgaactgaacagtacaaccagacacttgagcgggaacggcgacaacttgcttcggtcacgcaggcacgtgtgcgttatgaccagatgcagcaaacggcgggcaaacttcgcggcggtggcacgatggccgttgccggggccactgctggcggttacgtagcgggacgtttcttatcccccgccgttgggtttgatcgggaaatgtcccgcgtgcaggcgctgacccgcatagataaaagctccgttgacttttcagcacttcgtgaccaggccaaaaagctgggtgctgaaacgcagttcaccacgactgacgccgccagcgggcaggcatttctcgcgatggctggcttcactccgcaggctattcaggccgcactaccaggcgtactcaatatggcgctggccggtgggatggatttaggtgaaagtgccgatatcagctcaaacatcctgtctcagttccgcctcgatcccaaagaaatggatcgcgtcagcgacgtattaactggcgcgttcacccgtaccaacaccgatctgcaaaatatcggtgaggcgatgaagtacgccgggacagggctttccaaccttggcgtcagcgtcgaacagaccacggctatgatcggcgtgatggcgaacgttggtctgcgcggaagtatcgccggtacggggttgcaggccacattttcacgccttgccgcgccgaccggcagagcaaaaactgcgcttaaagaactgggtgtagaagtcgctgatgcgacggggaaaatgcgccctgctgaggttgtgcttaccgatctctataaaaaaatcagcaaatacggcgataccgataagctctctttcttcaaagatattgccggtgaagaagcgtcaaagtcattccaggcactggttatgtcggcagggagcggcgaacttcagaaattgcttggtgaactgaaaaacgccaagggtgaggcacagaaagccgccaaaataatggcggataaccttgatggcgatctcaagaatctggacagcgcctgggaagggttccgcatccagattaacgatctcgttaacaaccagcttcgcgccctgacccaggggctgagtaatgttgtggggcatatgacgcagtgggcgaaggagaatccgaagctcgcacaatccctgatggttgtaggcggtagcgttctggcgctgaccgccgccattggcggcacatcgctggcgatcggcctgctgatggggccgctggctaaactccagttaggttttaccctgctgacagggggcagaggcatagccggaacgattgccgctctgcgaacgctaggcacggcttccggcccggcgatggcaagcgtgcgcggatgggtgccagttcttggctcgttagcagggaaaatgcggggcgtttcggccatcatacccgctatgcgtagcgcacttatgggagtatttcttgcaccaggtgcctcgctgggagtgctgactaaaaacctcggaatgctcgctcttcgccttacaggcttaccggccatatggagcatgatcactgctgcggtgtctatgctgggtacagcgctgtcactgctgtttagtccgattggcctgatagtagcggcgtttattgctgccgggctactgatttggcggtactgggaaccgataaaagcttttttcaccggtttttttaatggggttatgcagcagctggctcctttccgcgacgcctttttcactttaacgctggtcttctctgcaattggtgatgctgttagcaaggtttgggactggttttcaaaactcttaacacctgtagaaagtagccgcgaatcccttgataaatgcgcatcagcaggggaaaccttcggtaaagtcctggggggggcacttcagttgctgctgttaccgctgacaaccctcatggaaggcattggctgggttctggaaaaactcgaacttatcccttctggtctggaagctgcacgcctgaaagctgaaagccttaaaaaagatcctgttatgtgggagtgggatccgcaacagaaaaaaatggtgcaaaagggctggaactggtcgcctgcctcaacaggtaaaaacaataccgggaacacccctccaccgggagcaccgcaacccacatcaccgctgaccggcgataacggaactatgcgcaggttgcagagtatcgacagcaacaccaaaacgacagccgacaacacgaagaagatcggccccggcgatatcgtgtttaaaaacctgccgcgtgcgctggccgttcgtggggaatggaaagagtcgcagctggccagcacggtcaggaacaacgggttaagcgcacgtcccgcagtggtagcggcatcgcttcccgttaaacaggctgaacttctgccagtcagccgcagcgccagcaatatcccggttgccagtggcggctttacgggcgagatccacgtacatctgcacggcgttgaccggcaggacgcgcgcgaaattggcaggattgtcgccgatcaagtaagtgccgaactggctcgccgtgaacggctcaaccgtggcagcttcaaagacagagattaa

SEQ ID NO: 126623 - DNA, 318 bp, Enterobacter cloacae
atgagcaagaaaactgataacgccattatgctggtaaaacctgttgttcgtggcgaagagaaaatcactcaggtaacgatcacagatgagatcaaacaggctggctccctgcgcggtctgaagctggttaatgtgatgaatatggatgtggattcggtggcgatactgctgacccgcgttacatcaccacgcctcaagcagaccgaaatcaacgaaatggatacccgcgattttgtcagcctgtctgaagcgctcgtcccttttttgacacctgcggggtctggagcgtcgagcgaggcggagacggagaatcagtaa

SEQ ID NO: 126624 - DNA, 516 bp, Enterobacter cloacae
atggcggttcctcacaaactgcgcctgttcacctgctttgtgaacggcagcaactgcatcggcaaagtatcttccgtgacgctgccaaaactgacccgtaaaactgaagattttcagggcggcggtatgattggctccgctgcggtggatctcggtctggacagtggcgcgctggacaccacgatggtggttggtggtctggttcagtcgctactgctgaactactgcggcgatatcgacgaaacccgcttccgcttcgccggtgaatattacaccgatggcgcaagcctgctggttgaggttgaactgcgcggacgtatcaccgaaatggatggcggtgaaagcaagcagggagaagatacctccgtcagctacacgatgaagaacacctattacaggctcaccatcgacgacaagccgctgtttgagtttgatctgctgaacttcatctacaagaaagacggcaagaatatctaccctgaccgcattacgtctgcgctgggaatgggtaactga

SEQ ID NO: 126625 - DNA, 1227 bp, Enterobacter cloacae
atgagggattatcaatgcgaactcaataacgtaatggtggttaacatgtcagagacacgtttccacggtgtacgcgtccgggagaataccgacctggtgacagccatcaatgacattgaatcaagtgtcattggggtcgttgccgtggcggatgatgccgacgctgaaacctttcccctgaatacccccgtgttactgacgcgggttaacaacgtgctgggtaaggcgggtgaaaccggctccctgtacaaaacgcttaaagccatcgctgaccagaccagcccgaaggtcatcgttgtgcgcgtggcagcagccacggaagaggaaggcggtaaaacgcagtcgcagctcatcatgggcggcacggcagaagacggtagctataccggcatgtacgcatttctgacggctgaacagaaggtgggctatcgtccgcgcattctggccgcgccagactacgacacggaagaagtgacctctgcgctgtgcgtcattgcgcagaatctgcgtgcgtttgtttatgccagttgttacggctgcacgacgatggcagaagctatcgcctaccgcgctacctttgcctatcgtgagctaatgcttatctggcctgacttcatcgcatacaacccgcagaccggagaaaatgaaatcttcccggccccggcctatgcctgcgggctccgcgcgctgattgacaacaatcagggctggcataaatcgctttccaacgtggcggtcaagaacgtgctgggtatttcgcaggatgttttctggtcgcttcaggccgaagacagcgacgcgaacgaactgaacaacaaggagatcacgacgctcatcaagcgtaacggtttccggttctggggcaaccgcgttaccgacaccaaagattatatctttgaggtttatacccgaacggcacagattctggctgacagtatcgctgaggcgcaatttgaatcagtggacgaaccgctaaccccggccaacgtcaaggatgtggtcagcggcatcagcggcaaactcaattcgctggtgacgcaggggcggctaattggtgctgaatgctggtttgatatcctggataacccgacaatcggtctccgccagggtcaggtacgcattcgctataaatatacgccggttccgccaatggaagatctgacgctctaccagaccttcacggacgagtatttcgaatcggcgttttcttccctgggaggtgcataa

SEQ ID NO: 126626 - DNA, 1137 bp, Enterobacter cloacae
atggcacttacagacctgacaaaatcacttaacgacgccatcagcagttataacgattcacttaccgaggcggtaaaaagtccgggattcagcataacgatgggcggtaaggtacggacgcagcttgacgagcggatcatgtcgttgtcactgacggacaaccggggttttgatgccgatcagctttccatttctattgatgacagtgacggtatggttgctctgcctccgcgtggcgctgagcttgcggtatcaattggctggctgggtgagccgctgatttacaagggactgtacacggttgatgaggtatcccatgaagggccgggtgatatcattggtattactgcacgcagcgctgattttcgtgaagagttcaacgtaaagcgcgaagtctcatggcatgacgtgactgttgagcgcgttgtgtcggcaatagcgcaccgctacggactgaaggcacagatcagtgaaatgctcatggatattgagattgaccacgctgatcagacgcaggaaagcgatatgtcattccttacccgcatggcggaaatgctgggcgcaattgccaccgtaaagaacggtagtctgctgtttatcctgccgggcggaggtgttaccgctgacgggaaggcgctaccctctgccagtattgaccggacgagcggcgatcggcaccgctttcgtattgccgatcgggatgcgtataccggcgtcagggcttactggctggatctcaatttcggcaaaaagaaaaaggtcagcgtaaagcgtcgtaagccagcaaagcccaaaaaagagaagagcagcagccgtgagggcgattacatggagggcgcagacggtaacgtctatgtactgcgcaaaacttaccagaatgaagagacggcgaaacgtgcggcagcggcaaaatggcaacagcttcagcgtggtgcggcagagttttcgatcaccctggcgcgtggccgcgctgagctttaccccgaaatgcacgttacggttagcggttttaaggatgaaatagacaatcaggactggattattgcgcgtgctgagcacgtcatagacgacagcggttttaccacccggctggagctggaagcaaaaatacctgactggatagcggaaactgaataa

SEQ ID NO: 126627 - DNA, 930 bp, Enterobacter cloacae
atgctagtacctgataagttgtttaaatataaatcatttaactctgattgtatggagttgattattgccgactatctttattttgctaatccaaatcaatttaacgatccccttgattgcaaagtctctatatttgatgacattcaagatgaagggcaattaaaaaacatactatcaatcctttatcaaagaattgcggaggaaaaattaaataacgcggctaataaccttcattataacggtcctaaaactcgagataaaatttcattacttagtaaaagtgaatctgacagaatgattgctgatttatatcaacaatttgatttttacgacgatgagcaattttcagtaacaggtacattagctaatttaatcggaaagattatcctatctggatatagcaacggagtactctcccttgctgagaattgtgattgcccactaatgtggtcgcattatgctgataatcatagaggattatgcttgggctatacgattccggataatgctaaagataaaatccaaccaataaattacactggtaactcaagagatattaaaaccagtcaaatattacaaatgctgaatggcgatgcggatgcaaaacttgaaatagaaaaggcgatttttcttcggaaggcttctccttggcaatatgaaaaagaatggcgaatgatttctaatattggtaagcaaaatgcatcaatatatttaacggatattatttttggcatgagatgtaaagatactaccatttacacaatcatgaaatccttgcaagggcgaagtttacctattacattttggcaaatgtctgaagttcaccaacagtttacactccagaaaatagaaataaatttaaatgatgagtgttttatttctttacctcgctgtatggaatcaatagttaaagcatttgatgaggaatga

SEQ ID NO: 126628 - DNA, 753 bp, Enterobacter cloacae
atgagtaacccgctggcgtttccgatgtatgccatcaatcgcgccgacaccgatgccctctggcgagcggtacagcacctgcttgctgaacgcggcgtgccggtgagcgagggcgtacccgatgattctctgctggcccactggcagcagcccgggcttgtcctcagccagacctgcggctacccgctgatgacgcaattgccggacgtacaggtcgtgggctgttttcactaccaggcgccgggctgcgaagcgttttattaccgtagccttctggtgacgcgcgcccagaagcgctcccggacactggctgattttctcggccgatgggcggtatgcaattctgcggattcgcagtccggttatcacgcgctgcgaaaaaaagtggcgccacttgcacccgatggccattattttgcccggacgacctttagcggcagccatcgccagtcgctaattgatctaaaagaaggtaagggcgatatcgccgctatcgactgcgtgacgtacgcgctactgcagcgtcatgaaccggcgttgctcgacgggctggtggcgatcgacagtactcccctgacacccgggttaccgctgattaccgcgcacaacacatcccctgaaacgcttaacgctctccgtgatgcgctgaacacgctggtgaatgccccgcaataccgggacgtttgcaaggcggtgctgatctgcgggttcagtgtggtgacgcgtcagtcttattcggtgttgctcgactga

SEQ ID NO: 126629 - DNA, 666 bp, Enterobacter cloacae
ttgggagcgagttcgccaaaagaaattgccgatggcatgttgaaaatctttaatccgcgtacacaaagtggtcctgaaatattcgctcgcagtacggtcgatggctttttgtccatcccggaagacttgtggatgttaactaaggattttctggattcggatcatcgctggagaaatgaaaccgataaaattaggttgctgacactcatcaaaaaagggctgacctcagaagatgtacgtaggctaatcaacacagtgattaaacgctatctgtctggtttatctgaagagcagtcaaagaaattgctccttaaaataggtgggtcgcaagtaggcggaattacctttaaaatggttttcgttaatgagttaattacattatttgtctctaaaatcattccacgattccttgtttctgccggtatcacaggggttttgagtgttggtgcttcaatttcgcgctccgtatatacctcatatgatttgctgaaattgaataaagatatttattatgaattgcgcggagccggtgatttggatttgttatattttttggttgaggataatattaaaccattcattgaggcggtgaatttccaacaaagtcatggtgcagtagatgaggaaatttttagccgttttgtgtcaggggtaacacgtgtttga

SEQ ID NO: 126630 - DNA, 213 bp, Enterobacter cloacae
gtgtttgaaaaaacgatcaagtatattttcgtctatctgatgttacttgtgtcgtttatgatgttctttacgactctgggttattatgtttttgtatttaactggggtggcagtgtaatgaaaatagcgataaatgctgtcctgttaatctctttggtaattgcatccatcgctatttattattttgctgaaaaagtgaagtcaaggctatga

SEQ ID NO: 126631 - DNA, 198 bp, Enterobacter cloacae
atgaagtttttcgggtttattattttttcattggtcgctcttgcctatatctggaatggcaaagataattttaacaaaaaagaatgggtagttttttttcgtaaaattatcttttatcttagtcggcacttttattctggttttcgtgttgatcggattgcgaggaattttcccctcgatgacaaaagaagatggtga

SEQ ID NO: 126632 - DNA, 294 bp, Enterobacter cloacae
atgagcacggtttacatagttattttaacctatataaaaccactcgaagagattgacgcagcgatacctgctcatgttgagtggcttaaaaagggatatgcagaggggattttcctgacgtccggtcgacggatcccaagaaacggtggtgtcattctcgctaagtgcgagagtcttgcctctcttgaagagctcttacgcgaggatccttttcagaggttaaaacttgcgactgccgaaatcattccttttgaacccagtatgaagacagaactcttggaaaatgtgttttga

SEQ ID NO: 126633 - DNA, 900 bp, Enterobacter cloacae
atgaacctgacgaccctgacccatcccgacgctgtctgcgtgcaggcgcagtacaccagtcgtgatgaagcaatacgccagctcacgatgcggctggtgacgctcggcaaaattaccgacggcaatgcgtttttaaccgaagtctttcatcgagaatcgctaggccctaccgcgctcggcgaagggctggcagtcccgcatggtaaatcagcggtggtgaaagaggcggcttttgccgtagccaccctacgtgaaccgctgagctgggaaggcgtggatggcccggaaaatgtcgagctgattttcctgcttgccattccgccggctgaagctggctcaacccatatccaggtgctgacggaacttacttctcgtctggcggatgaaactcttcgggcgcgcgtcatggcggctaccacggcagcagcgctactcgccgcgctggacgatgtgccacaggaagatgacgttgtcgcgttcgtggatgcgccaaccatcgtttgtgtaactgcatgccccgccggcattgcgcatacctatatggcagctgagtatctggaaaaagcggggcgtaagcttggcgtaaacgtggtggtggaaaagcagggggcgaacggtatcgaagggcggttgaccgcgcagcagttacgcactgcgcaggcctgtatcattgccgcagaagtggctctcaaagagagcgagcgttttcagggcattccgacgctgtacgtgccggttgcggaaccgcttcgccatgccgaagcacttattaagcgtgcgttggccttaccccccgcgggaacgaatcgccaggtgcacaccggcaatgatgtgagcaagagccttaaaacggagcttaagcagccctgctcagcggtatttcctttgccgtgccgctga

SEQ ID NO: 126634 - DNA, 288 bp, Enterobacter cloacae
gtgttgatattaacggttctcctgcggagcaataacggtgacccgatgaggactttcaccggttttttcctgttttgcgtacaaatagtattttggtttttcgtttgcggcctggtatgggcagccttttttccactggacaacattcaacgtctggcaaacgtgtttagtatttacggcatagagggtgcgcatgattttgcttcgattcttgctctgtccgtctcggccattggtgccactgggataacagtcatttgcatgaggtttttattcagtaagacgtaa

SEQ ID NO: 126635 - DNA, 597 bp, Enterobacter cloacae
atgttactgagtttaataaataaaaagttaaagtgtttactaattatcataagtatgatgggttctggctgtgtaacacaatccccatatcattcctccgaccccgtagatcaggcattaaaagtttgtggattaggatactcatcggaagcggcaacgctttatcgaggtgcttaccagatgactaataaacaagtatctgctgaatttgaaacaaagtttagccaaaaccttgaaactcagatgaccagtatgtttaagagctttaagccttcggacggaagctccatgaagatcctgagtgaacagataaatgaaagtcgagattgtgtattaagtcagatcaacagttatagagaaccctctcgaagtgatttagtttcacaatgcattaccgactttaagaaacgtgtaggtgatactggtaatggttatccttatgtccgggactggacagttcttgaaagcgatccacgcaactccaaaaataacttagttgttggctttatatttagccaaggaggaccgaacatccctgggaaaataatttgcaaaataaagaataataaatacgacgatcttatttcatccgaataa

SEQ ID NO: 126636 - DNA, 1926 bp, Enterobacter cloacae
atgagcggttattcggtgacttatgaagagagatttctttttaaagaaatcggttcaatagctacgaaacctgatgttgctattactgaacttgtagctaactcacatgatgctggcgcaacggtagtaaaaataaatatatctgaaaccaatccgcaagttctcactattgaagataatggagtaggacttacgaaagaacaattcgaaagcaggtggcttagattacgatacgataggcacaagcatcagggggcttatgtcgaatttcctagcgatgctgatgtccaaactaaacgtcttgcgtttggatgcaatggtgtagggagacatgcaggactatgtttcgatgataattatatagttgaaacatggaaggactccatccgcaattattatcatttagctgtatcttctggtcaaagtccaataaaagttattgaacaccgtagtgagaaatcaacaggtcatggttctaagattacagtaaatattactcgtaactatgtcgactctgaacaaatatcagatattatatctgcaaggtttctttttaatccggaatttcatgtttatgttaacggccgcaaaataaccttgctagagcatcccggggtggtaaaaacggaagaaataaatccaatcgggaacataaaaataaaattgactttagtagattcttctgctgcggctagaacttcaaatcagcatggtgtcgctttttggctgggtgggagattgttaggaaaaccttcttggtatattgcaaaaaatcaaataatagatgggcgaaagtcatttgccaaaagatatactttaattgctgagtcgaatgatctattcagctatgttgaacctgattggtccagcttcaagtcagactttacaactatagaccttatatctaatgagatcggtaggattcttcgaggctggtatgttgagttgtctcaaatagacatgcaacaagcaaaatccacggtaattcaaaaccatgttgaggatataaagagtctaaatattcttgctagaaaggaactgaatgattttctagacaatattttggaggaaagtccggatgttaaattggaatatttggagttagcatttaaagcagctataaatttagagaaatccagatctgggatttcacttttgagaaagttaattagcatttcacctgatgatgtagaagcgctgaatgtttttctggatgaatggaatgtaacagatgcaatgacaattcttgctgaaattgactctcgcataaagttagttgagatgatttccaggattagtggtgaccatagtgtggatgaattacatactttacatccactaatcgagaaagctcgctggattttcggtccagaattcgatagtgccgaatattcaagtaacagagggcttatcaaaacaatggagaccatatttaaaaaaagttataggaaagaatgttttttaaattcatcaaaacgtcctgatatagtcgtaggcagtaattcatctttaagcatgcttgggcttgaagagtttgatggtgaaataaagaagactaagactgtacttttaattgagcttaagaaaggcggtttcactattggtcgtgatgagatgaatcaggcaagatcttatgtggaagatatttggcatactggcgtaggatcttcacgtccttttattaaagcatttgttgttggtgatactattgatagatttgccagcaagtatcaatcagttggaaataatgaaaatgatcagtttggcgaagtaaaagctattactttcgatgaaatggttaggactgctcaagctaggctttttaatttacgggacaaagtattccttaggtacgacagcttagacaatgaagctacgatgagcaatgttatcaatattcctacacaagataaatttagcatttaa

SEQ ID NO: 126637 - DNA, 876 bp, Enterobacter cloacae
atgtgtgataataaaactgatagttacgccagacgctttaaacaggtctttgattatattgaccaccatctcgatgacgctttattactggaaaaactgagtgaagtggctcacttctcgccatttcatttccatcgtcagttttgtagttattgtgggatgccacctggccgttacatccagatgatgcgcttaaaacgcgcatcttatcgactggcttttaatccgttagagaaaatcactgatatcgcgtacgacgccggtttccagcattctgaatcatttagccgtgctttcagacaaatgttcggtctatcaccgacgcaattccgccagcagcccccctgggtggattggcataagcgcatatccgaaccttacaaagccaggagacaaaccatgcaaagccaggtcagaatcattactttccccgcgacgtcagtcgcaatgctgacgcattatggacaaccggagcgaataaacgaaacggcggctcgctttattgaatggcgaaaaaccacgggtttttcaccggttgccagtagccagacatacggtattgcaccacacgatccaaccttaacgccgccggatgaatttgagttccatatttgcggaaccgtcacgtcacccattattgaagacaatcgcttcggggtgataaatagtgacattccggctggtcgctgtgcggtgttacgtcatcagggatcgcatgatgcgttaaccgggttggctaagtctctgtatcgtgactggttgccagagagcggagaggaacttcgcgacttcccgcttttctttcattaccacaactttgtgcatgaggtagcagaacatgaattactcacggatatctatttgccgttaaaatga

SEQ ID NO: 126638 - DNA, 252 bp, Enterobacter cloacae
atgtgtaagcaccacggggctaccgggaaaattaccgacaacgttcgtggtgactattacccgatcgccttccgtgagaacttcaatggggtgaacgctatagtcgaacgcagcccgcgccgcgcgttgccacgcttcgattgccgcgtgcccccgatgggttttaccttcgtcgaacacgacggcattgagggtaaaacagcgcttaacgctggcaatatcggcaccattgccgatcgcgaaataggttga

SEQ ID NO: 126639 - DNA, 135 bp, Enterobacter cloacae
atgaagggtttgatattattgaatacagctgaatttacttttctgcacaaagcggaccggcatacgagccgcaaggtccgctacgagcgaaaagcggacattgttgaggccagagaattgtgcatgatgagttaa

SEQ ID NO: 126640 - DNA, 438 bp, Enterobacter cloacae
atggggttcagcgagctctggggtaaaaagaacgaagtggtggctcatctggctctcgtcaacgggcggtcccttcagggcgcatttgacaatatgaatgaggcctttgacgtgtggcgggaacgctctcgtcatgcctggcaactggatatctcgtggctcgaaacgcaggggattacactcgaggatgagacagcagcagagggcgacaacatccctgctgagaatcagctttcgctggagcttgaggttccgcctgtcgcgacggagagcactgcagtgcccgccgtcggtgaacaagagagcatctccggcgatgagaggccaatccagaaggacaaacctgtatcccgctcatcgtccgtagggtcaacgttctggtcagtctgccagcgggtgttctaccaggtgaaaaaggtgatacgggagcagtggtga

SEQ ID NO: 126641 - DNA, 1032 bp, Enterobacter cloacae
atgactgacaaacatatatttttagcgcaggattgtgatcatggtatatatttgcttgagaaaagcatgagttttatgtgggctgctgcactccggtctgtcacgttactgggcgtggccgaacatcttaccagtgggcctaaatcatgcgatgaactggccgatatgctgaaacttgacgcccaggcacttctgcgggtaatgcggatccttgcctccggcgctgtgtttaaggaattcccggaaggttatttttcccttacccctgcggcccactttctctgtaaggaccacagccattcattgcggtcagcgatactgatgctcacggataaaacattctgggagcccgcaggtcatcttgacagggcgcttaagggggaagatgtctttagcagtcttttcgggatgccgttctatgactactggactaaggaaaagcactcccgtggtgagtatgattttcatgctggtatgtcatcgatgtcgacagtggaaaacgaaattattgctgacgcctatgatttcccgcacggagcaacggtcgcggacattgctggaggatatggaaatctgcttttacgggtgttacgtaaggacagctcattgcgtggtattttgttcgatcagtcagatattctgagtaaaaacgtgcttcatcagctcaaggacgatacccgttgggacacggtctcaggtagtttttttgaaaaatgccctactgcagatatctatatgctgaagtatatcctcatggactggtcagatgaaaaggcctgccagatcctgtcgagttgtcgtcgggccatgcgagctgattcgaaattattaattatagaacccgttataaaggataaagataatgaggatggccggtatgaaattgacatgcttcttctggcaagctttgacggcgggcaggcccgtacagaacaggcgctggggaaaatgctggatggcgcagacctgaaaatcagtaacattattcatacacacagttatttatccatagtggaggcagtaatcaggtaa

SEQ ID NO: 126642 - DNA, 1008 bp, Enterobacter cloacae
atgtccggtgaactgtttattcataattcagtggggataattttcatgatcttcgctattcctgtcctgggggttatcacctgccggggagtgaacttccggaatattcggtaccgttttactgagcacctgctgggttttgctttatggtcaggaattatacttcttggcacagattatttgtatgacggaattgctgatttgcacatcagatacctctcacgaacggcggtgaatttattcggtatcacgctgatcgctcttttgttcctgagaaaactgtttctggttattgattattttgaaatccgccagattaataaaggacatgatgtgacagactcgcgggttatcacccgggtgctgaagataaccgttactctgatagccatgctgatttttggtcagcatttcggaatgagtttctccggcctgctcgcctttggtggtatcggtgggattgccgtcgggatggcaggtaaggacatactgagtaatttttttgccggcatcatgctctattttgaccgaccatttaacattggtgactggatccgttcaccggaccggaatattgagggtgtcgtggctgaaattgggtggcgcttaaccaaagtaatgacgtttgaaaaccggccaatgtatatacccaactccgtttttgctgatatcacggtcgagaatccggggcgaatgctgaaccggcgcatcgagaccacggttggtttacgttatgaggatgctgagaaaattgccgatatcgtgaatgatattcacacgtttctggctcaagacccggatatcgatcaaagtcagacactgctggtcaactttaataattttggcgattcttcgctgaatattatggtgtactgcttcacgtatacaacggtatggagcgagtggctggcggtgcagcaaaaagtgtttatgaaaatcatcagtatcgtccatagcaggaatgctgactttgcgttcccgagttcaaccgtttatctctcacaataa

SEQ ID NO: 126643 - DNA, 678 bp, Enterobacter cloacae
atgaaatccaagagtgcgttagttttagaagaactcagatccaaattacgtactgcatctgtggcacaagtcggtggtttccgccctacagcagacccaattacatcctggtttttaaaaggagtcgctcttccaggtgaagggttgccagtttggaaggggcagccgatgtttccgcttctccagattcgcgtagatgagcttcccgtgattcctgaacaactgaaggggatcgcgctcttagtgctttatcataatatggaaagccatccatttgataaacctcatggcgaggggtggctaatacgagaatacgccacccttgatgggcttgagttattgcctgcaattaacactccatatcgagcatttccggttcggtgggtgagtgtcaatgatgatgctccaggatgggaggacgcttgggatattattgacttgtctcacgtaaacgatgatgaggatgcaagtgatagattctatgatggttttaaccggtacaggggaaccaaggttggaggatatccaatggagatacaacatggtgtggggattcaagattttgtctttcaagtggggtcagaagaaaaagtaaactggatgtgggcggacaatggtatcggctactttcacaaatccccagaggggctttggacgttttcatgtcagttttactag

SEQ ID NO: 126644 - DNA, 645 bp, Enterobacter cloacae
atgtttgctgattttggtatcgtgaatttctggacgtatctacttggtgcgacactgatagtccttgcccccggccctgagaccatgttcgtgattaaaacaagcattacgagcggcatcaaacgaggctttgctgcaatattttccattctcatgagtgacgtacttctggttctgctggcatggtgtgggctggccgcggttataagctcaactcctgccttgtttaacgccatcaaatacgcaggtgctgcctatcttttctatctcggtgtccagacgatacgcgctatctttaagccagctctcgaaacgagtcaggaaaataaatcttcagctgatgctaaggagatcatcgggcgcggaatgctggttactctactgaatccaaagacgctgctgttctatatctctttcttcgcccagttcatcaatgttcaggctgaacactcctggatggcgtttatcattcttgctgcagtaatgttcgcaattactctcgtttatttcggtttcctcgttttctgcggctcttatctgctcagccgtctgaaaggcaaccgtaggttatcaaccattggaaacgcgctggtaggtatgttcttcattggatttgcagcgcgactcgcaagcgcaacttcctga

SEQ ID NO: 126645 - DNA, 486 bp, Enterobacter cloacae
atgaacatctccatctgcagatcagacgaatatgatgatttggctgatatttttatcgaaatggaaacctactataaccagacgctttgcctgtccaggcgtgatatgtccgtgtatctgagggataagatctttgcagccgactccggtaccgaagttcacaaagtggtttgtgatggagttatcgctgcgttctcatgtgtatcagtgatgtacccctctccgcgatttagtgggcaaatgtttatcaaagagctttttgtctctgcacctttcagaagggctggaattgggagagggctgatgagttttatagccagtcgtgctatagaacgcgggtgctttcagctcgactggttatctgtgacagcagacccactggcgcagacgttttatgagtctctcggtgctcagattatcaggagcgttaactatcatcggatttcaggcccatcaatagataagcttgcccgtcgtgccaactga

SEQ ID NO: 126646 - DNA, 702 bp, Enterobacter cloacae
atgtattacagtgaaaatattattaaagaactaggaaccgacaaagaattagccgtgagattagataaggccatggctggtgtcaaagatggctttgttgattatgtggataatcttggtgatgcagccacgcgccttttatattactcatcatgtttaactgaaaattatcatgatgtatgcttaagattaagggatgaagatgttagatttgttttgggtttaggccaactaataaagcaccgggacttgattttcaggatgatgatgctttatatagaaaccatcctcaaaaacaaaaatgaaacacagaaaaaaacacttcttgaaaaattagttccagtaacaaaaaaccttgccataaaaaacacctcaaaaagcgccttaatttattctgttgtatcttacatctgttatgggaataaaatgagcgtatcagtagaggctgcttttgtgaagaaattaggtggacgggttggcattcccattacagcattaaatttatatgggattgtttacaaatcttctgaaagtgcaaatagattaaaaagttttatgccacaattttatcatgcactttatgtagaaacacttgaaatgatgtatttctttattgagccaatcattatgaaggctgggtatttaaatataagcacggcgactgataatgaaattactaatgctttaaagagaatgatgtga

SEQ ID NO: 126647 - DNA, 228 bp, Enterobacter cloacae
atgttagaaccaatcaagagatttttaaaacaattcttcaatagttttaaacaggattgtttgaatgatatttattggtacggcgcatttatatttgctgctttctttgctggcatagtagcatccaatatagatgatttaaaaatagcaggggaaataatccttggcatccttataatcacattcgtaattgctttccgtttcaaagacaaaggattaaaaaaatga

SEQ ID NO: 126648 - DNA, 480 bp, Enterobacter cloacae
atgacaataccagcacatatttggcttactgatgaaaataactcacctttaatgggggaatgtgtaatgccaacacgattgggttcgactgagcttaaatctttcaatcattctgtatggattcctgcagatcataatacaggaaagctaactggaacgcgcctacatgttcctatcacatttgaaaaagaaattgatcgcatcaccccatttttattcagaggtgtatgcactggtagaatgtttaaaggagctttaataaaaatgtatagaattaatgaggcaggaatagagatagaatattttaatataacattgcaaaatgtgaaaataacaagaatctctccaattttattccctctaggcgttgcaagtaaacatatggaggaagttgaaatccgctatgaatctatcgaatggaaatattgtgatgggaacataatttttaaagatacctggaatgaaagagcggtagcataa

SEQ ID NO: 126649 - DNA, 594 bp, Enterobacter cloacae
atgagcgcgtcagcactgatctgcctcgcccctggtagcgaagagacagaagccgtcaccaccattgatttgatggtgcgtggcggcattaacgtgaccaccgccagcgtcgccagcgacggtaatctgaccatcacctgttcacgcggcgtaaaaatcctcgccgatgcaccgcttgtgcaggtggccgacggggattacgacatcatcgtactgccgggcggcctgaagggcgcggagtattttcgcgacagccccctcctggtcgaaactgtcaggcaattccatctgtcggggcgcatcgttgcggcaatttgtgccgcagccggcacggttctggtgccgcataacattttcccgatcgggaatatgaccggtttcccgggactgaaagagaccattcctgaagagcaatgggtggataaacgtgtggtctgggatccgcgcgtcaatctgctcaccagccaggggccgggtaccgcgatcgattttggactgaagattatcgacctgctggtcgggcgtgagaaagcctacgaggtggcgtcgtcgttagtgatggcggcggggatttataatttttacgaagcgtag

SEQ ID NO: 126650 - DNA, 144 bp, Enterobacter cloacae
atgatatacttgcgcgcctggatgcagccacgggtgtgggctgctatacacgtcatccttcaggttgtctctgtttgggctacgttgcgcctttccgttacttactcgcgtaagcttgcggggggctgtgactcgccgcgttga

SEQ ID NO: 126651 - DNA, 561 bp, Enterobacter cloacae
atgttcaataaaacattaatcgcagcggctatcatgttttctggtgcagcaatggcggcagaaagcacgggtgtcgcaggtggcacaattacctttaacggttcagtatcagatacaacctgtgatgtgacgaccaacaatggttctgatttcaccgtcaatctgtctccgattacgcttaccgatatggggaaaaccgcgggcatcgtgacggctaacgaaaaagacttcaccatgagcctgaaaaactgcacagcggcagacgaaggcaccaaaaccctcaaaatcaccttcaccagcagcaacctgtctgacgacggtaaatacctgaaaaactacagcgaaggcggcgcagaaggtgtgggtatcaccctgacatccgatggcaagactgccgtaccgtttgataccgccttcaataccggcctcacgtcggatgatgtttccagcaccgacggtattacgctgaccatgcatgcgaactactacaactttggcggtgcttctgtcaccaccggtaaagtcgttaccgacgcaacttactcttttagctacgattaa

SEQ ID NO: 126652 - DNA, 708 bp, Enterobacter cloacae
atgaaaaaattaataatctttctcatcggggctgtcgcctcgcagatggcttttgccagtgtcgtgattaatcagactcgcgtcatttatccggcagcggcgaaattcgtttccgtacagctggttaatgacagtgataaaacgcatctggtgcaatcctggctggatgagggcgatgcttccgctgcgcctgaaaaggtcaaagtgcccttctcccttatgccgcctgtcgtaaaaatggaggcgcacagtgggcaaaccctgaaggtcgccgcaatgaatacccagtcactgccaacggatcgggaaagcgtattctggctgaacgttctggacgtgcctccggtaccggaaggtggagctgataattatctccaggtcgctattcgcaaccgcatcaaagttttttatcgtccaatgtctctggaagaactggacagctcggttattgaaaaagtcaccctttccacctctggcgatcgtgtgtgccttaaaaacaactccccttattacctgaccattccgcaaatcgtgacctggcaaggtgggcagttaaaacaggccagaaaagataatttactgaacgataccgcctttattcctccgtttggttgtgcgctggttcccgacaaaatccatgcgggtaatcagtaccgaatcacctggcttgatgatttcggcgccaagagattcagcatcctccactga

SEQ ID NO: 126653 - DNA, 2505 bp, Enterobacter cloacae
atgaagaacagatcgctgtttcgaaaaagcctgctggttcattccatcagcctcgccttgtgctcgtttggtgcatacggtgagacattcaacagtagcctgctggtcggtaattcagcggatatggactggagtaacaatcagttggtcatgacgccagggacttacgatctcgacgtttacgtcaataacgtctggcgtggaaagttcaccttaacggtcgccaatgacgatcggggcaccgtacatattcataaagaagatgccacgcaactgtctattcaggaactggatgatgctatcgcgaacgctcactccgacatgattgacattaatacgttactccacggaggtaaaagcaagctggtaccgggagagatgcgtctggacctggaagttccgcaagcctttgtgaaaactgacagccaaaactgggtggcaccgcagaaatgggatcaggggattaacggtctttataccaattacaacgttaactattacaacttccatggactgagtgaagggtatacaaatagcgataatttttatctttcactgaacagcgggctgaatttttcaggctggcatttactcgataattccacctggatgcgttacagcaatccgggaaaaagttattgggtcaataccacacgctatgtcgaaaaaccgattgtggctatcgaatcgctcatgcgtgtcgggcgggcgtataccgcctctgattactttgataccgtgagattccgcggcctgacgctcacgaagagccggcagatgttgcccgacagcgaacgtgtttatatgcctgtcatcaccgggatcgccaccagttccgcggtcgtgagcgtatttcaggacggccatattattcatcagttatccgtgcccgccggcccctttgcaattcgggatttaatgccgaccggttcacgtggcgatctgaccgtggaagtaaaaaataatggcggaagtaccgagcgctttgccgttccattttcctctttaccagacatgctccgaccgggcaccagtgattatcagttcaatatcggtgaagtggacatgcgcggtattaacgaccatagccgctttgcccagtttagctattcacgcggtattaataattacgttaccgcgactgccgggagcatctggaatgctgactatcaatctgtattgcttgggggtgccatatctttaccctacgcgggctcgttgtctggatctcttgaagagtcacagtatcgcctgccgggagaggagcggcggcgcggagaaaaatacgccctttcatggagtaagtattttccaacacgaactaacctgacgctcgcatcgtattattaccgaacgcagaactatgcctccttcagcgattttgtcctgacccgatccaatattcaggattatggcggaacaggctcctcgacggttaacagcaaacaggcattcagcgccaatatcattcaacccctgtcagatgatttcggccgtctttcgctttcagcatactggcgtgactactggcgcgggcaaaaaaccagccgccagtataacctgacgtggagcaatgcctggcacagcgtaaattacgccgtatcgctgcgccgttccgaagtgacgcagtcctactacgactatgaaacaaattatgagggtgatgtcgtcacttcgttgcgcacacgtggaaacactgagaacaatctctatttttccgtcaccgttccgatgtccctcttcggcagcggtgggagcatcgcaacccacgccagcatgcagaaaggtcaatatgcgtcttcagacgtcagcctgagcggtaattcccacgatgtcgattacagcctgatgctggcccatgataacgagggggattcccgttcggcggatctctataccaactggaaaaacagtgtgaccagccttaacaccggcctgaccgtcgcccgtgaatatcgccagaccagccttggtgcgagcggcaatctgcttgcgtggcgtggaggggtcattgcctccccgaataatgggcggaactttgtgatccttgaggcacccggcgtggaaaatgccgtggtcaacggcgattcatcgacccgtacaaaccagcacggtatcgcactggtgaccagcgcaacgccttaccggcagaataattttcatctcgagcaggatgggacaaaaagcagcgacgttgatttacagggtaatttgctgaatatcgccccgtatgaaggcagcattacgtatctgaaatacaaaacggatacgcggaaattattcaccctggaagttcaggatacgaaaggtgaacagttaccgtttggcgcatttgtttcagatagcggtcataacgagttgggatatgtagcacagggaagccagatttttattaaatccgatacgatgcctgattctctgcatatcgatatcagcaaaggcaaggtaaaaaaaacctgtgtcattgcacagcccaatgaacatgccgtcaatatctgccggtaa

SEQ ID NO: 126654 - DNA, 1173 bp, Enterobacter cloacae
atgagtaagtctttttatctcatcatagccgtattcgccctgatatttataccaggattttccgcactggctcaaccccagtccagaggtcttactggcgatacgtgcagaaatagcggcattttgtttaaaaacgtggcagaagcggataaatcgctgaatctctcatcggagtttctgacatccaatgtcgtagaaagaacctatacgacaagctggtctggcagtatgacctgtacctatggcaatgtcgggattggtggtgtattgcaggatcatctttattatttcaccgggtttaataataaccccgtgtacctcaattttaacagcgccgatggcgaaaacagctactggattaaagtgacggcacaaatcaccggcacaacaaaagtgactgtcagcgggattgtgggcatccactccctcgcctatccaacacaatatacattgcgcgcagagcttttaaacacgccgcccaccggggtcgcagcctacaccaagacgaccactaatggtgcactcagcgttataccggcggtaatgagcggtacggggagcggagcggattcacccttgttatccagtaaaacctatgcctaccgcgcgtgggacaacatgatgaccgacacctcgcgcaaaagctggaataccgattattttctcgcttacgagaaagttactatccagtttgaaccgaaagaaaccacctgcaacatgacccatgacatgacggttaagctcccccccgcctcgctgaggacattaaaaataaatggtaaagctaacggtgccgattttaccataccgtttaagtgcgggaatctggcgggagtaaaaactgccacccgtaatatcaaggcctggatatccagtaatgacctggtcactaccgacagcacttaccaggtcatggttaatgatgagaccaccgctggcggcgtgggcattgcgcttcgcagtcgttatttccttggcgaacatgaggagataaaaatctccagcagtaataatatggaacatgcaacacaaatattagacattgcaaaagatgataacatccaggatatacaatatatttatttgcatgcctattacaaagtctacaacgcatcagcgctctcgaccggaacggtggtagcaaccgcacaaattatgtttggttacgattaa

SEQ ID NO: 126655 - DNA, 1188 bp, Enterobacter cloacae
atgaatatatctgttcaaaccgtgcttaacttattacatcgaattatttatccggtctctgctgacctggtaaatcatttgcaacgcacggcaatcatcacctggtatttaagccatcaggcaggacttgatcactccggaatcaagacggcctttctggccggcatgcttcatgatattggtgcactcagtaaagatcgcgcacacatcatgccgggaggtgatggctttcaggatggtcatgaacagctgggtgggtcaatgacggcgggcattcgttttctgcagccggtgaccgccattctggaaaatcatcacagcgaatggtcaatatcagacaacaatacgctccctctggtacatcatctggtgcatatggccgatacgttcgaactgttcctgcgcgaggttaaaggcgattttgtcgcacagcgcgaggatatcctggcccgcttctttgcacggcctgagcagtggcctgaggtgctttcgaatgccctgtatgaatcgagtcgccaggatggcttctggttcaggctctgtaacccggcacaagaccaggtgcttaatgccattagccctctgcaacacgacatgctcgatcatcatgactttcttgaagtgtgccagctgatttcaaaaattgtcgataaatacagcagcttcacccgcactcacagcgccagcgtggcccatgtggcggcccgtcttgctgcactttatggctatgaccgagatatgcaggaaaaaatctgcattgcgggttatttacatgacatcggcaagctctttacaccgctcgctattctcgaaaaacacggcaagcttgaagaccatgaatacgcccgtatgaagcagcacagctacaaaacgctggtcatgctacaccctattaccgaactcggcagcatcgtggattgggcagccaaccatcatgaacgtctggatggcagcggttatcctttccggctaggcgccgcgtcgctggatattccgtcacgaattctggccgtagcggatgtttttaccgcaatgacagagaaccgtccctaccgacgaggaatggacagcgataaagccatgagtattcttcgtgaagaggccgcaaattatcgtctggactgggacattgtgactttgctgggccataatattaattctgttaaaccgctcgttgcgaagtgttaa

SEQ ID NO: 126656 - DNA, 780 bp, Enterobacter cloacae
atgaaatatttgattgcccatacagttgtctacgatacggaaagtggtgaactcactattccaggcgctgaggcacctgaaggcaaaaaactgacaaacacggcgaatcgtattctctcgttgctgattgcaacgccgggagccgttcttgaacgtcagtatctgctggaacaggtgtgggagtccgccggacataccagttccagctcctcacttaatcagtatgtgagtattttacgtaagaccctgacctccctgacagatattgaagaaacgattattgttgtccccaaagtgggctttttcttttcttctgatattgatgtgcagattatagacaccactgaaggtgtcactaaactcgagaatattagtcctcgccgggtcagaaagaaaagattcccacagcgatatatatgggcaacagtcggtattgttgtgctgctaatagccaatatctgggtctggcgcaaggaacagccaaatcagcgatatgacgaactcacgatgattggccatctcgggaagtgtagcgtcaacacttttgaacatctttctggtgatatgcgaaagcatttgattgacgtgttgctttctgctcagcccagtctcaaagagaaatgtgcgttacatgcagctcaactgatggtgaatatacagccgagtgtgttttatggtagccgcgggagaattttttacgctttttgtcccctggactcagaaaacaacacgttgatctattgcgaaaaccattatgcatttaactgggaaatgaaatga

SEQ ID NO: 126657 - DNA, 480 bp, Enterobacter cloacae
atgaaaaacgcactggtattcgcgacgataataactgtacttacaggcacgcttctctggggtattattgtacgtccatcaacgtatacaaacgatcgctgctttgcgaatttctcctataaagatggttcaaatgaccaaccgtttacattttcaggaaatgttgcctttgaattttccgaggataaaacaggtcagtctaatttatacggcgacatagattaccagggcaaaaattacaccttttcccgctacgtaaagtttaagtaccttaatacctccagcaatgcgtatacggtgaagatcctcaagcaggaaaagctggcacatgataacacgcccgaaaatctgtcctctctggctattaaagtattctttttaagcggcgagcattccatgtatatgaaaaaacatggcgacagctttatcactatcggtaatacgctgtcgcccgtgatgaattgtgttatccagtcataa

SEQ ID NO: 126658 - DNA, 687 bp, Enterobacter cloacae
atggaagatattgtgtcgacaaaaaagaaaacatcccggtgtgtcagttgctcagaatgcggttttgctgatgtgtgtcaggcctatctttttgaccgccaggaacccctgtttatccaagatctggcgcgcggtaaacgtatatcgaaaaatgcctttatttatcaaagcggcactccggtaactgcgctctatgccctgagaagcggcgtggctaaaatttacgatacgcagcagattcttcaggggatcctgctgccggggcaaatttttggtgcagaagaactcttcaccagccagcatcaatatagcgtgcaggctgctacagacgtggaaatctgtgagctaaaaaaaacgcatttttatgagataagccagctaaccagcacgttcacccactttatcattcgtatactctcccgttcagccagagaaaaacagttgtttattaacgtgctggtgaagagcgacggtttacagaaggtcagtgattttatccagcttatcgcggatatccgaaaagagtatggctttgagcaccgcgcgattgaactgccgctcactaaaaaagaactggcgcaattactgggtatttcccagtcgacactggcgcgtgcgctggcggcgctggttgagcagcagagggtcttaatgaataaaaaagaaattaccttattacaccactga

SEQ ID NO: 126659 - DNA, 621 bp, Enterobacter cloacae
atgactgtcaccgatgcccttcttgcttacactctcgctgccacgctgttgaccctgactcccgggctggataccgcgttaattctccgcactgccgctgcggatggcagtaaaaaagcaattcacgtcgcgctgggtattgatacgggttgctttatctggggcgcgctggtcgccttcggcctgggagcactactggctgtctccgaattcgcgtattcctttttaaagtggtgtggggccttctatctctgctggctgggcctccagttattgttacgcccacgtcagcagttctcgctttcctctgacggtaatgcccgcagcagcaacggttttttacgtggcatgttgggtaacgtgctaaaccctaaaatgggtatcttctacgtttctttcctgccgcagtttattccagcaggtcattcaccgtttgtgtggacatttttgctcgtgagtattcatgtgcttattggcacgctctggtcgttaacgttaattatcgcaaccggctatgcggcagaagtattgaaaaagcccgcggtcgttaaatggatggacagaacgaccggcgtagtgtttctgctgtttgctgccaggctggccatgagtaagcgctaa

SEQ ID NO: 126660 - DNA, 837 bp, Enterobacter cloacae
atgccatatgtaaccacacaggacggggtaagtatttattttaaagactggggcgataaatcagcgcaacccatcatgtttcaccatgggtggccgctgagcgcagatgactgggataatcagatgctatttttcctcgcccacggttatcgcgttattgctacggaccgccgcggtcatggccgctcagaccaggtgagccacgggcatgatatggaccattatgcatctgatgttaacgccgtcgttgagcatctggatctgaagaatgttatccatgtaggccactccaccggtggaggacaggttgctcgctatgtttcaagattcggacaacctcagggacgcgtatcaaaagcggttctcatcagctccgtccctcccctcatggtaaaaactgacgccaacccagacggaacgccgattgaggtcttcaatgatttcagaaaggcacttgccgctaaccgcgcccagttctatctggatgtcgcctcaggtcctttctacggttttaaccgatccggtgcagcaatctctcagggcacaattcaaaactggtggcgccagggtatgaacggcggtgcgattgctcattatgagggtattaaggcattctcagagacagaccaaactgaagatctgaaacagatttctgtacctgttctggtcatgcagggcgatgacgatcaggtcgtcccctataagaatgcagcgattatgcaggacaaactcctgaaaaatagtcagttaattatttatcctggtttccctcacggaatgcacaccacccatgctgatgttataaactcagatatactggcattcattaagaaataa

SEQ ID NO: 126661 - DNA, 795 bp, Enterobacter cloacae
atggatcttcaactcaccggtaagacagcactcgttactggcgcaaccgcggggattggtctggccatcgcccgcacgctggcgcgcgaaggcgtggccgtcaccattactggtcgtgaccacgcgaaattgcaaaacgccgtggcagacattaccgccgctcagcctcaggcgcagatcaccgccatcgttgccgacctgggaaacgctgagggggcaaaagccctgatcgcggcctgccctgacaccgatattctcatcaacaacctgggcttttatgaagcccgagacttcgccgacatcaccgatgatgagtggctgaacatgttcaacatcaatgtcatgtccggcgttcgcctgtcacggcattatttcccgcgcatgctggaacgcaactggggccgggtgatttttatgtcgagcgaagtcggtgcgttcacgccgccagatatggtgcattacggcgtcagtaagtcggcgcaactcgccgtttcgcgcggtatggccgaactcacgaaggggacgggcgttacggtcaacagcgtactgccttcagcgacccgctccgacggcattatcgaatacctgcgccagaccgcacctgcaccgggtatgaccgaccaggagatcgaagcgaatttcttccagacctaccgtcccagctctcttatcgcgcgaatgatcgatgctgatgagatagccgcgatggtcgcgctgctggcgagcccgctgggcgctgcctctaacggtgccgcggtgcgcgtcgaaggtggcaccttccgctccattctttaa

SEQ ID NO: 126662 - DNA, 912 bp, Enterobacter cloacae
atgcgctcaccgtatcgtttccatgaacgtagctccttttataaatacatgcccctttccacagctgaaattgtcctgcaaaacgcgtcattgcgatggagttcaccactaatattcaatgacccttttgatgttccgcgagaagttatcccagatgtgaatgaacacgatattagcagagcattagcccagaaaattttgttagaattaaaaaacccacgacctgacacatcccaactgaactctggcataagataccttcttgaattctataaaaattactttccatttggacttccagaagagttaataaaaaaacaaaccgagcttattttaaaccctcccgtaggagaaggagcaaaggatgctttaacagggtttagaaattattgggataatacactacgagatagacggatattatgtcttagtgaaagcccggtaataacctcaatgtggaatcattatgctgacagctataaaggtatagttttagaatttagttgcatagatgaacttgatagcgcttggcttttagctaaacctgtgaagtacacagataaaaaacccttaacttatactgctgaaggaatggctgaattatttttcatggatgaagaaatcgttaaaaattatataaacgaagatataacttacatcaaaaccctagattggcaatatgaaaaagaatggagagtatcaactcacaaaagacctcttcaggaaggtctttatagtgacctaaccttcaatatacacgaacttaaaacaatcatactcggccccatgtttgatatggataaattacctgctatagatgagctatcagagaaatatcctttagccagtgtttctagtgcaacaattacgcgctctggattgattgaaataattcccttaactacaaattga

SEQ ID NO: 126663 - DNA, 627 bp, Enterobacter cloacae
atgagtaaagaatcgatgttggcaggatgggaattgatttttcaggcagcagacgcaggagcagtactttttagtcaagataagtttacgcaagattttgataaggcctgtggtcatatcatggtacttattgaagatgcctttatgtgttatgagcgccgatcatttggaacctcggtatttctaagcgtaacagctatagaagagactgcgaaagctgagattggtatttatcgtagggataataaaaacgaaaaacaaaacaggaagaaagatccactttataatcatttatctaaacataaaatggcagttcttccaacggtatttatgggtaaaagattgctggaggctttaggtgaaaaaagatgtaaggaattatactccgaagttataaatggttctttgagaactttgagggaggaagcactttatttctctaacaaagacggctcacttattacacctaatgaactgattaacagggagaagtctaaagaaatgttgctcttagctattgaaactatagacgatagattagttggttatagcgataaaagttatgacattgaaaaaagattatctcagttattcgaacatgttttaaaacaatctttagatgattaa

SEQ ID NO: 126664 - DNA, 516 bp, Enterobacter cloacae
atggattggaaagatttagcacatacagccatctacactggggccgaaaattcagaaggtagtatatggaatcgggtggaaggagtggatgtagaattcatcggaggatttcttactgcccatcttagtgttgagaaatatattagtgactatctttctttaaagtacccttcactttcttggaacgaagccaagttaactttctcacaaaaaattgctttattgcaaaaagaaaaagcagatcctccttataatgagatttacataaggttgaaagattttaatagtataaggaataaattaagccacaatttaaactacaagttaactgaagctgataaaagtaagtttattgatttttttaagaaggtatctaaggggcatgaatatgcctcatctattgatatagatgatccggcgtatttaataagtttttttgtgaaaatatccgaagcctacttcgccagtgcgatagctttttatcattctaaaaaccaagttctttcaaaaagatag

SEQ ID NO: 126665 - DNA, 288 bp, Enterobacter cloacae
atgcggcggctagcgctgctggcagatatggatgctgaccagtggatagaggccgcagccgctgagctgggttttgatgttcagcacgaacccgaagaccaactgctgattctgttccggctggatgaagaaacccacagcttctatggcaaagaccgtgcagcaggcgctttacagtttcttcgttctgagctggcttacgttgccacaatgcaccccgatacgctggatgactggaataaaactggtttaatgtcactctgcctgctggacggcgaaaaactgtaa

SEQ ID NO: 126666 - DNA, 1131 bp, Enterobacter cloacae
atggctattggccactacttattcaggggcgataagactgcttgcggtggtcggattattgaaggatgtaccgatcatcagtttttcgataaagacatggcctgtgaagggcataaagtgacatgtggtaaacatgcgggtagattccgcatagtgggagggcttgaaaacgatgaaatacatggtaaaagggttgcaggaacactgcacagccgtagctcctgcccctgcaaatcacgtttcattccctctatcttcgacacttacgaattttctaaagagcgagtgaaagccgacaccacccaatctcacatcgttgaatttcccgttctccctggcccgattgcagatcctaaaattgatagctttgctgacacctgcaagccagaagataacccgctattgaacggcgtttacatctggactgaaaccaaaaacgcaggtcatgctttcgtttcagtgcacgagaataacaatgtctatctttacacttatggtcgctacggcagaaccaatcgtggaggctttacgggagatggtattcttaacttcctgcaagatgaagacgcaagggtttactatcgttctgaactctatgagatgggtgctcgtgttttccgcatagacgatgctgacccggtgaagacaagaacgttcttcgaagacctatggaacagcagtaaaccagccatacaaacatcaaaaatgccagaaactacaagaaggagaggccgtaccattgatgactatgatgttactggcagcaactgtaccacacattcagttgcggggatcaagtttgctggatcaagggtatttgagcacggttatacatctacgacgacacaactacctattgaagccgaagaagatttcaccgttccggtatcgctgcaaagatttctcatcacaaaaggtggagacatgtcctcaatgcttgtcgttgagatgacgggagtattcaaagaacaataccctaattcaggcaacttgcagccattccaggaaactcgcggtggtgtagttcagcatgttgcagcggaaggtgctgccactggtaattcattgtccccgtattccggcggcactgtaggtggtgtattagggggaacttatggcgatgacgaatag

SEQ ID NO: 126667 - DNA, 276 bp, Enterobacter cloacae
atggcgatgacgaatagaagcaaaactgttttccgatggggtggaattgtcattgtatcgctttgctactttatcgcactggtgctatctactttctctttttccgcattcagcgagagtgaaagtatgcggctttcaggcccaatcccactaaaagagtaccatgcttcgatagactcgatcatgcaagccactgatgatgtttttaatgtcgccttttttggttttatgatctgcgtgcctcttattctgatcatctttaaaaaagtaagatga

SEQ ID NO: 126668 - DNA, 264 bp, Enterobacter cloacae
atgataaataataagttctggatcaggtgggtgagtatcgcgctgctctgcgtagcctattacgctatcgtgctgtatttcgctctggtcttcgcgcttaacttttcagagacaatgagccagggcggggagtttacgccttctcaatgcacctggtttgttaaggagctatcgcaaaatcactctgactcagcgttagcttctattgttggtttcgctatctgcgtaccgctgatcctgctcattttcaaaaaggtgagatga

SEQ ID NO: 126669 - DNA, 270 bp, Enterobacter cloacae
atgacgaatagaacaaaatgtttcatccgatggggaagcataatcacgatctctttcctctacatagcatccattttggtcaatgtattagattatgggataacgagaaaatacactgacatactcaacgaaaaaacgatcactattgaagcctgtaatgctgtggtggctgattttgaacagtattacgacagactgattgatgtttctctcttcggttacatcatttctaccgtgttgatcctgatcatcttcaaaaaagtaagatga

SEQ ID NO: 126670 - DNA, 2481 bp, Enterobacter cloacae
gtgttatgcaatggatttatgataaacaaatggcaaatagatatggaaagatcacttcgcttcaatacgttattcttttaccgcactcccgctttattgtttctgttattacttttcccctttctggttcaggcagcagaatcagtatatgaacaacagattcagcaggcgcgtaacggtaattatgcaccttttctgcaatatcttcagcgttatcagcagcaacatgccctgacgcctgagcaggttgcggactggttgcaggtggcgtcctgggcgggtcgtgatgacgacgttattcaggtctggctgcgttataaggtctatatgcctcttcctgcccgtggcgtggctgctgctgctcaggcaaggcgaaaccaaaaggcgtggcaacctgcgttaatgctctggaaggaggcgtgtaaccttgcaccggataacgacgattatcgcatcggctacatcaaaaccctcgccgacgcccgcatggatacactggctctgcaggaagcccggcaacgggtggcggaaaagccctctctggctcacctccagacgctctcttatgtctattcacgccaggggaaaaaccaggagcggcttttagcagacatccgcgcgttgaatagtgcgccagcggatgacgcccttcgtactgagttgattgatgcgttaacagacaaccgggccgacacgcctgccctgcggctttcacaaacggtgacgctgccccccgcgcaacgccgccgcctggcactcaacgccgccgccgaaatggtacgcctcgccgatgtgcctgcccgtactgaaacagagcgtttgcagctcgcgcaagcggcgctgaaccgctatgacgagctgctgtcccgctggcaaaacgaacctcaggcagcggaggacgttatccgggcccgtgtcgatcggcttggcgcgcttcacgcccacggtgattatccacaggtcatcagggaatatcaggcgttaacgtcggctcagcatcccgtgccgacctgggcaattggctgggttatctccgcgtatctggaggagaaaaatgccgatgccgccctctcgcttctcaaacgttatccagactatgcgccggatccgcaggacgacgatcatgcgctcttctacgcctggctggataccgggcagtatcaggccgctcgccagtatgttgagaagataacccgtaacacgccctggacccgctacgatttcggttcgccaaccccgcaacccaacgatcaatggctcatcgggcagtcgctcacctttaactatttgctgatgaccaatgcccttccgcaagccgaaaagctggcgcaacgtctggctgcgtcagcgccgggaaatcagggattacagattgattacgccaccttacttcaggcgcggggtctgccgcgggcggcggagcaaaagctcaaaatggccgagacgctggagccatccaatatcgagctggaacggcagcaggcctacgtcgcaatggatctgcaggagtggcgacagatggatttactggccgatgacgttatcgcccgcgcgcctgtcgacgggagcgcccgaagtctggacaggctcagaaacgtccatcacctgtccgaactgcgtctgaacgcgggcaaaggactgcactctgataaccccgtcagcggcacacacgatctgagctgggatgccacgctctacggtccgcccgtcgcggataactggcggctgtttggtggaacccgatttgcgcagggcaatttcgacgaaggcaaaggcaacagccgccacctgtttgccggcgtcgaatggcggcctcgcgaccttctggtcgaagcagaactctccggcaaccattatcacggtgcaaacaagcccggtgctcgcctctcggcagcgtacagcctgaacgatagctggcaggtgggcggaaaccttgaacgtctttcacgcacgacgcctttacgggcactgcgtaatggcgtcagcgcaaaccggggagaaggctgggttcgctggtatcaaaacgaacgccgtgagtaccagtttaacgcctctgccagccacttttccgaccataaccgccgccaggagttcgcccttacgggtaaagagcggctgtggcagacacccaccctgatgctggatctcgaaccgggtatatcagcgagtaccaacaccctgcgggacacgctctattacaacccggagcgggatctgtccgtaacggcagccctgtccgtcgatcaccagatgtaccgccattacgacacgctctggagccagcaggtcgttctcggaggtggggaatactggcagaaaaatcagcccgctggcgccatcgccctgctgggttacgggcagcgcattcaatggaacaacgtcattgatagcggcgtgatgctgaactgggacaagcgccctttcgacggtaaacgagaaagcaatctctccgtcacgtttgatgcgaatttacgcttttaa

SEQ ID NO: 126671 - DNA, 2592 bp, Enterobacter cloacae
atgcgtgaatttatgaaccgcacattgctttcgcagtgtgtcttaatggctttaacctctttcggtacccaggcagcaatgacggcagcgacaccgtgtgaggatggcgtgacgacgcaaacctgtggattaacgaaatataccgatgacagcttttatcaaaatcccggtgtaacaattgcggttatggccgacgccacggcgaataatattttcatggatggtcatcgaggtgatggcgacacgcagtcattaacggtatccggaacggatatgtcaggccactatatccagggaagcaacggcggtaccgcgaatatcaccctgaataacggcgctacggccgatatgattgaagtcggtagcggaggcgcgaccaccaataccaccgtgacggttgatggcgcgacgctgaacggtgaaaacagcacaggcaattaccagggtgataaaacctatatgatgggctcagcgatttatctcgatcccctggataaaggctaccacaccgtcaatattgagaacgggagcgcgctgcacggcagcattgtaagcgccggtgctggcgaacaggatattaccctcagcaacagtacaatggataagggcggtatttatgcagggagcgatcaatcaaatacccgcattacgctgaccggagccaccgtcgatgcctcgcagagtgaaatcgcgcagaacatgggcgacctggccgaaaaactcagcgagtataagccgttcagtgacatcaacctggatggcgtgggcgatcttgccatcgccatgtacggcacccaggccgattccctggccctgaataacagtaccgtcactggcgatattggcgttattaatgaaaaggggtcgacatcacttacgtttactaataagagcgtcgtgaatggcaatattaccctgaacggcagttcagcgaattctgttctggtggataacagcaccattaatggtgcggtaaataccggtcaaaacagcggcaataccaccatcacgctgcaaaacaatgccactgtaaatggtgatattacaaccggtgcgggcgatgatacggtcgtgctgaccaataattctcatgttaacggcaatgttgatggcggtgacggtagcgacacgctgtcaatggatgccggcagttctgtttctggtgaaattagtcagttcgagacggtgaacacgaccagcaataacagcatcgccattgataaaattaacgatgccaccagctggagtttgcaaaatggctcaacgcttgtcgctactaccaccggcagtaatgcgatggtaaatatgagcaccgacagctttgtggatttcggcaatatcaccggggttaataacgccgttgtcgtcaacagcattactccctcggcacaaaatcagcagaacgtgattctgggtacgttcaccacttcaggcaccagcaccccgcaaaattatgcggcggccaccttcacaaatggccaacagaatgttgaaaaccgtagcggcgcttataactatgacaacagtctgaatattgtggccgtagataccgcgccgcagacacgccttaccgccgataatacgcagtcgtggaatatcgaatttaacagccagaagggcagcctcgcgagcgacgttcagggccttgttgccggtctggacgctgccgagcaggccggacatcaggtggctgatgatatcagcaaccatatgaatcaggtgcatctggctaacctgctcggcaagcaggaggaaggtgcgcaggtctggggtgatttcctctatcagaatggcaatttcagcaatgatgttgactataagagcatcacccagggcgctcagggtggcgtggactggacggcgcatctggacaacggtgatagcgtcactggcggtattgcactggcatggacgcgcagccgcgtgcaggatacccatgacggcgctgatagctttaatgacagcgtctacggtaattactacagcctgtacggtggctggcagcaggcgcttaacggcagaacatggggtatgtttgccgacggtagcttcagctatggcgatatgcggtacaccctgtctgcgaataacgtgacggggaataccagcggcatgaccgaagcactgcacggttcgacggatggcaccctgtatatggcgcaggcgcgtaccggtgtgaacgtgttgctgccaggtgaaaccctgctgcagccttacgccaccttaggctgggatcaaaccaaagcaaacggcttctccgacagtgaagtggccttcgccgacagtcaggtctcttcctggaacagtggggtcgggttgagactcaccacaacgcttcgcgatctgagcaagaacgtgcagatgatgccgtggatcgacgcacgcttccagaaagagttcagcgacgatactgatattcaggcggcggattaccacaccacctccggccataacaacacgatggggatcttcggagcaggcatcaatgcaacgatagcgcataacttcacgctcaatactggggtgtatgtcggcaccggtgacgtggacaacgatgccagcgtgcaggcggggatgagctacagcttctga

SEQ ID NO: 126672 - DNA, 168 bp, Enterobacter cloacae
atgatgtggatgcagaggattatcgataaccttttcaaccggctccttgagccggtttttttatccataagcgactcatatgacagccttcatttctgccagggcatactgaaacgtctcccgatgatgagcagatggatgcagcatgttagcagctcaggtcactga

SEQ ID NO: 126673 - DNA, 432 bp, Enterobacter cloacae
atgaaaaaatattttagtaactcagatagcagcttttatcttgaagacactattcaggtttacgaagctcaaggtattgcagttcctccagatttgaaggagatctcagaacaggaatacgaatctttcatggtatcacctgacaggatgacccctcattacaatgttaataaaagttgcatggaatgggttgaaattgcccctccatcacatgaagagtatatttataatgcccagtcaatgaagtcgaggttattgtctctggcgacacaagctatctcacctcttcaggatgccgttgatttatctatggcgactgaagcggaaattctctctttacagcagtggaagaaataccgggtattgcttaatcgtgttgataccaacaacgcaccggatattatctggcctgacgctccgtctaacaattaa

SEQ ID NO: 126674 - DNA, 1104 bp, Enterobacter cloacae
atgtttcgatggataaaaaaagcaaacagatctaaaaactattttttgaaaaggatcaaacttaagttaaaacttaacttattgagtatgattgccgctcaggggcgtacttctcgaacgagacatgggtcgggcacaaaccatctgattatccccttcattggtaaagggattggtgatgctattgtcattggtggtgtgattgagactctggtaagaaacaattttcaggtctctgttattgcagataaaaggacgcactttctcttcaaagaatggcgcaatttagaagctctttacttttatgaacctaacaacaaaaagatgctaatcaaggtgttaagggaacttccaccttttgtatttgttgactcgcatgaaataactcattcaaatgtcgaaacatttaatttaatcagactaataaaaccacacaaaacaatcggttttaccaggaagtatcgtatctatgacgaagtaattaacattagctgccctttgtcacatataagcacaagatacattgatttcctgaagcatctggggatatcggcacagagctatgattacactgtgatcatacctgacgacgatgtacaaaaagcaaaggattttcttaagaaaaccactgataaaaaaacggttgcgttcattccttacggcagtgttagtgaacgtttcttctcaacagcgcagattgaggccattaccagtcacatggctaaatataaagatacttttcacttaatcattcttggcgaacaacataaaataaagcctattcccgatgcagatcatgtcactaagagttcattgccctcattcttttcggctgcacaaatcataaaagagagtgcactcgtgatttctccagatacatcattcgtgcatgtatccagagcatttaagaaaaaactaatttgcctctatccatttaaaatgcttgtcgctcaggcagataatgctgatgtctggggaccaaactatgaatcagctatccaggttagactgaaagagcgccgcgtaatggatactgatgttcggcctatactgaatattattgacgagcaattgaagagtatcgccgataatagttcgagataa

SEQ ID NO: 126675 - DNA, 1218 bp, Enterobacter cloacae
atgcaaattcataaaaccctgaaaccgatttttgtgaccaggttcaagtgtgtggggccggaatgtttaatttcctgctgccgcggctggacaatttccattgataaaaaaacacatcaaaaatatctttcatcaacgcatcctggtatcgctgcaatagccaaagacaatctgattctgcagcgtaaaggcaaagtaaattattcccgtattaaactggatgaaaaaggggagtgtccgtttatcgatgaaaataagctctgtatggtacaccgtgatttaggtgaaagtgccttatcgcacacctgcagtacttatccccgaagctcaacccgctatctggatgaaactcgccacagcatgaccctttcatgtccggaagtggtcaggcgggttctcttcgaccccgatgcgatgttattgcaggagcaggatgaactgctggccgtttataaaaccaatctgattggtcagcgccagtctatgcctcaaagcagccaggtcattcatctccttgcgtggaaaataatccagtcgccagcgaggaatgttgaagaaaatttgatggcgctggctcagttgatcctgaccttacagcatgtgaacttcgatttgcacaatcagtatgagcaggttgaacgcttttacgaagccttgctggaagcgttgcagagcggtaaatcgctgctctctgaaagcaatgtcgggcgatcaaatgcgatgaaatatctggcattgtcgatcctcggcacgaacgtggcgcgagattctgcacgggatgggtatatcaacgaagggcatcggcaaattgctgactttttgaatttcagccatgacagcgatcccgccaggctggcgcagaaattcgacgcgattaaccagcagtgggggaaactttgccaggaatcctgtctgtcagagccgtacgtattacgcaactatctgttgtacaaactctacagcggctatttcccgggtaagaataccgccaccattatgcgtcagttttatcgcatcgttctggactttttctacctgaaagttttcctgagcgtcaaatcaatggatgaacaactggatcagcagatggtcatgaaaaccatcgccagcttctcagaaaagaccctgcacaatcagaccattgatgcccgtatggattttgctatcgataagattaacggtggggacgacctctcgtgcctgctgctcattggctaa

SEQ ID NO: 126676 - DNA, 1236 bp, Enterobacter cloacae
atgctccatccgcgagccagaaccatgctcttactggcaataccggcgctgatcattggcgttgcctcaagtctggtgctcattgtcgtgatgaaagtcgcgtcggtgttgcaggcgatgttatggacggcgcttcctgcacaactgggcgtcagcgtggattcgccgggatggatcatgttgatgctgacgctcaccggcgttgcggtgggtctggtgatccgctttagccccgggcacgccgggccggacccggcgcttgagccactgatcggtgcgcccgttcccccctcggcgctgccggggctgattatcgcgttgatcctgggtctggcgggcggtgtcagccttggtcctgaacaccccatcatggcggtaaacattggtatggcggtctttctcggttcgcgcattttaccccgggtcggtgcgctggactggaccatcctcgcctctgcaggcaccatcggggcgcttttcggcacgcccgttgccgccgcccttattttttctcagacgcttaccagcaataacgacgtcccgctctgggataaactctttgcgccgctgatggccgctgcggctggcgcgctcacgaccagtctgtttttccatcctcatttctcactctctctgccccactacggtcagatgcatattgccgatattttcagcggtgccatcgtcgtcgcgatcgccattgcactcgggatgattgcggtatggtgccttccgcgcctgcaccgtctgatgcaccggctgaagcacccggtgctgattctgggggcgggtggtctgatgctgggcgtattaggggctattggcggaacggtaacgctgtttaaaggccttgatgaaatgcagcagttggctttcagccaggtgttcagcgtgtctgattacctgctgtttgcgctggttaaactggcggcgctggtggtggctgcagcatgtgggttccgcggtgggcgtatcttcccggcggtgtttatcggcgtggcgctggggctgatgctgcatgaacatgtggatgcggtgccggcagcgataacggtctcttgctcaattctggggctggtgctggtggtgacgcgcgatgcgtggctgagcctgtttatggcggcggtagtggtgccagattcaacgctcttccccctgctctgtatcgtgatgttgcccgcctggctcctgctggcgggcaaaccgatgatgatggcctggcgaaacgacaagtaa

SEQ ID NO: 126677 - DNA, 129 bp, Enterobacter cloacae
atgataaaaaacctggcgcgtattgaccagctatccgtcaggtttatcaaatggggaaaaaccctgttttgcaaaggggattatcaggagagggctgaagtctcccgatttttttgtgataacgcctga

SEQ ID NO: 126678 - DNA, 174 bp, Enterobacter cloacae
atgtcgaatttgggaagtattttaagtgaaacctttaaaaaaagcgttactgatgaaaaaggctcagtggatattaatcattctggcagcggtgactactacaggatgttgcattgcttctcaacccgaaacggatgcattaagcacccggcctttcatgggggggaatggtaa

SEQ ID NO: 126679 - DNA, 672 bp, Enterobacter cloacae
atggggccacaatggcatcagcgtcgtgaccgcgaaaccagcctgttgggccacagcggctgccgcgtaggcggtaacgacctggacattgctctggcatttaaaagcctgatgccgctgctcggcatgggcggacaaaccgaaaaaggcattgccctgccgattctgccctggtggaacgccatcgccatcaacgacgttccggcgcagagtgatttttacagcaccgcgaacgggcgcttcctgaacgatctggtacgcgacgcgcaggacgcggataaagtcgccctgctctataaagtgtggcgtcagcgtctcagctatcgcgtagtgcgtaccgctgaagagagcaaaatcgccctctctgaccgtgctgaacacgctgtctcattaccttttatcagtgatgagctggcgaccgcgatatcgcaggaagggctggaaacggcactcgcccagccgctgcagcggatcctcgagcaggtgcaactggcgctggagaatggcaaagagaagccggatgtgatttacctgaccggcggtagcgcccgttcaccgcttatcaagaaagcgctggcggaacagcttccgggtattccgattgccggtggcgatgactttggctccgtaacggcaggtctggcccgctgggcacaggtgatgttccgttaa

SEQ ID NO: 126680 - DNA, 1599 bp, Enterobacter cloacae
atgaaggttccggtatggtcgtatgcccgtgtatcaacgcttagtcaggttgatgggtttggtattcaaaggcaggtacagacgataaaccagtttatacagtatctggtacttgatactcgtttaccgttcacacttgatgtagacactatcacacagatggtagcggagggcagatctgcctttagggggaagaactggaaccctaaaactacattaggtcagtaccgaaagatggtaatggatggtgtagtaccagaatcagtactgatagttgagaacatcgaccgtttaactcgtctagatccatttcaggcagtagaaatcatttcaggaatgattaacagaggtactactattcttgaaattgaaacgggtatgacctattcacggtacataccagaaagcattacagtactaacgatgcaaatcaaccgtgctaacggtgaatcaaaacgtaaaagtatcatgatgaagaaatcccatgaaaaccgttttggtaatgtgagtaaggttaggccgcgttggtttgatgtagtagaaattgatggtatgaaacagtaccgcccaaatgataccgcaaaagctatacagcgtatgtatggtgattatgttaatggtattggtgcggctcagattgtacgtacttatggtaaaactgataatggtaaacagtggacattggtcacagtactacgtgctcttagtgataagagggtagccgatgatgcccgctatccttcaatagttgataaagaactatatgagagagtacaagcaatgaaaatagctactaacaaaactggaagtactcaccaaaaaaacatgctcaatatcttttctggtatgtcacgttgtccggtatgtaaacaggctattatagttaagcgtaactctcatggtggacttttcacagtatgtttagggaaacgtactaacaaaacttgtacggctcgtagcatggcttacaatgcgttagaacgcccactattggaagctatcaaggatttggatttttcagaagtatataaccatgaagaatcaaacattgtgacgttacgtgatcaatggattcaaaatgaaagggatattgccgcatttcgagaaaggttagctaatgctagcagatatgagaagtttgctattctggatgaactggaatctatcagtaaggaacaagaagaattatctattcggttaaagtcattggatgccccgaaggatgttcaactaacctataatgatgataagttagatatggatgttgattaccggatagaattaaacaaccgtatgaagaagttgattcaagaaatcaatattggacgtgttgatactagtaaaagtacttacaccatttactgtactattaagtactggacagataaagttaaacacttagtaattattgattctgaaagtatacgtactggtaaaggtggtgctaacacacttactactaccctaagatcagttagtagtattaatgctgatggtacgttttatggtaatcctgatgatgaggctgtacagtactggaagcagtcagtgaataaggtgtttatagaagcagggaaggaagccccatttaatagctaa

SEQ ID NO: 126681 - DNA, 165 bp, Enterobacter cloacae
atgaattttttaattgaactcttactattcccaatctacatagtactgtttctgatgtttatgatcttaacagtactagtacttcccataaagataccatttgtaaagaactacatttataaacatatctcacctaatactacaaaattgataaataagacgtaa

SEQ ID NO: 126682 - DNA, 2070 bp, Enterobacter cloacae
atggaagaagaactattattaccacgtttggtggatagagaagcactaagacaagaagcaaataaattacgtgaagccgtactaaacggtactatagttgatagggtactagcaaacgcacttagagaagaaatgaaccagggttcaaagtatcatggggaatggacactagaacctaaccagtacataagcagtgtctttaataagatggatctatcaagtggtgtaaaccttgtaaattcatcggtaggcactggtaaaacaacacagtttatacaagaagctaatccagagactaaccagaaagcgagagccaaaccaggttacatagtattagtaccactaacatctatacgtttatcctttgagggtgataatgatgtattcagtactggtatttgtacttggaatcaaatcgaaacaattctaaagcacagcaataaagaatactttgctgataaaactttagtgatagatgaggttcacggattttttctagattatggctataaggcaaatgtgataaaccgtcttattgcttcattctcacttttcaaaagtgttattatgatgtctggtactgctactcctaatgacttttcaggaattgaattcaacaaagtttacaaaatctataaaccttctgaagctcgtaaagtaatcagtaccgtagtttcaacaagggtacaagatcttgtactaacccaattgaattcaagtaaacgcaaaaccatagtattactaaatgacaaagcacagtgtgaagcattgaatcaaatgtgtacccgtactggcttagttgtaaatgctgataagaaaagtaatgatgatgtagttgaactatatgtaagtggtcaaatgaaagttgaagtaatttatggtacttatagtattgttgaaggtctttcaatagaaaaccagttagaagaagttgatatagttattgttggtgatgaacatcccgcacgtattgaacaattcacaaaccgtttccgtaagatctctaaactaaagaatgttacgtactatgtgaaccgtagggaagtagttgaagttggtatcttcaatcgtgctgaagtagttgctgatgctaaagtgatgaaagagcttctacaaactacatatgaagcacttcaaactgaagaagctaagtattcattcaccagtcagtaccgtaaagatattgcgggtagtatggtgtactttcatgaaggtaagtttgaagtatcttttactggcattgattacgcatactccgaacataaaacacgtgagtatgctaatgatttttcgttactttctgctgaactaaagaactatggtttcatcgttcaacctctacaatttgaagatggtgatggtgagaataacgctgtgattgctgatactgccaaaagaatcaaagaagaggctatagaggctgaaaacgcaatcatagaagaatacctatctgatgccattaatggcactttgaagccggtagaagaggctacagagctttatacggtcatagatcagagcgtagagaaactactagcacgtgggctacataaggatgattttgaatcccttgtgaaaggggtcattgatgatcgtagcttcttctatcgtgctcacatggacgcagactactacccaacgggtaacacgatccgtgaaatgattgtgaacatggtagcgggtagaactaagctagacgcttttgcgatccgtgatatagcagatgccattatccagaaggtacttaaagagtactttgcgggtaatacagagttgatgttgaaacatcctatgtggtcaaaatgcgtaacgatgaccagtactggcttagaaagcagttcatctaagggagcaaagtcaatcgtagagcgttacatcactctaggtaagggcaaggtagagagcgtgaagggtgtgaaggttagactatgcgaagtagtacacctatccctaacggggttgcgtttcacaaggccagctttcacgccatctatacaggttgccgatcacgtggagtcaaggcagtctcttgaagggatcaaggcgaaactaaagcagttacgcatgtaa

SEQ ID NO: 126683 - DNA, 393 bp, Enterobacter cloacae
atgaaagaagaattcatatatatgtgttttgtacagaatatacacactaaagaaatatgtatcaaacttggatattcttcaaacattgaagcaaggatgaagcagttacaacaaaggaatgaacattaccagtactcggactttctactattcaagcataaaaagaaaagatatggctatctacgtgatgaacaactaatacacataaagaatagaaagtatgtagcaccaataaacccctacgcaatgccagaaggttatactgaatgttatgaatttggatatggttatgatctagttgatcagctacgtgaacttggttatgaatgtgtaaatgtagaagatgaagtagaagtacaaacacaaacacaaacaccaatgtttcaatggtaa

SEQ ID NO: 126684 - DNA, 330 bp, Enterobacter cloacae
atggatgttgaaaaaattgaatttgaatggggtacagagtatcgctgttatgttgatgaagtactaacaagtatcattttacaatctggcggtactctttacttctggaatgatgagtactgtagagtaaagaacaaagaacaagatattgatatgatctattcacctgtatttgggcttaggttcaatacagaggaaacagacagcagtaaaaagattctatgggatatgtttctaccaggactaaaggcacaaccaacgattgaagattatccactactagatagtgagtatcatcacttgatgtactgtagggatctgattcaatga

SEQ ID NO: 126685 - DNA, 219 bp, Enterobacter cloacae
atgagtataacagttataatcaataactttcattatacggtttatgaatactatgtgaatgtttcaacttctaatctaactaattttagtggttctaagtgttatatcattgatgaagtactagctatggatgaagctgaattcttccaggaagaaacggtagatccacatatctatattgtaagggaactaatcaagctaaaggacaagctaaagtga

SEQ ID NO: 126686 - DNA, 294 bp, Enterobacter cloacae
gtgaagtacgaaatcattaacaataacccaaagaatttcaagtgtaagtactggatagacggtattgaatactatctacactctaccagtactgaacgctatgtagtaataaacaatcagaagtacaaagtggtgaacggtagaatactacccgtaccaaatggatttgagctaaatctaataaccatgaaattactacttgaaaccactcttacagtagctatttttgaatctatagctaatccgcctcaaactaaaaaaccttgtaaatcaagggaatccactaagaagtaa

SEQ ID NO: 126687 - DNA, 531 bp, Enterobacter cloacae
atgtgtatagctaaacgtggtattgaaaacgtagtagctatggttaaccaggtatggattgataacggtgaagcatacccgttaccgtatggtgagtatcaccgttacgctgtactgctggcagatcttgaacgtatgttagttcaagtactggaagcacgtttccatatgttctttggtgctaatgactacaccgcacgtagagcaatcatcgaagcggcacacactgaagcccttcagatcaacaaccgtatcacgcaggacacgcaccagtacgccgcacagcttaacttagtactggatgaagtagaggtagaaggtatgaatgttgtgttggtctgctgtggacataaagaacctttgtttgccttgttccgtaatgctgatggttcgtttaactggaatcagaacgtttgtttacctcagaacattaaagaagaactaccagcatactaccccgatgaatcatatctacgggatatgttggaatacatagctaaagaactcaagtatgaaatagataacatatga

SEQ ID NO: 126688 - DNA, 192 bp, Enterobacter cloacae
atgagaatgaatgttatcggtgacattattgaaatatatgatgatcacgaaaagaaagtaggttcggtagtactatcacgccatccacggcacaaaacaaaaccgtacagcgatggtaagacatggtttgctagtaaggaagaagcattactagcattacttaaacgtaaacgcgttaatattaaattctaa

SEQ ID NO: 126689 - DNA, 297 bp, Enterobacter cloacae
atgaataaagatattccattatctgtaccagctattaatgcccgtcatgttagttataagggctatccgatcactatcatgatgttatctacggatacttatgtatatgaacttcatgataatatccgcgttattgaatgttctacatccgatcaggtgatgtacattgataaaaacggtctaacggcggttattactcgtgattcactggtgtataaagaactgttacaccggatcatgaatggtgatgtgttagaggacgggaaatacgagtaccagcccgttaccatccagtga

SEQ ID NO: 126690 - DNA, 717 bp, Enterobacter cloacae
atgcgagctatcaaaactgttaccgctgatttgatcaagaaagtactctctgagggattcaacgctgccacattgatttctgacaacgcacataaggctgaggccgctactatcgatccagatgaagtacgtgaagttatagagcgtttgcgagtggttgccgataccgtagagcctttctttatcgaacgtcgtagagaggttgcggctaagaaattggaagaactcaaaaccaatgataagttacgtgaacttcttggtgaatttagtagtcttggcggtgtcgtacctactcagaaggaagaagaaccagaacacgaaaaagttagtaaaaaatcttcatccaattcaaataataaaacgtttatgattgaactgtatgatgctgatactggtaaattgtatacaggtaaaagtactaacaaaaccatatcttttgatgataaaaaagaaggttcaaaagcctacgaaagattattacaaaaagatgaaacaatgaaggacttcgataccttcatgagaaagtattcaaaagaatacagtgaagaatatgatcttaatgcggaatataatggtaataaattccaccttaacaaaagaggtaaactgaatcagtacgcaatggttcactttgaggacttcaagaagaaagacaaatcaggtgctgatgataaaacgttattagccaaatttaaagaaaaggtgttaaatagctaa

SEQ ID NO: 126691 - DNA, 369 bp, Enterobacter cloacae
atgaaactcaaatcttttgtatttgctgctatggtggctcttactggctgtactgctacacatcatgattttatggataaagcctacgtaggctatgtgaataatcacgctgtagtactttttgatgctggctattctaatggtgtgaaagtttaccgtcctcaatttgctagtgattgtggaaaggtatatgacaagtactatcagatggataatactagtacaacctgtttagtacgtgaatcacgtattgccgatctacattcatacaatgaacatatcggtaaagaaaatccacataaggccgatactattcacgatgggttagagggtgttaacgcaccgtcaattatccccgataatttataa

SEQ ID NO: 126692 - DNA, 444 bp, Enterobacter cloacae
atgattactgaagcaagcattaaacgcacatttagcggtactaaagcattagcggtactctctattatcggtggcgtacttgtgatgctgaacgtgcgacatgaggacggctacaccagtacgttcatgggtgattcagtggtattcgtattggggatgatagccacagtactgtatggttgggttggtatgctggttggcctactcactgtacccattgctaacatgttcaatatccagagtgataaagcccgtttgggtttaagtgttgtgtactggtttgtattctcctgggctatctacgttgtaggtttcattgtaacctatatcgtgattggtgatgatgaatatacactgatggaactcaagccagctttagcagttgctacacttattgttgctggtattcatactggattgtttaaggaaatgcttaagaaatga

SEQ ID NO: 126693 - DNA, 408 bp, Enterobacter cloacae
atgaagatatcagaagaggcactaagaagtactttcaagggggcatttggtctacttgcccttaatctgatcggtgtaggttttacggtatatcattataatcactataaccagtacaacccattaccaatcttaggctatttgtttgtatatgtggttggttatggcattggactgatcacaatgttacctggttcattcactagaatcattgcccgttgttttgaagtagattcaaatacagttaagttagtactatcattcgcattctttgcggtatatgcctttggaatcatttcattatcatcacttagtgaaaaactatttaatgagatgggagcaatgatcgcagttggggcattatgggcggcattcaatcaggctaaagtattcaaggataatttatga

SEQ ID NO: 126694 - DNA, 306 bp, Enterobacter cloacae
atgaaatggatattagcagtactgttagttgctggatcagtacaggcaggtgaactaacaacagatggtgttattgtaccggatctatcctgtaaggtttacaatgattcaggatataaagtacttaaaaccaaagaaatgttttcctataaacattctcaaaatggtaagtttgtttatattcatgaggataaggaaaacaaactattagtacagatgataattgatcaaagtactcttagtggttctcagtacttcatgatgggtgatgaaccagctactacaaataaagtaaactgtaattaa

SEQ ID NO: 126695 - DNA, 318 bp, Enterobacter cloacae
atggggaataaaaacgggtatgacccatcagtaacaagaggcgtacagacgttcttacatctaggtaggtgggcgattgtttgctattggggtagtggtctgagcaagtacacgtatggtgatcgtgtgttcatccagaatcagtacggggagttttggttaggtacgattgagcgtgattgttttatgctcatttgtgaaaatccactgaaaacagtacttgaagggttttcatacttaagtgctgagtatgatatgtacaaagctcatgaagataatgatgattggttttgtgatcagggagaactaccgttttag

SEQ ID NO: 126696 - DNA, 378 bp, Enterobacter cloacae
atgaacatcttcaagcactattcaaatggaacatcacacatagatagtgatggtgaataccacggctatagcccttcacgtaatgaagtaatcctagcggttcatatacagattgatgattatcatatccacatctaccccgatggaatctcagtacagtacaagtacatacgagtacaaccgacacactacacgataggcaaatggcgataccatttagacgctctagaacgctccaggttcaacgagaagaagcgagtattacacatgtactccctactacaagagatgctcttagaacagcgtataggcggcatagctattaatgattggtcagtaatcaaagtcattcaatcacacgccgaagaaactaaatag

SEQ ID NO: 126697 - DNA, 1221 bp, Enterobacter cloacae
atgacttcagaacgctctgcgcaaaatatgacgttaaggtcatggcttgcgttattcattctggctatttcaacgtttactattgtcactaccgaactggcgccggtcggattattaacgccaatcgcagagggattacggtcttcggaatccgcggtgggcatgaccgtgtcgctttatgcctgggtgggggcgttgagtgcgctgtttgcctccgtctttttaggcaatgtggctaagaagcggcttttacttgtgctcaccgtggtgcttctgatctctaacgtcatggccgcgacggtaaacacctacggaatgctgcttagtgcccgcgtgctgggcgcgcttgctcacggtgcattctgggcgatgatcggcgcaacggcggttgccatggttcctgccagatatattggtgcggcgacgtcaatcgtatttggtggcgtttccgcagcaagcgtttttggcgtaccggtttccaactacattggtatccacttcggctggcggcaggcattttggctgatggccgcgctgagcgtaattgcctttgtgggtattagcgtgcttgttccccagatcgccagcaaaagcgcgcttggcctggatgcgcttaagggtgtgctgaaatcgtctaccctgtggaaaatttactcagcaaccctgctggctgttacggcgcactttgccgcctttacgtacattgaaccctggcttcacacgcagagtttactgtccaccgcctttattcccgccgtgctttttgtttacggcatcgcgggtctggccggtaatttcctgaccggcgtgatgattgataagtatctcaagctgacggtttcgctgtctgtactgctgatctgtgcagtgctgctgtttctgggcctgtcaggttcctcgctctctgctgcgctgatattcaccagcatgattatctggggcgttgccgtgtcaggaatatttgtcggcttccagacgtgggttttacgtatggctgaagataaagccttcccggcctccgcaatctacgtttcgtttttcaataccgccattggtatcggcgcgtcggtcggtgcctggatggtttcatcattttcaatgccgctcctgtatatcgtcgccggcacggctatcggcctgtccgttctgcttgtcgcggttattcctgcaaccttgaccgcaaaacaatcccgtatggagaaatcttatgagtcaaattaa

SEQ ID NO: 126698 - DNA, 954 bp, Enterobacter cloacae
atggcgctaatcaacgtcgcgattgttgcggtagacgggttcagcccgttccactactccgttccctgcattttgtttggtgatacggtatccggcgaaaagcgctttagtgtgttgatctgcgccgaaaaaccgggattactgacatccacagacgggtttgcgcttaacgcgactcacgatttctccgccatcggccaggcagatatcgtcgtggtgccttactggcagcatgtccagcaacgcccgccccagacgcttctcgacagcctggtccaggccagagacaacggggcggagatcgtcgggctttgtctggggtcgtttgtgctgggttatgcgggcattctcgacggtaaacgcgcggccacgcactgggagtttgaacatcagtttcagacgcttttcccggacgtaaagctggatatcaatgcgctctacgtcgatgacggcaatatcatcacctctgcgggtaccgctgccgcgcttgactgctgcctgtacatcatccgccagcgctttggcagcgtggtcgctaaccagattgcccgccgtatgatcgtgccgccacaccgcgaggggggtcaggcacagtttattgcccagccggtaccaaaagatacccgtgacggacgaattaactccctgattgactatctccagcagcacattgccgaaccgcataatctggactcgctggcagaggtggtatcgatgagccgccgcacgcttacccgccattttgtaaaagccaccggaatgagcgtggccgactggctgaccaccgagcgcctgcggcgcagccagatactgttagaagccgggaatatgcccattgaaagcgtggcagagctggtagggtttaactctgctgtgacctggcgccagcaatttaaggcgcgttttggcgtgagtccggcagagtggcgtaagacttttcggcttcgtcattaa

SEQ ID NO: 126699 - DNA, 162 bp, Enterobacter cloacae
atggatatagaaattactaatcctgtaaatattaagctggacgttattgagctggatgagcatgttccttccttaaagtttagcgtctcaatttcagttgagaagtttggttataaggctgaagttaatgcccacattctggatagaatgtcagtgctttga

SEQ ID NO: 126700 - DNA, 258 bp, Enterobacter cloacae
atgcccacattctggatagaatgtcagtgctttgaccagtttgttagttgtatgaactgtggcgaacttgccatcctcaaggatatgaacgacagttttgagttaattttaaatccagtcgctggtgtgctgaattggtcatgtatgaaggaagatatcaatggtggtatctccctttcaaaaggaagtgaaaagcttgatgatgctgccaagcaatcgatattacgtgcttttaacgactatcctaaatggtggtag

SEQ ID NO: 126701 - DNA, 465 bp, Enterobacter cloacae
atggctaaggagtcagcggaaaatattcttaagctgaagacatgttgggatgcaggagacaccgcttgtgtggtgcagatgcgcaccttgattgaactggatgaaaaagcttttaccgcgctacgtgtccaggacaatctggcgggtcgagcctatgaagattcggcaaagtggtacgctgatattatcgacaactgtaacggcaagtgcgggtggctgtcagcgtatcttcaaaaaacaactgcagatggaatggcggctgcaatatatggatcgctggcagatggtgtaagtatttcacctaagccagggcagacggtgaaacctgttactgataccgttgggaaaggaactatatctgagagaggctccgtcgcaaatgctaactttgcccaatcaaaaattagagctaatgaaacatttagtcccgaaggggcagatatatatagcaaaatggcaagttaa

SEQ ID NO: 126702 - DNA, 144 bp, Enterobacter cloacae
atgaataaaaatcaacatatcgaaataagtaaatttttgagttatatattgcgccacaaacctgaagcaattgaattacaattagacacagagggatgggttaacttgccattttgctatatatatctgccccttcgggactaa

SEQ ID NO: 126703 - DNA, 1164 bp, Enterobacter cloacae
atgtatttaaatagactgccgcgtattacattttacccttttgtagcatttatgtttttaagcatgatattctgtggggtatctaaggtaaatattcttttccacgtttccctggccctttttcttatcaccataatgctggtaaaaagcgccagagagcggtttatacatgacaaagaatttcttcctgcacttgggctgctaactctctttgtcctttatttttccctctcgaacctttgggccgagacatcacacttaagttctgctcttacccattcattttacatccttattttcttctgcctgtaccggcaatgtgagcttgaaaacaagaagacatatcttgttggcgcggcctattttggcattatcgtactcacgttgatgacatttatttatgttaacaagcctcacctgttcgttgggcgtttaatgaacgcttttccttatgcacccgacaacgtcattgatctgggtggctatatggcattgggaattattttaagtgcaattctcgttcgagaaacccgcagcctttggtattatgttccggttccgttgttgttgagtggcttattactgacgcaaagccgtggaccactattggcgttaatgatagcaacagctgtcgtattctgtattaaaccaaaatggaacaacagacttgtgttcttgtccctggcctctctgcttatactgggtattacactttattacagcggtttttacgacctgcttataaagcggtttgaagattcaaaccaggctggctccgttcgttttggcatctggcagcatgcttttgaagtaacaaaagaaagattaatatttggctggggatttaataaagaactgtcattcattaatggttataaacagcatgtgacgactacacacagcctctacttcggtgcctttcttaagggcggaatcgtagggctaacgctgtttttagcgatgattgcctacgcattcaggcaatgcctgagacaccttgctgtagaccacaaagccgaggttgcggtactgattttcgcactcgtattttattccactcaggggatgttcgttatcagtaatcctcgagaatactgggtgttattctggataccattagccatcatatttagtacacccgtgaaaaaaaccgttcaaagataa

SEQ ID NO: 126704 - DNA, 906 bp, Enterobacter cloacae
atgggctctctgactaagcagttttatcgttatactcataaacgaaacatgcgtcacaatgaaaatttgtggccgtatgtgaagattgcgcgtaatgaaagcggcgagatttctgattttgtctatcgtggtcagcccgttctacttacctccctcacttctctcaaaaatgcattcagcggagaagtgttaattaccgccactggcccctcagtcaaaaaaatagatttttcaacattacccgtagatgtcattcgtacgggggtaaatggggcatggcaccttcataaccagcttagttttagccattactttatcgtcgacatgacttttattgaccggcaaacagcgttgttaaagcgtatcgtggccaataaaaatttgcttctgtttacaacggctatgggggtgattaagcttattgaccgtttttcatacgaaaatatccactgccagatagccataatcgaagatatttgctacgaaacgtataaaccctcaatcaaacgcgaagcgctttttgataccctcaaggatcgtcctgggatcgttttttctgaaaatacaccaaatagcgcttttagcctcgatatttgtcagggtatcgttgatgccggtacagtggtttactgggcattgcaggtcttatattacatggggttctcaaaaatctatattgctggactggatatgacacacttctctcaaccgcgattttatgagaaagccgaaaccatgctgccttcgtttcttgaagataaagtacaggatattgttcttcctgcactctctcttgcaagtaagatttttgcttctgcaaacaaagaggtgattaatctttcccctcaaagtgctataccttcttctgtttttgtcagaaaggattttacggatgtatttaaatag

SEQ ID NO: 126705 - DNA, 1134 bp, Enterobacter cloacae
atgtggtttgtcaaacaaatgaaaaaaatcatcctttattttaaagcacttaatcgtcaacgaaatcataagactcatgaattaaaacgtcggcttaaactctataaattatctaaaaacattcccgataaaagaggcaaacctttcgatagttcctcagtaaagcggatcctttttccttttttagatttagggattggtgatgccgtttgtcataccggcatgtggagagaactgaaaaaggctgggtatattgtccagatcgcggcagaagaaagaaacagggctttatttgaaaaaatcgttgatattgatgagatttttatcattgatatcaatgaattaaactccatctcacaaatagagactgacctgatcattaatccttatgcatggatgaaaagaaaagagctctttagtgtacaactgctgcagaaaacgcaatataaatatgcgatgagttttggtggctggcttaataagccctacaatttacaactgccagcggagggagactttcacattactgatccacagaaaaagatgcttactgcattaaatattcacaggaaacacttatcttactctttaccagctttacccagccacgaagagactattaatgagtatcttcttccttttaaaggaaaaaagtggatcgtaatcaacccctttgccagtgtagatgagcgaagtcttagtcgcgagcaattagtaagcctgatttcaaaaatttcagaaccaaaagataatcatattttcattgtgggtgaaagaaaaaagactgaaaaattaaacattcaggatcctgcagtttccgtatctattttcccgtcattatgggacaccgttgcgctaatcaagcaagcagaccttgtcatttcagtggataccgctattgtccatattgcctgcgctttagataaaaagctcgtagctatatattactcaatgcttcttgatcataataagaattacgaaggcaataaaatattcggcccgataggcgaaaatgcaaaacaacttattttcaataaatacgatagaaaaatcgacataaatttaattgccactgaagccaagaatattttagatggcaaatgcgttatagaagaaaaagataaatacctttga

SEQ ID NO: 126706 - DNA, 759 bp, Enterobacter cloacae
atgttcaagttaactgtttgtttactcacctgcaattcagccagggttcttaaccatgttctgcctcctcttcttaaaattgcagatgaaatgattgttgttgattccggaagtaaagataacacgctatccatttgtgaaagttataatttaagccctatctatagacaatatacgatgcatggggaccaaatgaactatgcggtgagtcttgcatctcatgattgggtgttatgcatggatagcgatgaaatcctggatgacctgactgtatcctttattctgaatctgaagagtggggctgagcctccaccagatcatgcctggcgtattgctcgacactggtacgtactcggaaaagaagttcgtactatctatccagtatcgtcgccagatttccctgtacgtctttttaatcgcacctgtgcaagatttaatctccgaccagtagatgacaaggtggaaggtgaacttaatgctttcatcatggctgggcaagtacgccatgataccttttatgacctgaatgaagtgtttaataagctcaatagctatacaacaaggttggtcaaatatcagaagatccgcccttcaattggacgaggcctaattagtgccattggggcgttttttaaatggtatcttttcagtggtgcctggcggcaggggaaagtgggcgtcgtgacgggactctatgcaacgctatacagttttctaaaatatttcaaagcctggtatcagtttgaggataaaaaatag

SEQ ID NO: 126707 - DNA, 195 bp, Enterobacter cloacae
atgcggcctgatggcctcaccccgaccctctcccacaaggagagggagaaaacctttctaaaccatcgtttcaaaatttcacgcttttgtgaggcgcttcacctccgcttttccggccgtagtctagtttttaagcgtacaaaaataaaacactgttttaacgcttatctcactaccctggagttgacccgatga

SEQ ID NO: 126708 - DNA, 471 bp, Enterobacter cloacae
atgagaaagaaacatcatatcgctggtatactcgtattagcaatcgcagcttttatctttggcagagcaacgcattttgaatatttgtcatggttttatggcagccatgacctgatatttactaatataaattcaattgtattatctaattttattaatggcctgtatttttccctatccgttttaattgtttatgctttactcgctgtattaaaaaaattgccgaagaatataatcatttcgtgtctacttcagttctttattaatacaggtttgtataccctttttgttgcagtgcatagagggtatagtaaatggtataccttgagctcaggtgcaactagcatcacccatagctattttttaatcgagttgctggccagcacactcctgaccgtcgcaatcgtgagcgttttacatgctaagtttctttcttcaaagcataaagatgggctacataaaggcgtttga

SEQ ID NO: 126709 - DNA, 675 bp, Enterobacter cloacae
atgaagctcaacgccaagcagctcgagaccgctaagccaaaagacaaaaccaataaaatggccgatggtggaggtttgtatctcgagatttcggccaagggttataaatactggcgcatgaaatacagacgcccttctgacaaaaaagaggatcgcctcgcttttggtgtttggccaactgtgacgtttgttcaggcaagagcaaaacgcgatgaagctaaaaagctcttaatacaagacatcgatcctaaagccgaacaaaaagaagctcaggccgagaattcgggggcatacactttcgaaacgatagcccgtgaaaggcatgcaaataaaaagcgctggagtgaagatcgtcggtcgcgtgttcttcgctatcttgagttttatatcttcccatatatcggtgcatctgacattcgccagctcaagactagccatctgttagccccaattaaaaaagtcgatgcaaggggtaagcatgacgtcgcgcagcgtcttcagcagcgtgtcagggctatcatgcgttatgcagtacagaacgattacatcgacacaaatccagacagtgatatggctggtgcgctatcgacaaccaaagtgcgacattacccgctttaccctctaaccggttctctgagtttcttgcgcgtcttactgcatatcgtggccgtgtaa

SEQ ID NO: 126710 - DNA, 954 bp, Enterobacter cloacae
atgaaaaggaacatacgagttataccccaaaacgtttatagcaagctaaaaaggcttggcaatactgttgttgctggtacttccatcgcaattacagaaagtcaattaaaaaatggaatatttgaacaccttggcatatattttgataaaagtgttaatgcatatgaggcgtcagtaataccggatccattacagggaaaatattctcttaaaaacgttttcggtgaggagatcgtaagaaaagatctcccaaaagaaactcattacactgaaattgagtcacctaactggggtgatagctccaacggtacgcatactgttagactacctcacgagaaataccccagagacatcatcccaccgaaactcatagcaatcgaaattaatcacaaacagtcttcaggcagtcatttcatatttaatttcagagttactagaattttagaaaaaaaatcaagcacgtttgatgatgatttattattcgacttaaatcttctccaagaaaaccttggtaaatgtggagttgagaatgctgataagcctatatcaacttatgctgacacacttatagtatcatgggacatattcccgccaggtagtaaagaagaagttttagcaagaatttttagaggtaaaaatatcacttccgacaagaaaaatgttgcagaaaatagatatgacttctttatgagtcttgaacctaaaaagattgtcaccgggaatagtacgttcagcaattatcttggagctatgctagaggatgatctggttgtttttgagaatatagaatatggtaatgcgatatacatcctctatgatgactgggatgaaatcagcaagctatcacgaattgatttgttatcaggaagagcagggaataatttcgatagaataatccatagtggtaattggaaggacgaagtgcgaaaaaaagttgctactggaagattatga

SEQ ID NO: 126711 - DNA, 537 bp, Enterobacter cloacae
atgttgaaagctatagtaggcatcgtcaaatacacgtggatatatatagtaatattcattatatcgctattgattatttcaacatccaatattaactatgtgtataacgattttgctaactattgcactcttctcgtatcagtttctggaatggtttttactattatgggaatttggttagcgtttctttatccaaatgctttacagcgtatcgttaaccccaaaactatagaaactgttgatttcaccgaacaactggaagatacaagaaggttagaagcaatagttggaagtgtactaaagtcatctttcgttatgattactttgcttgttatatatttactaaaactagtatttttcaagagtcatctttatattgagagtcaagaggtaataaaaaacacatctttagcattgattattgctatttcgtacatgcagattgaggctgtaattagcgttatacttgcaaatgttatgtttatcaatgatttacataacaagagagagcaaagagacatcgacgatcaagtatga

SEQ ID NO: 126712 - DNA, 234 bp, Enterobacter cloacae
atgcaggtgcatgacctgcctcagggcgcgccagtgctggcgctagcgggggaattcagtgtcggtaaaacgcatgcaaaaccatgcaccttatgcatgcatggcttttttacgggaaaacagcgggattttctggaatttttaaaaggactactgagcggccagttgtgcacggcggcgggtgtaattcaggttctgtgcaggtgtgaatttttcacgattatcatcgcgtga

SEQ ID NO: 126713 - DNA, 144 bp, Enterobacter cloacae
gtgaaaactagcgaagataatcaggccgccggacgctatatcttctcgcacgagccagtacagcgcatcagcatccgtaactggctgcatgattttatgcagcagaacggcgcagagctgccgccgcactggcaccggagctga

SEQ ID NO: 126714 - DNA, 720 bp, Enterobacter cloacae
atgtctttggcatctgagggtgatattataacgggactgatcattcctgtagtgctgtatttaattaaaaaaatcattgactggactggaaaaatatttggacctcctaaacctaagcggaaatatcaatttgataaaatccctgctgataaaaaagtggagtttttatcgcagatagacaccttaaagggaaaagtattaacgccacatactcttgtccagatgaaacttttatatgaacaacttggaatatatttacctgtatggcattgccaccagcttgtttcatttatggcgtctgacaatattagctcattggatgtacgcctacgaggatttctgaaaaacacaattattggaaattatccggaaaaaggatttagtgtaaataacaaggtagtacgtaggtcctactcgatatcaattttattcggcttattttcagttggtatctttgtttatgcaggatgggacactgtgttatctttttggaaaagcaaagaaataggcttatttctattattcttaatagtttacgcatcagccattattgctgtcttagggtatattatctcccaaactgaagatatctaccttggctctaaattcgggtatttattcgaagcttggctttcaaacaatcctccagataacgatgctatccaaaatacttctgtaacaacttcatctgaagatcaaggaccacaacgtgaaaactag

SEQ ID NO: 126715 - DNA, 453 bp, Enterobacter cloacae
atggctgcgacgaattttatgccagagtttacggtttgcaaaacagaatcagatgctttcaccggcatgattgaaaaccgcgagctggtacgcaaaaatagcacccgccgacttcacggcaaccagaccactgcagcgcctgttcatccccgcgcagaaacgccggaagcaagctccgcctgctgcgaactctatgcccggatagataataaatatcttccgctggggggagactggttaacccgggcagggtttatcagcggtatgccggttaaaatccgggtgatgaaagactgtattgtgatcacgccgcagcatacaagagaattatggggatgcctggaagggatgagtgtggtgaatatcaataaacaaaaagtcgctcagtggttaaaaacatttccaggggcgttaaatgatacgggcgatatcccggtgattaagcgcgggtga

SEQ ID NO: 126716 - DNA, 1380 bp, Enterobacter cloacae
atgaacacctaccacgcattcccctggcaacgggttgttagcgcgcagggctatacggcggaatcaaaggaaaatgtgattcacttcaccgacacgctgttctgtatcgacggtagcggtaccattgtggatattattcaacataacgatggcgcgttccggcacgtacgtgacgccgcccgtaaagcgggtaagctcactgaactctcttctgaccagtatcttctgcccggcctgatcgatttgcatgtccacgccccgcagtggcctcagatgggcaaggcgctggataaaccgcttgagaagtggctgaatgactacacgttcccgctggaagcccgatacgccgacgtcgattttgcccgccgaaattatacggaactggtcagcgcgttgttggcgaacggcacaaccaccgccgtctacttcgccaccctgcacactgaaagcagcgtcgagttggcccgcatatgcctggcccaggggcagcgcgccctggtgggccgcgtcgcgatggacgatccctcccagtgccctgactattatcgggacgaaacggcggcatcggccgaggcggaaacgcgtgcatttattcgcgctgtcgcagagttacccggtaatacggcaaaacgcgtgctcccggttatcaccccgcggtttattccctcctgcacggacgacctgctgaaaagactgggcacggtggcgagagaaacaggctgccacgtgcaaacccattgctcagaaagtgactgggaacatggttacgtcaaagaacgcctggggaaaacggacaccgtggcgctgcgtgattttggcctgttgaccccaaaaaccatcctcgcgcattcaaaccacattgaagatgacgatgctgacctgattaagaaaaccggggctggcgtcgcgcactgccccctttcaaatttctattttgccaatgcagtattccctctgcgagcaatgctggaccgtggtctgaacgtcgggttaggcaccgatattgccggtggccatagcccctcggtttttgatgcctgccgccatgccatcaccgccagtaaagccctgaatgatggcgtcgatgcccgtatcaaaccggaacaccgcggcagaccaggctcggcagtcagcttcaaggaagcattctggttggcgacagccggtgcgggtggcgtgcttgagctgcctgtaggaaagctggaggtcggataccagttcgatgccatcgttatcgatacccgggctgcaggaagcgatatttatattcatcctgctgaagaccagcctgaagatagactgcaaaaaatcatctataacgccaggcgaaataacatcagccgtgtctgggtagacggaaaagccgtgaaagttcagtaa

SEQ ID NO: 126717 - DNA, 447 bp, Enterobacter cloacae
atgaaactcaggataacattactttcagtactgctggcgcttccgctatttgctcaggcgacctgcaacgtaccggagacgctctccggcaaaatctttatcaataaaacgggtccgctatggtctgtgcaaaaccccaatgccgatagcctgctccggctggagttcactgacgatacgtataccagccatatcttgcgcacaggcaataaggtgcaagggaaataccgttatgaagtttttaaaagccaaacaggcctggcacacagcgtaggcgttctggaagcggaggaggattttcagggccagacgacgctgtttaccctcacgctcgtctgccttagcgacagcaccggcacctttgtcttcaaccagcgccagggcgccattaaaccggatatcaggcagaacacgggggtctggatagttcaggatcctgcgacctga

SEQ ID NO: 126718 - DNA, 339 bp, Enterobacter cloacae
atgagtaagtttaccatcccaattataaacctgcttctttgctcatatttaatttttgcctatagtctttgctggattgaattcgacacatggcatgataaaacaatcgccttttccatcattactatgagtgcttacattatttcattagtactcaatagattactgccaggaaagatacttactttaggtaggatcctgaacgtgttatcaggccctgtgctcgtggtaggtgcatttgcttgcatagctatccttgagccgtggcctttgaaaattcctggcttattaatatgggtcgtggcgatgttatatctaccttcttttataaacatttaa

SEQ ID NO: 126719 - DNA, 513 bp, Enterobacter cloacae
atggacctgacaattttttctgaaaatattaaatccacaggattcatcttggaaaacaagatatctaagatattgatcggcaacaaatggaatgtaataaacaacaaatattatattgattatgtagcaaaaatagccagagagattgatattattgcctataaagccaccaagatagaagatatctatgtttatacttcactaataataagctgtaaaaaaaatgacgaaaaaatctgggctttactcacgaaagaattcaataaaagcgatcctaatattgagttggaaccattacagcattggtccaaccatccaataatagactatcaattacaagaagaaaaattaataaaagaagctatcccaacgggcgaactttacgaaaaattatttgagcctcacaaacaagtttttgctttccaagaaatgtcaaaaaaaaatggcaagcctgacaacgataaaaatatatttaattcaattacgtcattaatgaaaatcacaatcatatga

SEQ ID NO: 126720 - DNA, 399 bp, Enterobacter cloacae
atgacccctgacggttttaataatttaatcaagagttatcactctctgcataagcattattgtcaacacatttcacgttgctttaatatatttttcaaagatgcattagaaaaaatagacaaacagaaaatccttgccaatgaactaaatagaaaattcgctagtaaaataagatctctcatttacagaaaaattaatatttatgataaatacgcaataacaagaatatcattatataaaggaaatatttatattgatattgacacaaaaaatgacaaattgattaacgcattagatggaaataaagaaattaaagatgaactagcaaagatgatagaagatatttctaaaacaaagatcactggaagtattaattttgaggatgatatcccattttga

SEQ ID NO: 126721 - DNA, 243 bp, Enterobacter cloacae
atggaacaaaatattattcattgtcctttttgtcataaagaaagtcaaaaaggtgttcaggtatgcacaagctgccaagcttcaatcctatatggaaaaattcccggctggtatgccgctgtgatcattctgctagcattcggtttatcattcttgatcggcatgtccaatggaatggctggagctaccattaaccttccaatgaaacaattccattacagcatgaagacgaacagcatttaa

SEQ ID NO: 126722 - DNA, 288 bp, Enterobacter cloacae
atgcgtaaacttatgatggtggcaggtttagtgacgctattgtctggttgtggcgatgatggcatctacggcaactacgttaatcaacaatacggtgtcagactcgatgttcagaaagatgtgatcaagttcagaaatggcgtttttaatgttaaaagttgggatgaaagcaagaaacccatctatatcgccaaaacgcaaaacaaagatcttggctcttggaccttcaaaatcgaaaaagtcaaagatggcatagtctatcaaggtgcggtttttaagaaggattaa

SEQ ID NO: 126723 - DNA, 1041 bp, Enterobacter cloacae
atggcaggaaaaagacagcattttatccccagattcttacaacgtggattttcaatagagaaagaaggaaagtttttctcttgcttatgtaaaaaagagtttataaaagaaaatatagtaattgaaaatattggtttggaaaataaattttatactctagatgacgattcgtcaattgatgacaaaataactgaaaaagaaacttatgtttattcaaaaatcgtccgtgagttacttaatggcacatttaacatggatgatataggaagtttgtctgactttatttttcatatggaaattagaaccaaaaatttacgttctaactttactaacactgcatctcatctaatagaacagatgagaataaggcttttaagcaaagataccctgtctagatattttaataaaaatatcatttctgatccatcaaaaatggataggttgattaatgaacagcttaatgagttaaatgttccacaagttttacggccacatattaaggatgctatatttaataacgttcatgcatggcttcctgacatagcaaataaactttcattgcaacttatccctttatttgaaagtatggttttatccggtattcctaaggcagctaaaaaaggacacttaaaaggacttgggttggatgaaagtttaaaaattgaagagtataagaagttaaattataaactaataaatgtagagcagtcattgatattaggggattgtctcgtggtttttgaagttgatggtgatcgtaggtttaaaccatttcatgaaaaagatgatgctttaaaagcagtatatatgccaattaattcacattctatattgtatggcgcaaaatatcttgatgacaatccaagtgctgaaaatataaacgatatagttgcacaatgttctactgatttctttatttgcaaggagcctattcataatatgaataaacttcaaaaactcattggtgttaattcttatcttttgtctgatgagtttattgatgaaatgttgagtgatataattaatgataatattctctaa

SEQ ID NO: 126724 - DNA, 765 bp, Enterobacter cloacae
ttgaacttggtagccgcagatattcttgatgtatattcacagactcaggttaataacacctttgttgctaaaacggttactgttaacggattgcctttaagtagcaatattacactaaccgccgcacaactaactgatatggcatcattggcatttagtaatagtacttatgtgcctaagacgttcttaatcaataacaagccattatctggtactaacattcaattggtagcagcagatattagtgatgtatattcccgtactgaaagtaacggattgtttgcgttacgtatcactacgattaacggttatgctcttaatagtaacgtaacgttgaactataacgatgttggaacgtattcaaacgcacaaattgatgctaaagatgccgcactacaagcgaacattgataccaaagttactatcactcaagacctcctaacaataaataacgtagaagatactttagaacttgatatgtctgatggtaaacgtgttttcaaagcaacactaaccgcagcagtaacacaactaagtgtaatcaatgccagtggaagcaacttaaatagccaaactattactatgtgtttaacacaaggaacaggggcaaataaaatttcatggccttctaatgttatttggtcttatggtcgtgaaccagtattaacctttactcagaactcaattgatgtaattcaattcttaactgtcgatggggggagtacctggtacggctccttactaatggcggatctacaagaatga

SEQ ID NO: 126725 - DNA, 2841 bp, Enterobacter cloacae
  misc_feature (1471)..(1479): n is a, c, g, or t
atgataagaaaacaaaatatcagcaatgcccaacagatgattgaagggcattggaaatttttagaacgtaatacgggtttagttaatgacaataaaacagatcactatgtactaaaccctcagaacgttctatgtaacaacaggcactttatagcggaaacaggatgggaagcacaaccggacggtgacgcaactacagaaggacaatccttagcaatccttggtgctatctatgcgtatcaggcaaccaaagaaccgtactacctacaacgtgctaaagaccttttcaacgcctatcacatggcattcttccgtggtgtgacgttccccgatccacctaatggttcactacgttgtaactggatctgtaatggtaaggctccagtactggcacattacccattagatccagagtatccaactcatggcgggttcaagggcgtattgttcacatggacgaacggacaaacacagatacctcatggttcacctaactacggtgaatacctcgatgctgtatggtttgcctttccagaaagggcgggtcttggttggaatcaggttaacgcaactgcctatgcctggttagccagtgaagatagcattgattgggataccaaagcccctacctatgatgttgactggattgttgaccgtacaggccgcaaggtagatagcaatggtgatgtactggcagaagggctaacaagccagatcggtacagtccagctcaaagacacgtctataaacggcaattaccgattcaactacgccacaaagaatcctgtatcagagggtggctatcttatggggcgtaatgaacgttggcacaacaggccagtaaacgtacctattgataactatggttcgcttgatttctctgataacgcctcagatgctgaattgtggttctgtcaggcatgtaaattactatgggatattacaggcgaacgtatctattacttagcatggcagaattcactaattacttgtactggttattctgatattgataaatttgatatgttctttcgtaaaagtgctattgctttaacgccttttacagatggtatttcatatgattatttctatccaaatgatcaagtagcatcatattcacgtgattcagatggctatattgtcattaatcaaagtgcctcagcacaaacaacacttgaacaacaatctatatggttcaagtttaataatagttcatcttttcatgtagaatatagtggtgttgatacaactggcaagccgttaagccttgctgtagcaatgacagttaataaaacaaaaacagaagatggtgctattagataccgttgtggtttacccattacaaatactgataatagtattatttcaatggatattccaatgaaccattttacccgtattgctaaacctgatggtggacagtacctaaccgcagatatgcgtatgatttccgattatggggataatacannnnnnnnngataatacagtaacttcacttcaatatgtttcctgtatcgctggaacgtactatgacaacgtgatttctaccactatggattctgacggtagctctacggtaggtttctggatctttgatgatgaaacacaggacttaaacacattcacatacagaacatatgctgatgattttaatatccgtattattgatgatcttggttggcgttggtgggctatgcttccagcaagtaacggggcatgggtaacacaaacgtttaatgtactggattttaaattaagttcatatcaaccggatcatgaagaaggtgatgaacagccaggacaaccaacgctaacaggacgtgaagagtttacacttttacttgataccgatccggttgatggtgtctcaggtcgtattgattggtattgtgttaacgagctgccagcactttataatgatggtggtacaggtgattattccgtactggtttctctaactttcaacgatagtaccagtagtggatatacagcacgtttaggtgattgtgtaatccgtaattacatgcttgatagtctttcatatactccaggactaataccattcagtaacatcacagatccatatgctcaactgtattccggttggcgtggtctaccttatccaggttatcaactacccgctatatggtgtttcaaaggtactacaattgatcaaaccagactaaataatagtattaagttcctatgtgatgctcaggactggtttactaataaatttcatcctactttacctggtccttgtgctcaggcttatgtatggaaccgtcaggacgcattagcatattcaccagatggacaaccggatcaattcattatgcagcactggtacgaagaagcatggtcaggttatgaacctcgtgcgttctttggtggttgtgatgtagtccatgaactatatctacgcggtgattatgccattccgcagaacattattacgtactgtcaaaactggatgaattacttgaagtggttcatgaaaaataatgatggtcacgcaccaacacgatttaaagatgatggtgaagttatctatgatggctttacgggtcatatgtctggtttatggcttgctggtgcttcaatgatggcaatagcaggttatccagatcacgaattacttgatttactattcgcggaaattcaacagaactataacgtagtttcagctaatcacgtaatgaatggtggctggtcatcagctatcagaagtggcacacctacaacaccacagaacaattcaatgttctttggattctatacaggtgaactactaagaggtttagcactttacatgaagtactacaaccaacatatataa

SEQ ID NO: 126726 - DNA, 507 bp, Enterobacter cloacae
atgatgccccaaatatataaaggaatattaaacatggcttttaattctatttttgtaggcaataatgtcaaagtggaaatcgcaactgctcctactggtggcggtcaagcaactacctttactgttgttgaagaagttggtgcttttccatcagcggcgggtgctgaatctaacgttgttagtgtaaacactttcggtcaacagtacgctaaaaaattgcttggttctcgttcagtaccggatctaacactaactgttaactggaaaccaggtgcgacaggtcaagaaatgcttgcggcagccgcagcagcacaaaccctaattcaagttaaagttacttattatcagaacatcgatgatcaagatggtgcggcttattacagcatcgtaaacggttatgtaagttcagatgtagttaacggtgattttgatggtgtggttactcgtgatttcgtagtttctgttactggtgctccaattgcggttggtgaagttactggtgcgtaa

SEQ ID NO: 126727 - DNA, 291 bp, Enterobacter cloacae
atggattttactaatcttatgacagctattggtgtgaagttaacaccagtagaacttacaccagaatgtaccgtatacatcaaactaccatcaattacccaacacgcagaagtttcagatccatataaagcgatcttctattgtgtggttgatgaaagcggtaaacagatttttgattcacctgaacaagttgaacagaatgttgatttaacagtacaactaaaactaaatgccgagatcggtaaagtgtttgccaaatcctttaatgttgaggatgtagaggtaaagtaa

SEQ ID NO: 126728 - DNA, 2463 bp, Enterobacter cloacae
atggcaaacaataataaacaatcaatgatatttgaaatcacaggtgatgaatctggactacaaaaatcattaaaaaacgcggcaaatgatataggtgattttggtgatcgtgctggcggggtatttggtggtttcaataccggattatcaaccacggctaaagctatgtctggttttgctggtgcggtaggggtcgcaggtatcgccattgccgccacattagctaacgtacaagaacaatcagaaaaggcgtttgaagtctttcaggcagcatcactatcacaaactggcatagtacagatccaacaagcggctaatatgtttgcgtccgtaggtctaactatggatcaagtagccgatcagatgaaagatgctaaggataagttaggcgatgctatcactaataacgctggctctatgctaaccgatgtaattcaaccgttgaagttgaatatgtttgagttacagaaagcagcagaaagcggtgaagatattattgctaagatttactatcaagctaaacaaatgggctttagtcaggctcagattgtacagatgatggaaactgtagctaacgatgctactaaacgcatgactgtatataaagaattcagtagcgaacaagagtaccaaaatagccttgctaatgaaactattcagttaacagaagagcaatcacgacaatttgaagaatatagaacggcaactaataatctatcaagagcgtgggatgcgtggcgaaattcaacgcttgcccctgttgctaaaagccttgctgatattcttgatctaatgactaagatactcaacagtaagccagtggcagcagccgcagcagctacgagtaagcagggtatacaggccgtacaggaataccaacaacagtaccaacagcaaatacagaaaaactcttctatctatggtgctcaggtggtagaggaacaacagaagcaacaagaagctaataacaaaacctttgagaatcttttagcaaatcttgatgccgcacataatcttttagccaaacaacaagagcaatataacaagggttcagataaaagtgttattgattcagcattgaaaccttatctatcagcaaagcaaaagacacaagcacagattgatactcttgatgctactcaccaacaactacgagcaacgattaaagattctttagcacgtgcttacaaaggtgatgaagcggcaatgaatgccgatttagctaaacttgatgaaggttataaagctaaccgtgagaagttaataaaaagcctaacagccgatgaagataaagcacgtgaagataaagctaagaaagatgaagcagcagccaagaaagcacaagccgcacaagataaaattaatgagcaaactaaaagagcaaaagcattattagtacaaaccttatcacagatcggtactaatgaagctcaaatacgtattactcgtttcaactatgaacaagatgaaattgaaaaacgtatcattacagcaggtaaattagctggtaagagtgaaaccgaaattacagcaatgctagatcagcaatataaaagccgtgcgactaagtacaaaactatgattgatgaaatgcttgcggaaacagaccgtttaaaacaagcacaaaacattgccgcaattgccagtgatccaaatgccacaccagaagctaaagccaaagcagcggcagcgggtaagacatggacaggtgacacagcaagtcagggattagggtatacaaacccgttagacttctcaccagatccaacgaaagtacagcaagtaaacactgagcagcaagagaaccaggatggggctaaagctttatacgatgccaaagtaattgggttccaggagtaccaggatcagctaaccgcgattcaggccaacgccgatatgaaacgtggtcgattaaccgcagacgcattaaccagtactttaggtatgtgggctacgggtgctggcgatgtaggtactatcatggctggtgtattcggagagtcatcagcagcggctaaggcagcttttgccgtaagtaaaggtattgccattgctcaggcagtgatcaacatccaacagggcatatccgaggctatcaagcttggttggcctatggggatcgcagcaggtctacaggtagccgctcaaggtgcttccattgtccgtactatcaaaggtacagctatccaggggcaagcccacgatggatgggattcactaccaagtactggtacatacaatcttgaaaaaggtgaacgtgtagtaggtaaatcactaaaccaggatttaacaaaatacttgagtaatcaggatggtagtaaatcaggtgatattaagattgacgcaccattaatcattaatagtaatggtcaaatctcagattcagatttccaaaagatgtgtgataaacacgctgatactattgttcaggcaacacgtaaatctcagaagaataacgtataa

SEQ ID NO: 126729 - DNA, 555 bp, Enterobacter cloacae
atgttaaataacactcttattagtgagttcatgttgacggacaatataccgcaataccaaaaccagacatggacaggtgaaactattacacgtgttgttggttcgcagtactttacccttagtttcaaagttaccttgaacaagatgaaccgtgctgaacttgctaacttctacgccttatatggtcagggtaaaccgttctctatgcctcttggatggtggagtacatacaatggtactcaaacatcacaagtacaggcaacagcagcaagggcggcgggggcaacatctattgctgttaatgctaatacacttgaagttggtacgttagttcagttcaacggacacaagaaactataccgaatcatagccaacactggcaacgtgattactatcttccctggattaatcaaaaacatccaacttggggaagtaatgaaatatgacaatattcaaggttcatttattcttacaccacagaacgcagcatatcagatgccaagtactaacgtaatggaagtgacaataaacgcaaccgaaaacatcagaggttaa

SEQ ID NO: 126730 - DNA, 645 bp, Enterobacter cloacae
atgtcaattccaagcaatgtactaactaatgcggatcttatcgcgtactggaatcttacacgaggcgataacaaaaccgtactaacagagaaagaactatatcaatgtggggttatggtaaagctaatagatgtacttccacctactggcagtaacatatatctaactgatgccatagcagaccagaactataatggaattaactataagtccgtacctgattttcttgattcatcatttgctaactatgtagaaaagaaccaaatcaacaataacggtacttcattgaaagtaagtaacgtaagccaggattatctatctatggcgttacgtggtttatggaatgatgccaaagttaatatctggatgggtatagttaacccagctacaggggggattctatatgcctatcgtatgtttagtggttacattgattactttagttcagacttcaacaacacagcaggtaataccactaatgaaacaacagtaaatcttaattcattgtggaagaagttagaccaaacacaacgcctgctatccagtacatcagtacaccaatcattacatactggtgataagttctttgacctaattggcatactaaatagttcagaacaattctggaagagtagtaagaaataa

SEQ ID NO: 126731 - DNA, 3390 bp, Enterobacter cloacae
atgatgaatgtaggtcaaatgggggtatcgtacccaagtacgggaagcaataacgcccgatcaacatcgccaagtaccggtattccgatcagctatggcggatcaaatcgcaacgcaacagaagtagcatataacaagttaggctctatcgtcgtatggcagaacgtctataaaggtacttcaaaccagttatgtacggtacatgcgatcagtatcggtgaaatcgggcaagtaccaggggaacagtcacaaggcgtaatcaagcagatctattttgataatgctccggtgctcatggatggtgcgtacatcaccactgaggggatagtacctacctcaatgatgattgagaagtaccgcaaatacctacagattgaagtacgtttcggtaagccgtcctacggtggttctatgacgcttgcccgtcaatatggcggtagtcaatggactgacaacatgcgtggtgatggtcttgtacagatctgtaccgtgatcaagaaaaccaacgattcattgattgacggtattctaacgaaccagaactatacgttatcggtagaaatgcgtggacgtatgatctatgacttaactgataatgtacgtaaaccaagttcaaacccaccaagccaactatatgactttatcacgaatacagaatttggttttggtcttgatccaaatgatattgatattaccagtttccgtaatatggcaaactattgtgctcagaatcatttctattccaatggtaatattcaatatgataaatcctttaaggaaaacattgaaaatattctacaaacatttggtggtgtactttatgaatcaaatggtaagtactatctaaccgttgatgctccagatattccaagtgtacattttgatgaaacaaatattattggtagtgttaatatcacaacgggttctaagtctgactattttaatacaatggacagtacttatacaaacccaggcaatgactattcacaagatattatccgttatccaagtgatgccattagtaacgcatccattgctaaagatggttatattatcaagaaggatttaaactatctttgggtacaggataaaaatcagcttgctattcttagtaacattgaattactgaaatcaaagtacattacgaacacgattactttcaatacctatgtaacagacatgaaagtatatgatgtgtttacaattgattttaaagaagctggatttagtaataataagtacagatgtattcaacgtactgtaccaatgaccgtagataaaacaggcattatccagattacagcgatttcatatgatgatggtatatatcaaggaaaagatccgggacaattcccacaagatggattgaccaatctacctaatccaacatacgtagaaccgccaagtaacctacaggctcaacgcttaggggctacggcatcaggtaacaccgttctattaacatgggatttatcacaggatacaactgtacgtggttataagattcgttataaacgcagtgattccagtgtttggatcagcattggtaacgtagggcagtactcaacgagctttgagatattaaatcttttatatggtgtacagtacgattttgctattgaggcgtataacacattaggttattcatccgatttagtagcaatctataatcaaacaccacaagttatattcgcattaccgaagattactaaccttgacatgatgaatgatgatgtaggtttaaaccagacgtatgctcaagattttattttccgttgggatgatcaggctaacatagccgtaaatgggaaaacatttgctgatttcttcaaacactatgaaattcgtgtgtatgaccgatacaggaactacatcacatcgtactacaccactacaagcaactggacgtactcatattcaatgaataccagtgatggccttagccgttaccgtgtgtttgggatcatcgctcatggttggggtacaggtatctatagtgaagaagttcagattgaagttagtaacccacagcatccacagttgttagggatcaatttgaagagtggttatgattccgtgttcattgactggacagaatcaaacgtaccggattatgcgggggtagttcttcaaatcgcacttgatgaggggtttagctcaggctcgaagtactttagtagtgctaaccgctattcagcatcgtttggtattgaagatggttcatggttcgcacgtgtagcagcctatgacgtgttcggccaggatgaactggtatggtcgcctactatcggttttaaccaaaacacgaaagtaccgtacagtaaattgaacgaagacgttattgatagtctacttaacagtgatacggctactggcattgttgagaaacagatcgtagatgaacttggttcacgctggcagctacaggtatcaaacaacggtaacgtaacgggcattgccttagcagcagatgaaaaaacatcggtgtttaccgtcatggcggatcgctttagcatcataagtacagacagtgccaagctatcagacagggtatatccttttgtggttcaggggggtaagacttatatcaactcagcggtgatagcatcagcgagcatcaatgaggctatgataaataacctttccgtttcccgtgcgaaaattcaggatgccgcaatcgacaatactaaaattgccaatgccgctatccgtaacgcccacatcatggacggcgtgatcgactcagcgaagatcagccagcagatacaatccagtaattgggatggtgtaaacggttggatgattaacaagaacggtacagccaactttggtaacgtaactgtacgtgggaatatccaggcaacttctggtgtacttaacaacgttactatcaatgaaaactgtaacattcttggtactctaagtgccgcacgtatcgtaggtgacatttgccgtcctcaatcgacgggtatcaaccctgtaccgtttatctttggttcacgtactgtttcaggtggtcaggccgcattagatccagtagcaaaccaacactatatagcgttgcgtattcgtggtgaagattttccacgttattttgatagtgatttatcaattagtttaacctcatatgaacgtcaatacttctatattcgtatgggtggtgatggaattggtttaactaatctctattattatgatgctggtaacggtggtagttctacatctttcagattgaattctatatatgttccgcctgtaggtcgtggtaactggaattatatctatgtgatgtgtacaacttcacgtagtggtattgcttcacttaatgttcctgctaactggtcatcattcttatatcgtgctggtgatcagcctttatataatgcgtaa

SEQ ID NO: 126732 - DNA, 270 bp, Enterobacter cloacae
atgggtatgggaacaattcttgctttggttattagtggtttggtactgatatatactatttttcgtgacaatacaaaagatactaatgatttattaagtcgtgtgtctgatattgaaactaccattgcggtacaagatagtaacattacacgtctaagcgacgaacaagacaagatgaaagaaactttgagaaaccttgaaattcaaattcacgaattggatatcaaacttgagcgaattattacgattcttgaacaatcaaagcagtaa

SEQ ID NO: 126733 - DNA, 447 bp, Enterobacter cloacae
atggatataaaaacacgactaatagattatgagggatcacgagcatatcaaacacgtatggggttctttagaaacaacaagtattatccatataaggatagtgaagggttcttaaccgtaggattcgggcataaagtactacaaggtgaaaatttctataatggtattactgagattgaagcacttagactacttgataaagatattgctatagcagaaagccagctaagtaaactaaacctaaccattcctaaagattggcaagacttcatgatcatcatgatttttcaacttggtctatctggaacgatgaagtttaaaaagatgattcaagcacttcgtgatgccaactaccccgaagcaattaaacaatctaaagattctctatggtatcgtcagacacctaatagagttaatgcgatgatcgcacaactaacaaacaagtaa

SEQ ID NO: 126734 - DNA, 432 bp, Enterobacter cloacae
atggaagcatggcaatacaacgaagattggagtgagaaggaattaacaaacggtagttatgtaggattcgtgtatttgttccaatttgaagataacacaagctacataggtagcaaacagatgtacaagagagttaaggacattaagaaactaaaagataattcaatagaaaacggatggcgtgagtacagttcaagttcaaagatagttaattccaagattgaagaaggggtgaattatactcgaaccattttgtgggctttccccacaatgaaagaaacactattcgtagaaacagcattaatcataaacgaaggactaaaaacgggtaatctaaaccttgccgtaatgcataaggcaagattaccaagtgggaaagatgctgtacgtattcgcggaatccttcaatcattatatgaaatactcaattaa

SEQ ID NO: 126735 - DNA, 294 bp, Enterobacter cloacae
atgattaatataattttagggatactaacaaaaggaattaacttctttctaaagcataaaactttagaacaggaagttcaaaaaacaaatgctgaagggcagatagaaacgaacaaagaagagattgaaaaggtgtcattccattggcgtaatgctctaggatttgtgctcaccttaatcattctatataactggatcatagtaccagtacttgatgcctttggtattgtagtaattcaagtgccacttggtcaacttatgcaagtactattgattatggttggtggtggctaa

SEQ ID NO: 126736 - DNA, 1113 bp, Enterobacter cloacae
atgatggaatatttcttagatgaaagtggtaacacaggtgatttgattaacaaaaaaaatgacatgggatttgctaatcaaccccttttcactcattcatgcgttggagtgccagaagggaaaattagaagaatagaaggttttgtacgtgcactaaagataagacacggtatagatgaatcaattgaacttaaatcccaagattattatattaaaaaccctaaactagtatacgaattgattgattttgtagttgatgaaaaattcacattagtatgtgaagtaatggataaaaagtgtaacgtggctgtttcaatagtgaatcactttatagtaccgacaatggagaatgcagatagtaatgaatcgctgttagtaagaaacatactagtagatataattagtacatttgcaccagaaatttgtttcacaacattctctgagttatgtaaagacccttgtgaagaaaagttaatcatatgtattgaaagcctgaaagaattcttttctagtgatgataatccactagatggtgatggcgacacatgcaaaatgttcgagaaaaccctaaaagagtttgaatacaggaaaggtagattttcagcagaggttgcaattaaatggtttgtacctattccagatttagatagtaatggaaatgttataaagctactacctaacgtacacagcttttacaaccagattgctcgcctcaataaaattcatagaagaaaactatccgatatcatattaacacatgatacatctagtgagtttgctagtacctttaacttttgcatctcagatataaaaacaataaatgtagacgcaatgcctaaaatcccttactatgattttaaagttattgaaactccaactttgatattcaaagattctaaagatagcactggcatacaaatagcagatataatcgctggctttttgaatagatatgtacatgggttactgtacaaaggtatacaaatggacgctatatatcatgagacattcaatagaattataaaacctaatcgtagtccagatcctaaagggacaaactttgtaattccatcgagcaaacgaaattggttattcagtcaatttaatctctaa

SEQ ID NO: 126737 - DNA, 840 bp, Enterobacter cloacae
atggactatcaggtaatcgcccttgatctggacggcactttattgacgccagaaaaaactattttaccagcctcattaactgccctacaaaatgcccgtaaatcaggggcaaaggttgtcatagttaccggacggcactttgtagccatccatcctttttatcaggcattagcactgaatacaccagctatatgttgtaacggtgctttattgtacgattacgccgaaaaaagagttattgcctcagacccattacaaccagaacaagctactcaattagtaaacctacttgatagttacaatgttcatagtctgatgtatgccgatgatgccatgttttatcaaaatcaaacggggcatattatccgtacagaaaattgggctaaatctcttccagagtcacaacgtccagtattcaaacaagtaccctctcttagtaaagcatcgcaagatgttgatgctatatggaaattcgcccttactgattctgatactgaaaaactacatcgctttggtcagatagtagagcgtgagcttggccttgcttgtgaatggtcttggcacgatcaagtggacatagcacaagccggaaacagtaaaggtaaacgcttggcacaatgggtagaatcgcaaggcttatctatgagtcaggttatggcctttggtgataatttcaacgatctaagtatgttggagactgctggcctgggtgttgctatgggtaacgctgttgatgaagtgaaagcgtgtgctgatttagtaatagctaacaatacggaaactggaattgctgatgtattaaaccagtacttcgaaatcgttagggaagaagtgatgtag

SEQ ID NO: 126738 - DNA, 222 bp, Enterobacter cloacae
atgacctcgcgtgtaattgctctggatttagacggtaccttacttactccgcagaaaacccttctcccctcttcccttgaagcactcaaacgcgcgcaggaagtgggatatcaactccttatcgtaacgggtcgacatcacgttgccattcatcctttttatcaggcactggcgttagatacacctgcaatttgttgtaatggcacttatttgagtgtgtga

SEQ ID NO: 126739 - DNA, 129 bp, Enterobacter cloacae
atgcttttaaccccgatgacgattggcgcatactcttcgatgtcccctaatgggagggcatacatttcattcaagccgatctgcttaagcaggcggattaattcaaacgatagccgtctgcttctctaa

SEQ ID NO: 126740 - DNA, 888 bp, Enterobacter cloacae
atgacacatattgcagtaagaaagatgattggcagccaaaataggtatgccaatcgcaactggtggtacgagtttcaggagatacctggcttcgctgaagagtcagatgttcaggtacgttcaagcgagctattgcagcagttttcaaccataacgaagaaatggagttcagaactaaattcggaatggacggtaagaatattttttgcagcaaagatggttttggcctcttccgttatggcacagactttgaagtacgctgaggaaaataacctgcgccctgtggtctcttatctgagttattacacggtcatgcatgcattgcgcgctattcttttgacaagcccgcaagttaaatggaacaacggagaaattctccaaacgacccacacaaaaacgatcaatatcgcttgcgatgcattagcacatttcaataaggagcttgcgagtcaggtaaagagttcaacgattcatctaaaagccttcagagagcttatttcttaccgcgcaccatcgagtggtgacaacttcgaaaaaccagactttgatgtgtacagattctgccgactttttcttgaggtggcacagcttcagtctgagctacttgaagcatccatcggaaagcatgtaactaactcattcgaacttgaacaagactttactcaacatgtatacaacattgagatcgatggaattcacttccatgacaaggaggattggtatcggattgggtatttagctagaaagcatccagcaccaacaaatattcttcacataatgtcagaagggcatgtggaagacttttttggctcatggtgcccagaggaggaaactcctaatgcttttaaccccgatgacgattggcgcatactcttcgatgtcccctaa

SEQ ID NO: 126741 - DNA, 1221 bp, Enterobacter cloacae
atgggcagttggccgccatcttcctatcaaatgcggccaaatcataaaaggagtcaaaagaatttcatgaagaaaaagctgcaattggcactcaacaagtacaagccgatccctcataagcttcaaggggatagcgaagagagtccgaaaacgattattgatcttgaccttgccgctctctatcaccacttttacttggacacctacggcactcagccccctaatccggatcctgcccagtttgagcacatgagattcctagtgcctgacgatgagcttcgatttcaaggtgagggagtgggcgcttcaaccaatgccaagcgagccaaatccagcgagatggggcaggcgttctgtcgctggttcctgcatgagcatttggggattaaatacttcgcacatttggatcgtttgatcgatgacacaagcgagaatttgcatggatttactttagagcgtaccgcaccaggcgatatgcctgactacctgtgcagtgacggggcaggctccgtcgtacttgcagaggctaagggacgctatacttcggtggggttcaacacgaaagagtttggaaattggcggaaacagttcacgcgggttcgggtgttggacagcaagggcgaggctgtttggataaaaggccatatcgtggccactcgctttgcaaccgaatccacacccaaggttcagaccaagttgtttgcagaagacccaatcacagagggccgggagcctttatcaggagaaactgcacgcagcctctccggacaaataatctgcagccattacagtaatgcgctgatgaaaattgaccaacctcttttggctctcgccattagaagatcaaggcgtttggagtcgcaaagcagaattccagtaaccctgtggaagttcgcatttgatgaccaacagcgacacttcgttgggggctattacgcaaatgataccaacgagccgttaattgacttagaaaatgggcaggccacacaccgcagccgtgatcccttcaggttaggtgtgcactcggggacgttcgtgggtgttgagctttcggtcttcgagcatctggtaaaggttgcgcggggtgatgctcgtctgttggatggcctaccggaggtcgagcccattagggagatttacagcggaataagcatgttgcgagacggctcaattgttggacccttgtcaatgttcatacctgtcagcttaaataactattaa

SEQ ID NO: 126742 - DNA, 1062 bp, Enterobacter cloacae
ttgacgcttcaaaagagcgctttccatgagacctacgttcgtgcggccggagccgtggcgttcgtagccgtagtcgatactaatggagatgaagggattggtaccgcgttccatatcggtgatgggattttcgttacggcccggcacgtggttgaaggggtgacaatcaaggagatcgctaccaccaaatcggcgcacctcatcgaagaggctggaggtaagatggttcctccgcgtcggctacagattgtcgatggtccctactttggtccaaatggactcgatgttgctgtcttcagagttgagcttggcacgacgccgttgccggcgatcactgtcagccagcacacggactactcgtttggagagaatgacttggtcctatcagacatcctcgtggtcggctatcccccgatcccgtttactacggtacccaaccaagttgtcactttaggacagatcaatgctgtagtacgtgtacatcattctccagccctgcatttcatcgcttcatccatggcccggggcgggtttagcggaggtgtggcgcttgatcagtccggtgttgcgcttgcactcgtgacagaaagtttgggccagggcgatatgccgctggaaaccggctatatgagcctgctgtcgatcgaaccggcggtggatcttgctgccgaaaaattcaagttcagcactcatggtggctatcctggccgctatagtgacacgttgttcgccgtgaaattctcggacccgtctggtaggtcgcttagttcttttatctatgacgccagtttgtacatctatgatgacgaccgcgaggtatttgttgagatcaattgcgcagacgaggcacggatggatgaagcggtcgcgacattcgataacattacgcctctcactcgccaagatattggtgatggggccgttttgtacacgcccaccgaaaacccttccgcagagctgctgcttgaggcgggggaggctgtagcggctctcttcgagagttttggctacaagaggacggccttggagcgcagtcagtggcagctcaagtccaagcgttag

SEQ ID NO: 126743 - DNA, 2334 bp, Enterobacter cloacae
atgaactggaaaatatccaagattgaagtctcaagcttcaaagcattcaagcatatcaacttggatcttggcgaatcgtctttgctaacactggacggccctaacggttatggcaaaacaagcatcttcgacgcaatcgaactactgcttaccggccagataagccgaatacaaaatctattcaatacattattaactaggaacaagagagactacgcggacaatcttttctggaacaatcgctccggcgaacacgacctctgcattaagattgaattttctaatgatggtcgaaaacttattttagccagacattgccaagctgcgatattcaaaaaaccagtaaacaatcgtgcagacaaatacgaaaacttcaagctttacgagctgccaaaattcgaatcatctgacttctctaagatcaatctgcgcgacaacaacttccttggcgaaattttcggaaaaaatttcagggaaaacttttccttccttaactatctggagcaagggcaaaaccgtctgttacacactcgggtagacgaacgtaaggagaaactaggaaacctatttaacatcagcgatatcgaagccgagatcgaaagctgcaacactatatacagtaaactcacaaggtatatcaacaatcccgaacgcacggcaaaggctgtatcacttaaagaagagatagccaccctaagggacacattgcaggcagagactgggatcactgaatataaaaatctctcgacgactgatatccaacccggatgggacaaggagatactgttctcaacgtattcagcagtagaccatgttgcctaccaggaatccgttcgcaagattattgcccttctgccactcaaagccacgataaaaactagggttcacaatgagagaattgatgccgacattgatcgtaacgaggaatctctgagaattttggcgcagtttggtaaagacctaggcaagcttgatgggcttgaagctatcaagaaggggattgatgaattagagcgttcagcaagcatcatcaaacgcggtgccactgtgattaagctcgaagaaacacgctcattacctcactgggcggatgggcgtcttgagtggtttgagtcacaaattaaatcccgaaacagcctacaagaaaaaagcagcgccaacgcgaacgtcgtagctgaattggaacgcctaaaaagacagctacttgaggaacataataagtcttatcccgacgaacagttgtgccctctctgtggcaccgactgggaagatcacaaatcaatggtgaatgccattgaagcaagaactaagcagatctctgaaacgctaggtcaggacggtaaggatttagttaaaatcatcgcagctatggacgctgagttgaaactcatcgacacctatatacaagacaggctcaaacttctcacacctacatttgagctaaatcttcatgcagcgctgaccaaaattatgcttcggctacctgcaataacccagctactggagaagctgcaaagcgaaaaaattcaatttactgactcatttacggaaattgatgacgtagtagatgagcgacttgaaaagctcaaggaaattctaagaaataaaaaacaggttgaagctgatgccttagcgctgccggaagactggcgagaaatcactaacagcgccttcaaagacctacaggacttctacatagtcactgctgaagacctgaaggacaaagagcagtacatatcgattaaagctaacgaagctcaaaactccaggctccaaacctgtatgagcgatcttaagcttatcgaaaatgaaaccctggcagcccaaaaagcacaaggtaaaatcgaaaagctccgcagcacattgaagaaaacagagcagagttataccgaccagacaatttcggctattgaattcatattccacatctacagtggccggctgattcaaaactaccagcgtggcctgggcctgtttatcgagagccgcgaaggtacccagttgaggttcctgactgcagagaagtctgagcacgacgcagtcatgtccatgagttctggtcaggtgtcggccctcagtcttgcctttttcctctcgctcaacaaggtctatgctcgggtgcctctcattttaattgatgatccgtcgcaatccctggatgaagtaaacgttgcttccttgaccgatctactccgttgcgaactcaaacattgccagttgattgtctcctcccacgaggacgatatctcggcctatatgcgctaccgattcgacagagcaggtttgacaacaagttcgctcaacatgcagctcttggcgaaagaagcctcgtaa

SEQ ID NO: 126744 - DNA, 666 bp, Enterobacter cloacae
atgataaagcaactcattaatgaagcacttgttgcccatggctttgttagtaaacgcgacttggacaacacaaacttttatattcgcgagtctggatctgctatcaggttcgtagtcctacacaatcttgacgacttccctgacccggccgaattgaataatagaatcaatcatcttgctcctgaggaatttctcagaaacccaagttttaagaaaaactgcgacttgatttgtattcatcgccttgacgttctggccaagttcaaggatcacgaagaagaaattttcgcaattgaggaagacccgcacttttataaaaaatatgtcctctattacagtattgctgaagaaagcgcgctcactaatttcacctacgacaaactggtatctgtgattgctgataaaaaggaatttcttaaatacaaagaaaaccctcttgtcgctacacaatacagcttcgcggcgaagacctttatcaagcttccattcttagagttacctagccatcaagaaaatcttgtgtccttgaggttacaggcagcagaggccgttgcagaagccggcctgaataatacgtatttgactatccagaacgtcacagccaaaaacgccgacgaaattatcaaggaaatggttaacaatgaactggaaaatatccaagattga

SEQ ID NO: 126745 - DNA, 1233 bp, Enterobacter cloacae
gtgagccaagaagatgatgagaagtatccagccagcgcagtatcctcgtggagcggcttcgtttatcaagggaaaattgcactatatcactccctcaagatgattcacgatggcgacttagacttcgagcttcagctagacagtagtgatgacttcgctatttataaaaatggaaaactacaaaccgcccatcaagtcaaagctaagataagtaaatatcgaagtggttacgccacggcgctggaacaatcttctttaatcgaatacgacaaaatcaaggggacaacgcgttacttccatgtatccgtccggctaaacaatacagatgatcacagaggcattagcggagaaacagtaaaattctatcgctacggagacaactttcattgcggcttgggtgaaattgaaggactaactaaagaactcataaaaaaaatatgtgataaacagtccatcaccgtcagtgataaccttataaatttcaactactgcttactgtcagaaaaaatcagcaccacggcaataaataaccataaattaaatcaagttgacggaatctcagaagacaaagccgcatacgaaggacgtattaaggccagaaatattttagaagacctgctgaccgaaaacccctatcagaatagagactactatgcagttgaattaaaggccaggctccaaacgcatctagaagaaagactggatcaggtgcttccaacaatgagtgacgcaacatatgagagagctaggcgtctgtgtgagcacattcgcgaaacccatatcaacgaattgaaaaccctatgccagatgatgaagccttccgagcgatttcaagacgttcagactagcgatatcaggcgatacaccaagctcatccaagctatttcggtggaacccatattcaaccatctcccgcactacctcgacagccaaaatcggttctacgtgcctactgctcttgatgtggatgaaagtgaagagtgtgagtctgatatgatccgtgaaatgaaaaacaacggggatctgctgaggctactttttgagtacaaccatctaatcgccagcaaagcagaaacctcattcaccattaatacaaaattcacaaactcggatgacctcgacaacaagcagaccactgaaaagcttgaaagcaacatcaccaagtcactatgcattagcgtgataacaaaagacgacgcggaggaactactgaatgataaagcaactcattaa

SEQ ID NO: 126746 - DNA, 435 bp, Enterobacter cloacae
atgtccaggactacctattcacggttacgcatcgagggcttccgcaaagcagaggattccctgagacttgaaggaatggaccccagtggtacgtcgctctatgagtccattaaggcatgtattatttcaggtgagctgacgtatgagcagggacgttcagagattcttgcatactacacaaaagcagatacttctgggcctgtggcagtgggggaaatgctggtagaggaatttctaaagccgctgagcatgtcccatgatgaactggcggaatctatgggtatttgcaagcaggatattgaagatattatttgcgaccggcgccgtcttatgactgatgaggggcgcattcttgcaggaatgtttggtacagatgaggacttctggatcaaccttcaggcgttgcaagaccgaaaggaacaacgaagtaagtaa

SEQ ID NO: 126747 - DNA, 1155 bp, Enterobacter cloacae
atggtatggacgtttggtataatcgctatgaaaaggggcggcttacaagatttacttgctgaaatagtaaggtttttcaccgtgaatggttttttctattatcttttaagcaatggtcccgcgatatctaaatctataattgattctatgagagagcttgccgcaaatgctttaggaaccagtgctggcatttcaccttcaagtatagttgatatggcctttgtgatattaacgaaagtaagttctgccgcatcgatctggtcaccaatgatctccactattatgatcactgtcgcgataatcgttttggttgtaatgtcccttatcgcgataaatatgctaataatgttggtttctgcgtgggtgctatgttacgccggagttatattgcttggttttggtggatcgaaatggacttctgatataacaattaattatttgcgcactgttttatcaattggtattcagctgttcacaatgacattaattattggcattggacagtcatttatagatcaatatttttctagtattaaagatgatgttcctgatcttaatagccttattgttttgcttctggcgtcaattatcctattagtattaacgaataagctgccactgttgttatcaggtgttgtaggaggggcgtctttacaaggaattggtgggtttggggcgggtatgattaccggcgctgccgctactgccatcagcggtgctggagcaatggcaatgggggcatcagctcaagtcagcggcggagcctctgcattaaaggcagcgttcgagtctgcgcaagctgccatggccgaagagtcgggttccggtggtgtaattggtgatggtgaggataccggttctgtagacacgtcgggagatcaatcatccagtaaaggtagctccagtgggggaagcgaaggttttgcagcatccttctcgcgtgcaggccgtatggcaagccatatgggaagcagtatggctaatggagctgctgagtaccagacaatgaagcgaagtagcaattcttctcgtatccaacagactattggaggggaggtggcgactcagatacgtaaacaaacagctactcgtcgggataaacgcgaacatgatgattttgccggagatagcttatccggcaataatgaatcttga

SEQ ID NO: 126748 - DNA, 186 bp, Enterobacter cloacae
atgaaaattgcgagcaaacttacatttttaggtgtggtttttttcttttctatgaatgcctacgcaggacaactggacagcagtggcttgcttgatactttattagataagtatcagcaagttgccagtacatggacgacagtaattggtgattatgcaaattggctattttggggctggtattaa

SEQ ID NO: 126749 - DNA, 795 bp, Enterobacter cloacae
atgaagttattggtacagatgtttacatcattgagagggattttagccgctaaaaaaacggcgcccattttcctttccgtatcgttgatagctctggcggctaaagccgggattccggttattgatggtactaacgtggttcaaacgacaatcagcgcagtcaataacgttcaggccgtagcaaaacaaattcagcagtatcagacgcagcttcagcagtatgaaaatatgctgcgaaatactgctgcgcctgcagcatatatctgggatcaggccaattctacgatcaataaattactacaggcgcaggatacactgaactattacaagaaccagacaggtagtcttgattcgtacctcaagcgctatcaggatattaattactatcgttcatcagcttgcttcaacagcaatatttcatgtactgccgatgatataaaagcgctgcggaatgctgataaggacagttcggaggcacgtaaaaaggctaatgatgcggtctttaaagctctcgaccagcaacaagaatcattgcaatctgacgctgacaaccttgtagacctgcaaagccaggcgagcggggcaacaggtcagatgaagtcaattcaggccggaaaccaacttgccagtgctcaggccaaccaactgctgcagatacgctcactcctggtagcccaacagaatgccgcaatgacattggctcaagtacaggcagataaagaagctcaacagacagtagctgatgagaaagtattagctgggggtaataaaccaagccctaagcgagtttggtga

SEQ ID NO: 126750 - DNA, 762 bp, Enterobacter cloacae
atgacaactggtaataaagtagcgcccacaagtacagcatggcaagccagggtagttctgtatcagccaagccagcgtcctcaagagctaaagggaaagtggatggagaccagtttcggacgttgtcgtgttaccggtcgtctcggacaacgtcatgccgatattgtggaggtaatattatatgttgccgagaaacgtcgtgatatttctgatggtggaattgaattattagtagatccagcgaaaatacgccgaacgctatccgatgcacaatatagctatggtcgtatacaaaagttgcttatagatcttcgcgttgcaacagttgaaattataacaccagagctagagagaagcggcgactgtataataggggggctaatcgatcatgtagtgccatcacctatgactcggcctgatcctttgaccgggggaaaacgtcgtttatggcgtgtccgtctgggggttgcactcgcaatgttgttgaaaaaggatttgcatttttattatccccctggccctatcgctcgattgcaacatggtattagccaggcagttgctcgtcacatcttaacccataagcataatccttcagggggctggtatatggataagttgataatggctgtctgtggcgaagggacgagtaatatgactttgcgcaattatcgtcgacgattgaaagaagatgccgggcaattgcttgaaattggcattgagataaaaagttcaaagataaagcgtgtcacaacggcccgatag

SEQ ID NO: 126751 - DNA, 984 bp, Enterobacter cloacae
atggttgacatgaaaattactacctgggaaggctgtgaccctacaatcacaacagcaatcaaaatatttatagaacgtagctctccctactccatagcttcaaggatgtatccattactgcgtctggtacaggaagtgattgaccctgcagtagcggcttatataaattccctgccactaagtcataaggactacatttctggcgcagatataggatttagtgaactaatcaaaaaagtgggttttaatgtcgtagcgcaggcacaaaaacttcttttgcgtaattttatcctgacgttagatcgtcaaacttctcttgataaataccttattgctacgattgaatcccttattgagttagttagtgagtgtgcatccaagcggccgaagaaatcctcacctgcaaaaggggtaactataaattcacagcgtaaactcggtttttgcgatttttgcggtaaccagactgaatactctcaatttattagtgaaatatcagaatatgctgctaacgatatagagtattccgatcatgaaaaattggtccttagccatcgatattgctcgaaccataggcccagactgaccgatggccaatggaatcccaagtacagacaaggaaagcgctcttccgaacagtttaataaagaactaataagattgagacggcaatgcgctaaaccaaataaagccaatgcaaactcaggggatagattaattgacgactattttttccattggattctggctcaaaccttgacgccagcagatataggtgagatgagaaatattgcacaacgcatggctgattctagattctccgacactaagaaaagaatacttatattaataaatcagggatttaatcaatctgaggttgcacagattttaacggaaaattatcacttctctatgacacgccaagctgtgtctaaagcattagcatctgtaagaaaagaatttcatattaataatgatgcttag

SEQ ID NO: 126752 - DNA, 630 bp, Enterobacter cloacae
atgcctgagttgtctataattatacaatggatgaatcaataccctaagaccggctggctattgctgtttatctatattgtactcggtgtagtccgtcacagagtaattaatgctgaatctggtagcgtctttcgtggactactcaatcttaggaagcgccggctagagcaaatgcttacacagccatatttgaataaaaatgcggtcagtctggcaaagcgtgaacttcgtcagcgcagcctttatcggctcacaggtttgtataactatcggctgcaggatttggctgtaataatgtgtgatcgttatggactacgggctggttatctcaagccgtggcgtaactggctcgaagaacgggatggacagattgtgttcaacaggaaatggcattattttcgctggcgtctttttctggcaggtcagattgcaaacgcagttctactgatagtattcattatctatatagtttctcatgcttcggccgaaatgatcgcaccgtttatgatgctcttcatctttgtgtggtggtttccgtggctaatggtgaccttggtacccgcccctaggtggactcgcgaaatggaagtctatctggagaaatttaacggtgtacagaccatggtctaa

SEQ ID NO: 126753 - DNA, 558 bp, Enterobacter cloacae
atgttagcgctttttgacggacagacccgttactttctggatatcaacgacagcctggtaaaaccggatgttctgcgatttcggggcagggaagtactgagcgaaccgttcaaatgggatattgagttcacgacccaacaggcgaatatcccccctgaacaggtcctgatgaaatatgcctctttccgggtgcggagcggtaaaaatgtccacggcattattacccgcctggaatggctttccacctcaaaggatcagtcccactaccgtcttacgctcagttcccgcctggcgctcctgggatacacccggcagtgtgcggtatatcagaaccagtccgttcctgaggtggtggagcaggtgctgcgcaaacacgggctggagggacctgattttgagttcagactggagcgcacgtacccgccgcgtgaaattatcacccagtggcgtgaaacggaccttgagtttatccggcgcattctgtctgaagtggggatttactggcgtacggtgatggacgacgtgcgcggtctggatacgtacatactggccgattaa

SEQ ID NO: 126754 - DNA, 549 bp, Enterobacter cloacae
atgcggcatggaataaataaaaacattaattcatttaatagtaaactaatgatcggcttgttagcatgtatgatctatagaatcatcaccatttcgatttctttactttacgcccagttttttattccacataaaacccacatatcaacaaacctatatggtttttatgtatatttaattcttgtgttttgcatatttatatcagcagttgttcccaagcaagcaataggtatcatcgtagcaataagttcaactctgctattggggattgaaatctttgaagctgattttccatatagggccttattgtttattttctcttcttctttgtcttatctatttgttttctcattaaatggtcaattgagaaaagtaccttctgagtcgcacacatccaaaacagcaaggcgacttaaatatattctgttaattgtttatccagcatacctcttctttgaagtggaaatgttcaggaatgtttcattattcattgcctgcgttatatttctggccttttctatatcttggttgaatagaaatttacaataa

SEQ ID NO: 126755 - DNA, 558 bp, Enterobacter cloacae
atgaaaaaaataaatattgaagtcgatggcaccccctattttattgttacaaaaaatgaaaaaacggaattaggaataaaaggtaataccacgcctgaaaaagatgaagaagcccataaaattgaagtgccaaacatttttataatcacaagaaaaaacgctgatgttttgttcgttttgagagggggtgaaaaggattcttttaaaatcatgacagctcaagagttgtatgataaattccagtatcaatggtttgaaccattggcagataactatcggaaattgttgtatgttaacgaagctgattacgcaaaagaagcttacaaaatattcacttgggatgatattgcagaattttcagttatcgatagaacgcctttggcttttcgtccaaaaggtgagggcgactggaaaaataatagtgtgggtggtgccagctatctcctcgtaatgataaataaaatcccatactggactgatgccgttgggcaaatacctttcgccatagacacatatagaatggaaaaaatataccatcaacagttgaaaccggtatga

SEQ ID NO: 126756 - DNA, 525 bp, Enterobacter cloacae
atggcaacagtaacccgctggtgggcgctgacgcttattgcctgtggtctgctcgcaggctgcggtctgacgcagaccgtcatggacggtacggtcagcatcacgaaatccatcttctataagaaaattaaaacgctgcatctggattttaccccacgcacggccattaacgccgatgccgcgcagacaccgctggcaacaatggtgcgggtttatctcctcagggatcggaaagcggttgatgccgctgattaccagacgctgctgcgcaatgccgatacggtacttaaggacgatgttctggcatcaaaagagctgctggtgatgcccaacggcagcgtttctctgaatatgcccatggatgaagaagcacagttcgtggcggtggtgggattgttcaatcgtcccgatcagaaaaacaaccgctggcgtctggtactgacccgtgacgacctcgatccggacaaaccccggaccatcgagttgggtgacggctggctcagcctcgagccggtaaaggagtga

SEQ ID NO: 126757 - DNA, 777 bp, Enterobacter cloacae
atgaaaagaatgctattcatatttttagccgcgtactcgtttcattcttatgctggttgcgatgagtcctggaagaaatctgactatgaacaaaatatacactcatataaagttattaacaaaacttttttccattcaacgccagatgttaacgctagaaatagtaaacttttcctgattaataatgatacctttgttggatttttgaaatccggagaatttgagttcgggaggtataccagaaaagatggcagcattgtcatgggatggctcaaagacgatgctctttcagaaacaaaggaaacaaaaaaatcagattttaatgatgatgacctaagcatctactccccaaatgggaacattgaattaagcgcttcattcgaagacttttacaaagcatggggtaagtgcgggaaaaatgaacaactagaaacgggtgcttggagcaactatatatctaaaggtgatgaaacatacaaatatttcgataactactggaaaggattctccattcgctcttcaaatataaattacaaacaacataacaatgattttgatttgtaccgaattaccactatcactataacaaataataaatacatcaccagcagaggcatctatataggcatgaccaaaaatgaaattataaatgtatatggagaacccgcctcaataaataaggacaacataagctataacttcaagaacaaaacactgagtttcatgttagaaaaaaatataattaaaagcattattttagacgagaatatcatgtaa

SEQ ID NO: 126758 - DNA, 804 bp, Enterobacter cloacae
atgaatcaatataagataaaaatctcggtttttttagctctatcattattcgcattcaattctattgctgcaataaattgtacgccaagtagtgctgactatatctataatacaaaccaagaaccgactcctaaaaaagtgcaatcaaatggacggatttattttttttctttgccaaaagatgaatgcaagacaagcatttttttaataaaagatgacaaattacttaaatatagagaggtaaatggcttttcttttgtaaactatataaataaaaagggtgctgtcgttgatggatgggttcggagtgaagatgttattgcagataatgaacagcataaagggattacgtactcggatttctcatggaagataaatggacaaaatgtaaatctgcttggcaaagcaatcccagagttaaataaatgggccaaagaacaaggattgaaaattccggagccagataaccatggttttaataatggattcgaatcatggacgttaactattcagaatgaaattgtaacaatttcacaagtaaatgacatccttgagaagagattaggttttaatgacacatatgtatcaggaattacatttatagatagcaaatatgaaacagcaagaggtgttaaagttggggatgattggagtaaggtaacttcaaaatatggaacaataagcaatttggattctgacgatgagtgtagattctaccaatatttcgatatgaaacttaggttctgccttgactcatcggggaaagtgcagtcaatttcatttgaaaactacccagtaaaataa

SEQ ID NO: 126759 - DNA, 507 bp, Enterobacter cloacae
atgaataagaacattagcatgaatcagcttgcgaagcagtacgggtataacgaaagcacagttcgcgaatggaaagcacagggtatgccaattggtgaaggtactgaagaagctgatacacgagcatggatagtacagaatgtaattctaccattacgtaataccgatacacgcgaacaaatagatcaagaacgtctacgtaaactaaaagcagaagcggcattatctgaacttgaattacaggtgaaacatggaacggtagttagtactgaatatcttgaacaagtattaactgaatacctctttcaagttaaaaccgcaatgagagcaatccctagtaaaacatacttagagttattcgcacagacagacgcaaaagatttacgagatatattaaaacaacatattgatagtactttattccagctaggaagcatggaatttgaactacccacggatgaagaaatattagaagatggaaacgaacaagaagaactgccattctaa

SEQ ID NO: 126760 - DNA, 441 bp, Enterobacter cloacae
atgaaaattactgttgaaaatatctctgatatgttcgagggaacgaaagaactattgattggtgggctgatcactgctatcactggtttgattattataattggtccaaatggcaatgaatatgtaaaagtgcctttgatgttagttgcgatatttctaattactataatacctggttttgtcgcgatgcttttctcaccattaacaaaactgacagcaaagatttttgatattaaaagtagcaatatactttgccgcctgttttcatttttgtatttcctactgtattggtttgtaacgctttcagtattcaactttataattagatatgtattaaatgtacacccaatagaagatggtatgaaagtatgctttgctattgggtgctttattgtcgcaatagtacaaacaagaagattttactcaatacttattaagtaa

SEQ ID NO: 126761 - DNA, 294 bp, Enterobacter cloacae
atggggaaaattattgtagttttgttggtgctcatcgctttgtatttcaaaatctcaggtggagatgttaagcatgaagcacagaaggaagaaccgtctacccagctcaccaatcaagagttacaggacgctaaggatttcgctcaggctcttatccagcgtgattacacatgcgataaagtcactacgtttagcaatgcgaacttctcaggccgtatagatgtatggtgtgatgatcagtaccagtatgagattacaaagcctggtggacgctggcaggtagtagcgaaataa

SEQ ID NO: 126762 - DNA, 600 bp, Enterobacter cloacae
atgaattataataaatgtgactattctgctatagaattagtggatggtgtcatctttcgcatgaaagatgatattactggtttttataagttagttgataatgaaaaatattactattatcattttgaggatggcgtctatactcgtactgatgatttagtaactatagagaagggtgatcttttttctaatctactagacctgagagcggaaactttcattaatatctcagaccaaaatatagataagcctcaaagtgaatttcgtagtgcttttttacatttcgatagtttacgagtcagcattgaaagcattgacggaaacatgtcagtaaagtcatttgattataaaactgatactgaaattcagacttataatgatgtactacagttctataaccacatcatggataataaatgtgcgtattatggcagacctgattttgataatgacattcttatcaattcattacgtcatgttggggttcctatcgatcaggttaaggaacatcttattaaatttgatatgttttgtagattggttattcctgaataccagtatccaatcgcaccaacagagataaaacagcttagctattaa

SEQ ID NO: 126763 - DNA, 705 bp, Enterobacter cloacae
atgaaacattttttcattgtggagccattggtagaccccatttctatgaagttaaaaggtgttgaaatcttaactcgtttccaagatcaagatggaaagtacataccacctgatgccgtcattgacagcatgaacaatgaagaaaggtgcttgttactcaaagaacaaatcatcgccatcagagagaaaagtgcgttcttcatagaaaacaatcttctatgtagcctcaatgttaatagggatatgatcgaatgtatcaaccgaacacctgaagaggactgtttactaaagggtatggattatgtgcggcttgagatctcagagagcctagccacatgcgagttacaaacccgtactaagctaacagaagcactctgtcttagattgggtaaggtatggctggatgacatgggggcagggtactgtgatataagcatggtcgatgcctctcagtatgaactaatcaagattgatcgtgaatacttctggcgggaagccaagaaagagcaaccctttaatggtcttgtactctataaaaagaaatgtgacaaaattgtctttgagggagtagagacagatgaacaacttgaactagcaaggcgtttagaggtgtggggtgtacaaggttacttgtttaactcttgtaaattaatcgatattgaaagtctaacacttcgctatgactttataaggctgacaaattaa

SEQ ID NO: 126764 - DNA, 471 bp, Enterobacter cloacae
atggcaagaaaagaaacaatacacaataatcaaatgatccagaatgaactacgtttcatttgctttaattcactatcgagtgaagcaaaagaagtaatgcgtagaataatacaggaaagtacttttctaggtaaacaccgtgtaccggaagaagatgtatttgcgatagtaaagagtgctcctgaattcagtgaagtgatggtatttgaacatctaaaactattcagacagaataaaaatcaaaactatccagatagtaaatcatcgcgtgaaaagtacaaacgcatagcaaccctagtatcacaggcgtttgaagtactggtaaaggaagggaaatcccttaatagaatgaagcaatacaaaccaaagaaaaccgtaactgaagaacatgtagcacttgttgaattgctaaaaaatgaaggtgctgatcttgataccctaattgaaaaactagtggcaataaataagtga

SEQ ID NO: 126765 - DNA, 474 bp, Enterobacter cloacae
atgaaaatctggaaagaaacaaaatatgaatattatgtagtaagtaatgaaggtgatgtattcaatactaagacagaaacactactaaagctaaccccttcaaaatctaatgggtactacaaagtatcactatctgttaaaggtggtgatagtagaactgtagaagtacatcgactaatcgcagaaacttttattgaacgtgatgaatcattgaaattagttgttgatcatattgatggtaatcccctaaacaatcacgtggataacctacaatggattacacaaaaagagaatatggcaaaagcgaaaaataaacgtagctggaatagattcaccgaagaagagagagtacaaatcattgctgcgtggaatactggaaagtactcatacattgggattacatctcacttcaatcaactatggaaccgtaataccacacgaaatagttacacaagaattatcaaaaaagcataa

SEQ ID NO: 126766 - DNA, 174 bp, Enterobacter cloacae
atgaagaataataaatctaaggatagaaaagataacgtaataaccgcacgtttatctaattcacaggttgaagtactaaaggaattgattgatgaaggtaaggtatcaaaaggtactctatcttctgctgtaggttacttaattgatcagtacattgtactaaacagtaagtaa

SEQ ID NO: 126767 - DNA, 171 bp, Enterobacter cloacae
atgctaaaactattaattgaattcttactattcccaatctacacaatactagtattgatgtttatgattctcacagtactagcacttccaataaagatacgatttgtagaaggtcacgtaagacaatacataaataaaagtactaatgtattacgcaagaaaaaaacctaa

SEQ ID NO: 126768 - DNA, 1605 bp, Enterobacter cloacae
atggaacaagtacgtaatggtatgtgggatagttctatattggtagtggaatctatagaccgctttagccgccagaacccgtttgatgtgatgcgttacatcaatgctttaatggcacataacgtagctattcatgatgtgatggctaacatagttatcagccgtagtaattctaaagatctgccttttgtgatgatgaatgctcaacgggcatatgatgaatctaagtataaaagtgatcgtattcgtaaagggtgggcgaagaaacgcgaacaagcattcaacaaaggtactattgtaactaataaacgtcctcaatggatcgaagtagaaaatgataagtatgtacttaatgagaaagcagcagtagttaaagagatttttgctctttatcaaactggcatggggtgtccaactattgctaaacaacttcaaaggaaagaaggtgagcaatataaatttaatcgtccgtggactggtgaacttgtccataagattcttactaatcgccgtgtaactggtaagattttcatttcagaaatcatccgtaaccatgatgatattgaaaatccagtaactcagaaaaagtacgatatggacgtgtaccctgtagtgattaatgaagaagaatttgaattagtacaggaattgctaaagtctcgtcgtcctaatgctggtcgtattactgttaagaaagaagggcaggaagaagtactgattaaaagtaatttgtttagtggtatcgcacgttgtacagaatgcggcggatcaatgtatcataatgtggttcgtgctaaacgtacaccaaaaaaaggcgaaccaaaaatcgaggaatatagatacattcgttgcctcaatgaacgtgatggactttgcgaaaataaagctatgacctatgaaacagtagagcgttttgtagtagagcatttattaggtatggatctgaacactgtaattaaagcacaagaattcaatcctgaaattgaagtgatacgtattcaaatcgatcaagttaaggatcagatcactaactatgaaaatggtattgaacggcgtaaaagtgctggtaaagctgtctcttttgaaatgcgggaagaattggatgatgccaagttagagttagagcaattattagcacgtcaggcttcattagctacagtacaagtagatgtgccagtactacaggatgttaacgttactgaattatataatgtaaataacgtcgatatacgcacacgttatgagaatgaacttaacaagattgtttctaatattcgccttaagcgtaatggcaatttttacacaattgacattatctacaagcaaaacgagctgaaaagtcatgtcctttttatagaaaataagaagaaggaacaaaagttaatcagtgaggtgatcattgacgatgttgatggtgctaagttctattacacaccatctttcgtaattagtgttaaaggtggtgagatccgttttcagcagactaaagaagatctttcaatcattgattactcgctattgctgaactatgtagatgctgtagatggcattgatgccgtaggtgtatggatgcgaaataatatgagtttcttatttactaattaa

SEQ ID NO: 126769 - DNA, 300 bp, Enterobacter cloacae
atgaaagcatttcttagtaactcgcaaatagagtcactacttaatgcttttggtgaaaagctcgtcattgttcaagatggtgtatcaataacgattaccgcaatttttgaacaggacgagctttttttcgatgatagtcaaactaccgtgacatattttagtgccaagtcaggaattaaactaaatagtaccttcacaattgataacaccgaatacctagtaaatagaatagatgatgatacaagcggtatctctaactatcactatattcgcaagatcgatttagaagaggaaatataa

SEQ ID NO: 126770 - DNA, 747 bp, Enterobacter cloacae
gtgctacgtgctcagtcagtatttgctactctacctgtacaagtattcgcaaatctagaaggtgaaggtaatctagttctacctaaactatctgctgatttcactgataacttcggttatgttactgaaggtgctccatcaccatcttataacgccgcttttgagaagatcactctaaagccagaaatctttaccggttctgttgaactaactcgtactctaatcaaatctgctagtactgctgaacagtatattcaagatgcgatggttaagggtgctgctctaaaactagaacgtctaattcttgctgatgttgttgctaaggctccagaagtaaccctaactgctgctctaaccaaaaccgatgttattagtgctctagctactctagctgctgctaatgtacgtgttgagaatgtagttgctattgtacatcctactaccgctgcggtattacgtactactctagatggttctaacaccgctgctaagtacttgctacaaggctatatgggtgacggtatcctagctgattcagtacgtattattgaatctactcaagttgccgctggtgctattgtgtttggcgattggtcaaatatcatcatggctcaatggggttcagtaactatggatcgcgatgatacaactcaacgtaactctatgggtattgttctacgtactttcagcttccaatctcatgctctagcacacgatgaagcattcctagtactaaacctagcttaa

SEQ ID NO: 126771 - DNA, 522 bp, Enterobacter cloacae
  misc_feature (442)..(451): n is a, c, g, or t
atggaagatgaaaatgaaattgaaagtactgaacctgaaatcaaagatgaatcagaagtaattagtactgaagttgaatctgaagaagaaattaccgagaaagaagaagtagcagaatctgaagaagtacgtatgagcgatgaagaactattagcactaatggctaatcgtccagacttgcttgaacaaatgataaataaaatcgacgttgaagaacaacgcgaagaagtacaagaaagtactgatgattctgaagtagaagattctacagaagaagtggaacgtaaacgtgaattggaatcaatcggcgtagttctaaatattgatgtgtctgaagcaattgaaaatggaatttcagttgagtacttcaaacgcacactaaatacaaaaacaaatcctaatcatgataaggaaatcaaaatggaaaaatccgtattaaatnnnnnnnnnntgctggtaaaactgaaatccctgcgggtgatttcgtccgtacttctactactgttggcggtgctgctctag

SEQ ID NO: 126772 - DNA, 243 bp, Enterobacter cloacae
atggcaattttaccagaaaagatttatatggtttcaaacccatatgattacactgtaacaattccagctaaaacacttttcgttatttcatatgtcagtactggtaattcaattacattagataacagtaatagtgatagtgaaggttcatttactatcacctttgaaactaacgttgcttcagaaaagctattctgtacaactattactaatggcattgccagtactgcgttattcaattga

SEQ ID NO: 126773 - DNA, 531 bp, Enterobacter cloacae
atggcactattaccagagaagatctatttggtcactaatccaatggatctaacagtagtagtaccatcacaaactatacttgttattagttttacaacgtctggtattagtacatcacttgataatctacagggtagtacttcaaaggaatttactctaactttggaattgagtacagcacaggaaatgcttttctgtactcaaattaacaatggattagcaagtactttcactagtgaagtaattaaccctctacttttcacgagtgaatacgcacaactaaaaaggatgattgaagaaattgataaagttatagctaataaaattgctggtggtgctaactattcaatcacaatcaataacaaaaccctcgtaagtgagtctcttagttcacttgaagctatgcgtgatcgctatgttaaaagggcaaatcaactattttcaaagatgaataatatgaatacttccaatggtggaaaaccaattaagagtatgacggtttttcgtcctaaacctgggagtattcgttaa

SEQ ID NO: 126774 - DNA, 558 bp, Enterobacter cloacae
atggcaagttttacaaataatgtgaaggttacaaactttcaaattaaaagtactgaaccggtttattcaaatcaaactttaacaggtcaacgtatagtacgttctactggtattcagtactacaacattcaattcacacttaatttcaatcctacggcatttacagaggtaaatagttttctagcacagtacgcacagggtaaaccatttacattttcacttggtgttattggtacatatcgtggtacacaaactggttccgtaactgtaagtgctattactcaacctggaaatatggttataccaactagtactaatacactagcagtaggtgaaatgattcaattcacaaaccataaaaaactatatcgaattgtagaacgcactggtacaagtattaccattttcccagctctacagaataccgtacaggcatcagaagttattagctataacaatctaatcattgaagcagtactagatcctgataatgattttactatgccagtaggtaatattatgaacatcacactaaaggctacagagaatatacaataa

SEQ ID NO: 126775 - DNA, 858 bp, Enterobacter cloacae
atggttaatcagatgattggctatcaagatccaaataaatcattaaaagatactaatgcgttacttgcttcaggtggattaaatagtactcaaaaagattttctagcagatcaacaaaatcaacgtatcaatggtggtaatccatttacatatgataatactgataagctacagaaagataatactgatgctatgaatgctgaattagcacagaatgatttactattgaaaggtcatgaggactacgaaaaacgcaaggctgaaattacagctaagtataacgcacaggcaattgatatcagcaatcaaaacgcacaagcacagttagagatctttggtagtactgctgattctcttgctcaaggtatggtagatgcgtttggcagtgcttcaggtgctgctcaggccgcctttgctcttagtaagggtattagtattgctcagacagtactatcaatccaatcagcactagcccaggctctagcgactccgttccctgcttcattggcgaactacgcacagatcctatcattgggtatgagcattatcagtactgctaaaggtgctgctaatggacaattccacggcggtgtagatgaactaccagcgggatatgataacaaatcattcgtacttaaagctggtgaacgtgttgtacaacctgaagcgaacaagaaactaacagcctttcttgataaacatgaaggtggtagtacttctggtgatatcacagtaaacgcacctttgattattcaaggtgatgtagcgggtgatgataagaaattcaatgaaatgttgaagaaacaccaaaacagtgtagcacaggctgtaagaagctcacagaaacgtaatacataa

SEQ ID NO: 126776 - DNA, 183 bp, Enterobacter cloacae
atgacgcgtcgggttgtcttcattacgcccctgagttttgtgcggcggcgtgtcgtaaacctcttcaccgtggtcagagaaataaaccaggaaaccgttcggatcggtcgctttaaagtctttaatcaggctggcaaccacgtgatcgttgtacaggttagcattgtcataatcattatatga

SEQ ID NO: 126777 - DNA, 576 bp, Enterobacter cloacae
atgaaaaaaaatctttatagcctgtcagccgttgccatgacgatgctggcgttatcaggttcggcgctcgccgagggcactaatttagatgttaacttcacggctaatatccgtgaaactacctgtgatatgaaactggtcggtggtacgggttccgatacgcaacaaacgctgactataggaaataatggacaggtgcgacttgacgatgtgaaagccgggactgcaaacgctactttcaaaatcgtgatcgtcgaatgtccggcatctcttacctcactgaaaacgacggtaaaaggatccccatcgggttatttagctaccgggcttaagaaccagatcgtaaaagaaagcggtggttcagattactctgctgtcgaaatcgccagagccagctcaccgaccgccccgtttaccattaactctaccgtggatgcggaacgcctggtctggacctctacagaaatccagaataaggaggttccattggtggccacaatgcgtgaaaccaaagcgaatagcatgacccttggtgattttcaggctgtggcgacttttgaatttagctacgagtaa

SEQ ID NO: 126778 - DNA, 1080 bp, Enterobacter cloacae
atgatgaaaaaatatgtcaatctatttgcattcgtgatgctggggatgtctggtgcagcgcaagcttatgaatgtaaattctatggtggtacagacaatgtgttaattatgtctccgggtacgcagccggtaattacccccttgcccgtaggcacggtaacaaccccaacgcagataagcaccacgatcattatggagacgacgccaacattaaaatcgcactgtgcaggtggtgatgatggcggcgatgtttatcagttaaccaataatgccatgttgtatggagaaatagatggcaaagccacgtttcgtaccaatatccctgggattatctacacgctggcgttttttcctgatggcaacggcgtaaccgcatggttcccaccaaacgccaacgcattttatagaacaggcatcgtcggttatgactatagcatgctagatgagaaaaactggcatgttcgtatggagttttggcaaaccaatgcatttaccggtgtgccgcccgacgaagatttcctgaccgccagcagcggccctataggtcaaattataatcggaaagcctgatggaaccacaaaggaggatcatccacgccctctggtaaatatgtctcagatgtcgtttagcattccattaaatcgcccgacctgtgccttacgtgcacccacgacggtagaccttggggactggtttcctgcggaactggaaaacggcaataccccaaaagttgagtttcatattacgggaacatgtgcaaataccacgctggttcagtactcactttcatccacccacacaacggcagataagaaatcttttactaattccgttcagagtagtggtggtgtcactgcggcaggcggcgtcggcgttcagattttcgataatcctagcgatacttatccggtcccagcaaatggcgtaaaacgcgtcattgccattggagaaatagccggagagcccacagataacgttatagacaaatcagtttgggccagactggttaagctcggtagcgacccggtcaccgtcggcgtttttggcaccaccgtgaccttccagaccacgtacgaataa

SEQ ID NO: 126779 - DNA, 351 bp, Enterobacter cloacae
ttgacaaatcaggtgcaactctggccggaaggtgaagtatttacccgagaggtattgataccgacgaagtacgagccattaccagttgaagtcacttacaccgttcctcctttcgagatagttgtcgaaacgtggcagaacagagacccagctaaggcttacgctctgtttagacaattcattgttgactgggatcagcaggacaaactcaccgacgaaatacttatgtgctttctgacagcttaccccggtacagatgaagctatttttgccggatggtatgagcatatgaaagaagttatgacggtaaatgagcagcttttcacaggttgcagccagtcaatcaactga

SEQ ID NO: 126780 - DNA, 603 bp, Enterobacter cloacae
atgaatacagcaaaccatgaaacaatgagcaccattcttttgagtggctcgctggctaaactatttggccgtacgcaccaaagaattattggcccgacacgtgaggcgtttactgcgttatccgccaccattcccggctttcagaagttcatgaataccagcaaagcccgagggctcacgttcgcggtattcgtggacaaaaagaacgttactcaggatgatctcgattttccgaacggcaacaggacgattcgcattgttccgatcataatcgggagcaagaaagcaggtattttacagaccatcatgggcgctgttctggtggcagtgggggcaatcgcaacctttgggttcggccaggcatggggcgtcaatgttatggttgcaggcggttcaatgattgctggcggtgtaatccagatgctatcccctcagcctacagggctggcaagcaagcaaagtgctgataataaagcctcatacgcgtttggtggcgttactaatactgccgcgcagggctatccggtaccattgctttacggtaagcgccgtatcggcggtgcaatcatatcggcgggtatatatgtggaggatcagctttga

SEQ ID NO: 126781 - DNA, 1662 bp, Enterobacter cloacae
ttgaccgtctggaatgactacgcaaacgcgataaaaacgggcgaaattccggcctgtaagcgcgtaaaacaggccgtggaaaggtacttttcagaccttaatgacccccgttatgagttcgatacggcgaccgtagagcggtttattgcgttctcgcggctctgtcctcacgtcaaaggcccgcttcggggccagccaatagagcttgagccgtggcagcagttcgcctttgctaacctgctgggtttcaaagtcagggagtcaggccgccgtaagtacagcagcgcatttattgaggtaccgcgtaagaacgccaaatcaaccgtggccgccatgctggctaactggtttctggtaatggagaagggccagcaggatatctacacggcggcggtgagtcgtgatcaggcccgaatcgtgttcgacgatgcccgccagatgtgcctgctgtcaaaaccgctgaaaaagcgcgtcaatatccaggcgcataaggtcattttcccgaagagcaacagcctgttaaagccgctggcggcgaaagcggccaccattgaggggactaaccccagcctggcgattgtcgatgaataccaccttcatccggataacggtgtttattccgcgcttgagttgggtatgggcgcacgtccggaggcgattttattcgccatcaccaccgccgggagtaacgttgtctcagcatgtaagcagcattatgactactgctgtcagattctggccggggaagagagcaacgattcactgtttgtcctgatctacgagctggacgacgaaagcgaggttgaacagccggaaatgtggatcaaggctaaccctaatctgcatgtgtccgtggatgcggcgaaactggagtccaccatccagaaagcgcggggcataccgtcgcagtgggtcgaaatgctgaccaaacgtttcaatatctggtgtcagggctccacgccgtggatgggcgccggtgcatgggatgcctgtgcgctcgactataccgaagtcgatctggccggaatggaatgttatgccgggtttgacctgtcctctaccagcgacatcaccagcgtaagctatgcgttcccgttcgacagggagatcagactccttacccgtcattatctgccggaagcgcagctgcttaacgtcgccaacaaaaaccgcgccatctaccgccagtgggtaaaagcgggatggatacgcaccacacccggcgactgcatcgactatgaccgcatccgtgacgatattctgcgcgacgctgaaaccttcaatatccggctggtgggcttcgatacgtggaacgccacgcacctgcgcacccagctacagggggcgggcctcgatgtggagccgttcccgcaaacctatctcaaattcagtccggtagcgaaatcctttgaggtgttcgttaaccgcagagtggtgcgccaccgtggcgatccagttctggcctgggcgattggtaacgtggtgatggagaccgacgctaacgccaacattaagcccaacaagaagaaatcctccaacaagatagacccggctgtatctgcgctgatggcgttcggtaccttccaggctgagcatgaggattttgttttcgatatgagcgacagccacaaacaacggctggcgacatttaacggtatctga

SEQ ID NO: 126782 - DNA, 192 bp, Enterobacter cloacae
atgcttccgcaaccgctgacaggcggcatgggcggggtgggggaggttttaaagacaaaccccctgctgcaaggcaccgcctgccccctcaaatttttacgcacggtgaattttttgaaaataaaacgcgatggaaacgagaaatttttatggcaagaccaccaaaaccgccagcttaccttgatgagttag

SEQ ID NO: 126783 - DNA, 153 bp, Enterobacter cloacae
atgactgagcaggaacagcagcggctgataagtgggctgataaagcagcgcgaggcatggcaaccatccagacagagagcgcacacgaagcccgtagcaaagcgcatgagccagcgtgaccgggagcttatggaatgcttccgcaaccgctga

SEQ ID NO: 126784 - DNA, 294 bp, Enterobacter cloacae
atgagtgagttaatcggtctggaagaagcaaagctgcattgccgtattgatgacgattatgaagacacgctgatacaggcgtacatcgaagctgcgctggaggtctgccagaagcatattggcaagcgatttgataacggcctggagttcacccctgctatcaagattggctgtctgatgtacgtctctcagctgtacgagtaccgcacgatgattggtgacaccgacgccaaagagataccgatggctgtctctgcgttgtggtctgtgtaccgagatgtgggggtgtactga

SEQ ID NO: 126785 - DNA, 339 bp, Enterobacter cloacae
atgagagccggaaagatgaaacgccgcgttacctttcagaagtctgaatctcaccgcgacccgactggtcaggttatctatgaatgggctgaccttgccaccgtctgggctgaaattcgagctatcagcgggcgtgagcgcatgtcttccggggcactttactccgaggctacagtgcgaatctggacgcgctaccgcgacgatataaccaccgcaaaccgcattctgtaccgctcgccaaacgtccgggggcaggtttacggcattgtggccgtaattcctgatgtggatcacacccggcttgagctgctgtgcaagggaggcattttcaatgagtga

SEQ ID NO: 126786 - DNA, 1236 bp, Enterobacter cloacae
atgtggaatatctggccgtttggccgtaagtctgaaccctccgaacagcgcagtatgaccattgatgagtggctggcgatggcagggattccaaataccggatcaggcgagtatgtgtctgcgggtactgcggaatctctgccggcggtcatgaacgccgtatcagttatcagtgaggcggtggcaacaatgccctgctatctctaccgcgtccgtaatgataatggtcgtgaggcgcgagaatggctgagtaatcacccagtggattttctcctgaacgagcagccgaacgactgccagacgccttatcagtttaaacgcacgatgatgcgccattgtctgctgaatggtaacgcctatgcggtgatcaagtggggccgcgacggccagccgcaatccctgcacccgtatgcgccgggggcggttgttcccgagcgtatcggccagcataagtacaaatacaccgttacagagccgtttaccggggctgtgcgcacctatctacaggaagagattctgcacttgcgttactccaccgatgatggctttctggggcgttcgcctatcaccgtctgccgtgaggcgctggggttaggtctggcacagcagcgccacggtgccagcattatgaaagatggcatgatggcggctggcgtggtggtcactaaagagtggctcgatagcgtgaagggcaaacaggcgatggatgcactggatcgctacaagggcgccagaaatgccggtaaaacaccgatccttgaaggtggcatggactacaagcagcttggcatgagcaatcaggatgccgaatggctggcctcccgtcgcttcaccattgaagacattgcccgcatgttcaacgtgtcgcctatcttcctgcaggaatacagcaacagcacctacagcaactttagcgaagcgagccgcgcctttctcaccatgaccatgcgcccgtggctggcgaacttcgaacaacaaatcaaatctgcgctgctggtggcctctccggttccgggaacccgctaccaggtggagttcgactctgctgaccttctccgcgccacgccaaccgaacgttacgccacatatgagcgcggcattaagaacgggatcatgaacccgaacgaagcccgtgaacgtgaggggatgccgccgcgtgaaggtggtgacgaattcagccaggcatggaagcaagaagtgaagatcagcaaagacggcaaggaaggtgacgaatga

SEQ ID NO: 126787 - DNA, 561 bp, Enterobacter cloacae
atgaaaacaatcgattttgaaatccgtacctccgaagtgagcgccagcaacaaaaagctggtgggctatgccgtgcgctggaacagtctctcagaaattatctgggacgagttccgcgagcagtttgcgccgggagcgtttaaagacagcctggcatccggtagcgatgtgcgtgcgctgtacgagcataactatacccagctgctgggccgcaccaaatccggcacgctggtgctgtccgaagacgataccgggctgcgcttcgagctgaccccgccgaatacccagcttggcaacgatgtgctggagctggtggagcgcggggatatctctggcatgagcttcggttttcgtgcgctgaaagaggcgtgggatattgctcagtctccatacctgcgcactgttaccgctgccgaactgcgggagattaccgttacctctatgcctgcttatcctgagtctggcgtggaaatcgcgcaccgttcgcttttctcccaacatcctgaactgcgccgcgctggcgataaccgtcgccgctgggctgaattagcggggctttga

SEQ ID NO: 126788 - DNA, 1167 bp, Enterobacter cloacae
atgaagaaactactcgaattacgccagcagaaaaccgcactcaaaacccagatgcgctccatgctggacaaagccgacaccgaaaagcgcagcctgaacgaagaagagggcaaaaagttcgatgaactacgcgcccaggctgatgccctcgaagttgaaatcacccgtcttgaagccgtcgccgacgatcagcgcaatctgcctggcacttccgttgaaggtgagcctgtaagcaacgacgagctgcgccactacatcatgaccggtgatacccgctctctctccacgctggtgcaggctgacggcggctataccgttatccctgagctggacaaagagattatgcgccagttgcaggatgatagcgtgatgcgctccatcgcaacggtgaagaccaccaaaaccaacgaataccagaagctggtatctgtgggcggcactaccgttaatcgcggtaccgaaggtgaaccacgcaccgaaaccagcacgccgaagatggagcgcgttgatatcaaactcaacccgatctacgcctacccgaaaaccacccaggagattctcgacttctccgaggtagatattctgggctggctgtcttctgaaattgccgacaccttcaccgctaccgaagagagcgactttgtgaacggcgatggtgataagaaatccaaaggcttcctgtcttaccctcgcgcggccactgccgacaaaacccgtccgttcggtacgctggagaagatggaagcggctgacgtttcctctgatggcctgatcgacctgctgtataagctgaaagccaaataccgcaaaaatgccgtatgggtgatgaactccaacaccgccgccaaactgcaaaagctgaaaaacggcaacggggattacatctggcgcgatcgtctggttgccggttctcccgatacgctgctgggccgtcctgttcagtatctggaaaccatgccggatgcggaggcaggtaaagcgttcctcgcggtaggcgacttcaagcgcggctatttcatcgtggatcacaccactggcgtgcgtactcgtcctgacaacatcaccgaaccgggtttctacaaggtacataccgataaatacctgggcggcggcgtggtggactccaacgccatcaaggtgcttgagctttccggctccggttcctga

SEQ ID NO: 126789 - DNA, 2136 bp, Enterobacter cloacae
atgaagatgaaaaacgctccaaacattaagtgtctgccaaaggacaagtttactgaggcgattatttttgcaggtgatgatgcttattcacacgcgcagcactggatcgagagcgaggggaaaagggcgggggatgatgtgccgccagtatatctgggtaaaaaacagctggaggagcttgaaaggctgaatatcatcgatcaggggcgtcgttgcgtccgcgtgattagagctggtgagctttcagaaactcaggtgagtatcattgctaccaaactggcactgtctgatgtgaaagaggcacgtttgtttaacggtatgtttgagccccagccaaaagagaactggacggatgtacttccacggctaagggaagaggccgagcgtggggaaagtattgtggtaaatctgcctgtgaaaaaaagggagccaaagcctgaaccgggtgatgaactgaaaccccgcgtagagagccgtaacgatggcctgtactggatcacgccaaaggtggataaggacagcggagaaataatcaataacgaaacgtggttgtgctcgcctctcgaggtggtcggctccggtagtgacggtgccgatcgctatcttgttttgcgctggcgttcgccgcgtggccacgaagatattactagggcgatcccctgtgctgatatcggtgagcgtgacggctggcgctcacttaaagctggtggagtgaatgtgaccactaaaagcaccttcagggcgattctggccgactggttgcagcaatgtggttcagggcgcgaatggatcataagccataccactggctggcatcatggggcatatatcatgcctgatggtgaagtgattggtgatccagagacacccattctctttaacggtcgcagcgctgcatcttccgggtatgccattgctggtactgctgccacctggcgggattccgtcgcccgtctggccgggggcaatccttctatgatgctgggcgtggccgcggcattatccgcgccgcttatcggccttgtgggcgctgatggtttcggtgtccatttgttcgaacagtcgagtgccggtaagaccaccaccgccaatattgctagcagtctctggggtgagcctgatgcgttgcggcttacctggtacggtactgcgcttggcatagcaaatgaagcggaggcgcataacgatagcctattaccgcttgatgaggtaggacagggcagtagtgccaaagatgttgccacctctgcttacaccctgtttaacggtgccggaaaattgcagggagccaaagagggcggcaatcgggagcttaaacgctggcgcactgtggcgatcagcaccggggaaatggatattgaaaccttcctggctgctggtgggctgaaagttaaagcgggccaactggtgcgcttgctcaacatccctatggagaaatcgacggcctttaacggcctgccaaacggcaaggctcatgctgacgcactgaaagaagcctggattgataaccatggcgcagcggggcgtgagtgggttaaatggctggcaaaccaccagcaggaggctaaacaggcggtacgtgacgcgcaaacgcgctggcgcggcctcatcccggcggattacggtgagcaggtacaccgcgtggccgaacgctttgcaatcctcgaagccgcgctggtaactggtgcatcaatcaccggatggagtgaacaggccagccgtgacgctatccagcatagctttaacgcctgggtgaaagagttcggcacgggtaacaaggagcaccagcagatcatcgagcagtgcgaggcgttcctgaatgcctacggtttaagccgctttgcaccgttgccctatgatccgtccagtatgccgattcgcgatctggcagggtatcgaaagcgcaaaagcagccatgatgatgcgccgatggtgttctatacgttccccgcaacgtttgagaaggagatagctcagggctttaacgccaggcagtttgcccgcgtgcttgccgctgctggcttgctttctgagccgtccagcgggcgtggataccagcagaaatccccgcgtattgatgggcgtcaaatcaacgtttatgtgcttcaccaggttgcggaagatggagaagaataa

SEQ ID NO: 126790 - DNA, 228 bp, Enterobacter cloacae
atggataacctttatacctacaagagcaaaaaagatttgctgttactggcgcaagaggttgccgcgcttctgtcatgtgctgcttaccttgcgactatcaggggcgagcaagagcgtatccatgtaatgagtttaacgggcctggctcaacgcctttctgacgaactggcaaacgcactggatatttctactttttcagaccatgaatcgcaggaggcaaaatcatga

SEQ ID NO: 126791 - DNA, 285 bp, Enterobacter cloacae
atgccaaatatcatctttaccccgccaaatcctgagcaacgccgcagccttctggaagagtacggattcaagttcgatcgccgtattcgtgaagatgagtgcagtgaaatgaccagtctttcccgttccagccgttggaagatggagcaagagggccgctttcctccccgctgccactttggccgcaatagctgcgcttggcttctttcggatgtgctctggtgggttcggaaccctcctgccgtggaaaacgtcaataatccgtacagccgcaaatcagcataa

SEQ ID NO: 126792 - DNA, 819 bp, Enterobacter cloacae
atgaatattccaataccagaatattgtactttagagcgagcatcaaagttaattggctgtgagattggcgacttactacattttggtgagattggtacggtaactatttgtattaaagtaccttcatcaacaaaggcaatggttcatgtcttcaaaaaagatgaagaaaccgtttatgatattgaagcagaatggtcttctcgcggaaaatactctgagtttgtgactgttgatgaaccaatggaacatgcagaggattatgaatatgagtttagaattcctgcttttatcagtggcctgtggggtatgttgcgttgttctgattttggtcaaccatttacacaaattccctgtgaaggtatggtggtcttgactggtactgacagaccatttcttgcaattctagattttcccggttcggagtggggtgttgaacaattattaaacatacaaccggaagatatgtatatattaggtgctgacatcgaaaaaattataaattatgcagggaagagattgcctgatagatcggatgaacatatcgataatatcaatgttaagcccaatggtgaattattggtgagacatgaagataaattatcgaccaaaacaataaatagccgtgcgcaatttatcaagtcacttttatacacaatgtacgattctgatgttgctgaaaatccaagaaaatactttgataatcctgatagtgaaataagtgagctttttaaagcaaaaggaataaaggctcccaatggcaggactgtgcaagcttggttaagtatggttgatattcccttcattgaaggaaaatcataa

SEQ ID NO: 126793 - DNA, 1017 bp, Enterobacter cloacae
atgacgacgttacgcctgcttatctctgactctcacgatccctggtttaacctggcggtggaagagtgcatcttccgccagatgcccgccacccagcgcgtcctgtttctctggcgcaacgctgatacggtcgttattggccgcgcgcaaaatccgtggaaagagtgtaacacccgccgtatggaagaggacaacgtccgcctggcgcgccgcagcagcggcggcggtgcggtgtttcacgatctgggcaacacctgctttacctttatggcgggcaagccggaatacgacaaaaccatctcgacctccattgtgcttaacgcgctcaattcgcttggcgtgacggctgaagcctcgggacgtaacgatctggtcgtgaaaacgcctgaaggcgaccggaaagtgtcaggctcagcctaccgcgaaacgatggatcgcggttttcatcacggtacgcttttattggatgcggatctcagccgacttgcgaattaccttaatcccgataagaaaaaattgcaggccaaaggaattacgtcggtgcgcgggcgtgtaactaatttagtggaattattaccgaatattacgcatgaaaaaatctgccatgctttgcgcgaggcattttttacgtattacggcgaacgcgtcgaggcggaaattatctccccgcatcatacaccggatctgcctaattttgccgaaacctttgcccgccagagcagctgggagtggaacttcggccaggcgcctgccttttcgcatctgctggaagagcgctttacctggggcggtgtggagctgcactttgacgtggaaaaaggtcatattacccgcgcgcagatgtttaccgatagcctgaaccccgccccgctggaggcgctggccgcacgcctgcaaggatgtctctatcgcgccgacaggcttcaggaaacgtgcgatgccctgcttagcgattttcccgcacaacagacggagctgcgggagctctcggcgtggatagcgcatacaatcaggtaa

SEQ ID NO: 126794 - DNA, 696 bp, Enterobacter cloacae
atgaaaaaaatattactggcaacctcggttgctttggctctgtctacatcagcctatgcagactcaacggcagtgttaaagctgaccggcacgctgactaacgcagcctgcaccccttctctgagcaatggcggcgtggcggattatggccggatcatgctgagcgatctctctgctacagatacaaaccagctcggtaataaagatatcaccttctccattagctgtacttctccaacgaaagtggcctggaccatcgttgacgatcgcgctgattcaatgcaaacggggataaccctcactaatgtaggctggagtaatagtacgtcgtggagcgattcaaaccactttggtgtaggtaagacggcaggcggtgtcaacctgggcgtctatgcaatcaatatcaatgccagtgcagtcacggcagacggcctcatcgaacaaggcctgcatggatggacagttccaggcaatgggaatgcctgggcctatatgaactcttcaaacgagctggttaaaccgtcggaatatatatataccgtcgcgttgaaatcggacgcgttaagcccgatgtcgttctccaatgccgtcttcccgttacgcgtttccctggcaatccagggcaccgacacgctggcgattacggatgatacaaatattgacggccaggccacgatcagccttgtctacctgtaa

SEQ ID NO: 126795 - DNA, 255 bp, Enterobacter cloacae
atgaaatcaattttgggatttgattatttattaacgccgcgcgttctggtcctgttttactggatcgccatgctgcttatttttgcaggcggtgtgtataccatgttcagtgaccgcctcatcactggctttatcggtacgatatgcagcctggtcggatgccgagtgatgttcgaactgattatggtggcgttcaagaacaacgaatacttacgccgtatcgctgaaaacacgtcagtaaaatccgccgaataa

SEQ ID NO: 126796 - DNA, 1953 bp, Enterobacter cloacae
atggacgcagttgagcaagacgtcagattcgaatgggcagacttttatcaggcttttgcctctcagctactgacctggcgaaatcgaagaaaggagttggtggcgggtattcaccgcattgctgctgagattggtagtatgtcacacctacaggacaagcccgctaatggcgtcccccatcctttgaaagacatttgtcctttcaccactatgggcttgtttaatcgctcgcttaccgttaccaaccgaagaaatatcgcagccagcctggcaaaactgataggcgtacgcgaaaaggttcctgaatcgttcgacggtattccgctactgaacaatcagaaatcttggttctttggctatgagaaatcacgtaagcctgaagacatcgatacgctgtgggaaatgttttctcaggcaatctccttcgccgacaccccaaacgccgatcccgctgacttcctcttttcttatgacgccgcatctaacgtgcgcaatgtgggctggaacctgacaatgggattgtactggctacgcccctggttctaccctacgctggatagccagtctcagtactacatccagaaagtcctgaacattaaaatcattaaaaaaggtgccaaagggcgctgtagcggacacaactatcagaccgtagccctggcgctcaaaaaggcttttacccagccaaactatccggttcactccttccctgaactctctctggcggcatggaatatcgatttgcaacagtcaaatgatgaagtcgagcggctgacatggaaagcgtatttgctcaataagatcaaggtgctgtgcctacgaaaagacagcccctttttctctttgagggagttaaaagaggcctatctggatgagattaaggcggattatcccaataacaatactattgaatcatccatttcatattatctgcaaaaactacgtgacgatgatgaactggagtttcagacccccggcaattatgaatacctcaacttcgataaaggtgaattgcagagcatcaccgaggaaacggttgaagagaacgtgcccgcggaaatcccccacaagccttacacgataagcaatttgatcgatgagggctgctttttagaagaggaaaaaatccaattcatccttcagcggttacaggccaaaaaaaacctgatccttcagggcccgccgggaaccggtaaaacctggcttgcgcgccgtctggcgtattgtctgatgggcgaggaaacctctaagcgcatcagcgcggtgcagttccaccctaccctctcctacgaagactttattcgaggctggcgtcctaacaatgaaggacgtttagcactggtagacgggccttttctccatgcaatcgacaaagcagtaaacgatccgacaactaagtacgtggtcattattgaggagattaaccggggcaatcctgcgcaaatttttggcgaaacgctgacgctgatggaggcggataaacgtacgccgaacgaggcgcttgagctctcatatcgatctgatatggatgaaaaaacctacattcctgaaaacctgtatatcatcgggacgatgaatatcgctgaccgctcgcttgccctgctagacctggcattacggcgccgctttgcgtttattgatctaaagcccgagtttaacgacgcgtggaaaaaatgggttaaccaacggtttaatgtgagcctggaaacattagcctttattgaatccaaattcaccgcgttaaatgaaaaattgtccagggatgcggccctgggacctcaattttgtatcgggcatagctatgttaccccacctgcggggttgaaaattgacgacgggatggcctggtacgagcagattgtcgaaaccgaaatctgccctttacttgccgaatactggtttgatgcgccggagaaagtccaggattccagaaaggaacttctcagcgtatga

SEQ ID NO: 126797 - DNA, 1134 bp, Enterobacter cloacae
atgaccgatcttgctgaacgtgacgatacgcaggctcgggcagctgtatcgcgtattcctttgcggaatatctggctattgatgctgtacgcctccagcctgtttcgccaccacgggcgcagcatggttgccgctgaaaacaacccggaggagatcccggcgctggtggccaggatcctgcttcacgaagtggagcagcggctgttaaggcatttaagtatgggataccaaactcgccgcgccacgcttaacagggtaaggggacgcattgatgttctgcgcacaaccagtcgacaattgcttgagcgggcacaggtagcctgccagtttcaggaaatgacgctggacacaccacgaaatcgctatgttcgctctgcgttagagcaccttgttccgctgctcagcaacggcccgctggctgcgcaatgtcgcgcaatggcaatcaatttgcgtcgtcgtggtattgaggggggtatgcccagtaaaggtgaactgccgtcaatcacacgttttggccgccacgatgcggcggataaagccatggtcgatgccgcgaagctggcatttgaattatggctaccaacccaaactgcggggcaaaaactgttgccaacgccttctgatgacccttactggatgcgcaagctgttcgagaaaagtatggcgggtttctatcacttccatcttcccaaaaaagactggacagtcgctgccggaaaagagttgaaatggggattaacgtctcaaagtgcagggagcgaaagtattttcccaaccatgaactcggacattattcttgagcacaagcaacctgcacagcgcgtcatcatcgacaccaaattcaataacattctgactaaaggctggtatcgcgataagagcttgcgcagcggttatatctaccagatttatacctatctgcgaacgcaggagaaccgaacagatccattatctctccgttcagctggattattacttcatccagccgtcgatgtaatgctctacgaattcgttgaggtacaggggcataaaatccactttgccaccgtagatttagcagcagatgccgccacaatgactcagcaattattgaaattagcgcgtgattgctgtgggataactgacgtgaattaa

SEQ ID NO: 126798 - DNA, 810 bp, Enterobacter cloacae; identical to SEQ ID NO: 26634

SEQ ID NO: 126799 - DNA, 1266 bp, Enterobacter cloacae
atgaaaagcacttcgacaaccaacagaactgaatattacaaaatcagcagctttatctttctctatttctttacctggtctgccagtattggtctgctggcgatctggctcggtcagaaagccaacctgagcggatcggtgattggaaccgtgtttgcggtgaacgggatattctccgttattctcaagccgatctacggctatattctcgataagatcggcatgagcaaatatctgctctattttgtggtgatcatgtcggccctgatggcgccattctttatttacgtttaccagccgctgttaatgtctaataccctgctggggattattatcggcgcgctctatttaagctttgcctggtacgcgggcgtggcggcgtgtgaatcctattccgaccgctttagccgtttgaatggcatggagttcgggcagatccgtatgtggggttcgctcggctgggcggtggcgtcatctttctccggcctgctgttcaacctctcaccggcgtataactttattctcggcagcgtggcgtcggtggtgatgctgattgtcctgctgagcctgaaagtgaacactaactccgctcacgcagccgaggtgctgacgaaagagaaaatcgccccgtccgacgtttacgccctgctgcgtaaccgtaaattctgggccttctgcctgtacgtggcgggcgtggcgtggatgatgtttatcgccgagcagcaattctcgcgctatttcgtcaccttcttcgatgatattcatgagggcaacgccgtattcggttatctcgggaccgtacagtcgggcatggaatttgtcatgtatatggtggtcccgctgttggtgaattttattggcgccaaacgcgggttgttaattgtcgggctggtggttggggcgcgtctgattatttccggcatgtgtgattcacacctgttaatttcagtgcttaagccgctgtacggtctggaaatttgtctcctgctggtgtcggtatttaaatatatcgccgagcatttcgacaagcgcgtcaatgccaccatgtatttactcggctatcaggcgatgctctacgttggcaacgtggtggtctcttcccctgccggctatatgtatgaccgtattggctttgagcacacctatatcatcatgggcgcaacggcgctgacctttacccttatttctgcttttacgttatccgcctgtcagagcaaatggcgcggggctcgtgcgctgaacgtagcagaaacgtcaacacgataa

SEQ ID NO: 126800 - DNA, 1995 bp, Enterobacter cloacae
atgaaaaaaagtgccctatcccttttgatttgtgcagcaatatcattttctgctgcggcagaaaatctggtgcaaaatgagcttgcatatgacaatgcgacctacacggcaattgtactcaagctaaaacccactaccggtttgttaaaagcgacaaacaataaaattaccctgaatgatccttcccttatcaccacaaatatgtttcggccgacgaatttgcggagttcaaatcagtcatccgagctgacggaactcaataagcgttatggctttgaccgttatctgcgtatcgcgttgccgcaagataaacgtcaggataaaacctacattaaccatattattactgagctggagcagaatcagaacgtagagtttgtttacccggaggccgaaccggtgtcgctggatgaaaacgcccttacgccgcaggttaagtcttcggtaaataataatttaacgtctgccgccgtaccggattttcgcaataagcaggattatctcaaagcacctgatgttaagcgcgccggttattatatggggggcgtaaaccgcgaaagcgtagatcactatgcaggcagtgcgggtgaaggggtgacgattatttcaacggagatttatccctggaatacccaccacctcaacttaccgccgataagcctcagctctggaaaaacaacgtatgttgaaaagcaagatcatgacaccgcttccgtcgggattatggcagcgaaagatattggcaccggtattcgagggataagctggaaaagccgactggggtacgcgggctcagcgcataataacctctataatttaattccgctgctcaaagcaggcgatgtggtgcagatcggggtacacgtagcgggcggttatccagcgggttgtcagaaggattgctgggtggcaatggagtccgagcccgcctattacgatgtgattaaagcgctgacggataaaggcgtttacgttattgaggcggcaggtaacgggaacgtcaacctcgatagcccaggcttcaagggagagtttgacgtgaacgtgcgggactccggggctatcctggcgggggcgttttgtgcaaaagacggtaaaaaagcgtcgttcagcacctatggttcgcgcgtcaccagctctgcatggggctgctgggacgtagtgagcacaggttatggcgatctctataaaaatggcggtgttaacgattcttataccgcgacgtttgccggaacctcttcctcgaacccgattattgcgggtgtggtagccagcctgtcaggcatcgccaaagccaacggtattaccgtgacaccgcgtcagatgcgtcagatcctggaggagaccggtacgccactggccaacggagattcggcaaaagtgggtactcaacctgacatggagcgtgcggtggcccgtattatggcgctcaaagacggtagcacgcctgtcgcgccggctccaacggcggtggcaggcgcagattacgtcctggtttctccgaccacgggggtgatcacctacgcgctggacggcagtaagagcctgaatgccagatcgtataactggcgtgtgacgaaaggggcagaaaccttctcgctggaggcgacactgaacggcacgctggtgaagagcgtggacagcgcgcatgcctatgccgtcattcctgctaacagcgagggtgaagcgacctttacgctgacgacgaccggcgcggatgggcgaaccgcgacggacagcatgaccatcaccgtcagcaaaccggcggtaccggctaaggatgacaccccggcaaaagatgacacaccggtaaatcctgcggcaccggcctataacgccaaaatcgcctatccaacccgatgcaccaaagtgtcttacaacggtaaagtttggctcaaccagtggtatgtcaacccgggacaagaaacgccgggaagcggcggccagtggggcgcatggcgcgaacaggggactcccgataacagctgtaaataa

SEQ ID NO: 126801 - DNA, 681 bp, Enterobacter cloacae
atggacattaaaatcgttattgctgaagaatcctcgttgattcgccgcggcttatcctcaatgatgcaagcgctctcgttacccacctcaggcatgaatcagagatgcgttctgaccggtgaagtcgcctcttccgcagaacttctgtcgcttctgggtcagcataaccccgatatcgttatcctcagctatacactgacaacccgctttaatcgccctcctctcgcaggtatggacggtctgaagctgttgagatggctccatcagacttatcctgcgctcagcattatcctgatctcgccctatgcaaacgccttgtttattcgtcaggcgctaaaggaaggtgtcagatcgtatttgtcgcgggatatcaacgagaaaaccttgagccaggcgattgcaacagttcttaaaggtgagatctatatcgaaagccagctggtaaatatgctttttcgtcatgagatgacagatattgagaaactctcgccgcgggaaatcgatgtgctgcgtctgatatgtgacggattaaatttgaaggagatagctcaacatatgcacctgagcatcaaaacagtcagtgcgcacaagatccgggcgatggaaaagctggatgtgcaaaacgactgccagctttactcgctaatcatcaagaaccagatgttcgacatcaggatataa

SEQ ID NO: 126802 - DNA, 672 bp, Enterobacter cloacae
atgaaaaaagttgtattggcttctatgcttgctatgtgtgtatcatctgcttttgccgcagacaccgccgtactgaaagttacgggcgttctgacaaatggcggttgcacccctgaaatcagcggcggcggcgtggtggattacggcacaatccacctgtcaagcctgaacgccgctacgattaaccagttgggccagaaagatttctctctttctattacctgccctgcgctgaccaaagcgggctttagcgtttctgacgatcgcagtggcactgcgccaaatattgcggttcaaaatggcgcgggtaacgggaatgatattgttcagccgggcaatatgtttggtctgaaccagaccgcagggaaagttaacattggtaactacactatttacgtgaaaaacagtacgattactgcggatagcaccaccgtatcggcgatctttagttctgacaatggcacctcctggtccaacactggtgcactgatggataataatggtactcaggttgtctccgttgctaccacgggtactactactccagttgcgtttaaaaatgtggtaatcccgatgaccgttgccgctgcgattcaggataccaatacgctggctattactgatgataccaacatggatggtcaggcaacgtttaccatcaagtatctgtaa

SEQ ID NO: 126803 - DNA, 681 bp, Enterobacter cloacae
atgaaaaaagttattcttgcgactgcgctgtctctttgtgttgcgtcagcgtttgctgctgataccgcagtgttgaaggtaaccggtaagctgacaaatgctgcatgtacgccagtattaagtaaaggtggcattgtagattatggctctatccatttaggcgatctttccccaaccgcagtaaaccagctgggtcagaaaaatatcgacctgactatcaactgcaccgctgcaacgaaagtagcgtggaatatggttgacgatcgtgctgattccaacgcaggtgtcactattgaaaagggtcagtataatggtggcgacattatcagctactctgataccgatcagacctacggcgtaggtaaaacagcgggcggcgtgaaaattggtgactactccatgtttgtcaatattgctagcgttgttgctgatggcaaaaatgttgataccattttaatggacaagggcgcgactgcctgggcaaagagctcgggccaaacccgtgctgctggcattcgtgacatgagcgttgcgacaactggcaccctggagccgctggcattcatcactgcaaccttcccactggttactgcgttggctattcaggataccaccaaactggctattactgacgataccaaacttgatggtcagctgactatcagcctgaaatatttataa

SEQ ID NO: 126804 - DNA, 144 bp, Enterobacter cloacae
atgttttttaatttatacgtgctgatggagcttttaaaaagtaaaaatcggaatctggcccagtgcattcgacacgctatttctgtcaggataatcaacgaaatgctttttggtgaatgccattcataccttttatgtatttaa

SEQ ID NO: 126805 - DNA, 459 bp, Enterobacter cloacae
atgaagaaaatattacttttactctgcatggtgtctgctgtagctaatgcgaaaccactcggccctgctgagcaggccgtgaagttcaataaatggtatgtcagtcagatagcaaaggacatttacccaatattggacgggaacgagatcgataaattcgtcacagcgtcaacgatgaaaaaactgcggcatacgcaggatccaggatacggagaagaaagtgacgtattttacgacgctgatttgtttttaaaggcccaggatattcgtgatgactggtcagcgaatgtcgccgccatcgctgtagattccgatccggtttgcgtgaacgtttacatcgcgttcggcaagaaacaggagcatgttgtcgttgactgcatggccaaagaaaacggggcgtggaaagtgcaatcagttacagctgcacagtacacgcgaaatgttgctggcgacaaatga

SEQ ID NO: 126806 - DNA, 210 bp, Enterobacter cloacae
atgttgctgttattgatgcgctacccggtgagaatcagcacgggcacgcatgcatttatgacggatccggaacctggtattccgatttcaaacaaagaacactctaccctggcccgacgtaccgaaaaattcagccaaaaatcacaatttacaggcatccgtaatgaagaaaatattacttttactctgcatggtgtctgctgtagctaa

SEQ ID NO: 126807 - DNA, 705 bp, Enterobacter cloacae
atgtctcagtctgagcgccgccatgagcgccttgcggtccggctgtcgctgattatcagccgtcttgtggcgggagaaacgctggtcatacagacactggccgccgaatttggcgtgtcagtacgcacattgcgtcgggattttcgcgagcgtctggcctatctcgatctggaattccgtaacgggcagtgtcgtctgctgtccggcagccgtcagagggagctgacggtgcagacctttgtccgtcagtccggtgtggaggcgctttttccggatatagacaaccaactggtcaactctctgttgagtgccagcgagtctccctgccttatctggcacagcaccaacgccagaacacaggcacggactgaagtttttacgcgactgattcgcgccatcactgaacaccgtcgggtaacgcttctggcagaaggccatcgttgcacaggtctggctccctatcgactggtgtgcagtgacggctgctggtacctgaccggcgaacatggaggacatattacggttttcacgctgggtgatattcacacggtcacattcaatccggcgctttttgtcccggatacacaggtacgtaacctgttgtcacaccccgattttcttcgggttttacctcactttcagactttccattcacttttcgttgtcggtgacgacggtttttcaccctttaaggagcaaagatga

SEQ ID NO: 126808 - DNA, 615 bp, Enterobacter cloacae
atgaaattactcactgcaaccacgctggcgctcagcctgtgcgtcggaacagttttgccagtagccgctgaaaatatcgtgggtacggttaaggcctggcagtacatgcaggcagatggctggaaatcagctgatggtctggacaaccatacccttagcaacgcgctgtatggtgccagagtgatcgataattatccctggacccggcaattcttgctacgtcagggatacaatggaggctattttctggccgataaaaatactaaaacggtacgcaaactggcgctcaaaacagccagtggttcttcctccgatttgacatctgtctaccagggtgagggaaaggcatgtggtttcgttctgattgatacacaggctgcattgcttgacgaggcacagcagcgagcgagtggaactgatgacccggcagagacagtgcgagtagcccgtacaaaatttcaaccaaacaccttgatagtcgtgcctgataactgtgtcaatcccaaacaacaggccgcgctggaggctaagcgctctcaaaaagacagggagctgcagcaatgggtggcaaagcagagtatggctgaactctgccgccgaaccggtaactgttga

SEQ ID NO: 126809 - DNA, 411 bp, Enterobacter cloacae
atgctaaaaatagcgacctctgttatcccggctttaattctctcgctcgcggctttcagcgccggtgccgcgcagcttccggaaagcctgatggataaagacaatcccggccaggaatactggtgccagggtaatgacattaacactaccgtctgctcattgactgatgtcagtaatgaccgtaagtttgccctgattcaggatctgcccggtccagcctgcgaagatttaagcttcggtgttattgacctggtatttaacaccggacttaacattccttatgacggcggtgactgcaaaggggatgtaaaggccgggtttgtgcgaggcacaaaagataatgccctgtatgtgaagattgtccggggcagcaaaactttgcgcctgtataaggtacagacgggtttctga

SEQ ID NO: 126810 - DNA, 369 bp, Enterobacter cloacae
atgaaaactttacctgctacaatttcgcgggcggcgaagccctgtctgtctccagtggctgtctggcaaatgctacttacacgcctgctggaaaaacactatggtctgaccctgaacgatacgccgttctgtgatcaaaccgttatacaggaacatatcgatgcgggtatcactctggctaatgccgttaactttctggtagaaaagtatgagttagtacgtatcgatcgcacaggatttacctcacaggaacaagcgccatatttgaccgtgacagatatccttcatgccaggagagcatgcggattaatgaacagttgttcgtatcgggaagtaagtaatattgttcttagccgatcgcggcagtga

SEQ ID NO: 126811 - DNA, 165 bp, Enterobacter cloacae
atgtcagcatacgatgaaattatgaacgcactcgccttctacttcggcgatggagaaggcctaaacccaagcgaggaaagcatccgtgaaattatcagccaggagcatgacccaattgagacgattgctaaagcgctagacgattaccgcgcatcgaagccatga

SEQ ID NO: 126812 - DNA, 240 bp, Enterobacter cloacae
atgttccagctaattcaacggggtcagatttacgctgaccagcacggttggcccgtcatcatccacagttgcacttctcagatagtccgctactggcgacagggccggatcaacacagcttcaatcgaccgttttaacaatgattttgagcacctcgatcaccgtgaggcggcgcagatacgcgccgaactggagacgagcgagcacattaaatcgctgcgtgcccagcgtgcggcatga

SEQ ID NO: 126813 - DNA, 348 bp, Enterobacter cloacae
atgagcaaatacagaaaaggcgcagtatatctccgcaaaatgaaagccggcgataaatcgaatgactttcgcacttatatgcgcatggcgatgttcagcgacaaaaaagcatggaaacaccccgagaagattaagcctgtcgtgctcgttcagtatgggatgaagaatatcgtaagtgtcttcatgaatatggatgacgcgaccggttgcctgttcagtggggcgattgaaaagcgtgcgcgtaactcccggcacaatccgcgccgcggcatgcgttacacaaaaggcgacctgaagaaagccttccgaaagtgggcattcaaacacaacgcggagcgcatcgcatga

SEQ ID NO: 126814 - DNA, 1476 bp, Enterobacter cloacae
atgacgcatgaccagggtggtgacgagattaaaacggacgatccagcttctgaactcacctgcaaccacgaagcgccgattgcagcttacggaattcctggcaactggataggccgcgctccggaaaacggtggtaatgcaactgagccaatggttgatgtttccccatgcctgactgtagctgaccgccacggagtagcctatgcctttgccgagaatagccatggagaagctcggcttcaggatggtgacgggggcattaccggcccgctttcaaccggaggcggcaagcctggacagggatatccggcagtggtcgcctttcaggagcgaggtcgcgctgatggtcgcagtctcgaaatcaacggggatctggcttacgcactgactgcgccgaacggtggcggccgagcacaggaacgcaatattgccgacttccgcactatggccgtgcgccgacttacgccgattgagtgcgagcgccttcagggctttccagataatcacactctgatcggctggcgcgggaaggatactgccgaatgcccggacgggccacgctataaagctatcggcaatagcatggcggtgccggttatgcgttggattggtgagcgtatcgccgcagcgctgccgattgaagaacctactccgcgaaactggcagcgcccgttcctgaaatgggctggcgggaaatattcactgcttccggaactggatcgcctgatccccgcggggaaacgcctcgttgagccattcgttgggggcggctcggtatttctcaactccgaaaaacacgaatctttcctgcttgctgacgtcaatgcagatctgattaacctctatcagatgcttgaagttgaccacatcagagtatgctcgcttgccaaaatattgtttgagcgcgccaacagtgaggtggcgtacaaagagcttcgggatgagtttaataaccagcgaatgggcgcgccggagcgcgcagcagcctttctcttcctcaatcgacactgctttaacggcctgattcgatacaaccgtgatggtttctttaatgttggctggggcaagtacgaagcgccctatttcccagagattgaaataaaggcttttaagcagaagtcgcataaatgcgtgttcctgaatgctggatatcgcagaaccctggcgctggccggtgaaggtgatgtggtttactgcgacccgccgtatgagccgttgcctggtaccgcaggtttcacaaattacgccgcaggcggtttctcatgggctgatcagatttcacttgcggaaagctgtgtagcagcacaccagcgaggcgcgaaagttcttatcaataactcaacagcgccacgagttcttgagctttatgagcagcacggattcatccttcaccatgttgatgcccggcgggcgatatccagcaagggcagtacgcgtgagacggcgaaggacatcgtcgccactttgggggtttaa

SEQ ID NO: 126815 - DNA, 435 bp, Enterobacter cloacae
atgcaatcgacgcaaagcgccgcgaacgcggtgagccagaatcaattattgtctgggaaaacgtccccggcgtgctcagcagcaaagacaatgccttcgggtgctttctggcagggcttgccggagaaagcagtgaattgcagccagcagggggaaaatggacgcacgcaggttgtgtgtctggaccagaaagggttattgcctggcgtgtccttgatgctcaatttttcggagtggcccaacgacgccgccgtgtgttcgttgtcgcaagtgctcgaaaagggttcgatcccgcagcggtactttttgagctcgacagcgtgcgccgggatactgcgccgcgccgagaaacgcaaaaggctgttgccgcccttactgcacgaggcgttggaacgtgtggcgcagacggcaaccaggcacaagctggacacctga

SEQ ID NO: 126816 - DNA, 282 bp, Enterobacter cloacae
atgaacgcatacctcacttacgaccgaatcgaagatcggcgctgggttgagcagcagctcaccgacgagaaggagaagtggatcgacaaccgggcgaaagaactgatcgccatgttcccgaaatatgctctgcaaatgagtagcctgtttcttccaaaagaagcgcaaatggcactagtcggtgaaaaggcagaggaagcctataacgactatatcactcgactttgctacgaccgcgcagaagaagagtgggatcgccttcatccaacctgcccgttttaa

SEQ ID NO: 126817 - DNA, 207 bp, Enterobacter cloacae
atgatcggaatgcactacggcaccgcatcagtgccacgcagcgaggttttaccgggcacaatgctgcaacaccacggtaaaacttatcgcgcctctgcgaacgttgagaaaggcctgtacgccttcaacatcttcgaaaaaaccatcatcaaaagtgattccatcgttgtgctgctgaatgagcgcggcgagccgatggttcactga

SEQ ID NO: 126818 - DNA, 162 bp, Enterobacter cloacae
atgatgacagtcacccacaacggcaagcagtacaccgccaaaaagctcaacgataacgagtggcaactgacgtcggtatcggcaccgcgggaaaagctcacacttaatcgccggcagatgcatatcgctggcatcctggaacaggttgaggtgaaggtatga

SEQ ID NO: 126819 - DNA, 198 bp, Enterobacter cloacae
atgagcaaagaacagccaatatcacgcctgactgagccagaaatggcaaaactcgcagttaagacggttcaggaatttgttaatgcctgccactgccaaaacgaagatgacgttcttctggcattaagcttctggctgaatgtgggcatggaagcgggtgagcttgtccagcatgggcataaggttgtcctgcaatga

SEQ ID NO: 126820 - DNA, 819 bp, Enterobacter cloacae
atgactacaccatgcctatacagcattgttagatatgcgccatatgcagaaaccgaagagtttgccaacgtcggtgtagttctttgtgccccgaaattagggcagtttcactttcaactgacgcaaggcaacaacgctagggtaaagaacttcttccaagacgagataattttccctcacgcaaaagatgcaattgcgagagagttaaagttcgcacaagaacaaagttgcaaattcaccacaccggagaggctggctaattttttcaactacttaattggaaaaaaggaatcaatcatacattttagccctgcgagagttgtgatgtctgattgtccgcaggacatgttggctgctctttttgataagtttgtaaaccattcagaagtaacaaaagaatctcgtgaggcaatactgactagagagctaaagaatcgtttctctcattataacgatcttaagaacgtcttcaaaaaagagacgcttggcggagagttaacgcgattttccttaccgtttgtcgctcgtcaagaagggcaaattttatgcgcgatcaaaccgctagcgttcgtacaagacaagcctgaaaagatgatggagcactgtgactcttggacagcaaaaattttacgtgccactagtgaaaaaattctatcgctctctaatgtgttatttacgatcgatgcacctcgccatccaaacgatcttgaggtcaaagcgatgcgtgaaattcgtaaaactttcaatgagaaaggcatcaatcatgttgagcatacagatgaagcatcgatagtaaaatttgctagacaagcaatttaa

SEQ ID NO: 126821 - DNA, 219 bp, Enterobacter cloacae
atggacatcatactcatcatcagttgtatcttgtgtgaacgccaggttatggtcaatcaggtaatacctattgttaacagcatcgaaaattatatttacattcccgccaatctcagtaagagaccgatctgcattgtttatccagcgatcaaagaaaaatattttcttttgatcctgtatgtttacagcgttacgggcttgttgaatgtttatcgttga

SEQ ID NO: 126822 - DNA, 654 bp, Enterobacter cloacae
atgaaatggtacgacttagctaaaaccctgatgaaaagtcagggcatcaatcaggaacagctggcggagcacctcggtattactaaaggtgcggtaagtcattggctgaacgctcggcgtgagccaagcctttccgagatcgcaaaaatattgcagttccttggcaaaaagaacttctccgtaggagctggcggtatgatcattgacgacacgcttaagggtgatgtggagtacgctggcccctacaatcctggtaacaagtatccagtaatcagcagtgtccaggctggttcatggtgcgaagcggttgagccatacaccctaaaagatatagatctgtggcttgagtcgaatgctcacattcagggtgacgcgttctggttgctcgttgagggcgagtcaatgacagcccctactggcttgagcatacctgaaggaacctatgtacttttcgacaccggtagagatgcggtaaatggcagtctggttatagctaagctatccgattcgaacgaggcgacctttaagaaactggtgatcgatggtgcacagaagtatttgaaaggtctcaaccctcagtggccacttgttgcgattaacggcaactgtcggattataggtgttgctgtagagacgaagctgcgcctagtttag

SEQ ID NO: 126823 - DNA, 219 bp, Enterobacter cloacae
atgaacaatatccgaaaaatccgcagaaacatcggtttgactcagcgacagattgccgaagagctgaacctgtcgacaggtgcggtttgccattacgaaaaaaataaacgcagcttaagccttgagcagtgccgggcgattgttgcagctctgaataagcatggcgcttcagtaagcgttgatgacgtttttccaccaatcagcaacaacgccgcctaa

SEQ ID NO: 126824 - DNA, 204 bp, Enterobacter cloacae
atgacacgcatccgtaactttggctggaatcgcctgaagctggccaccctgtcatacgacgaactcaatcagcttgaggagcaggtgaaactcgaacacgcctgcaaagacggcatccacatgtacgacaaagcaggtcgtgacaagctcgatgctctgagttgggccgtatacaacaagcagaagcgggaggccgcccaatga

SEQ ID NO: 126825 - DNA, 582 bp, Enterobacter cloacae
atgtttgagaatgaaatttggaagccggtgccggggtatgaaggccggtttgaggttagctctcttgctcgcgtccgtagcttgtctcgcaaagttactacgtgcgggcgcgataagaagacgtggaccactaggaccatcgccgggcggattcttaagggatgcacatcatcccaatacatcagggtatcgctttctaacaaacacgaaatgctacatcggttcgtggcgctcgcgtttgtgccaaatcctaataactacccgcacgttaaccacatcgatggaaataagcacaacaatctgccagagaatcttgagtggtgcacgcatgccatgaacatgaagcacgccaatgaaaccgggctatccaacaagaataaaatgcctgtaattgcagagagagatgggttcggatactggtttccatcaatgcaatcgaccaagaagtacggatgcaacccggcgttagtccacgcgtcgatcaacggaaagcagggtgagcacagggggatgcagtggagttattgctctgccacatccaactgcgagtaccagcagctgcgcgataagcaggaggcctga

SEQ ID NO: 126826 - DNA, 642 bp, Enterobacter cloacae
atggctaagttaccgcgccgcaagtgcgcccacaaatcgtgtcgtcagtggttccacccggtacgcgacgggcaagttgtttgcagctttgagtgcgccagcgcgattggcaaagaacagaccgcaaaagcccgtgaagccgccaagaagaaggaagcgcatcgccagcgcactgaagagaaggcaggccgccagcgccgtaaagcgcgattggcagagctcagacctaacggttactacaaggcgcaggctcagcaggcattcaacgcctacatccgtgcgcgtgatgctgatttgccatgcatcagctgcggcgagaccaatccgcctgatctgcatggcggccaatgggactgcggccacttcaaaacggtcggtgccaaccctgagctgcgctttgaagaacgcaacgcccataagcagtgcaaatcctgtaatgccggggctggtaagttcaccgccaaagaggcgacggtcgcgaagcaatacgaagctggcctgatcgctcgttacggccaggaatacgtcgactggctcaacggtccccacgaaatgaccaaataccgccgggaagacttcatccgcatccgcgatgagtaccgcgccaagctcaaagcactgaaacagcgggaggcagcatga

SEQ ID NO: 126827 - DNA, 516 bp, Enterobacter cloacae
atgagcagtgtaactccggcagaagtcggttcattctttttatctctggttgttccaatcaccactggggttgtggctgcaggatttactgcatttttcgctctgaatcgattttacaaagaaaaatggtgggagaagaaacatgctgcgtacaatcaattaattgataaattatttgaaatcaaagcaatttattcccacgcctcagatttttacgaggctgaatacaatgctggtatgtatggtaggccgccgccgaaagggtctgttgattggaatacattccatcaaataaaagcgcagctccatcggttttatgtgctcgcaccaatctctctaagcaataatacaagggatttgctcaataatttcttcaagcaggacgctgattccgatcatagtgtttacgaagagggttacccagattttgtggcatacaatgatatgacgattgcgactcagcaacttattgatgccattgtcttggacgctgaaaaagaacttaaatttaaataa

SEQ ID NO: 126828 - DNA, 402 bp, Enterobacter cloacae
atggcactcgtaaaggtattggtagcaaacctctttgccggtgccagccttcaaaagctggaggctggacaggtttatgacgtcgatgactcgattgctgaaaagtggatcgagcagggtaaggtggaaaaatcaactgacaagaagggtgagaagctcgtctttgaagtggcgacaccgtctgcgcccgtggcaaccggtgcatcagatttgcagtcaaaactcaatgaggcgttggctcaactggaacaggcccggtctgaaattgatgctaaggataaagggcatgccgaagtgattgagcaactgaagcaggaaagtgcagttaagttggacgctgaaacaaaacgtgctgacgcagctgaagcggcactggcagaagctatcaagaaggcgaaataa

SEQ ID NO: 126829 - DNA, 174 bp, Enterobacter cloacae
atgacgtacaaatcagttaagcacgggctaccgagctcgttcacccgcgtctgggtgatgaccgacaccgggcgggagactaccggctacgtgaaatcggatggcgagtggttcatcaactgcccgcgcatccgggcgactggcgcgaaggtgctgcgctggaaggagggatga

SEQ ID NO: 126830 - DNA, 357 bp, Enterobacter cloacae
atgtcgtctactgcgtcatggtcatacaacaagccgtgcacgatatggcgcaaaggtgcaggtggcaatgacgagtggggcgatcctgtcgacccatacgaaccgcctgaaaccatcatgtgcgactatatcggcggcctgtctgcaaagctcggttcaatcggtaaagaggttgtagtaaaaaacacctttttcacggcttacgctctggccgatgagggcgattacatcctgattggtgttagcgctgagccggacccggtcgtggctggtgccgatgaggttcgtcacgtgacgcgctggaacgatactctcgaaggtctggaagatgactgggcgataattacgggagtgtag

SEQ ID NO: 126831 - DNA, 369 bp, Enterobacter cloacae
atgggcatcaaagtgcgtggcgctgcacgcgtagagcgcaatttgaaccgcattctgaatgatattcagggtagaaaagtcattcgcgcactccaatcggcgatgattattggggcggcaagagcggccctctacacgccgatcgacacgtcagcacttttaaacagccagtttcgcgaaatagtaactgatggggtggtaatcaccggcagggtgggttactcaaccaactatgccgtttatgttcatgatccggctaacccgcagaggttccgccgttcaacggctaaaaaagaattcctcacacttggatttgaagaggaacgttctgcaatcgatgatgttgtgcgtaaggagctttcactatga

SEQ ID NO: 126832 - DNA, 384 bp, Enterobacter cloacae
atgacaccaatgatgcacgaacgggtcagaaatttgttcggcggcgccgggttgacgagtggctttatcatacagcaactgatgtttgacgacccgaaagacctgtcgaaggctgtaatggtttttcgtcccaatggaggagccaacatccgcaatgagctcggttccgagtatcacgtgctggtggatgtcatcggcgcaaaagataagagtaaggccgcagcggatgccgttcagcgtattgttgattacgtacaggataaccctataagcgatagctgcgtgggccacatcgaaaatatggggggcatcccgccgccggtattaaccgaagagggaaggatagttttccgccttcagttcgcttgcctctacggggagtaa

SEQ ID NO: 126833 - DNA, 762 bp, Enterobacter cloacae
atggcagcaaattgccctacggacaatacaaaacttttcggcagagccattgtactcgaagtggctgatggttgcgccgatgcagttccagcggaatcggagtggaaagctctggccgctggtacaagtaaaggtttcgatttctcgccgaacagcgttacttctgacgccgacgatactaaaggctatgtcgagaatatcgtgacgaacgccgacttcaccatctcatttgaaggtgaggtgcgccgtaatgacaaactcgaccaatacggggtcgggcgcctgattaagtattttaatactgagatccaggcggcacgccagcccactttgtgggtgcgcatggagttcgggccgataactttcatcggctacatgctgattaacgcgctcagctctgacggtggcagtaacgacattgtcacgttttccactgagttcaaggtggcagccgccgacactatccagatcgttgacaccgatgaagaagtgccgaccacaggtgtcaccgttacgcctaccagcgcatctgtagcggccggtgcttcgacaaccttcgccgtcaacgtagcgccagccgatgcgaccgataaaaccttcacggttacttcgtccgtaccggcgcgtgccacagcgactatcagcggaaacaccgtgacggtaaacgccccgtctggcgcgacggcgggcactgcgaatatcacagttaccaccactgacggctcattcacagcagtctttgcggtcaccgtaaccgtttag

SEQ ID NO: 126834 - DNA, 684 bp, Enterobacter cloacae
atgacaccaatgaaagagatcggtgagctgctgatcacctgcggcgaccgggatttctttttcaggccttcgttcgccaatatgaccagaattggcgacccgggtgagatagttgctgctttttatgctctccatcacgatgaagtctcagtccttctggaaagggctatgacgtcatacggacatatacctgagtggatcgttcagcacatcaaagattcaacctacggtcgggcggctatgcttgctgccggaacagtcctggaggcttgctgtgatgatgatatttctgtgctgatcggtgagttgcgaccagcgcgtattggtgggcgtccattcaagatgcgtcgcggcgaaatggacgagttcgatatggtggttattgctcagtctctgattactcacggcatcatcggaaaggcaaaggttcgcaagttgcagcgccatgagagtggcgaaaccacaaccgaatttaatgccttcgagtacatcagcgcggcacgtaatcacttcggcatgagccgggcggaagcagaacaattatccatgacggaatttcagctcttaatcgccgccaaatatccggaccagaaaggcttcacaaaagacgagtacgacgcagtcgcagatgactatctggcgaagaaagaaaaacgattagcccgggcgaaacgggccacctaa

SEQ ID NO: 126835 - DNA, 498 bp, Enterobacter cloacae
atgccaattatcgactatcccgactggctgccgctggcgcagaaggccagcaaaaacatgacgctcgataccgggttccagaccgatcagccagcggtcggcccggccatcttcgagaaccagaccgacgacctgaaagtgacctggtcactgacgtggatcttcaccctggcgcaggagcgcgcattccagcagtggctacgcagcccgaactatctcaaccggggcctgaactggttccggatgaatgtcaacctgggcggcagcggtctccagcagcaggagcttcacttcacgcagatgccggtgcaaaccagtatcgacggcggagtggtgacctggacgggaaccgttatctctaaccatctgtacaacgctgacgacgagttcgacgacatcattgttgagctgccgccgccttggtattcatggctggatatcgtggttacgggttatccggatgggcgcgatccggaaagtcttccgagggttccctga

SEQ ID NO: 126836 - DNA, 471 bp, Enterobacter cloacae
atgccatcgttccgtcaatataagcagcagcgcccgacgcgcggactgtacgacaccattacgttctaccatccatcctttggctacgtccgcttggtcgataagcagttcttcccgaagacgcttggcggccagacatactcgccagcgcgctttgaaatcgaagagagccagcagagcggtacgccggtaattgacgcgacggtgaagcttgggcggctgtcgtcggatatcaaagcgctgatgaaacagtggaagggtgcggccaggctgactgccatcacggccacgcggcagatcttcgacagcggcgacgtgtcggtgccgattaagtcgtggcagctttacgtcaagacggtggatatcgatgctgatgccgcatcggtcacgctctccgtcaccaaccctctgaataacaatattggtcgcctttatgatccagtcgagtacacgggacttcagtacctctga

SEQ ID NO: 126837 - DNA, 753 bp, Enterobacter cloacae
gtggttgaggtgaaaaaatattataaaggaagtgttgattttattgcaggtgaagggactattctcaatgagttcataggagaggtagccacgcgacaaataaatattatagatggtaattattatgcttcttcctctttgctagataaaaatgaaaaagttggcttcctgctgtatgatggtaagaaaagcgacctggacttaagtgacgccgaagaaatttcgaatgaggaatttgaagttttctggcaaacatcaacgagttcattgcaagaaaaaaagcgaataaaatacttgtttggagatgctgtggaacctttgaaaaaatccacagttattgctcatattgtgaataataaagggaagtggggtaaaggttttgttctgtccctttcaaataaatatcctgcggcaaaaaaaagctatcttagtagcttcaaagaaaataactccccagaattaggggtggttgattttgttatggttgatgctcaggagaagatatttattgctaatatgtatgcgcaggatggtataaagaaaaatatcaacgacaaaaaacaatacgtatgttatgactctctggaagtttgtcttgaaaaattatctgactttgctttagtgaatcgcctttctgtacaaatgccaaggataggagctggcctcggtggtggtgattggaatgttatagagtcattaatactaaaaaatatttgctataaaatgattgattgcaatgtaataaatttatga

SEQ ID NO: 126838 - DNA, 351 bp, Enterobacter cloacae
gtgagtgaagagcgggacgataacccgttcagctggtaccgctggcattaccgctacgacggcgagcatcgcctgacggaggttatcagccagccgcgggaccgcaacaggccgcagacgcaggtcagcttccgctatgacccgctcgggcgtcgcatcagcaaaacgcgccgccagatgctgtttgggcagccgaccggcaagccagtcaccacccggtttgtctgggaagggttccggctgttgcaggaggtgcacggggatgtgccgctgacctacgtctacagcgatcaggacagctacgatccgctggcacgtattgacggcgttgatgccccggaaatcttctag

SEQ ID NO: 126839 - DNA, 4371 bp, Enterobacter cloacae
atgagcgataacaacgcggcccgtaagggcgacgagattattcactccagcatttttgctgatataaccagcattgtggcggaaggtgccgcctatgcggtgattggcgcggcggtgggcgcggcagcgaccgtcgcggccccactgctgggagccggggccgcagcggcaggcgtggcggcgattggatccagctgtctgttgagcggcattatcggcggggttctggcgaacgtcgccgggatcaccgacgatatcagcaacgccgctgaagggctgggtaacgcgcttttcccgccgtcgcccgcgggcaaaatcaccaccggttcgagcaacgttctgacaaataaacttcccgctgcacgcgcagccgggacgttaacgcctgccgataccccgtccccggagcctcagtcgccgggcagctttgccgactatgcgggcatgctgctctccgctgccggacagttcggcagcgagatgtggcagcccagcgtcgcctctgccgccgcggggacctcgccactggaagaagacaaggtggcgtgtgataaacactccgggccgcagtatctggcggaaggctcgaaaagcgtcttcattaacggacagcctgcggtgcgcgcaaaagatcgcaccacctgcgagggcaccgtttccgacgacgtctcccctaacgtgatcatcggcggtgacacgctcacggtccgcgacatcaaaagcggcaaaacgccgggtctggcgctggggatgattgcgctctccctgctgcgcgggcgtcctggcaagatcctgaaaaacatgccctgcgcgctggctgctgccggtggcgggatgctggcggatatggctgtcaacgccgtgttcggctcctcgcacccggttcacgccgccactggcgtgaaggtgctgaatgacgacgacgaactcgatttctcgctgccggggcgctttccgctgcgctggcaacgcagctacaacagcctgaccacccgccaagggctgtttggtctgggctgggctaccacttttgacagctatctgacgctggaagaaaacaacgccacctggttcgatgaaaccgggcgcgagctgagctttgaactgccgccggtcgaccgcgcgttttacagcatcagcgaaggcatcattatccgccgcaatgagagcggcgacgtggcgatagctgacgatgacggcgcggtgtggcgtctgtataaaccgacccgcgctaacccctccatcctgcgcctggcctccctcagcgacgagtacggcaacgcgttgctgacggaatgggatgagcacgggcggctggtcggtctgcacgatgagccgcgagcgatcgatgtcaccctgcgctatgacgatgaacgtttcccgcagcgcgttaccgctgccagccattttgacggcaaccagacatggccgctgatgcattgggggtacgacgcgcgcggccagctggccagcgcaacggatgcctccggcgtagtaacccgtgaataccgttataacgatgatggactgatggtctggcaccgtctgccgggtgggctggagagcgaataccgctggcaaaaatttgaccactggcgcgtggtggaaaaccgcaccagcaccggcgacggctgtcgctttagctacgatttagccgccgggctgacgaccgtcgatcactacgacggtcagacgcgaaagcattactggaacgcgcaaaacctgattgttcgctacgttgacgagcgcggtgagaactggcgctacgagtgggatgacaacgaactcctcacgcgtcgcatcgatccgctgggtaatgccgttactttcgtctatgacgagatgggcaaccgggtgcaggagatcgacgccgatggcaatactcgcaccaccacctggctggagcaccgtgcgcttccggcgtccatcatcgaagccgacggtagcgccacccggttcctgtatgacgaacatcatgggctgaaacgcgtggtggatccgatggggcagaccacgatgctgcgtcgggacgagtttggtcaggtggttgaagaagttgatgccgccgggaacagccgctaccaggagtacaacgaagccgggcagatggtgcgtgcgacggactgttcgggccgtgtgacacaataccgttatcatccgctgggctggctggtggctgagatccgcgccgacggcgaagagacgcgttaccgctacgacgccgcggggcgtccggtgcagctcgaccgaccagaaggctggaccgagtcgctcaaatggaacgaacgtggcctgccggtgaagcatgcgggcgccgacgggaaagagagcgagttcagatacgacgaggcagggcgcttaaccgccacccgtaatacgcagggtgaagaggtgcaccgccgctgggacagccgcgggcgtctgattgccctggaaaacgaaaacggcgaagcgtatcagttccgctggggcgcggactcgctactgctggaagaggtagggcttgatggcgtggcctcgcagtatcgctacgatgcctgcgggcgtacgatagcgcgcacctttgccgccggacatccggaggccattacccatgccttcgcctggagcgcgagcggccagctggtcgcccgcaccacgccggaggggcagacccgctaccactacaccccgtccggacttttgagccggattgggctgcatcccgcgctttcagccgatgcctggagcgccgaggccgagcaggagcttgtgtttgagtatgacgcgctcgggcgcgtcacgcgcgaaacgggcgagcacggggagctggcgtgggagtatgacgcgctgggtaaccgcacctccgtcacgctgcccgatggtcgggagctgaaacagttctactacggcagcgggcatctgctcagcatcgcgcttgataagctctcggtctccgactttacccgcgacgaactccaccgtgaaaccagccgtacgcaggggctgcttaccacacgcagcgaatacgatcgtcttggacgactgcatcgccgggacgtctttaccggcaatgcgcagcgcccgtcgccgcgccgctggtcccgccgctgggattacgactaccgcaataacctggtgcgtgaagagcgggacgataacccgttcagctggtaccgctggcagtacgacagcaccgggcgcctgctcgttcaggacggcacgctgcctggccaggagcagtggcgctgggatgcagccggtaacccgctcgaaggctctgctgagaaggtcacgcacaaccgtctgacgcacctcaacggcattcgctggcgctatgacatccacggccgcaccgtggagaaggataacggccagacccgctggcactaccgctacgacggcgagcaccgcctgacggaggtcatcagccagccgcgggaccgcaacaggccgcagacgcaggtcagcttccgctatgacccgctcgggcgacgcatcagcaaaacgcgacgccagatgctgtttgggcagccgaccggcaagccggtcaccacccggtttgtctgggaagggttccggctgttgcaggaagtgcacggggatgtgccgctgacctacgtctacagcgatcaggacagctacgatccgctggcgcgtatcgacggcgttgatgccccggaaatcttctggttccactgccagcccaacggcacgccggagcggatgacggatagcgaagggcaggtgcgctgggaaggcgtgaacagcgcctggggcaagctgctgcgggaaagcgagacgcaggtatcaggatattcccagaacctgcgtatgcaggggcaatacctggaccgtgagacagggctgcactacaatctgttccggtattacgacccggactgcggaaggtttacgcagcatgacccgatagggctggcgggggggataaacctttaccagtatgcgccgaatgcgctggggtgggtggatccgtgggggttggcattaaagggagtcgactttacaggaagcccagatcttttcccaatcaatggaacgaaacaaaacattgtatctattacaatgcaaggaactcgagatagagatttcaccgaggctttcaaggcagccggtatctctaaaagtgaagcaaccggatatacatggcatcatgtcgatgattttgacccagccacaggaaggacaacaatgcaattagtaaaaacttctgcgcatgaagctactttcccacataaaggctcagtctcacaattcgagaaatattttggtgtaaaatatggttcccaagaagccattgctgtttcccattctaaaggctggttgaaggggcgtgttccgaaaaaattgcgtgcaaactgtcaccagtga

SEQ ID NO: 126840 - DNA, 2562 bp, Enterobacter cloacae
atgctcaaccgaattaccgttcagctcccggttgaggggctgctcttctggaaactctccggccgcgaggccatgtccgagtcgttcgcgctgacgctgacccttctcggcacggacgcgcgcattgaccgcagcaggctgctgggccagccggtcacggtgactatccccacgcagaacctgcttaccccccgctatatcaacggcaaggtgacgcgcgtggcggtgagcgccgtggagctgacgggcacccgttacgcggtgtaccagctgacggtggagccggacctgtggccgatgaagcgcgaccgtaacctgcgtatcttccagggccagacggtaccgcagattgtcaaaatcctgctggctgaacatcaggttaacgttgaggataaacttaccggcagctaccgggtgtgggactactgcgtgcagtatcaggagtcgagcctggacttcatcagccgcctgatggagctggaggggattgcgtactacttcagccacgaggcggacaagcataccctggtactgaccgacgccgcgacgcagcatcagccgttcagcggctatgaggtcattccttaccatcagacgccgtccggcggcagtacggatgaagagggcatcagccagtgggcgctggaggacagcgtcacgccggggatttacagcctcgacgactatgacttccgcaagccgaacgcgtggcttttccaggcgcagcagaacccggcgtcaccgaaaccgggcagcatcgacgtgtacgactggccggggcgctttgtcgacaaagggcacggagagttctatgcccgtatccgtcaggagcgctggcaggtggagcatcagcagattcaggcaaccgccacggcagcgggcattgcgccgggccacacctttaccctgaccaacgcgccgttcttcagtgacaacggggagtatctggtgacggcggcgggctatcacttcgaggagaaccgctacgcgagcggcgagggggaaaccattcaccgcaccgatttcaccgttatcccggcgtcggtgtcgtaccgtccggcgcagagcacggcgtggccgcgcacctacggcccgcagaccgcgaaagtcgtgggaccgcagggggaaagtatctggacggataaatatggccgcgtgaaggtgaagttccactgggaccgtctggcgaagggcgatgacaccagctcttgctgggtgcgcgtgtcaagcgcctgggcgggccagggctacggcggggtgcagatcccgcgcgtcggcgatgaggtggtggtggactttatcaacggcgacccggaccgtccgattatcactggtcgtgtctataacgaagcaagcatgccgccgtgggcgctgccggctgccgcgacgcagatgggctttatgagccggacgaaggacggctccgtggacaacgccaacgccctgcgctttgaggacaaggcgggcgcagagcaggtgtggatccaggccgaacgcaacatggacaccagcgttaaaaatgatgaaacgcacaccgtcggcggcgcgcgcagtcattacgtgaagaaaaatgagctgcatcgtgttgaagcgaaccagatccaggcggtgaaaggtgggaccgaaatcctgacgggcaaaggcaagctggatgcggcggtggagcagtatgtcattgcttccgggacgaagctgaggctggtctcaggtgagagtgctattgagcttaacgctaacggcaagattaacctgatcggcaaagagtttaacttcttcgttgagggcgatgggtatatcaccacgggcggtaagctgcatctgaatacctctggcactaaacctggcacaacggcaccggggtcgggacataaaggggatattgatgcagctgtgcaggagaagttttcgcctgaacaaagaaagaaaggggcaggagcgtctcctgtgccatcagagtctgcaacgaaaccagcacctcaagctacagcaagtaatgccacttcagcaccaccgactcaaggtgaggacaagttttcaaagatctcacctattattttccagaatgaaggcggatacgttaatgaccctaacgactccgggggagctaccaataaaggaattgcgtggaaaacatggcagaaatatgccaaggaagatcttggcgttgaacccacattggataacctaaaaaatttaaccaatgaacaagctgagacaatttaccgtaaacgttactgggagccgtctggatttaacaatcttaatgatcctaaactcgcactaatgtcttatgattggaccataacctccggcggagccggtaaacaaatccaaaaattgctgaacaatgagtttggccagcagttgattgcagatgggaaaatagggcctaagacaatagaagcaatgaacagcgtaagcgactcagcgaaacttacgtccagaatagcggacatccgtaaagagtattatgaaaatcttgtggtaaataattccaaaaatgctaagtttttgacaggttggttaaatcgagttgatcggtgtgcacaggtggctttgtaa

SEQ ID NO: 126841 - DNA, 171 bp, Enterobacter cloacae
atgatagcgctgaaacgtttcaagaagtcttgtcttttctacaaaaggttgcaagaaaagttacatttcttgttgcagaatttagaagtgcagcacatttcttcttcagtcgggaggtttttgctgatgttcagcaaacaggttcagcacgcttcagcgaaacggcgataa

SEQ ID NO: 126842 - DNA, 267 bp, Enterobacter cloacae; identical to SEQ ID NO: 11114

SEQ ID NO: 126843 - DNA, 441 bp, Enterobacter cloacae
atgaatacagaaatcaatttctccgagttctatagcgaactatctctcaatcccgatctcctaaccctcgtcgagcgctgtaatctgctcactgaaatcctgctggactgcaattcgctcccgcaaacgcagcccgtttgccgttgcctcggtgcttatctggaagaagtcaaaaccgaactcgcagaatcaatgagcgatttccgggtggttgaatttgacgacgaggcggaacggccaaaggaaaaagagtggcttctggaaagtactgaaaccaaatgcgattactgccgggcattaaaccacgtgctgctggtgtcgcattttgaccgcgagatgctgccccatctgacaggattgctgcatgacattacacattcgatggcgacagatgtggctgcacctgaatatggaaagcctgtaatccatatcattaattaa

SEQ ID NO: 126844 - DNA, 1311 bp, Enterobacter cloacae
atgtcaggagaagcactaagcgctttcatcgctgagtatattgccggacgacggcaaacaaagctggaagcatttgataaagaggccgcaaagcgcagcgatacagatagcgcaacgcttgcggcagaacgccgggagctggagcttcgctatgaaccgaaagcatggctgacggatgccgcgaagcgggccggacaaattaacctcgtgacccatgcggcgaaatttacccacggggattcaaaaagtagcagtatttacagcgaggcagtggcgcaggaagggtatctcagcaccgctgcgttgtcaggtctggatacagacgcggtgggaaacgctgcggcgctggatgttgcaaagctgctgcaaacgcgggtagacggtggcgactcccttctggcaagcctgaaacggggcgatcacgctgcgctggccgcttttgccgatggcgagaatcaactgagggagtggattgcggggttttcccgtgcgttaacccccggagaacccgcttcgcacaagctggcgaaacaggggtattttccggtaggggaaggttatcacctcttaagcccgttattcgctacctcgcttgtacacgccatgcatcagaaaatgattgccttccgttttggcgatgaagttaaagccatctggaaagcacgtcgcgagaaaacatggcatcccgctccgctgacgctattcccggatgcggcggaaatacacttcggcggtactaaaccgcaaaatatttcctatctcaacagcgtgcgcggtgggcggtgctggctactttcctgtcagcctccgcaggggaaaagagcagaaaaggcgccaacaaatctacgttctgttttcacctcgggtgggcagtttgaccgtcgtgccaggagtcaaattcagttgctggtttccttgctcacgaaaacgggcagttacaccagttttcgtattcgcgaggctcgtgatggttatatcaatatgcttatcgatctgctgttcgaaattgcatctgaacttcaacgcgaagcctggcaaaattggacgcttaactgccccaatctgaaacctcatcaacagctttggctcgatccctggcgcacaaaaacagacgaagccttccgacttgagagagaaaagggcgactggcagggcgcagtggcagaagatttttccctgtggctgaacgcacgtctgcgcaaggcgatgccggatttaggtgccgtggaaaaacgtgaatgggaaactcgcgaacgtttacgctctaacctccgcgagatggaaaaaatcattcaggaggcgctgaaatga

SEQ ID NO: 126845 - DNA, 555 bp, Enterobacter cloacae
atggatcactatattgagatccgcgtgctgcccgacccggagtttaccgaggagatgctaatggccgcgctgatggccaaactacatcgtgcgctgggtcagcgagggaaaggggatattggcgttagcttccctgcgcacggtattaagcccggcgcggtattacgcctacacggcgaacacctggcgttaagcgaactcgaatcgctggcatggcgaaaaggtctgagcgattactgtctgtgctcggcagttaaagccgtgccagaggtatatcactggcgatgcgtatcccgcgttcaggtgaaaagcagcgcgccgcggcttatgcgtcgttcggtaaaaaaaggttggataaccgaagaagaggcgcagcaaaggatacgcacaatggaggaagcgaggaccgatttgccctggctcaatttacgtagcctctcgacgggccagtctttcaggctttttatccgtcatggtgagttgctttccgcacctgtggttggcatgttttcaacctacggactcagcgcgacagcgacagttccctggttctga

SEQ ID NO: 126846 - DNA, 3054 bp, Enterobacter cloacae
gtgagcgaataccctgacgtcgtgccgccaagcgtgcaggtgcgcgccgagtacccgggcgccaacccgaaagtgattgccgagaccgtggcaaccccgctggaagaggcgatcaacggcgttgagaacatgatgtacatgaaatccgtcgcgggctccgacggcgtgctggtgactaccgtcaccttccgtccgggcaccgacccggatcaggcgcaggttcaggtgcaaaaccgcgtcgcgcaggccgaagcgcgtctgccggaggacgtgcgacgtctgggcatcacgactcagaaacagtcgccaacgctgacgctggtggtgcatctgttttcgcctggcggtaagtacgattcactgtatatgcgtaactacgccacgctgaaggtgaaggacgagctggcgcgtctgcccggcgtggggcagattcagattttcggctcgggcgaatacgcgatgcgcgtctggctggacccgaacaaggtcgcggcccgcgggctgaccgcttcggacgtggtcacggcgatgcaggagcagaacgtgcaggtgtccgccgggcagcttggcgccgagccgctgccgaaagagagcgatttcctgatctccattaacgcccagggccgcctgcataccgaagacgagttcggcaacattgtcctgaaaaccacgcaggatggtacggtcgttcgtctgcgcgacgtggcgcgtgtcgagatggggtccggcagctacgcgctgcgctcccagctgaacaataaagacgcggtcgggattggtatcttccagtcgccgggggcaaacgccatcgatctgtctaacgcggtgcgcgccaaaatggacgaactgtccacgcggttcccggacgatatgaaatgggcggcgccttacgacccgacggtatttgtacgcgactcgatccgcgcggtggtgcaaacgctgcttgaagcggtggtgctggtcgtgctggtggtgatcctgttcctgcaaacctggcgcgcgtcgattatcccgctgattgcggtgccggtatcggtagtgggcacgttcagtattctctacctgctgggcttttcgctgaataccctgagcctgttcgggctggtgctggcgattggtatcgtggtggacgatgccatcgtggtggtggaaaacgtcgaacgaaatatcgaagaggggctcgccccacttgcggcagcgcatcaggcgatgcgtgaagtgtccgggccaattatcgccattgcgctggtgctgtgtgcggtattcgttccgatggcattcctctccggcgtgaccggtcagttttacaaacagtttgcggtaacgatagccatttccacggtgatctccgccatcaactcgctgacgctctcgccagcgctggccgcgctgctgttgaagccgcatggcgccccgaaagatttcccgacccggcttatcgatcgtctgttcggctggattttccgtccgtttaaccgctttttccaccgcagctcgactggctatcaggggctggtgggcaaaacgctcggccgacgcggggcggtgattgtggtttatttactgctgctttgcgctgcgggcgtgatgtttaaagccgttcccggcgggtttattccgacgcaggataagctgtacctgattggcggcgtgaaaatgccggaaggctcgtcgctggcgcgcaccgatgcggtgatccgcaagatgagcgaaatcgggatgaataccgaaggcgtggattatgcggtcgcgtttcctggcctgaatgcgctccagttcaccaacacgccgaacaccgggacggtcttctttggcctgaagccgttcgaccagcgtaaacatactgcggcggaaataaacgcggagatcaacgcgaaaatcgcgcaaatccagcagggctttggcttctcgattctgccgccgccgattttaggtctgggccagggatcgggctattcgctgtatattcaggatcgtgctggtctgggctatggcgcgctgcaaaacgcggtgaacaccatgtccggggcgattatgcagacgccggggatgcatttccctatctcaacctaccaggcaaacgttccgcagctggatgtacaggttgaccgtgataaggcgaaagcgcagggcgtgtcgctcaccgatctcttcgggacgctgcaaacctatctgggctcgtcttatgtgaatgacttcaaccagttcggtcgcacctggcgcgtaatggcacaggccgacgggcagttccgcgacagcgtggaagatatcgcgaatttacgcacccgtaatagccagggtgaaatggtgccgattggcagtatggtgaaaatcacgaccacctacggtccggacccggtgatccgctacaacggctacccggcggcggatctgattggcgatgccgacccgcgcgtgctctcttccgcgcaggcgatgacgcagctggacgctatgtctaagcagatcctgccgaacgggatgaatattgaatggacggacctgagcttccagcaggccacccagggcaacacggcgctgatcgtcttcccggtcgcggtgctgctggcgttcctggtgctggcggcgctgtatgaaagctggacgctgccgctggcggtgatcctcatcgtgccgatgacgatgctctctgcgctgttcggcgtctggctgaccggtggcgataataacgtgttcgtgcaggtagggctggttgtgctgatggggctggcctgtaaaaacgcgattcttatcgtggagtttgcccgcgagctggaaattcagggcaaaggcattatggaggccgcgctggaagcgtgccgcctgcgtctacgcccgattgtaatgacctctatcgcctttattgccgggaccattccactgatccttggtcacggggcaggggcagaagtgcgcggcgtcaccgggatcaccgtgttcgccgggatgctgggcgtgacgctgtttggtctgttcctgacgccggtcttttacgtgacgctgcgtaagttcgtgacgcgcggtaaagcggaaagagaggtgttgcctgcgtag

SEQ ID NO: 126847 - DNA, 483 bp, Enterobacter cloacae
atgatctggtcattcgtcaaagcgtactggaaacagttgcttatcgtggcgatgcttgctgctctggtcatcgtcggagttgttgcgtggaatgtacacggcagccgccagtacgatgccgggtatgcacaggcacaggcagaccgcaaagcagaggatgagaaagctcgtcagcaggacgaacaggagaaatcgaccaatgaacgtgaagcgcagcagaggatcgaccaggcgcgcaacgatgctcttgatgctgccgctcgcgctggccggttgcagcaacagctcgttgccatccgtgagcagctcaggcagtataacgccactgtcggcgctggggcgtcagccgcagacaccggagttttgcttgccgacgtgctcagcaaatctctcgagcgaaaccgacaactggcagagtacgctgaccgggccgcagaagccggacgagtctgtgaaaagcagtacgattcgctgacccggtga

SEQ ID NO: 126848 - DNA, 630 bp, Enterobacter cloacae
atggacattaatcaatttcgccgcgccgccggcattaccgagcaactggccgcgcgctggttcccgcatatcaccgctgccatgaaagagtttggcattgaagcgccagcgcaccaggcgatgtttatcgcgcaggtgggccatgaatcgacagggttcacacggcttcaggagaacttcaactacagcgtaaccgggctggcaggattcgtccgtgccgggcgtctcactcatggccaggccaacgcgctgggccgccgtgctggtgagccatcgttaccgctggagcgccagcgtgcgatcgccaaccgggtatacagcaaacgtaatgggaacaatggcccgactgacggctggttctatcgcgggcgcgggcttatccagatcaccggcctgaacaactaccgcgactgtggcaacgggctcaaaattgagctggttagccagcctgaactgctggcgcaggacgaatatgcggcccgcagcgcggcgtggttcttcgccaccaaaggctgcatgaagtacaccggtgacctggtgcgcgtcacgcagatcatcaatggcgggcagaacggtatcgacgaccgacgagcgcggtacatcaccgccagtaaggtgctggcggtatga

SEQ ID NO: 126849 - DNA, 294 bp, Enterobacter cloacae
atgaccagtcctgaactgcttctcatcctgaacgccgctatctgcggcggcattgcaatccgagtcctgctattccgccgtgacgggtcacgccatcgctggtggggtggatggctcgcctacctgctgatcgtcgtggctgccagcgtacccatccggacgttctacgggtactacgtcagcgccgactggtcagaagtcatcatcaaagctgtgttcctggctgcgctcatcaagacaaaagggaacgtggtgcaaattttcaagataacgaggtcccagcatggacattaa

SEQ ID NO: 126850 - DNA, 405 bp, Enterobacter cloacae
atgtcgcactcgttaaccacggaatcgctgaatcaggggcttagcctgagcgcgctaatgtctgtggtcgcgggtgtgccgccggaggtggctttaggggcgctcgctggtgcggtaatttttgttacctcagcggtggaatatcccataaagcggcggttacttctggcgttcctcagcttcttctgcggccttctattctacaaagcgacagcatccattcttatcggtattgccagcatgatccccacgattacacaggactctttcgagaagggcatcgtgttttctgccggggcgttcgtgtcagcaatcgtcgctgttcgcattggcatctggctgtatcaccgttctgaaaatccgcgcgacctgatcccggggagaaaagacgatgaccagtcctga

SEQ ID NO: 126851 - DNA, 918 bp, Enterobacter cloacae
atgaaaatttctctggtcgttcccgtcttcaacgaagaagacgcaataccgattttttataaaacggttcgggaatttgaagggcttcagcagcatgaggtcgagatagtattcataaatgacggcagcaaagacgcgacagaatcaattataaacgcgcttgctgtttcagatccgcttgtggtgccgctgtcgttcactcgcaactttggaaaagagccagctctattcgccgggcttgatcgtgccaccggagaagcgattatcccgattgacgtcgaccttcaagaccccatcgaagttattcctcacctgattgagaagtggcaggctggcgctgatatggttctggctaaacgctctgatcgctctacagatggacgactgaagcgcataaccgctgagtggttctataagctgcacaacaaaatcagcaatccaaagatcgaagaaaatgttggagatttccgcctgatgtctcgtgaggtagtggaaaacattaagctcatgccagagcgtaacctctttatgaagggcgtattaagctgggttggcgggcgtactgatgttgtcgaatatgctcgcgcagaacgggttgctggcagcacgaaatttaatggctggaaactgtggaaccttgccctggaggggattaccagcttctctactttcccgcttcgcatgtggacatacatcggcctgttcgttgccggtgctgcgtttttgtatggcgcatggatgattttggataccattatttttggtaatgctgttcgcggatatccttccctgcttgtttcaatactttttttgggaggaattcagttgataggaattggagtccttggagagtatatcggaaggatttacgtggaagttaagaatagacctcgttacgtgctgaagggaagaaaatga

SEQ ID NO: 126852 - DNA, 1233 bp, Enterobacter cloacae
atgaaaaagtatttagaccctatcgcatatattgccatctttgcgatggtttgggcagtaagttatctttcaccaatgcaatcagatgattatgcattctacaatcttggatttagcattgaaaagcatattgccatgtatatgggatggagcggcagatacatagtagactatattagtccgatgattctttttgctaaatctaaagcgataagtgcaactgtcaccgcgacagttagcacgcttctgatgcatgttattaggagaatagctcatggcgggactgctatattctgcttaatagcggtatcattctttatttttaacccttccatagggcaaaataccttttgggtagtagggtttgtcaattatctaataccttcattacttttaatgctcttgtgcaataatttaatgaaaggtgcaaaatttaccatacatcaagctgcgttaggttttttagctggcgcatcgaatgagtcagtggcggtgctttctgtaggatttatcgtttgtcatagtatattgtcagtcataaacaagcgtttcgttgtcaaagatttagctctattgccatttgtccttattggttctgcttccatgcttttggcacctggaaacgcagcaagagcgtccggaccttcattcagctcatggtattcaaaagaattaactgaaagaatctactttcatatgcttgaccggatgccggagatgttcgtgcagtatggggcgctaatcatcgtcatcatgatatcgatgtttattttgtcatcattatcaatactgcatgataaaacaaaaatacaatacgcctttatattttttgctcttgctattggctcgaacgtaattatgtttgcagcaccttactatccgcaaagagctatgactacgggatttattttacttctcgcatgtctggcactggtaatttcttcatttgaagaaaagtcttccagaatctatacagcagtaacctttgtagctttaacacctatttttttgattgattattgcatgttgtcatcatattacatagatataaacaatcaatatttgaacagagttgcaatgatagagaaaggaattaattcggagaaaaaagtaattacggttccaaaatataatgaaaagaacactttcaggttaggggatcgccttgataagttccataaccctaaagccgctggagaatactacggtattgagtacatttaccagaaataa

SEQ ID NO: 126853 - DNA, 2676 bp, Enterobacter cloacae
atgacggtatcaaccgtagttgaccataacgattacacggggaacggcgttacgacatccttcccgtacacgttccgcatattcaaaaaaacagatcttgctgtatcagttgtagatctcaacgaaaacatcacagtcctggttctggatactgactatacggttacgaacgcaggaggatacagcggcggtaatgtggttctcaccactccgttgacaaatggctggaagatttccattgccagagaactggagccgacgcaggaaaccgacctgcgcaaccagggcaagttcttcgctgaggtgcatgaagatgcctttgacaagctgactatgctgatccagcaggcatacagtttgttccgcctggctcttcgcaagccatcgagcatcgcgaactggtacgacgcactgaacaactacattcgaaatttacgcgatccgagagacccgcaagatgcggccaccaaaaactatgttgatacgctggcaaacaacaatctaaatcgcacgttacgcgttcctgagccaataccttcattgccagatgcagctacaagggctaataaaattgtcgcctttgatagtgcaggcaatccattccctgttcttccaccatcaggatcagcatcagacgttcttattgagctggcgaagccaacaggctcatcaaagattggttacggcgatcgcactgtagaagataaacttaatgagcttaagacgccatttgacttcggcgctaaaggggacggagttacagacgacactattgccttacaggcatacatcgatagcgtggacggtgacattgatttatatgggaaaacataccttgttagcaaaaacccagcgcttgctgacacctatcctaccgagccagatttagccaacaatggatacaacttctgtccatgcctagcaatagtaaacaaaactaataagaaaatttccaacggtacactggtaagtaaggtatttgggcaatcagtaatttctataatcaatagttcaggtattgaactaagtggtcttaaaattatcggctttggtaagtttccagcgatagaccatccaagtggttatgctgagaaggggtatgcctcaggcggatataacacagtcgatggaggaatgctattcggaacaaataacgctattgcaacgggaaattataatcttggtaagtataatggtttgccaggacagtttcctgtttatgattcatcttggaatccaactggtacttatcgttcaacttggggggggtttggaggcggtaatattggaagttatgcttgcggagtaactatacagcgagcatgcaaatttataattattgaaaactgtgaaatctacggctttaatgatgcctctattagtgttggcattaaaaatgcagtaaacactactggctttacggactattcaacagattcagatgtgcctagaagtgttaatgtaaaagattgttatttacatgattgctataatgctggggttcatgtttgctctggttataatatagtttatgactctcttagagtggaaaatattggtcatccaaatgctgatgatgcagcagatacagacataaatcccggatatggtgttactacatcaagatttaagaatattagaaatattacttgtgtgaacagcttcttttttaattgcaagagaaaatcaatcgacttccacgctggaggtcagctgattgttgatggtaacttttgcatgagaactggtgtgaatggcatatattttgaggcgggttttggttgggataatggatacgagccatacaacgtcattgttactaacaactatattgttaccagggcattaggtgttgttggtgctggtgggatctctatggtgggtaatggttctgctcttgcagagtcatatccgtatccttttttaaagtgcaacaacaactatgttgaggtgagggcatcaaacggtgtagggatcagtaacggatataataataacgattaccattatgaggatataaatatttgtgataatactgttgtatataaatctgatacctacactcctggtaattttgttgggataagatgcaaccttaacacatcctctgggacgcttttaccaaaacaaagtataaaactcagtcgaaacagcattaaaatactatctaccatggggaattatccttatggaaccccaattaatattggcgggtctccagctgtaataattgccactgaaaacacagtggatatgggtaatttacctaatgggtccagcgcgtggtactttaccattactccgagctctgcaactgattactactttagtggaaataaaatattaaattacatcaagccatcatcattgagacaagctgaagtgatgttttatgataatattggatttacagcaaccggggcagccgtttctattccaatgcaatggtttagagggatatggacagtagaagcagcgggccttgattcacttgctggcgcgaagtctgtaacacttgcatctgacggcaatgggatcacgcagggaacaccgatacagcagggatcaatatcagctgcaatgacaataagttcatctaatattggttttactaccactgctggaacaatctgctacgtgggtgtaaaaatgaaacctgttggcattaaagcgtaa

SEQ ID NO: 126854 - DNA, 261 bp, Enterobacter cloacae
atgcaacgtcagtatcatcacccgctggaaaaaggatttgccgaacgaatacacacgccgggaggcgtccgctcccttgttgaagattctcacctgatgacgttgctgcgccagcttggtgaggatggttttaacgttgatggtccgatggctgagctgactgctctggttaactatgtaaccagctcgcagatgtccatgaaagatctgcaaatgcatcttgattactgcgtggaaaaactgaagcaggaaacgacataa

SEQ ID NO: 126855 - DNA, 195 bp, Enterobacter cloacae
atgatggacatcttagtcagtattggattgatgttgttctggtttgctgccgtagttgtatgcggtactgcctatttgtgggtgattgtaattgccatcaggaaaaagtggttaggagagtggtcggcgaaggtcgtttacttctcgaccttcgtcatcattgccgcaataatctttaaacttcctttgctgtga

SEQ ID NO: 126856 - DNA, 2757 bp, Enterobacter cloacae
atgaaacaggcatgtgttgaagccattgcgcagacactgggccgccagccaaaggctgacgagctgaaaggtattgaggaccgtatcaaagaggccgtgcgccaggtacataaaaaaaatgccagggaaggcaagactggaattcctgatgcgcagacgtacatggaggccgctgatcttgtgcgccagcgcgttgtgcatgacgtttataagaagcgccagcgcgtcgctcagaacgcgatcgccattagcagggtgactgacaccctcgacgccaatatcccgccagagcagcaaacacccgccaatttgcagcagtttatcttcgcaggtcggcgcacaactgacggtaaggatattgccgtgacctcggcagaggaactggcaaccggagcatatcaggactggtcacgccagctcagtgctgaactgctcaaagccggtgatgatgtacgaaaatttttcgagcagagtaaagcgctcggcgagcagcgtttccgcagtctgttcgaccagcaggcggcaaagtcagcacagttccagatcctgaaagagttatatggcgaggacaccgggaacccgcaggcgaaaaaaatcgcccaggtatggaatgacgtcaccagccgggcccggcaggaaatgaacgacaacgggtttgatatcggcctgcgagacgactggcatctgccgtatgtggacgacgctgattttattcgcaacgccggacgagatgaatggctggcatcattgccggtggcagaacaggccaaagcgcgactgtcaggccgccagccgccgatagagtttgcccgccaggcgtgggtggacgacgtttacaacacgcaggatcgcagcaactacgttaatccggacggcagcccgatgaatgacatcgagtatcgccaggcgctggaagcgatctttgaaacgaaggccaccgatggcgccaacaaaatcgacccgggcgctttcatgggcaccggcgggataaaaaaccgtggctcacagagcagggtgatggcgttcaaggatgcacaatcacacttcgcctacatggagcgctatacgcagcagcctgtggtgggcgtgatgatgtcccacctgcaatcctcctctcgtgatctgggtgtcgttaaagccttcggcccggatgcagcgcgcaacttttccctggtgcttgaccgggtgtatcagcgtgctgtcactggtggaaagcccgtggggcacatgaacgaagaacgcaagatggtcgagcggatgtttaactctatggccgggcttaacggtgtggccacatcgagcgtgttcacttctgctgttggcggtctgcgtaacctgatgaccagcgcgatgctcggtacaagtgtactgacggcaaccagcgatcaggccattatgcgcgccaatgcccaggctcttggttttacgcgagatggcatgcgcctgtctgaaaacaccattcgtaacctgttcagtggtgatgccaaaaaggccaacgcagagctcggcctgctggtggattcgcatgccgctgttgtttcaaagatgggcggttatgacctgtcgcgcggaattaccggctggtttgctgagaagaccctgaagtggtccgggctgatcgccatggaccgcgccaataaagcggcgttcggcctgctgatgtataaaaacattggcgaactgacccgcaaatttaagacgctggatgacgttaaagggtcagataaaaccatcctggccaacaaaggctggagtaacgaagactgggcgatcatggcagcggcagacctacagccaatgactacctccgggcacatgggtatgactcctgatgcgatctacgccgttcccgatgacgtgatcaccggcatcatgtcggaccgtattgcacaggtgcgcgccgggagtgaagcagcactgacggcgcttggggatctgccacctgaacgtctgaagcggatgaaagaagcatttgacgcagaagcggagcagaccatcactcgtatggttcgcaacgcccgcgcagaagccgctcagaaattgctgggtatcacacacggtgaaatgaccagcgccgtaacgaccgccacaggtcttgatacctatgcccgagacgatgccggacagctgatcaagagtttcatgctctttaagacaacgccattcgctgggttccgccagctggtaaaccgggctaatgatctggacacggtgccagctcttaaattcctcgcttcatacattgcaggcacgactctggccgggatgtttgcaaaccagatgaacagtctgttgaccgggaatgacccactggatatgacaaagccaactacatgggtacaggctctactgaaaggcggatcattcggtatctacggcgattttctgtttcaggaccatacgcaatatggctcaagtatcgcggctaccattggcgggccggtgctcagctttgcagaacagttaaccaagctgctgatcacgaacccgcagaaggcattgcagggggaagaaacttctttcggtgccgacgcgcttaagacggcacgaatgatcacccctttcgcaaacctctggtatgcaaaagccattaccaatcacctgatcctgcaacagcttcaggagatggcgaaccctgggtacaacgatcgggttagggaccgcgcgcagcgggaatttaacacaacgagctggtgggagcccggcgaaacagcgccgcggcgcgctccagatctcgggaaggcggtgggccaatga

SEQ ID NO: 126857 - DNA, 1566 bp, Enterobacter cloacae
atgtctgatgtattttctctggctccggaaggccaggcgtggaccgacgataaaacagcagccaaccctgcacgaccagaagactatgagccgacattcttccagggttcaatcgccgcaccggtgcgcggcgtggcggagggcactctcggccttgcacagtctgccgtcggattcagtaaacgcctgatcagcgatccggcattcaccgcagacgtggcgccaacggtcaatatcttccgcgtgatgtttcccgatgccgacaaagcgctgaatgaaacatacgacacgattggcaaacagttgcaggatgctcgcggttatgtgaagccggatgcgggtagccagggaaccgctgccgaggttctttatggcctcggtcagtttgttccggccatcggtgcgaccattgtcggcggccctgcggtcggtgctgctacggcattcagctcgacatatgagcagtcctatcaggatttcaaaggaaagggggtagacgagtcgacggcgcgcaacctggcaactcagcagagccttttcaacgcagcgggcatggcattacctgctgccatcggcaccactctggcaacgcgcattgcctcaggtgtggcaataaacaccgggttcggtggcctgaaccgttactccgtcggcgaaacactggaggagaaaggctacaccgagatggcgaaacagtaccgtgtattcgacggccaggcgatgctggtggatgcagtgctgggtggtgcctttggtggtgcccatcaccttgccgcgcgaaatgctgacgtgccgccaccgccagattctgaagcaccgatcccggcggcggaagtgcagagcgctcctgatgcaaccgcagagccatcgcctgtggtcgaagttgcgccagtgacagacacgccaggatcaccggttcgctcggattctcagtcgccagtgacagagcctgccgccacgccagatattcctgctattaagccaagcgatatcgatgccgcccacactctgaatgaggggctctattacgatctggaatcctccccggtgctgcatgccagcaacgagagcatcaacagccatgtggcagccatggatgaagcgtaccggcaacttaatgacggccagcctgttaacgtcgggatgatggcgcgcgggctggatggtccggcccggcctggcatgctggaatctgcaagcgagcagtaccatgcaatgcagcaggttttcgaagagaatggtgtcaggtatgaaacgccgtcagaactggctgaagaggctcctgctccgcgtgccgaaagtgcattcactgcggcagacgaaactggtgggcaggtcagcgtggatcccgattccggccaggctatttcatccaacagttacgacctgatggcggcgcgcgatatggcgaccactaatccggatctgacaattacgcaccccgacaccgggcaaccggcgaaactctcggatgttctggctgagtttgatgaacaaatccagaccgtgcagaacgaatcgaaagtttattcagtcgccgccgcgtgcttcctgaggaatccataa

SEQ ID NO: 126858 - DNA, 2529 bp, Enterobacter cloacae
atgccaacagtaccaacagtcagcgggcgccaggttgaaagccgcggattccagtctccgggttttcaggcgttcgaacagccgaatgtcggcgacgtcatttctcaggtcgcgccaaaggcgatcgacatgttcgcgcaggccaagcggcgggcggatgtcgcccaggctcaggatgcatcgctgcaactgagtcaggtatcgagtgatctgctgacgaatcccgataccggtctgctgaatcttcagggtaagaatgcactgggtaagggccaggagtacacccagcagtttgattcccaggcagagcagatcgccatgaccctgcctgaaggggcccgtgccgggttccttcagcaagcacagcagcaacgcattcagttcacgacgcaggccgggcgccatgagatcagccaacttaacgcctatgaagaaggacagttccaggcgacgctggcgaacaacgggaaactggcagcatctgcgtacggcgataacgccaactacgtgctgtacaaccagcagacctttcagcagatcgaaacctatggcgccgcgcatggctggagcgctgagcagattcaggcgaaaaagaccgaatttaaagagaaggttgctgatacggctctctctcagtggtcggctaacaactctatcgagttcatccagagcaatggcgagttgagcgacacggctgttggatcacgccgtgcggtatctgaaggcggttcaggcgatagcgctcgcggcattcgcaataacaaccccggaaacctcgaatacagcaaaacaaatccatgggttggacagaccggtgatgatggtcgatttgctaaattcgaaactccggagcatggaattcgcgcgctgggccgcaacctgctgtcttatcagcgccagggcatcgataccgtcagtgacattatcaaccgctgggcgccgccgtctgacaataacaacactgacgcttacattcaggcagtatgtgctcagctcggcgtcactgcggatcagcagcttgacgcgtcaaaccctgacacgctgaaggccctgtgtgctgcaatcatccagcatgaaaacggtagtcagccatacagcgaccagcagctcgccaccggtgtcagtgcagctattggtctgtcagagctcccgaccagcaccaagcgatatactggcaatgctgcatttgacgctgcatctcctgaagcgcaggcaaccttcctccgtcaggctgaccaaattcgcaagcagcagcaggcggaatatcgcaccagtatcgacagccgggttcgcgatgccagcgcggcatacatgcgcggcgttgatttccctgatgcaccaacgcagagcgacttcctggcggcctatggggtgcgggaaggtaatctccgctataccgagtttcggaatacgcagatcgctggccaatacatcggctcattccgcaacatgccgacgagcagcatcacagcctatgtcaatcagctaaagccaggaaccgaagaaacaggcgagggatatgcatcccgcgctgaattatttgatcaggtatcagcggcggctacgaaggtgatcagccagcggcagaataatccgttcaatgctgcggtggagattggagcctataagccgatcgccatcaacaaccctaacgacatcactgctgaggtggctaaccgtttctcttcacaggaaagcctgcgtgcgctgggcatcaatgcgcctattctttccagtgaggaggccgctgccctgtccgaacaggtacgcggtaccaaagacgtaaaccagacaatcagcctgttacagagcatgggggaaacgctgtccgctccggcaatgcggcaggtagcgtctgccattgcgccgaacaacgcagcaactgcatattccgcgctgctgctggggacgccggataaccagtacgacaacaaaaaaccatccatcgcatacagtcagttcattggctacaagccgaccatgaacaagtacgacgtatcgaaggtgatcctcgctggcgatcagttgctcaatccaacgaaggcaatgaaagacgctggtataaccccggtgcagttgccgagcgaagataagctgaaacgagcattcgacgatcaggtgggtaatgcattcgccaataacgcacaggcgcgccagctcagttacaaccttttcaaggcagcttacgccgggatcgcttatcagtcaggtgatgcctccatgacgcgcactgatgcagccaactcggacgtagtggaaaaggcggcgcaatacgccacaggcggcgtgtacaagggctttaatggtggcgatgtggtaatgccgttcggcatggataaatccaccttcaaggaccgctacaccgcatccgcacagcaggcactaaaagatgccggtctgaacgtaaacgccgcatcaaacttcacgccagtcaacattggcaacaaccagtatcggctggtaagcggcagcgggcgctgggcaacggatccgaaatccaatgaagctatcgtcgtgagggtagaataa

SEQ ID NO: 126859 - DNA, 540 bp, Enterobacter cloacae
atgtgcgaacccaccacaattttagccggtgcgacgctcgcggcaggcgcattgtcagcttacaaccagtatgagacaggaaaatattctgccgctgttgctgagcagaatgcggatgtggcagaagctcaggcgcaggactcgattaaccgtggcaatgcccaagcagaggaagtgcgccgccgtaatcgccaggcagccggctcccaggctgcaaccatgggggccaccggggcagacctctcaaccggtaacgctctggatatcttcggagataccgctcagttcggcacgctggatgctctgacgaccgttaacaacgcccagcgcgaggcttacggctatcaggtgcagtccgccaactatgacgcccaggcggtatccgcgcgtaagcaggggaatatgggggtgatgacaacgctgctcacaacgccgctacaggcgtacggagcctatcaaatggctggcgggacgtggtcgccattctcccagaaggcagcacctatcagcgcagccgtcggcacgccaaccggtcgataa

SEQ ID NO: 126860 - DNA, 465 bp, Enterobacter cloacae
atgattaaagctcagatcgtaccggcaacccaggaacatatcgaagccatgatcccgcatgtccgccaggctgatgttgatgaattcctggcaacaaacggatggagcccgcgtcgcgttcttgaaaccggtctgcgcacgtcaacatttgcctgtgccggtctgattaacggtgaggtggtgaccatcttcggcgtggccccggcatcaatgatcggtggtaacggtatcccgtggctggtgggcaccgatgcgctggagaaataccagcgcactttcctgcgacgctgcgggaaagtggtcaatgcaatgctggctgtttacccgtatcttgaaaactatgtagatgcccgcaaccacacagcgcgtatctggctgcactggctgggattcaccattgaagaaccgcagccgtacggcgctcacggtcttctgtttcatcgcttccacatggagaaaaaataa

SEQ ID NO: 126861 - DNA, 2478 bp, Enterobacter cloacae
atggctttcagttggatccagccgagctttgccggtggcgagattggcccgtcgctatacgggcgcatcgatatgtcgaaatatcaggttgcgctgcgtaagtgcgacaactttattgtccgtcagtatggcggggtggagaatcgcccgggcacgcgcttcgtcggcgaagccaaatatccggcgcgcaaatgccgtcttattcctttccagttctcgaccgtccagacttatgcgctggagttcgggcacaactatatgcgcgtcatcaaaaacggcgcgtatgtgctgaacagcagcaatgtgatctacgaactggcgatgccgtatgctgagactgacctgttccgcatcaaattcacgcagagcgcagacgtgcttacgctggttcacccggcctatccgccgaaggagttgcgccgttacgcgcacgacaactggcagatcgttgatgtcaccaccaaaaacggaccgttcgaagatatcaacgttgacgagtcagtgaaggtatacgccagcgccagcaccggtactattacgctgacggcaagctccgccatattcggatctgagcaggtaggtaaattgttttacctcgaacagcctgcggttgattccgttcccgtatgggagaccagcaagaccaccgctatcaacgatgtacgccgcgccgacagcaactactaccgtgccaatacttccggcaagaccgggaacctgcggccttctcacacggaaggcatgtcctgggatggatggggcggaaccggggatagtgataccggaatccagtgggaatacctgcacagcggtttcggcattgcgcgcattacagccgtagccagcgacggcctgacagccactgctacggtggtgagctatatcccgtcgcaggttgtcggatcggctaatggcagctacaagtgggcacggtacgcatggaacagtgtcaacggctacccgagcacggttgtttactatcagcagcgcctgtatttcgccgcgtccaccgcgtacccacaaacgatctgggcgagccggaccggtgactataaagacttcggcaagaataaccctattcaggatgacgatcgcatcatctacacctacgccgggcgacaggtgaatgagatacgccatcttatcgacgtcggcaacctggtcgcgctgacatccggcggggaatatacgatatccggagaccagaataaggtcctcacgccgtcggcgttttcgttcagctcgcagggaaacaacggctccagcaatgtgccgccgatcgcggtggcaaacatcgcgctgtttatccaggagaaagggagcgtggttcgcgatctggcctattccttcgacgtggatggataccagggaactgacctgaccatactggcaaaccacctgttccagaagcgcagcattgtcgactggtcattctgcatcgtgccgtacagcagcgcgttctgcatccgcgacgacggaaaactgctggtgctgacctatctgcgcgatcagcaggtattcgcctgggcaccgcagtccagcaccggaaagtacgaaagcacctgctccatcagcgaaggcagcgaggacgctgtttactttgtggttaaccgcaccatcaacggccagacgaaacgttacatagagcgcctgtcaagccgtctgtttaccagtgatgaagatgctttctttgtcgattgcggactgagctatgacggacgcaatacttcaacacgtactatgaccatcagcggcggcagtggtgactggagctatcaggttgactacccggtgactatcagcggcggggcatatttcgtgggcactgacgttggcgctcagatccagttcccgtactcagaaacggatcctgataccggcgagacagtggcgaaagaattgcgcggcgacatcatctctgtaacgagtaataccgccgtggtggtgcgcttcaaccgtaacgtacccgcggtactgcgcactgcggccacaactaactggcagatggcccgccagactttcagcggtctgtcacacctcgaaggccagacagtcaacatcctctccgatgccagcgtagagccacagaaaaccgtaactggtggtgctgtcacgctggaatcaccgggcgcagtggtgcatatcgggctgccgatcaccgctgaattcgaaacgctggacatcaacatcaacgggcaggaaacactgctggataaaaagcaggtgatccccactgtcacgatggtggtcaacgccagccgaggcatctgggcaacgacgccgggcggagaatggtacgagtatccgcagcgggaattcgagttttatgacgatccagttgatgatgctaccgggaaggtggaggtgaagctcgacagcaactgggataagaacggacgcgttaaggtgcgccagctcgatccacttccgctttctgttctggcggtcctgccgcgcatgacggtcgggggattctga

SEQ ID NO: 126862 - DNA, 606 bp, Enterobacter cloacae
atggcctccgttatcgagatctgcaaccgcgcgctgagcaatatcgggaacagccgcagcattaacagcctgaccgaggccagcaaagaagccgggcagtgctccctgcatttcgattcctgccgcgatgctgcgctggcggacttcgactggaactttgccaccaaacgcctggcgctggccgataccaacaatccgccgcctgactgggcttattcctaccagtatccgactgactgcctgcgcatcaccgaaattatggtgcccggtatccgtaatccgacggcggccatgcgcatcaactatgaggttggggctgataccgacggcaccggaaagctgatctacaccgatcagcctcaggcatggctgaagtacatcgcccgcgtcaccgacgtgaacatgttcgatgcaatcttcatggaagcgctgtcctggcgtctggccgccgccatcaatatgccgctgaccggcagcgcagatctcggtaacaacgcactgactatgtaccgcagcgtcatcctgagcgctggctcgcacagccagaacgaatcccaggagccgcagccgccagtcgatgagttcaccgcagcgaggttgtcataa

SEQ ID NO: 126863 - DNA, 324 bp, Enterobacter cloacae
atggaactggtaaacctcaaaactggaactgacacctatcaggatgaggatggtaaaacccagactcgcgatgattatccatggggcctttgcattgagctgaacaacgagacgctcgccaagctcaaggcaacgccacaatccgctggtactgaagtgatgatcaccgcgaaagccataattcgttccacctctacccgagaaacggaagatggcatgcagcataacgccagcttgcagattactgacatggcactcagcccggtatctggtgagcagcccaaaactgccgcccaaactctctacggcggggaggatgattaa

SEQ ID NO: 126864 - DNA, 369 bp, Enterobacter cloacae
atggaaaaagcaaaataccgcgtcctgcgcttatcccatattcataacaacctctggcctgaaggttcagaaattgaatatgacggcgagccaggatctgcgctggagccgatcaacgcagcggcgaaggcggcaaagaaaaaggcagaccagaatcgcggaatcgtgccggttgactctcagcctgaaccacaggatgaagatgatggccaggaagataccggcggtaaaggtgccaataccttcagtgaagatgaagccgcgctacgccagcagtacgaagaacttttcaacaagaaacctggcaacatgaatgttgaaacgatcaaagaacgtattgctgaagaacggcaaaaactgggcgtctga

SEQ ID NO: 126865 - DNA, 441 bp, Enterobacter cloacae
atgatcctcgacaaactgttgatgttctccgagaagcaggcggttacagcttccgctgcttctacggacgtgattgacctcggccctatcgacggcacccgccgcgatatcggcgttggttatccgctggagttctgggcaaccgttgacaccacggcaaccgctggtggtgccgcgaccctcaacgttcagttgcagaccagcccggacaactctacctggaccactatctacgacagcggtgctctggcgctttctgccctgacagttggtaaacgcctgttctctaccaaagttccggcgggcgtccagcgctatctgcgcgtcaactattctgttggcacgggtccgctgactgctggcgcgttcacctcgggcattaatctggatgttgacaacaacactccttattacccgatccgttccaaagtgactggctaa

SEQ ID NO: 126866 - DNA, 987 bp, Enterobacter cloacae
atggctgttaaaggcgtaaatgcgctgacgctggctgactgggctaagcgtactgatccaaacggaaaggtcgataagattgtcgaacttctttcccagaccaacgaaatcctgacggatatgatgttcgtagagggtaaccttccaactggtcaccgtaccaccgttcgctcggggctcccgcagcctacctggcgtttgctgaactacggtgtgcaaccgacaaaatcaactaccgtacaggtcactgacactgtcggcatgctggaggcttatgcggaagtagataagtcactggcagatcttaacggtaacactgctgaattccgcctgtctgaagatcgtgcattcctcgaaggaatgaaccagcagatggctcagaccctgttctacggcgacaccagtgtgaatccgcagcagttcatgggcctgtcatcccgctactccagcaaatccgcaggcaacggccagaacatcattgatgctggcggcaccggtacagataacacctctatctggctggtggtctggggtgaaaacactgtgcacggcatcttccctaaagggcagaaggctggtttgcagactcagaacctcggcgagcagacgcttaccgatgccaatggcggcaaataccagggttaccgcacccattataagtgggataacggcctggctctccgtgactggcgctacgttgtgcgcatcgccaacatcgatgtgagcgatctgtcagtaccaggttcagctgcaaatatcgtcagcctgatggttaaagcgctgcaccgcgtccctaacctgaaaatgggccgcgcggtgttctacatgaaccgtaccgttgcccaggcgctggatctgcaatctctggataaagcctccctggctctgtccgtaaaagagactgaaggcgaattctggaccacgttccgtggcatcccaatccgtgaaaccgatgcgattctggaaacagaagcgcgcgttgtttaa

SEQ ID NO: 126867 - DNA, 699 bp, Enterobacter cloacae
atgaatttatttgaacgtttgctgcatcgccgtctttgcaatgagcagcctgctgatggtggcgctgcgccggcaccgtctgagccatccgcacctgctgctgatgctcctgcacctgctgctgacccggcaaaaccagaaggcgataagccacagtctggcgctgaaggtgacaagcctcaggaagacaaacccgctgatggtgaaaagccagcggaggagtcggatgacgaaaagcagaagcaggaaggtgcgccggagaaatacgaatttaccgctggtgaaggcgtagagctggataccgaagcgctgaaggacttcgaacccgttgcccgtgatctgaacctgaccaacgagcaggcgcaaaagctggtggacgcatatccaaaaattctggccggtgtgcagcagcgtcaggcagaagcctggcagaagcagaccgaaggctgggcagagaccgtgaaggcagacaaggagatcggcggcgacaaactgaccgcaaacctcagtgctgcgcagcgtgcactcgaccagttcggcacgccggaactgaaagaatatctgaacgctaccgggcttggtaaccatccagacctggttaaaacgttcgtgaagatcggtaaagccatgtcggaagacggcatggtcgatggcagtaatcaaggccagcgtagtgcggccgaagtgctttatggctaa

SEQ ID NO: 126868 - DNA, 297 bp, Enterobacter cloacae
atgacggatatcgatgacgaaaaaaagagagctgaaagtgaccgcattaagcgtgatctggctcagcgagaaatcgacgatatccgcttcgtgatggatagcgagcaggggcgccgcgtcgtgtggagagtgctggagagtgggcgcgtattcgccgccattccgccgatggacgctctggcaatggctttcaacgaagggcagcgcaatctggctctggagttattccagcgcgtcatgacgcactgccccgatcagtatctgaagatggccgcagaggccagtgaacaggagtaa

SEQ ID NO: 126869 - DNA, 1674 bp, Enterobacter cloacae
atggtggaaaccgaaaaagagcggctgctgaagcagctcgcacagctgaagaatgagcgcacatcgttcgagccgcactggcgcgacctgagcgactttatcaatccgcgcggttcccgcttcctgacgtctgacgttaaccgtgacgatcgccgcaacaccaaaattgttgaccctaccggatcattcgctcagcgcactctcgccagcggcatgatgtctggcatcaccagccctgcgcgcccgtggttcaagctggcaacgcctgaccctgacatgatggattacggcccggtgaaggtctggctggaagtcgtgcagcgccgcatgaacgaagtgttcaacaagtcgaatctttatcagtctctgcccgtcatgtacgccagtctgggtacttatggcaccgccgctttggctgttctggaagatgaccaggacgtgatccgcacaatgcctttcccgattggcagctactacctggctaacagcccgcgtggcagtgtcgatacatctttccgccaattctccatgaccgtgcgccagctggtgcaggaattcggactggacaacgtgagcacgtcagttaagggcatgtgggaaagcggatcgtatgaaaactggatcgaggtaaaccactgcatcacgccaaacatcaaccgcgacagcgggaagatggacagcaagaacaagccgtatcgctctgtctatttcgagacaggcggcgactccgacaaattgctgcgtgaatctggtttcgatgaattcccgattctggcgccgcgctgggaagttaacggcgaggacgtatacgcatcctcctgcccgggtatgctggcgctgggccaggttaaagcgcttcaggttgagcagaaacgtaaagctcagctgatcgacaaggccactaacccgccgatggttgcgccgacgtcgctgaagaatcagcgcgtttctctgctgcctggtgacgtgacctatctcgacgttctgagcggccaggacggtttcaaacctgcgtacctggtaaacccgaataccgccgacctgctggctgacatccaggacactcgccagaccatcaacagcgcctactttgtcgacctcttcatgatgcttcaaaacatcaacacccgctcaatgccggtggaagcagtgatcgagatgaaggaagaaaagctgctgatgctcggcccggtgctggaacgcctgaacgacgaggcgctcaacccgctaattgacagagttttctccatcatggcgcgcaagaacatgctgccgccaccgcctgacgttatgcagggaatgccgctgcgcatcgagtacatctccgttatggcgcaggcgcagaaatctatcggcctcaccagcctgtctcagaccgttggcttcatcgctcaactggcttcagtcggtaaaacggaagcgctcgacaagctcgacgcggatcaggctatcgacgcgttctctgaaatgtccggcgtatcgccaacagtcatcgttccgcaggagcaggtgcagcagattcgagaagaccgcgccaaacaacagcaagcagctcaggcgctggcaatgggtcaggccgtagcgcagggcgcgaagacgctcagcgatacgcaaaccgcagatccaagcgcactgacagcaatcactaatacagtgggagcggctcagcaatga

SEQ ID NO: 126870 - DNA, 207 bp, Enterobacter cloacae
atgtgtatcggcagcaagccatcagtgccagcggcaccagaaattcaggccgcacctcaggagcaggacgccgctgttgtcagtgcgcgcgatgacgaagagcgccgccgccgtgctgccgccggtcgtaactcgaccatgcttaccggtgcccagggcgacacttccgccgcaaataccagcggtaaaacgctgctcggtcagtaa

SEQ ID NO: 126871 - DNA, 186 bp, Enterobacter cloacae
atgagtcagacagtcgttaatgttcataaacaatcttctgccgaagagatccgccgtgagaatctctaccacaccaaattgcagtgcctggcagaggttcttgggcgtcagtcatttgtcgataaaaacgacgctgaacgcagcgcagaagcgatcaacgcagcattcgataaaatcatcttctaa

SEQ ID NO: 126872 - DNA, 1476 bp, Enterobacter cloacae
atgacagccacagccatgtcgccggaagagcagctcgtcgaggatattgcttcgttcacgtatgacccgctgggctatgcgctgtatgcgttcccgtggggcgaagatggcacagaactggctcacgccaccgggccgagaaattggcaggctgacgcattccgcgagatacgcgatcacctccagaaccccgcgacgcgtcaccagcctctgatgctggcccgagcatcaggtcacggtatcggcaaatccgctttcatctcgatgctcatcaactggggcatgtccacctgcgaggactgcaaggtggtggtgaccgccaacaccgacaaccagctgcgcaccaagacctggccggaaattatcaaatggtcgaatctggccataacgaaagagtggttcacctgcaccgccacggcgatgtacagcaacgatcctggtcacgataaacgctggcgcgctgacgcaattccatggtctgagcacaacacagaggcgttcgccgggctgcacaacgagcgcaagcggatcatcgtggtattcgacgaagcgtccaacattgccgatctggtatgggaggttgccgagggtgcgctgacggatgaggacacggaaatcatctgggtggcgttcgggaacccgacgcgtaacaccgggcgtttccgcgaatgcttccgcaaatataaacatcgctggaagtgcgcgcagattgacagccgcaccgtggaaggaacgaacaagcagcaactacagaaatgggtggatgactacggcgaggacagcgacttcgtgaaggttcgtgtgcgggggatcttccctgacgcgtcagaactccagtttatcccgaccgggctcactgacgaggcgatgaagcgcgtggttaccgctgcgcaggtggcgcatgcaccgatgattatcggcgtcgacccggcatattccggcgtggatgacgcagtgatatacctgcgccagggcctgcacagcaaagtcctctggaccggcaacaagaccactgacgatttgattatggcgaagcgcatcgcagactttgaggaccagtacctggctgacgcggtgtttatcgacttcggttacggcaccgggctgaagtccatcggtgacggctggggccggacgtggcagctaattccgttcggcggcggctcgaccgatccccagatgctcaacaaacgcggcgagatgttcaacagctgcaaaacgtggctgaagctcggcggcgcgctggacgaccaggagacagctgatgacctgtcggcggcagagtacaaggtcagggtggacggcaaaatcgtcattgagccgaaggaagatatcaaagagcgtttaggccgctcgcctggcaagggtgacgcgctgctgctgacgtttgctttcccggttacgaaacgcctgcgcattcctgggcaggagagccaacagggtaaggcagttacggattacgacccgtggaaataa

SEQ ID NO: 126873 - DNA, 597 bp, Enterobacter cloacae
atgatgcccgcgacaccaaaaacccacaaacgcaaatcaacgcaatataagcctcttacagcgatgcaggaggcttactgccagtcctacattaagacacctgaaaaccagtctcaggcagcgatagacgcaggattttcgcctaatacggctgcggtcaaagccagcgtgatgatgcgcgacgaaagaatccagaaacgaatcgccgaactgatggaggagcgaaacaagcgcatgcgcgtcagcgccgactacgtcctcatgcgcctggtggaaatcgaccagatggatgtgctggatatcctgaacgatgacggaagcctgaagcctatccgcgagtggccgaaaatctggcgtaccacgctcagcgggttcgacctgtcctcaaccatcatgaacatgaacgaggattcgatagagaccatcctcaaaaaaatcaaatggccggacaaggtgaagaacctcgaactgattggtaagcacgtcgacgtcaacgcgttcaaagagcgcctggaagtttccggcaccgtcaccattgccgagcgcatggctaaggcccgtgaccgcgtaaagaaacaggctggtggtgaagaatga

SEQ ID NO: 126874 - DNA, 360 bp, Enterobacter cloacae
atgtacagtatttttatgtggggttccattatgggctttccatctcccgcaaaagactacgcagaatcccgccttaccatcaccagcatgtgcggctacgacggcaactgtcgaaccgttgagacgtcggctggttacgcaatcataaacgtcgcaagtaaaccacatccgggtgataccgtactaatttcctattgcggccgcacggagttcgccatcgtgcaggggcgggcgcttatcgttccggagggtgagtccatcgaaggtgaggcactggacgacacaacggtactgggagtggttacacatttcctcaaccgtgccgacagccaggaagacgatccgataccagtcatgtaa

SEQ ID NO: 126875 - DNA, 339 bp, Enterobacter cloacae
atggctaagaccgcagcagaacgcaaagccgcgcagcgcgcccgccaggctgaatccggtgagcgcaaactggagctggttctcgacgagcaggaaatgcagatgctggtgcggaactgcgccgggcgccgcccgggacgggaaccatacgaactgagcgagtacattgctctgctgatccgccaggatgatgcccgggtgcgcggacgcatcaaagctatcagcgccaaccagtgtggtaagtgcggcgacagcctgccggtgaagtcctgcccgtgcaccggtgattcggcttgctgggtaacgcagggttggcacgaaacgaaacttgcggtgtga

SEQ ID NO: 126876 - DNA, 228 bp, Enterobacter cloacae
atgtctgatatttgcgtgttccgcgatgatgcaaagaactgcattgtgctgaaagatggcgagaagcttttcacgttcacgcctgagcagtggtcggtgatttgtatggctgcaaactctgacatggaaaaccgcctgtacgcgctgaagcatggtgagacgatgcgcctggagcgtgagcttacctgggcggcgaatcgtggcaaggtgggcaatcagaatggctaa

SEQ ID NO: 126877 - DNA, 273 bp, Enterobacter cloacae
atggtgagcaaacttaaacagcggcgcctgcgccgccttaaagccgacgtggcctggtggaaaggcgaagcatcggacctgtacgccagggtgatggagcaggccgacgaaatagccgaactccgcaggctggttatccgcgtgccgatgccggtggtggtcccggcggatatcatccagggaattaacgtgaagggtgcgctcgccaaaggagtggagcgctacggcgatgcgatgctaatgctggcgaagaaggagaggggcgatgtctga

SEQ ID NO: 126878 - DNA, 201 bp, Enterobacter cloacae
atgggcttgaaaatttacggtaataaaattgcaaacagagaaacctcttactcattacaatctgagatgaagatgacatgccagcagtgcaagcacgcggaaatcgtgaaaggcgctttgataggggatgtaaaatgccctgcatgcggcggcaatgatcttgtttttgaaacatcagcaccgcagcaggaggtgaagtga

SEQ ID NO: 126879 - DNA, 609 bp, Enterobacter cloacae
atgagcaccattaccaaagaattcaccaaagagcagttaatcgaaaagcttcagcacagaatttctgtcgcatcaggatttccggagtcagaaaaagcgcaaatggatcttgagctggcgcgtatcgcgctggcatcgctcgaagcggagcatgtgtgcgtcatcgaccagtccaatcttgattatctcaactccggctctgatgcagacgtgtggccagcatccagagcagagatgggcgatgtgcttctgtaccgcgccgcccctccagtgccggtatctgtgaagataccaccagagaaaccgcacactgatggtccgttagctgatggatggaacgcctgccgcgccgccatgcttcagggtgccgaacgtgtaagtaatcgtgatgagttgcctgatggttggatggcttgcagtgagcggatgccggaacaatatgattatgaaatatggacctactctcccactaagggtgtcaaccactcattaggatatgatgggcatgccaggactttttctgacgtagattattactcaacgattgatgacgtgacgcactggatgcctattacgcggccagcagcacctcggcaggagactaaataa

SEQ ID NO: 126880 - DNA, 384 bp, Enterobacter cloacae
atgagcaacatcgacaaacagacgttgcgtgatattgccactgctgcggtatcaacccctttatggcatgcagttggtgtgttcggcgaaattgttgatccggctgatgaggaatggaagccagtgcatgacttttgcaaaacattcacggccgagagagttctggcgctgctgggtgagttggaagccaaagacaagaggattgatgaacaaatggaggttatgcgccaggccgccagcgatatctcttacgcaatatttaacctaacgggctctgatctgagccggttacaaccgggcgtcgttgaaaccactgatcctactgatacggccttaatcgcagagcgcagcttacgcgccgccgcagccggtaaaggagagtga

SEQ ID NO: 126881 - DNA, 186 bp, Enterobacter cloacae
atgagcaagttaaccgatgcagtaatcgaatcgtcaatgctgtcttctgtagaagggttttctttcctggttgttgattctcttgagtttgagttgggacgagagctcaccgaagaggaatcaatgcgcgtctatcgccgagttgaaaaagcaatcaacgaggcaacgcaggaggccgcccaatga

SEQ ID NO: 126882 - DNA, 300 bp, Enterobacter cloacae
atgaacaaaaccgaggaggcctactgtaggcatctggagctgcgtaagcatgccggagaggtggcctggtaccggttcgaaggaatcaagctgcgactggctgacaacacgttctacacgcctgacttcgcagtgatgctcaccaccggtgagatggagttgcacgaagtgaaagggttctggactgacgatgccagggtgaaaaccaaagtcgcagcagatcagtatcccttccgcatcatcggcgtgactgtgaagccgaagaaagccggtggcggatggaatttcgaagtgttctga

SEQ ID NO: 126883 - DNA, 303 bp, Enterobacter cloacae
atgcacccaattgagtttatcgaaaagaacatccgcacctacctgctgaatgaatggttctcgcaatcggtggcgcaggggggggcaaacgcggcgatagatttttaccgccgatcatcgcagccgtcggttaagagcaagggcatttttgaagactgtctgcgcgaggcaaagctttacgccaaatacagcggggatgcaccagagaaatccaccaaggggaatggcaatgcgaaaaagtcttcaggctctgggaaggttaaaagcagggcaaatgaacaaaaccgaggaggcctactgtag

SEQ ID NO: 126884 - DNA, 786 bp, Enterobacter cloacae
atgagtaacgtattcgcagcaattcagaatcgtgatgcaggtgctctggctcgcatgatgggccctgacaatcaccatgatcagcaggacaacgttgtaaacatgagcgcagagcgtctcgtcgatgctctgttcaaacagcttaagcaactcttcccggctgctgagcataccaacctgaagaccatgcagcaggaaaccgaagcgaagcgccagtggatcgccgcatttgccgaaggagggatccgtacccgcgagcaggtatcagcaggaatgcgccatgcccgcgccagtgaatcaccgttctggccgtcgccggggcagttcatcaaatggtgcaaggacagcaagatggtgctgggcgtgagcatcgaagacgtgatgggagagtttcaccgttacgccaaagagaaaagcctccagcctggtggacccgagcgcttcccgtggcgccacccggtcatgtactggattgtgtgcgatacccgccgtgcgatgtatcagcgccagctgagcgagattgaagtcgagaagcatgcgcgcaagctgctggaggaatgggctgcgaaagtggcggccggtcaccagattcctgatccggtactgagcatccaggcaaagccagagccgatacaaacgccagcggacacaggggggagtgcttaccaccctcccggaaaaagcttcggatgcatgccaaatgccgccaccctgggagggctgacaccggctcagtggctgatggaggaataccggcgagggaaagcggcaggactcatcaggtag

SEQ ID NO: 126885 - DNA, 777 bp, Enterobacter cloacae
atggccagcagctggattaaggtcgaggtgatcacccctgataagcctgaaatatttcagatagccgagctactgaacatcgacccggatgccgttctcgggaagctggtgcgcatctgggcatgggccgatcagcagacaatagacggtaacgctggcagcgttacaaagggagtactggacagactcgcttttattacaggattcgctgatgccctgatcaccgttggctggctcgcatatgtcgacgaaaagctggtactgcctaactttgagcggcacaacggtgaatcatcgaaaaaacgagcacttacaaacagaagagtcgcagagcaccggaaacgtgaaacgcaaaatgtaacgcgaacagcgttacaaaaagagttaccagaggaagaggaagaggaagatataaataaaacccctctctctgcgcgcgaaggaattcaaatccctcccgttgtcgttccaggtatcggggagccgatcggcaaattcaccatgcatgaaaactggcagccgtcagatgactttgtcatgcgcgccagaatgtggggccacgcactacctgctgacgggtacaagaaatcagacctgattgaattcatcacctactggatggcggaaggcaatgtgatgcaacacgtgcagtgggagcagaagtttgcccggctgctgatgaacaggagaaaaagagcggcaggaaagcgcggtgacagctctgacgatgacgtaccacactggaacagccctgagggctggaaggatttcttatga

SEQ ID NO: 126886 - DNA, 210 bp, Enterobacter cloacae
atggagattatcactcgtctggacgctgcaaaggcaggtcttaagcgttattacacgggtaaaaagtgcaagcacggtcatgacagcgagcgttacgtctataacggtcattgcgttgagtgcgccatcaactccagcctgcgccgccaggcggagattaaacggattatggatgaagctgcgaaaggcaatgtgccggaggtgatctga

SEQ ID NO: 126887 - DNA, 231 bp, Enterobacter cloacae
atgagcgagaacgaaaaattcgacttcaaaaaacactggttgcaactcactcctgatgagcgaaatgcctttgctgacgaggccggaacgaccagccactacatccagacgcatctgacaggccgtcgaaaaatgcccggtaagacattgatgaatgggctgtttaaggcatgcaaacaacgcggatgggtcagaacaaagccggaactggctatcttcttctacgaataa

SEQ ID NO: 126888 - DNA, 591 bp, Enterobacter cloacae
atgaaaagtattcaggatatccgcaggcagaatattaacgatatcatcgaccgtgactttaacggggtgcagactcgtctggcggaaaaactgggaactcaggcaaacctggtgaaccgctgggcccgcgggcagaaggttgtcggcgacacggtggcgcgcaagattgagaaggcggcgaacaagccgtcgaactggctggacgtcgaccactcattatctgctgttgccatcccccaggaggagatcactccttccgatatcggccagctggcggcgcataatctcgaagcgtggatgcagaataaccgcgacctgtcatctcagggaaaggtgtcgaaagcgtccggggttgcccaagctacaatccagcgcatgctgaacaatgaggtaagcgtatccatctccaccctggaggcgatcgccagcgcgttcgggcgccgcggctatgagctgctaatccatccccgcgacccggctaccatccattacgaccgggcccgctacgcattgttacctgagagcgagaaaagcaagatcgagagctacgtcgatttcgtgattgttcagaacggtaaaacgcaagaataa

SEQ ID NO: 126889 - DNA, 150 bp, Enterobacter cloacae
atgcagtggaaaatcatcaacggctggtactgcgttacggcgtgcgggctgatgagcaccaagtgccgcactctgcatgaggccatcaactgggcgtttgtcaccaagatggcagtcaaaactgaaatggatatgggggtgagcaagtga

SEQ ID NO: 126890 - DNA, 1068 bp, Enterobacter cloacae
gtgagtgaattagcaatcatcgaaatcgcgccggacctggcgccaagcatttacgttgaaaacggtctggataagttccttgaacagatccgtgatggcgttaacgaggttcctgacctgagcacagccaaaggccgcgcccgtatcgcatccctcgccgcccaggtatcacgcagcaagacggcagttgaaaagccaggccgtgattacctgaagcgcctgaaggagcaaccaaaagtggtcgaagcagaactgcgacgcttcgtgaccgaatgcgatcagcttcgcgacgaagttcgccgcccacttaccgaatgggaagacgctgaaaaggcacgcaccgaagcattgcagcagcgccttgtggatttgcgcgcactggctgaagtgatcgacaccaccggaaattacctgccatccactgatattcaggctcgcattctggaggctaaatccgtggtgctggatgacagctggcaggagcgtgcagcagaggcgggagtggctaaagactcaaccattcagcaactggaagcgtcgctggtagtagcgcaaaagcgcgagcacgaagcggctgagctggaacgcctgcgcaaagaggcagaggaaaaagcacgtctagaacgtgaagaagctatacgccgcgaagcagcagaacaggctaagcgtgatgcagaagcaaaagcacaggccgagattgatgcttctgcacgccgtgaagctgaagccaaggctgcaactgaacgcgcagagcgcgaaaaaattgaagcccagcagaaagcagagcgtgaagcaaaagccgctgcggaaaaagctgagcaggaaaagaacgacgctatcgcagcggagcgccgccgtcaggaagaagcggaagcagttcgactggcagaacagaaacgcatcgccgatgaagaagcgcgccgcgcagctgacaaagagcatcgccgcaccatcaatcgtcaggctattgcagacctgattgaaagtggtcttccgcaggaaatggctgagaaagcgctgatagccatcgccagcgggaaggtttctgcaatctctatcaagtactga

SEQ ID NO: 126891 - DNA, 300 bp, Enterobacter cloacae
atgaacatccagcagattaataacctgaaaaaaatcatgaatagcatcgacagcgactaccagctgagtcagttgcactacgcgcgccaggtggagctgatcgacgctatcaagttccaccagctgcaaaagcctttctatgagctggaacgcaaaggcgtgcgcaccgaaattcttgaagaactgatgatgagcacggaattcgaagaggctctcgcagcttaccaggccgcgatgaccagcatcatcgcgaagtgggatctggctgaccagctggacacggcgaggactgcggcatga

SEQ ID NO: 126892 - DNA, 822 bp, Enterobacter cloacae
atgatgccaggaatttacttcgacatcagcaacgaggattaccacgccggcgacggcgtgagtaagtcgcagctggatatggtggcgttgagcccggccctgttgccgtggcagaaatccgcgccggtcgacacagaaaagctgaaagcgcttgacatgggtaccgccctgcactgcctgctgctggagccggaagaattcgataagcgttttatcgtggcgccgcagttcaacctgagaaccaatcaggggaaagcagatcaggaagccttccttaaagatgttgagaacatgggcatgacggtgatggatgccgaacagggccgcaagctgaaacttatgcgcgacagcgcgatggcacacccggctgcgcgctggctgcttgaagcggaaggattctgcgaagcatcgcactactggacggatccggaaaccggagagctgtgccgcattcgtccggacaagcgcttgaagcatcacccggtgcttctggacgtgaagaaggttgccgatatggagcggttcgcccgccacatcgaggaattcaggtaccacgtgcaggatgccatgtaccgcgaaggcgcgcatcagaccaccggcgagccgcacggattcttcttcctggcagtgagcgaaaccatcgactgcgggcgctacccggttcgtgtgtttgaactggatgcgccggacgtagatgccgggcacgcactgttccgccgggatctgaatacctaccaccagtgccgggagtctggcgaatggggtggatttgaaattattaaacgccctgagtgggcacgcaaacaggatatgcacgtatga

SEQ ID NO: 126893 - DNA, 882 bp, Enterobacter cloacae
atgagcaacgacatcgcaatcacatctcagccaggcgcaacagttggcaccgctgcggctatcttcagccctgaaggtatggaccgcctggtgcgtttcgcaaccctgatggctgacagtaaggccactgttccggcgcatctggcaggaaaacctgctgactgcctggccgttaccatgcaggcggcacagtggggcatgaacccgttcgctgtggcgcagaaaactcacgttgttaacggcacgctgggctatgaagcgcaactggtgaacgcggttgtgtcttcttccaatcttctggccacccgtctgaattatcgctgggatggtgactggtcgaaagtaaacgggaaatccgataaatcgccgaacctgaccgtaaccgtgtgggcgaccctaaaaggggaatcagagccgcgcgagttgacgatcagcatggctcaggccggtgtgcgtaactccccactgtgggaacaagatcctcgccagcaactagcatatctgtgcgttaagcgctgggcgcgtctgaatgctcctgacgtcctgcttggcgtgtacacccctgacgaattgcaggagacggcgccgcgcgttgagcgcgatatcacgcctacgccagctaccgcgtccggcatgaacaagttgatcaactccaagcctgatcaaaagcaggaagagaaaccaaagagcagcgatgaccgcgatccagaagagattctgtgcgctttcactgacgcagcgatgaactacaacacgctgaaggatctggataacgcctacaaatacgtcgccaaaaagctcgctaacgatgatgaacgcctggctaaagctactgatgtgtacaccatccgtcgcgatgagctgaacgaagtccctatgtaa

SEQ ID NO: 126894 - DNA, 264 bp, Enterobacter cloacae
atgaaaggtgcattgagtaagaaaaaactccttgaggtggtgccactgtcatggagcacgattgaccgactggagcgtgatggcgaattcccgaaacgctggtacatcaccgatgggaaagtggcatggacccaggaagaagtagagaagtggcttgacgatcgcaggaagaatagcccggacgaattccagggaaaaaagccaccggttgagctgcgaaagtatcgtccagttaagggtgcatccgtgagtgcggcagcatga

SEQ ID NO: 126895 - DNA, 300 bp, Enterobacter cloacae
atgagaaaattaacccgccttgaaaaatatcacatgaacaaggcatcacagcgcggaactgaaaaagttgtggcagtaacgccggaagcaatggagatcgaaagccgggccatcgagcgcgagcgccgcggtcattatcgcatcgctgcccgcctctggctccagtgcctggatgcggctgttggtgaagttgagcgcgcccgtatcgcggtgcgccgccagcagtgcatcaccaaagggaaccgaaccccgcacctggactacagcgggatcggatgtcgcggggtggtgtatgactaa

SEQ ID NO: 126896 - DNA, 648 bp, Enterobacter cloacae
atgactggaaaatttacccttatctacgcagatccgccctgggtataccgcgacaaagcagcccacggcgaacgcggcgccgggttcaaataccctgtcatgaacgtgctggatatctgccgcctcccggtgtgggatctggcggccgaagattgcctgctggctatgtggtgggttccaacacagccgattgaagcgttgaaggttatcgaagcttggggattccgcctgatgacgatgaagggattcacctggcacaaaacgaataagcacaaaggcaacagcgccatcggcatgggacacatgacccgggcgaacagcgaagactgcctgttcgcagtgcgcgggaaactgccggcgcgcatggacgcttctatctgccagcacgtcacggcgccgcgcctggagaactcgcgcaagccggacgtgatcagggagaaactggtgcagctgctgggcgatgtgccgcgcattgagcttttcgcccgccagtcatcccatggtttcgacgtatggggcaaccagtgcgaaggcccagcggtacagttgcaccctggctacgcgctggatatcgacgggatgacgcgggcattcggaaatgctccgctatcaccaacagacgaccatggccgggagcgtgcggcatga

SEQ ID NO: 126897 - DNA, 1257 bp, Enterobacter cloacae
gtgcttaccgataccaaacttaaaaacctcaagcctcaggacaaattatataaagtttccgaccgtgacgggctgtatgtcgccgtgctcacgtcaggctctgtctcgtttcgctacgactaccgcattaacgggcgccgggaaacgctggtgatcggccagtacggtcgtgacggtatcagcctggcggaagcgcgagaggaattgattaacgctaaaaagctcgtgaaggcaggccagtcgcctgctgcggcaaaacgagacggtattaaaaagatccgcggggctgagacgttcgcggtacataccgacagttacatgaagaatgccacgctggcagacagtacgcgggaacttaagcgggcgatcattgatcgtgacctgataccgtcactcggcaacaaactaatgactgagatcaccacagcggcggttcgtgatttgtgcgataaaatcgtccagcgcggtggtaatgcaacagcagtaagagcccgggagataatcagcagtgtgtaccgccatgctaatgacagagggcacgggttctataacccagctgctgatataaaaccgtcatccattgccacatttgtggaccgggagcgataccttagtccagaagaaattggtgtttttttccgtgcgctggatagtttcagtgcaatgggaacgctgaagatggcaatcaagctcgttctgctgacgatggtcaggaaaggagagttcaccaacgccgagcttaaagaaatcagcttcaccaaaggggtttggaccatcccgggcgaaagaatgaagagcgggaaacctcattcaatttacctttcaaggcaggcacttgatctgatggtgacccttcagatgtgtgcaggcggcagtatttatcttgtgcctggcagatacgacttcaacaaacctatctctaacgcctcgcttaattccctgatcgaccgcgtagtggcgcgcataaacgaatcgggttatcactttgaacgctttactgtgcatgatctgcgacgcaccgccagcactaaccttcatgaagctgattatccatcagactggatagagaaaggccaggccagaaagcagaaagggtcgagagcggtttacaataaagcagagtatgcgcggcagcgcgcttacatgcttcagcagtgggctgatatggttgatgcctggatagcaggggagcacaccgatctggtgttattctccccgtctaagtttgagaggtggatggaagacagtaataaataa

SEQ ID NO: 126898 - DNA, 915 bp, Enterobacter cloacae
atgcgttttcggcatttattaccgctcattggagcactcttttccctgtatatcatctggggatccacctattttgtcattcgtataggcgtggaaagctggcccccgctgatgatggccggtattcgtttccttacggctggcgtgctgctgatggcgtttttattgctgcgcggccacaggctaccgccgctgcgtcccctgcttaacgccgccctgattggcctgctgctgctggcggtgggcaatggcgcggtaaccgtcgccgaacaccagaacgtgccgtcgggcatcgccgccgtggtcgtcgcgaccgtgccgctgtttacgctctgctttagtcgtctcttcgggatccgcacccgtaagctcgaatggctgggcatcgcgattgggcttgtgggtatcatcctgctgaacagcggcggtaacctgagcgggaacccctgggctgccgttctgatcatgatcggctccatgagctgggccttcggctcggtctacggctctcgcatcgagctgccctccgggatgatggcgggtgccattgagatgctcgcggcaggcattgtgctgctgatggcctccgcgttgacgggtgaaaaactgacggcgatgccagacctttcaggtttcctggccgttgggtatctggcgctgtttggctccattatcgccattaacgcctatatgtacctgatccgcaacgtctcaccggcggttgccaccagctacgcctacgttaacccggtggtggccgtgctgctgggtaccggttttgcgggcgaagtgctgtcgacgattgaatggctggcgctgggtgtgattgtctttgccgtggtgctggtcacactgggtaaatatttgctgcccgcgaaaccgattattacgacgtgtgaggtggagaaaccgtga

SEQ ID NO: 126899 - DNA, 912 bp, Enterobacter cloacae
ttggcaggaagtagcttattaacattgctggatgatatcgccaccttgctggatgacatttcggttatgggaaaactggcggcgaaaaaaaccgccggggtactgggagatgatttgtcgcttaacgcgcagcaggtcagcggcgtgcgggcgaaccgtgagttgccggtggtgtggggcgttgcgaaagggtcctttattaacaaggtgatcctcgttccgctggcgctgctgattagcgcctttataccctgggccattacgcccctgctgatgattggcggggcgttcctgtgcttcgagggtgccgaaaaagtgttgcatatgttcgctgcacgcaaagagaaagacaccccggaaatgcgccagcagcgtctggaagcgctggccgcacaggatccaaaaacgtttgaacgcgataaggttaaaggcgcgatccgcacggacttcatcctctcggccgagattgtggcgattacgctggggatcgtctcagaagcccctctgatgaaccaggtgctgatcctgtccggcattgcgatcctcgtgacgataggggtttatggcctggtcgggctgatcgtcaagctggacgatatcggcttctggctggaaaaaaaatccagcgcaattgcgcgcggcatcgggaaaagcctgctggtgctggcgccgtggctgatgaaaaccttgtcggtggtgggaaccctggcgatgttcctggtcggcggcggcattatcgtgcacggtgttgcttcgctgcatcacatgattgaacattttgcgtcaggccagggagcggtagtcgctgcgatcctgcccacactgcttaacctcgtactgggctttatcgtcggtctgattgtggtagccgttgttaagctggttgaaaaagtacgcgggaaatcgcattaa

SEQ ID NO: 126900 - DNA, 1701 bp, Enterobacter cloacae
gtgcagcacgatacctttgttgtaaaacaatcttttttgcagtggctgcataagcgtagcaatccccgtttgattgttaacctctgttttatcgttgtcctgatcttttccactctcctgacctggcgcgaagtcgtggtactggaagatgcttatatctccagccagcgtaaccatctggaaacggttgccagtgcgctggacagacagcttcagttcagcgtcgataaaatgctgttttttcgccacagcatgcgtgatgcgctggaaacgccgctggcgtttggcgcgctgcatgatgcggtaaagcgttttgcgcatttgcgcacgtcttccacctggcaaattgcggttgataaacggcgcacgttaccgatcaacggtgtttcggatgctttcgttgacaagacaacccttctgaaccgtgatgatgagtaccttgataatgaactgtccgccgcgcttgaagtggggtatttgctgcgtctggcatccagctcatcccgcaacgaagagcgcgtgatttatgtctctcgcgccggattctttctggaaacggatacgccgggaaattccagcgatatcgtgcagcgctattaccatctggtcactcagccctggtttacccaacagtccgaacgtgaaaaccgtgcgcgtgccgtgcgctggtttatctcgccgccttcctcctttgtgggcaaaaagccgctgattaccgccagcgtgccggtttactacaatcacgtctggtatggcgtggtggcgatggatttcacctttgccaccctgcgtcgcctgctggtggaagccgtcggcgataacccggagggggaataccagctgtatgacagtcggcttaccctgcttgcgacgtctgaatcaccggctgcggacgttaatcattttgacgcgcgcgaattagcccagatagcgcacgcgatagaatcggattccgaaggcggcattcgcctggggagtcgttttgtcagctgggagcgtctcgaccattttgatggcgtcatcctgcgcgtgcacaccctggatgaaggggtgcgcggcgatttcggcagcatcagcattgtgctggcactgctttgggcgctgttcaccgcgatgctgctcatctcctggctggtgatccggcgcatggtcagtaatatgtattcgatgcagaactcgctgcaatggcaggcctggcatgatcctctgacccggctgaataatcgtgggtcgctgttcgagcaggcgaaaatactggcgaagcagtgtgaacagcagtcgctgcctttctcggtcatccagatcgatcttgactgcttcaagagcatcaatgatcggttcgggcatcaggcgggtgataaggtgttgtcccatgccgcggggctaattgccagcaccctccgagataaagatattgccggacgcgtcgggggcgaagagttctgtgtggtgctgcccggcatgacgcttgaagaggcggcggaagtcgcagagcagatccgcgagcgtatcgatagcaaagagatcctgattaaaaaaagtaccaccctgcgcgtgagtgcgtcgtttggcgtctctggcgcgcaggagaagggtaattaccacttcgaaaatctgcaatccaccgccgatgcgcgtctgtatgaggcgaaacagcgcgggcggaaccgggtcatctggcaggatcacgtcaaaaagtaa

SEQ ID NO: 126901 - DNA, 243 bp, Enterobacter cloacae
gtggcggttcactggcttgtggaccagtatcgcctgcacgagggttccgaaccgacgacgctgggcctgggcgacggccccaatgatgccccgctgctggacagcgtaggctttgccgtcgtggtgaaaggcttcaaccgggagggtatcagccttaagaacaacgatcccgcccgggtttatcacactcagcacaccgggccgaccggctggtgcgaggggcttgattactttttgacgtga

SEQ ID NO: 126902 - DNA, 1011 bp, Enterobacter cloacae
atgcctagaatccgcaaaaacccagaagataactggatgccgccccgcgttcgccggggcaaatcagcctatgagttcagaacgccagacggcagaactgtgagattgtgcaatcgcgatcttaccaagtctcaggtctgggctgcctatgaaaacttcatcaacgatatcaaggttggttccaacttccatgctctatgcgaagagttttttaactctggtgatttccatgagctggcaacagaaaccagaaaggattaccggaaatatggttcaaaggtaaatgtcgttttcggcaaaatgaaaccagaaaacatcaagccagagcacatcagaaagtatatggacaagaggggggttaagagcagagttcaggcgaaccgagagaaagcctttatgtcgagggtgttcaggtgggcatatgagcgcggcaaagtgaaaatgaatccatgccaaggcgtaaagcagtttaaagagcaggcgcgcacacggtacgtgacggacaaagaatatgatgcactattcagtgtttcgtcggtgccggtgaaaattgctatggagttggcctatttatgctgcgcacgccaaggagatattctggatcttaaaaagagtcagatactggatgaagggattctaattcagcaaagtaagacggcagtgagtcagattaaggcgtggacagtgcgtctatcaaatgcgatcaccctagccgattcccttccgttaaatactggcatggtgagcctttacgtgatccaccagcagtctggttctcgttatacgcgtgatgcctttaatgctcagtggatgaaggcgaaaaagttagccgcagaaaaatttcctgagctcgaatttaacttcacgttccatgatctgaaagctaaagggatatctgatctggaaggaacgctgcatgagaaacaggaaatctcaggccacaaaaatgcttcgcagacagcaagatataaccgaaaaatatctgtagtgccggtggttggggggcagtaa

SEQ ID NO: 126903 - DNA, 228 bp, Enterobacter cloacae
atgagcggacaaagccaacgttttcttacccctgatgacctctatcagcttactggttatcgccgcccctcccttcagtgcaaagcgctgaaagaaagcggtgtattttttgtaccacgaaaagacggcaggccgggaactacatgggatcatgtaactaatcctgctggactgaagctggtagtgaacaatccagaggaagaagaaccaaactttaaggacatgtaa

SEQ ID NO: 126904 - DNA, 552 bp, Enterobacter cloacae
atgacattaaccaaagaatggctcctgaagaccatcgcagagcttgaagaggagcgcgatgctgtgccaggcgcagtaaacgaagacgcggccaaggcgctcgctgcgatgaagctggcgctggcatcgctcgaagcggagccggtgtatcaagtattggtcgatggaagttggactgattatgacaaacaacatttagaggaactgcttgaagcgaaaccatccaccctttttcgtgttgcttacccatcgccacggataatgaatccagtttcagttgatgctgacgataatttctattcttggtttggcagggaatggcatgagcattatcagcataatcaatacaccacggcagctaagcagatgcttggtgttatggctgaatctgcgtggaaagctggtcgccgcgccgccatgcatcagggggccgaacaaacaaactaccgcgctatcgttgagcggatagctgaaataattcatggcaaagtgactgatatcgatctgcttacggtaacagttaagagcatgaaggataaattgcagaaataa

SEQ ID NO: 126905 - DNA, 237 bp, Enterobacter cloacae
atgtccagatatatcgcagttattcacggctggcacgttagcagtaatggatttgatgtgcatgaactgagcgcgacagacaaagaagaagctcacaacgaagccgttcttctgaagcatcagcgggaaagcaccttcgacaaatgcgcattcactgtgatcgagattactgaccacgaaagattgccacgcaaattaactttccgcgaacgcctggcagggaggactaacccatga

SEQ ID NO: 126906 - DNA, 525 bp, Enterobacter cloacae
atgagcaacatcaacaaacgcgcattacgtgaggcggcggagaaggctacgcctggtcgcatcggagacagaattgatggcagtggcagtattaaatatcagtgcctcggtaacgacggctctttggttctgcaaaccgaccataaaaatatggagtatggattcattggtggaaacagtgatgctgatgagttgttcttcaggttgtgtgaccccgccacagtgctggcgctgctggatgagctggaagccgcagaggaacgcgtgactgagctatctcagaaggctgatatctacgacatgttgcgacaagactatgagcttcagggctcgctggttgattttgttgattggcaggcaaagcggattgctgagctggaggcgcgggaggttgagcttcctgcatatcgtaactcgcctgatatgcacacaaagcagtattacgaggctgtagggtttaaccaagggctggacgcttgcacagaagttctccgcgccactggcatctcagtaaaaggggaatga

SEQ ID NO: 126907 - DNA, 645 bp, Enterobacter cloacae
atgagcaaccgtacagaaaaaaacgaaatcattgtttcacaaatcaatgatgatcgcctgaagctaggcatgaacagaattagatctggtagcacgcagcttttcggtggcactacccatgaaccggaaatttcgctcacgcctccagaaaagcacctttacgcgctggaagttaaaggcgtttggatgtgggttaatggctgcggtcactgcaataagaacggcgaaaagatttcgtatgtagtttgtgaagaacacgatcgctgccaatgctgcggagttaaccgtaaagacgccactaccattccgcccaggggggagcacgatatcggtggcgggatatggggttctcgagatgtaaatggtgtttggggatggacatgtcacacatgccatgaagccgaagagcaaagagttcgttccgaggctcttgccagggttgatgataaccaggattacaacgagtgggattatttcagcgaagatgaggctaaatgcccatggtgcaatgccaaggttaacactgaggaaagttatgacgctgatggagacgagttgacctgcgacgagtgcggacattccttcacgcttaccgcagaacacaccgttacgtggaccacaaaacgccaggaggccgcccaatga

SEQ ID NO: 126908 - DNA, 501 bp, Enterobacter cloacae
atgacatccaataaaccaatgaccggcgaacagctggatgagctgatgactgttgcagtcaacatgcagcgcgaaagtgaaaaagcaggtgaccgcccttccgctatgtttgcatatgcagttcaggttgctgttctggagctgcgcgaatttcacgaaaacaaggggatttcagacttagagtttgaacgggcttgtcctgattatatggtttgtgatctgtgtggtcatgatgcacaccattgcggcggtggaaattacgaatgctcagaaggtcaccttttttctgtaagcgagaggctttttggtagccgtatggttcctgctggttgggtagctgttcccattgagcccactggcgatatgctggcacgcatccgtctttctaatacatggactacagaagctctgactgccagatacaaagacatgatccacgccgcccctcgcgcgccatatgtatcgtttgcggcccagcttcgcaaaggagtgcagtcatga

SEQ ID NO: 126909 - DNA, 1023 bp, Enterobacter cloacae
atggctaactcattcaagcaaatgacccgtgacgggaccatcaagcgcaccgataccgggatgttcatcagcctcgaccaaatccatgtgcgggaaggtttcaacaaacgcgaagatgatgaacgtacccgccaggcagatgatgaccttttcaactatctgatgaatggtggctctgttcccccgctggaggttatcgcccgtgatgaaggtggagtgtgggttgttgaaggccatcgccgtcgtcgctgctatgcgcgctgcgcagaagcaggaaagccagtagaccgcatccatatcatgccgttcaacggtaacgatgttcagcgcctggcccgcatcatgaccagtaataaccagcttccgctatccgatatggaacaggcagctgttattcaggagcttcataacgccttcaaccagaccaccagcgagatagcaaagctggttaataagtctgtggccaccgtcgagaagctgctgctcctcagcacggcgaaccatgacgttcagcaggaagttaaatccggtgcggtgtcagtcgatgtcgcggttgatcgcgttatggagtatggcgaacaggccgggaaagttctccaacatgataaagctgtagctgctgcccagggtaaatcgaaagtcacccgtagctctatcgcgccggagctgagcgtaaaggacgcacgccgtttcgttgagctgatggctcaggccacgatcagtgatgaaggtgtcttcactcttgaaggggctgccctggccgaggcgctgtcgattatggacgaacataaagcgattgccgaagcgcgtgaaacttaccgcctgtcacaaccagtccctgaaactgagatcaaagggaaaactctttacgtcagacttgaaggtacagagatcgggactgcgcaaatctatcgcggtaagaacgtcatccttaatgggattgtcaccagccagtcaaaggcagtggcctacttcgttaaacaacacaaattgcagcaggagcaaaatcatgacatccaataa

SEQ ID NO: 126910 - DNA, 456 bp, Enterobacter cloacae
atgaataattacgaatttggcagcattcaagtgccgggattcgtgcaaccaaaattcagcgctgtgcagagcgcgtataacacggagaaactatccatggcgaacacacagaacgtcaccgagttacaaccacgcatgacccgggagcagctgatcgacgctgcgcgtaaggccgcccctctccttccgccagcttatcgcggaattatgaccgaactggctaaccgcctggactatactagcgtcgcgctttgcgaagcgatggcgcagcgtagagaactggctgttcagaacgctactctgcgtgaagatgtcgcaagctgggccaaagagtgtgaccgcattgttgaacgctacacgaagaccagaaccaatatgcatttactggaagcccagcgagaattgcgtgagctgtcacccatcgtcatttcccaaaataacgaggtggctctctga

SEQ ID NO: 126911 - DNA, 321 bp, Enterobacter cloacae
atgtctgcaaatgatttggctgttaaatatggtacttatcagcccgaaaatttactggtcatccttccacttgaagaagcgtcagacattattcgtgaaagtcttcgcgctgaggttcgcaacgagctggaatatgaatacgatgaccgtatttcttctgctgaagaagaggcatctgattgggaatcacgggcagacagttacgaatgcgatgcgattagttttgccagagcgatagagaaagccttgcttgcaccaaccttggatgaagcaaaaattattctcgaacgcgttcgttctgataatcgccaatatttttaa

SEQ ID NO: 126912 - DNA, 309 bp, Enterobacter cloacae
atgagcgttaacagtatctacaagtgctctttctgcggtgttacagaacagcaggcaaaacggattattgctaaaggtggaaaagacgaggcggccatttgcgctgactgcattgttcagtgcgttagtgtgtttgctaatctggcttcgatttcgacacttgaagagcgcgagacgattgaagccgcccctattcagggcggcgagataacagctaacactattcaaaaagctgttatttcttcagtgattcaaacacatcaggaggaacagcctgaactcgatcaatcagtgcagcaagctcgttaa

SEQ ID NO: 126913 - DNA, 564 bp, Enterobacter cloacae
atgacggaaactggctttcaaagtcagactaagctagccaaagcagctggcgtggagcaatccgtcatatcaaaaatactggctgggacaagcaaaacatctaagcatagtggaaaccttgcagcggctatggggataagtgctgactggttgataaatggcgcaggttctatgcatggaggtgctgaaagcacattacaaagagtagatgtttccaggcttgtaaggctctatgacgaacacggtgatacaggagaattcataacctggatgtcagaagttcctgataactatcgtgcttatattatgaatagaaacactgggatagcacaggcaccaaagggtgccgtagtcatagttaacccagataacaagccgtctaccaatgatcttgttgtaacgcttatttcaggagttgtgtcagcatttcgctatcatgtgtctggcgatggcgctggttttctttccgtagatgatcctcgcatcccacttgcttctgtgcgctctgatgaggacgtagttggtccaataatgcagatattcatccctgaattaagtaaatga

SEQ ID NO: 126914 - DNA, 231 bp, Enterobacter cloacae
atgaaccatgtaattcaaaaagccattagtttagccggttctcaggccaacttggcgaaggcgatcggcgtagggcaatcgacaatcagtaaatggcttaacggtgctgaaattagctcccgttatatatcagctcttgttacagcaatggatgggcaggtaactgccgaagagattttgcaatctctaaatgatttacaagagcgtaatgctaaagcgaaagcagcataa

SEQ ID NO: 126915 - DNA, 471 bp, Enterobacter cloacae
atggtagagcaaagcctgaaagaagtagttaaagcgatgtgcaaagcgtacccaggaggccgtgaagctatggccggtgctcttggcatgtcagtaacgcagttcaacaacaacctttacgagaagaatggctgccgcttctttgaagtgaacgagctggaggccatggaagacatctcaaatacgtccctcctggcagattactttgcccgtcgtcgtggtgcgctgctggtggacgttcctcaacttgaagaccttgatcgtgtcgacctgtttgatcgtgccatgagaacgtcagcagcgcgtggacgtgttgataccgtgatccagaaagctctcgaagatggagtaatcgaacgtcatgaagctgaagaaatcaacgaatatcaccgccgtcatctggcagcgcgtgaagaagagatccgcgcgattgtcgcgctgtttagccgtaagaaaagccaaaaaaagtga

SEQ ID NO: 126916 - DNA, 339 bp, Enterobacter cloacae
atgaacagtttaaaccgattgagaccagcgaagcaattcagatgccttccactggtgggaaaagattccccgttcggctatgtggagagattaaacaaccaggcggatcagaacaactaccagcctgagaacgcgatggtagaggcatttgcactgatgaacgagaaggggcgtgaggaatggctgaagttgaccggcgattcagagaccacagaggcatcaccgtccacgtcatcaggtgggagcccgagacccgacgcgttatataccttcgcgaagggtacgatcatgagtgcttcagccctcttgagcaattccagcgtaaatttacagagttaa

SEQ ID NO: 126917 - DNA, 954 bp, Enterobacter cloacae
atgagcagaatctttgacatcgtccagtcaatgtcaggccagaagaacgtcattgttcttcccaggccgtacctgctgttctttaaagaagaccagcaggctcatgcgctggcagcagttcttaacaacctcgttttctggtcagcttttgggggagaagacggctggttctataaaactcacaaggagcttggagctgaggcgggcgaattaactgaagaccagacagagcggctggttaaaaagttggtaaacaagtatctgcctggcgtgatcgagacctgctctcgaaaggtcaatggtacgccaaccaagcattatcgcatcgacggcgatgctctaatctcattaatctttccagaaaataacgattccgcaaaagtacgtaatggaaaacgtgaatatgcggaaccaaaaccgcgaagctgcgtttctcaatccgcgaatgacaggaatcttgggagccgcgaaagtacggaatcctatctctatacagactttaatacagagttaaacaagcagactaataaacctatttgtccggttgcgccgcaaccagaccgtgatgtgtcgatcaccgatcaggctaaacaggttttaacccatctgaaccaggtgaccagttcgcgttatcaggtttcaacaacctcgctgcaaaacattcgcgcccgaatcggggagggcttcaccgttgaagatctgtcgctggtggtggactactgcaacgccaagtggagcgacgatttaacaatggcggcctacctgcgcccgcagacacttttccagccaacgaagtttccagcttacctgaagtccgctaccaactgggcgaatgccggaaggccagcgcgtgttaacgggaagtgggagcgtgaggatggaatcttcaaatccagcttcaagaacaccgactacagcaaagtcccggcgggcttcagaggagcgaactcatga

SEQ ID NO: 126918 - DNA, 495 bp, Enterobacter cloacae
atgagtcttctgaaagatattcaaattttcatcgccgctaatcctggcttaacgaacaaagagattgcggcatcaatgccacagtacgacgttcatgctgttcagcgcggtgtatgccatctgatcaaactgaatcgcgcaacccgccagcataacggcaagtgctaccagtattttgccaaagcgccgggtggtgacgttagcgaggggcgttctgcactgaaaatcaaccgggctgataaaccagctgtaccagaacaggaagaaggtctgaatccggctgtgaccacaatgatggataaggctcaaggcctgtttgaaaaagggctctaccaccgtgcggccaccgttctgatggatgccttcaatcgtactaagaacgaagagcagcggatgaagatactgattgagcgtcagcgttgcctgagcatggcgccgaaagtgaaagcaccctctgatgcatggtgtctggctggccgagcgaggaatgtctga

SEQ ID NO: 126919 - DNA, 660 bp, Enterobacter cloacae
atgaaatactcactgatttacgctgacccagcctggctttatgacaacaaagccagtaacggtgcagcagaagatcactacgacacgatgaaactgatcgacatgaagcgcttaccggtttgggacctggctgccgatgatgcagttctggctatgtggttcaccggtacgcatacccgagaagctatcgagctggctgaagcgtggggctttaaagttcgcacgatgaagggctttacctgggtgaagttcaacccactggcagagcagcatatcaacaaagcacttcaggcaggccgtgtggaggatttttacgacttcctcgatctgctgaacgcacagacacgcatgaacggcggaaactacacccgagccaataccgaagacctcttgatcgccaccaggggaaatggacttgaacgcaagtgcgccagcatcaagcaggttatttatagcccactcggtgagcacagccggaagccggcagaggcgcgtttccgtctggagaagctttacggtgacgtcccacgcatcgaactattcagccgttgcggtgcgcctggctgggaccactggggaaatcaatctgaatcaccagctgttgagcttataccggcagttgccgttcccatgaaaaaacaacaggagcgcgctgcatga

SEQ ID NO: 126920 - DNA, 228 bp, Enterobacter cloacae
atgaaaaagctatctaccgagcatgagaacgctgtgcgtgatgtagcccgtcaatgcaacgatgccatcaaaaaagccctaaagcagaatccaaagccaatctggaatgtcgtagtgcctccgatcctgaaggagtaccacgagaaggttaaaccgatgggcgtaagcctggtgatgttcaacagcgtaatcggacgcctgaacgggcgttatggagtcgagtcatga

SEQ ID NO: 126921 - DNA, 321 bp, Enterobacter cloacae
atgatcgaattaacgccgcgtcagaatgaagtgtttgaagctatcaaggttcacatcgaaaaggctggctttcctcctacgatgctggagcttgccggattaattggctgcgcatcaccgaacgctgctgtagcgcacgtgaagtcacttaagaaaaaaggttacatcactgttgctcctggcgctgccaggggcataaccgtcatcaaaacggaatgggatgcagatccagtaacgatcatcaaagacctgctatccgtcggagacaaggccagagataacgctgttgaatggctgaaaaaacagggagtgacgttatga

SEQ ID NO: 126922 - DNA, 390 bp, Enterobacter cloacae
atgaaactggtgctcccgttcccaccgagcgtaaacacatactggcgagccccaaataaggggccgttaaagggccgccatttaatcagcgccaaaggcagggcatatcaaagcgcggcctgtgtcgccattgtcgagcagcttcgcttccttccaaagccatcaacagccccggctgccgtcgaaattatgctgtacccaccagacgaacgccgccgcgacatcgacaactacaacaaggctttgtttgacgcgctcacgcatgcaggcatttgggaggatgacagccaggtgcagagaatgctggtggagtgggggccgaaggtaccgggtggacgtgtagaaatatcgatcaagaaacatgaacctctggcgggtgcagccgcctga

SEQ ID NO: 126923 - DNA, 726 bp, Enterobacter cloacae
atgaatcagatgaacatcaccgtaacgtgtccaacgcaccatgccgccgcaataggccatcagataacgatgtccagtcgtgaaattgcggagctggtcaattcccgacatagcaatgtctgcgtaaccatcgagcgactgatgaaatccggcgtgattggggggtatgctgcaatgcagtacacccatcctcagaaccagcaggtttaccactactacgaagttaacaagcgagacagctatgtgatcgtcgcgcagctgtgcccggagtttaccgcccgtctggttgatcgctggcaggaactggagagcggggccgggatggttgttccccaaacactccctgaagcgctccggctcgccgctgatcttgctgaacagaagcaacgtctgagtgaagaactggcaattgccgcaccgaaggctgaatttgttgatcgctacgtcaaagccaccgggtcaatgacattccggcaggttgccaagctccttaaggccaaagaacctgagttcgcgatgttcctcattgagaacggcatcatgtaccgcctgaaccgcgtgcttactccgaagagtaaacacatcgaagcaggccgatttgaagttaagaccgggaccactaaccagaccaactacgcgttcaatcagtctcgtttcacggcgaaaggggtgcgctggataggtggactttgggcagagcatgtcgcgaaggggcaaattgcgtga

SEQ ID NO: 126924 - DNA, 582 bp, Enterobacter cloacae
atgcagaacctggtaaaatggcttctggaaagggtgaatattgatttaggtttcagcgctgaccacattctttcgcttcctgagttctgctggtggatggtacgtaatgatctggctgaccttgttcctgaatcggtggcgagtaaagcactcagaatcaagccagaacagcacagttcagtgatgagggaaagcgacattgtcccgtcattaccggctacgcaaatctttcaggagaaggcaaaaaagatagtggcggtgaaggtcgatcctgaaacgccggaatctttcatgctgaggccaaagcgccgacgctgggaaaacgagaaatacacccgctgggtgaagtcgcagcagtgctgttgctgtaataacccggcagacgacccccaccacctgataggccacgggcagggtggaatgggtaccaaagcgcatgacctgtttgtgataccgctgtgcagagcgcatcacgacgagttacacgctgatcccgtggcatttgaagcgaaatacggcgaccagttaacgctgctgtttcggtttttagatcgtgcgctggcaatcggcgtattagcatga

SEQ ID NO: 126925 - DNA, 345 bp, Enterobacter cloacae
atgcgtgatatgtatgaagtaatggaccgctggggagcctgggcggctgctgatagcagtggagtcgactggcaaccaatagctgctggttttaaaggtttagtgccgcacggtaaaaagtcacgcctgcaatgtgatgatgatgaggggatcatgattgatggatgcgttgcgaggttgaaaaaattcaaacctaatgaatgtgaacttctgattgctcatttcgttatcggaatctcattgagagcaattgcgaaaaaaagaaaagtctccgatggtactattaggaaagaactacaaactgcaatggggtttattgatggctgcatttgtatgttaagctga

SEQ ID NO: 126926 - DNA, 492 bp, Enterobacter cloacae
atgagaaaccttgatataaatgcaattgctatcacagcgttaaacatgctcgcctctttatttttttcttatttctttactgaaactcttactaataacactgacgcactcaacttggttgccaatatattctcaatattgactggctttttattgttagtcatcacactgtcaggcgataattcttccgtttcacttggactaactgaagttgagcgcacatatcaaacaaatagattcttaattagattcaatagatattacagtttgtttttgttgtatcttttaacattagcactaattttcatatattacttactctcaaaagataaaagccacacaggtttggctttatcattatcaataagcgtgataacccatgcaatatcattcttaacttgcttctcatttattcagtctacgttcatacctttgaaattgaaaaagctttacacagagaagaaagaacttaatgataaatcaggcagctag

SEQ ID NO: 126927 - DNA, 822 bp, Enterobacter cloacae
atgaacttctcaaaaaaaaagcaagccaacctaacccgcaaggtcacggttagggcatttaaagtaaactcaaataataacaacaacttatataagcagatcgcagctagtaaaagtttagctgcgggcaccatcattcaatattcagctaccaagcacatcaaatgcaaagaactcaaaactataaataatacacattttattcactttacttcatacaaccctaatgagcaggtctcagtctcacctatcaatcctaaagataaagatctttttccagtcaaaaaccatgacaacctgcatgctttctacatgattaaagggaacaaaatagcatcactaatgttaatatcgactaattggccagaggttaagaccagcaaattatttggtcattttaagatagacattattccaacatgcatcctccgccaggatacagttgcgaaattgcaatcagacggattaaaagcggtccatgtaaatctggaagtaatgagctctgattttaataaacaacctggctttttaaaatcattaatccaaaatgaaccagctgtaaaacagacaggaatttcaggtcatctaactattgatcataaaggaaacccacaactcgctaaatctattgaaaataatccaaccccttggataagtgatttagatagtgacttttactttgaaacaaaaaaaagcgaaaaaataaccagtgacagcttaaggcttacacaggtatactacactatcccctatggggcaaagtcgatcctgtcaaaatatgcggaagaaattttaagcgattttgtaaaaaacgagttttaa

SEQ ID NO: 126928 - DNA, 489 bp, Enterobacter cloacae
atgggtcagaaaatcattacgttgtccggcgctgcgacggatgttctttatgcgctgtttttccgtggcgcgcttcagtctggtgacctaccagctaaatcaggcgctgctgagcttcgagagctgggattcgctgaaacacgccataccgcgacagagtatcaaaaggaaaattatttcaccttcctgacggctgaaggtcaggcgtttgccattgagcacctggccaatactcgttttggtgtgaagcagtattgcagcgcaatcaatattggagttgagctggataccacagacgcacaaaaggctattgatgatctggacgacaaaatccgaaacagcgatgcattcaaagtcctgaaagatggctggtctttcgaaaagaacgggacgctggtgattaataacggccaggtgttcattaccgatgcgaagattagcgatggcgtattgtctacaaactataacgtaaagttgaacgacgcctga

SEQ ID NO: 126929 - DNA, 246 bp, Enterobacter cloacae
atgtctgtttttccacaaggatttttatggggcggcgcgcttgccgccaaccagagtgaaggggcttaccgtgaaggcggcaaaggactgacgacggtcgatatgatcccccacggcgcaaaccgtctggcggtaaaagtcggcaaggaaaaacggttttcgttgcgggacgacgaattctacccgagccacgaggcgattgatttttaccatcgctacaaagaagacattgccctgatggcgtag

SEQ ID NO: 126930 - DNA, 1200 bp, Enterobacter cloacae
atgaaaatcagtcagcgtgacgttgccgcagtagaagatctggataacgcgctcgactccgaaagcggttataccggtgcccggcgcattgttttcttctccctgctgatgtttgtggtgctcggcgtctgggcgtggttcggggtgctggacgaagtctcaaccggcaccgggaaagtgatccccagctcacgcgagcaggtattgcagtcgctggatgggggcatccttaccgagctgaacgtgcacgaaggggatcaggtgcaggccgggcaggtgctggcgcggctggatcctacccgctcggaatccaacgtcggcgaaagcgcggcgcgttaccgggcatcgctggcctccagcgcgcgtctgtatgccgaggtgaacgatctgccgctcaaattcccgccgtccctggcgaaatggtccgacctgaccgccgctgaaacgcggctctacaactcgcgccgcgcccagctggaggatacgcaacgggagttgcgcgccgcgttagatctcgcgaacaaagagctggcgatcacccagcggctggtgaaaaccggggccgccagccacgtggaagtgctgcgcctgcaacggcagaaaagcgacctggagctgaagctcaccgacgtgcgttcccagtattacgtgcaggcccgtgaagcgctgtcgaaggccaacgccgaggtggatatggtgtcagcgatcctgaaaggccgcgaggattccgttacccgtctgacggtgaagtctccggtgcgcgggatcgtgaaaaacatcaaagtgacgacgattggcggtgtgatcccgcccaacggtgagctgatggaaattgtgccggtggacgaccacctgctgattgaaacccgcctctcgccgcgggatatcgcctttatccaccctaatcaggaggcgctggtgaaaatcaccgcctacgattacgcgatttacggtgggctgcacggggtggtggagaccatttcgccggacactattcaggacgaagcgaagccggaggtgttctattaccgggtgtttatccgtaccagccaggattatctggtgaataaggcgggcaggcacttctcgatcgtgccggggatgatagcgacggtggatattaagaccggggagaaaacggtgctggattatatgatcaaaccgtttaaccgggcgaaagaggcgctgagggagcggtag

SEQ ID NO: 126931 - DNA, 204 bp, Enterobacter cloacae
atgcagattttcctcaatctgctgcgtccctttgatgagcatcaacgacagcacgtcattaccatggaaaatgacaacggacacgatgggcaggacttcacacaaggatggaaccttaaaatgtacagaccaatagtcgttatcctctttattcttctgacgctcgccgcattgattgaaatagggattatctctttcggctaa

SEQ ID NO: 126932 - DNA, 1548 bp, Enterobacter cloacae
atgaagctgcaatcaatactcttttttcctcttctggccgggcttgtggcgtgctggctctcactctctgcggcacaggcagcggctggacttcccgcttctgattacccaccgcgtagcggcgaactcacgcctcgcgagatggctattgccaaaaacgcctggcaatatttcgttgctaactatcagcccacaaccggcctggtaaatgccgttaataaatacccctcaaccaccatgtgggacagcgcctcttatatggccgcgatgacggccgcaagggagctggggattattgataaagctgagttcgatcgcagaatgctgaaattactcgctaccctgaacaaactggatttattccgcaacgaactgcccaataaagcctataacaccatcacaggtcagaaggttaactaccagaacaaacctggcgagattggcttctcggcgctggacatcggcaggatgttgatctggctgaaggtcattaaggagcgctatccggaatatagcaacagcattgataacgtgctgctgggatggaacttcaccaacgtcatcaacccctgtggaatgatgtacggagcctacctggaaaatggccagccaaagtacgtgcaggaggggcggctgggctacgaagagtatggtgcagcgggctttgcgctgtggggctttggcacctgtcaggccagccagcctcagccctacgagctggctgagatctactgcgtaatggtgccttatgactcgcgcgatccgcgccttaccagccagcataattacgtcgtaaccgaatcctatgtgctttacggcctcgaatttggtttcgacaaaccgacggacagggaaaacagcccgcgtgactacacccatccgtggatgaaaaacttcgccgacagggtttaccaggctcaggagaatcgctacgccatcaccggtattttatctgctcgctctgagcatcaactcgatcagtcaccctacttcgtctacgacaccgtctttagcgacggcttcaactggaacaccatcaccgataaaggcgtgtacgttcccaatacggccgccgtctctctgaaagcggcgctcgggatgtgggttctctggaattcgccttataccgaccgcctgctggacgccattgaaaacgccaacgaggcgggcaaaggctactatgaagggctgtacgaaaacggcgacggccccatcaaagaattcacggccaataacaacggcatcatgcttgaagcattgctgttcaaaaaagagggcaagctgttgcagttcaacagcgataatcccaaagatccccactttgccccttccctgtgggaaaaaaagctggtggatctctttgagcctaataatgcctcgcgcaaccgtccattcctgaacagtacgcccgcagtgaagacatggtgtgaacaaaccgggaccactctgcgcaccaaacccgcttgccaggcctgtcaatgtgctacctgtaatacggacgagcctgtgaaactgccgccggtgaccgcacaatgcttaagaccttag

SEQ ID NO: 126933 - DNA, 630 bp, Enterobacter cloacae
atgcgtacgttcagtggcaaacgtagtgcgctggcgctggctatcgccggtgtaacagcaatgtcgggcctggtggttgcgccagaggcaaaagcagcaggtttcattgaagattctacccttacgggcggtatttattactggcagcgtgagcgtgaccgtaaagacgtcactgaagataaatacaaaaccaacctttctcactcgacctggaacgccaacctggatttccagtcgggatatgccgccgatatgctcgggatcgatattgccgcgttcaccgcaattgaaatggctgaaaatggcgacagcggccacccgaacgaaattgcgttctcctccagcaataaagcctacgatgaagactggtccggcgataaaagcggtatcagcctgtataaagcggctgcaaaattcaaatatggtccggtctgggcgcgtggtggttatatccagccaaccggccagacgctgttagcgccgcactggagctttatgccaggcacctatcagggggcggaagccggtgctaattttgactacggcgatgcgggggcgttgagcttctcctatatgtggaccaacgagtacaaagcgccgtggcacattgagatggacaagttctattag

SEQ ID NO: 126934 - DNA, 1251 bp, Enterobacter cloacae
atggctattaaaaaacgcagcgcggttcgcccggacagtcacgagggtgacacacttgctatcaaatccgcaccggttgccgccggtgcgtctttctggaaagagcttccacagcacattatgtcggggatatcccgcatggtgccaacgcttatcatgggcggggttatcctcgccatttcacagctcatcgcctacgtctggctggagatcccacctgacaccggtattctcgacgcgcttaactcaggcaaattcaccggtttcaatctctcggtattgaaatttggctatttgaccgaatcgttcggcgggctgctgttcagcttcgccatcccgatgtttgccgcctttgtcgccaactctattggcggaaagctggccttcccggccgggtttatcggtggcctggtcgccacgcagccgacgctggtgctgaactttgatgcggaaaaactgacctggcttgccaccaaacccgtaccctccacgtttattggcgcgctgattatcgccattgccgcaggctatctggtcaaatggctgaatagccgcattaacgtaccgcagtatctgctggccttcaaaagcacctttctgatcccaatcctctcggcgctgtttgtgatgctggcgatgtattacatcatcacgccgattggtggctggctgaatgcaggtatgcggaccgtactgctggcggcgggtcaggcgggctccatgatgtacgccatcgggatggcggcggccacggcgattgatcttggcggccccattaacaaagcggcggggtttgttggcctggggctgacaaccgatcatgtcctgcccatcacctcccgcgccgtggcgattgttattccgcccattggtctggggctggccacgctgattgaccatcgtctgaccggcaaacgcctgttcagtccgcagctttatccgcaaggcaaaacggccatgttcctcgcctttatgggcatcagtgaaggggccatcccgttcctgctggaaaatccgcttgcgacgttgccagcgtatatggcgggtgcgatcgccggtgcaatgaccgccaccgcgctcggtgccgtgcagtggttccctgaatcggcaatctgggcgtggccgctggtcactaatctgggggcgtacatgctcagtattgtggtcggggcggcgatcaccgcgctgttggttgtgattattcgtaacagtctgcacaagcgcggaaaactcgctatcgacacgctgtaa

SEQ ID NO: 126935 - DNA, 1113 bp, Enterobacter cloacae
atggaactactgagaaggcttcgtgcctggctggctgcggagaaactggacggcgtgctcatcgcttcgcgccagaataaacagccgcacctgggcatttcaaccggttcgggctatgtgctggtgacacaaaccgcggcacatatcctggtggatttccgttactacagcgatatcgcttcacgagcggcgggctatgagatgcacctgcttaacacggagaacccgtttgcgcaggcggtgaatcagattattgcgaaggaagatcttacccgtcttggctttgagggtgaatacgtgagctggcaaacaggcgtgctgtggcgcgatacgctgaataccaccctttgcagcacctcgctcgacgcactgcggcagataaaaaccgctgacgaaatcgaccgtatccgtgcagcgtgcggcattgccgaccgcgccgcacagcacatccggcgtttcattcagcccggtatgcgcgagcgtgatgtcgctgccgagctggaatggtttatgaagcaggagggtgcggacaagccctctttcgacaccattgtcgccagcgggccgcgcggtgcgctgccccacggcaaagcctctgccaaagtgattatgcctggcgagatgatcacccttgatttcggcgcccaacaccaggggtattgctcggatatgacaaggacctttcttgtcgccgggcaaaacacgccgccggaggagcaccctctctatgcggtgtaccagatcgttctggcggcacaacaggcggccattgatgccatccgccccggcgtttcctgtcatcagatcgatagcgccgcacgttccgtgattgaacgtgcaggttacggcccgcagttcgggcataacaccggccatgccattggtattgatgtccatgaaaatccacgtttttcccccaccgatcgcatcctgttacagcccggcatggtgctgaccgttgagccggggatctaccttgaacacctgggcggggtacgaattgaagatgtggtgctggtgacgaaaacgggcgccgaggtgctttataccttcgacaaacagctattgctgacgggagaacaagagtggacagagatttactgcgcgccctga

SEQ ID NO: 126936 - DNA, 573 bp, Enterobacter cloacae
atgaatgaacagaatgtatttgcagggtcaatatatgaatcgctcacgccgtttgaaataaacggattaatgtttcgtgatttttttaatgccccggatagcgctgcacgacatattccgttgcgccatttgctcgacgggtgcgatcttccggaggaggaaagacggaacgttgagtatgatttcaatgccctgtttgtcggcccggcggcgctgctggcaccgccttatgcctgcgtctatctggacgatgctcccgtgctgatggggccaacaacgctgagtgtccgcgcgtttctgcaacgtatgggtttagcggttgccgcggaaaatagcgtacccgatgaccatatcagtcatgaaattgaactggtggtgatgctttctgtccatgcccgacattccccgcaatatcaggatgcactggcccgtttcgtgtgcggccatcttgaattatggcttcccgcatttatcgaaaaaataaacctcaacgcgaaaacatccgcaattaaacgtctcgcattgcaactgactaattggtttgatgaattaaaaacgagagtaatattatga

SEQ ID NO: 126937 - DNA, 1065 bp, Enterobacter cloacae
atgaaaaagattgcactctctttggtggctcttgggttactcactgctctgccgggcctggcggctacccccgcgccggttccggccgccattgccagccacgacggccccattcgcatcgcggtgatccgcaacctgggctcggacgacaacaccacgcagtttgttgccggggcgattcaggaagggaaaaagctcgggtttaaggtcagcacgtttttaagtaacggggacgacgccagattccaggacttcgttaaccaggccatcagccagaaatacgacgggattattctctctcaggggcgcgatccgtactccaccgcgctggtgaagaaggcggtggatgccgggatcaaagtttcggtgtttgataccgccgtgaacggcgagatcccgggcgtaaccgttacccagcaggacgatgcctccctgaccaacctctcttttggtcaactggcgaaagatttcaacggcaaggccaatatcgtcaagctgtgggtggcgggcttcccgccgatggagcgccgtcaggcggcgtataaagaactgcaaaaacagtatccggagattaaagagctggagtccatcggcgcggtctcctctgacgtgcagggcgacaccgccaacaaggtgggggcgatcctggcgaaatacccgaaaggtaaaatcgacgccatctgggggacctgggatgccttcagccagggcgcgtataaggcgctggaagagaacggccgcaccgagatcaagctctacagcatcgacatctccaaccaggatttgcagctgatgcgcgagccgggtagcccgtggaaggtgagcgtggcggtagatccgaagctgattggcgcgaccaacgtacgcctgatcgccaataagattgccggagaagcgacgcctgccacctacgatttcaaggcggcggctattccgcaggcgctgctgaccgcccagccgggcgcggtgaacgtggcgtcgctggggaaaatcattccgggctggggccagacggaagattttatcgcgccgtggtttgcgacgctggaagccaggtcaaaataa

SEQ ID NO: 126938 - DNA, 789 bp, Enterobacter cloacae
atgggttttctttccggtaagcgcattctggtgactggcgttgccagcaaactgtccatcgcatacggcatcgcacaggcaatgcatcgcgaaggcgctgagctggcgttcacctaccagaacgacaagctgaaaggccgtgttgaagaatttgccgcgcagctgggttccagcattgttctggaatgtgacgttgcacaagacgaaagcattgatggcatgtttgctgaactggcaaaagcatggccgaaattcgacggttttgttcactccatcggcttcgctcctggcgaccagctggacggcgactacgtgaacgcggttacccgtgatggcttcaaaatcgcccacgacatcagctcctacagcttcgttgcaatggcaaaatcctgccgcgcgatgctgaacccgggcgcagccctgctgaccctgtcctacctcggcgcagaacgtgctatccctaactacaacgttatgggtctggcgaaagcgtctctggaagccaacgtgcgctacatggcgaacgcgatgggtcctgaaggcgtgcgtgttaacgctatttctgcgggtccaatccgtaccctggccgcttccggtatcaaagatttccgtaaaatgctggcacactgcgaagcggttaccccgattcgtcgtaccgttaccatcgaagatgtgggtaactctgcggcattcctgtgctctgacctttccgcaggtatctccggcgaagtggttcacgttgacggcggcttcaacatcgctgcaatgaacgagctggaaatcaaataa

SEQ ID NO: 126939 - DNA, 1536 bp, Enterobacter cloacae
atgtctgtgaatactgaaaccgcctccgcgcaggggcagaccaccgtactggaaaaagagggcgtttacgcctccctgtttgaaaaaatcaacctgaccccggcctccagcctgggggatatcaatgcgtttctggatgacgccgcgctttctgacgctccggcgggtgaacgcctgacggcggcgatgcaggtgtttatggactgcatccgcaaatccggtcagccggtggagaagctcgataaaacgctgattgaccaccatatcgctgagctggatttccagatcagccgtcagctggatgccgtaatgcatcaccaggagttccagaaggtggaatccctgtggcgcggcctgaagcagctggtggacagcaccgattaccgccagaatgtgaaaaccgaaattctggatgtgtcgaaagaagatctgcgtcaggactttgaagacgcgccggaacttatccagagcggcctctactggcacacctataccgccgaatacgacaccccgggcggcgagccgattggttccgtgatttcatcctatgaatttgacgccagcccgcaggatgtggcgctgctgcgcaacatctctaaagtgtcagctgccgcacatatgccgtttattggctctgtcggtccgaaattcttcctgaaagactccatggaagaggtggctgcaattaaggatatcggcaactacttcgaccgcgcggaatacatcaagtggaaatccttccgcgacaccgacgacgcccgctacatcggcctcgtgatgccgcgcgtgctggggcgtctgccgtatggcccggacaccgtacctgtacgcagctttaactacgttgagcaggtgaaaggcccggatcacgagaaatacctgtggaccagcgcgtcgttctccttcgcgtcaaacatggtgaagagcttcatcaataacggctggtgcgtgcagatccgtggcccgcaggcgggcggggcggtgaaagacctgcctattcatctgtacgttctgggcaccggcaaccaggtgaaaatcccgtctgaggtgatgatcccggagacccgggagtttgagtttgccaacctcggctttattccgctctcgtattacaaaaaccgcgactatgcctgcttcttctcggcgaactccgcgcagaaaccggcgctgtacgacaccgcagatgccacggccaacagccgcatcaacgcccgtctgccgtacatcttcctgctgtcgcgtattgcgcactacctgaagctcatccagcgcgaaaacatcggcaccaccaaggaccgccgtctgctggagctggagctgaatacctgggtgcgtagtctggtgacggaaatgaccgatccgggcgatgagttgcaggcttctcatccgctgcgtgacgcgaaggtggtggtggaagatatcgaagacaacccgggtttcttccgcgtgaagctgtttgcggtgccgcacttccaggtggaaggcatggatgtgaacctgtctctggtgagccagatgcctaaagcgaaagcgtaa

SEQ ID NO: 126940 - DNA, 492 bp, Enterobacter cloacae
atggcaattccagtctatctgtggctgaaggacgacggcggcgcggacatcaaagggtccgtggacgtgaaagaccgtgaaggcagtatcgaagtggtggcccaggagcacaacctgtacatcccgaccgataacaataccggcaagctgaccggcacccgtatccacaccccgttcctgttcaccaaggaaatcgactcctccagcccgtacctgtacaaggcggtgacgaccggccagaccctgaaatcggctgagttcaaatggtacagaatcaatgacgcaggccaggaagtggagtacttcaacacgaagcttgagaacgtgaagctggtgaaagtgaatccgaagatgcatgacatcaaggatcctgctttcgagaagcacaaccacctcgagcagattgaactgcgctacgaaaaaatcacctggacctacaaggacggcaacatcattcattccgattcctggaacgaacgcgccactgcgtaa

SEQ ID NO: 126941 - DNA, 2640 bp, Enterobacter cloacae
atggaaaatccagccattctgttacgccgtcttaacccttactgtgcccgcgcgatggaaggggccgcttccctgtgccagacccgcgctcatgcggaaatcctgcctgagcactggctgctgaaactgctggagcagggtgagggcgacctgacggtgctggcgcggcgctacgaatgggatatggatacgatatggcaggatatgctgggttttctggacagcctgccacggtcggtgcgcagccgtccgcagctttcggagggcgtgcagtcccttatgcaggacgcctggctgcacgcctcgctggcgggggaagagcatatccgcagcattcaccttctgatggctctggtggaaaaaccgaaactgctgcgctgtgacggcctgtggccgctgctgacgctggcgcagagccagcttgagcgcctgcgtggacttctggatgcgcagtcggatgaacgcccggaggtgcagcaggaagcggagcttacgcagggggatgaggtggagtttgtcggccgtccggtgaacgcggatataaaaggagagctgaacccggcgttgcagaatgcgctggacaggttcaccctcgacgtcaccgcccgcgcccgtgagggcagaatcgacccggtctatggccgcgacaatgaaatccgccagatggtggacattctttcccggcgccgcaagaacaacccgattctggtcggcgaaccgggagtcggcaagaccgcgctcgtggagggactggcgctgcgcattcatgagggcaatgtgccggacgcgctgaagccggtctcggtacgcacccttgacctcggcctgttacaggccggggcgggtgtgaagggggaattcgagcagcgcctgaaaaacatcatcgacgcggtgcagcagtcaccccagccggttctgctctttatagacgaggcgcacaccattatcggcgcgggcaaccaggcgggcggcgccgatgcggccaacctgctgaaaccggcgctcgcccgcggtgagctcagaaccatcgccgccaccacctggagtgagtacaaacagtactttgagcgcgacgccgcgctggagcgtcgtttccagatggttaaagttgatgagccggacgacgacaccgcctgcctgatgctgcgcggactcaagtcacgctacgcggagcaccatggcgtacacattacggatgaggcggttaaagctgccgtcacgttgtccagacgctatctgaccggacgccagcttcctgacaaggcggtggatttgctggataccgcctctgcccgtgtccgtatgagcctggacactattccggagccgctgacccgcatgaaggcgcagctcacggccctggctatggagaaacaggcgctgctggaggatatcgcggtgggtaataccgcccacggcgaacgtctggtggccattgaacaggacgaaatccgcatcatcctgcaactcgacgaacgggaaaaccagtacggccaggagctgaaactcacggaagaactgctggcctgccgggctgatatctcccgtcagggggagattgcggacctgcaacagcaactgagcgatatacaaaagcataccccgctgctggagctggatgtggacgcgcgtaccgtcgccaccgttatcgccgactggacgggcgtaccgctctcttccctgatgaaggacgagcagacggaactgctgagccttgagcacagtctggcgaaacgcgttgtcggtcaggacagtgcactgaatgccattgcgcagcgcctgcgcgccagcaaaaccggtctggcgccggagaacggcccgcagggcgtgttcctgcttgtggggccgagcggcaccggcaagacggaaaccgccctggcgctggccgatgaactgttcggcggcgagaagtcccttatcaccatcaacctctcggaataccaggagccacacaccgtctcgcagctcaagggctcacctccgggctacgtgggttacggtcagggcggcattctgaccgaagccgtccgtaaacgcccgtacagcgtggtgctgctggatgaagtggaaaaggcgcaccgggacgtgatgaacctgttctaccaggtctttgaccggggcgtcatgcgcgacggcgaggggcgggaaattgacttccgcaacacggtgattctgatgacctccaatctcggcagcgacctcatcatgcagatgctggaggaacagccggaggcgacagagccggacctgcatgaactgctgcgtcctgtcctgcgggaccacttccagcccgcgctgctggcgcgcttccagacggtgatttaccgtccgctggcgcaggcagcgatgcgcaccatcgtggaaatgaagctggcgcaggtcagtaaacgcctcaaccgtcactacggtatgaagaccgatatccacgaaagcctgtacgacgcgctgaccgatgcctgcctgctgccggacaccggggctcgcaatgttgacagcctgctgaaccagcagattctgccggtactgagtcagcaactgctgagccatatggcggcggggcagaagccgcaggatcttacgcttggctgggatgaggaagagggtgtagggatcgtgtttaatgaggcgcacggaggctga

SEQ ID NO: 126942 - DNA, 606 bp, Enterobacter cloacae
atgcagatttgcatgatggattacggtaacctgtcggcggatggcaaaacggcgtacctgaaatgttacggcatcgggacgtttgaagtgctgtcgggcattgatcgctatatcaataaccctgactgcgccgaccatgagaaggcggctattccacccggtacatactgggtgaccgacaggcctgccggcagcctgtataaccgtgtcagggcagaggcgattgatgcctggcatggttaccgaaatcatcattctgaatggtttgccctgttcagcgataaaaccaaaaaagacagtctgaatgtgaatggtctcaaccgcacaggctttcgtcttcaccccctgaacagcgatggcactggcgtctcctggggctgtatcaccctgagacgttacagcgattttcagcatctgcgccgcctgttgttgaagcggggggcctttccggtgcctggcgggaatggcctgatggcctgggctcgtatcgatgtacgcggtacgcccgatttcagccagtgcgagaaagagatcagggaaaaggaagacgctgataagcgtcgggcacaacagtccatgaagaaacgcacggagagcgcagaatga

SEQ ID NO: 126943 - DNA, 228 bp, Enterobacter cloacae
atgaaaatcctgctcgtactggtcctggcgttgcttgggtcgttcttccttcccgatggcaaccttacctattttgtgaacaaccaccttccggtgcctggagacggtgaggaggggatggataaccttgcgatgacggtcatcctgataaaagccctgctgagcggtgccggggcatacctcctgctgacgctgattcactggctgcgcaaccgtccgaataaatag

SEQ ID NO: 126944 - DNA, 2637 bp, Enterobacter cloacae
atgagcctgacggataccctgaacacgatggtgaccaccgtcaccggaaaagccctgaaccgctaccgtctcgatattccttcctgtacggccgatatcgacgtggaggacttcagtggctcagaagcgatgagcgagctttactgctataccatcaacttcaccagtgccgacaagaacattgatgcccggcagatgctgagcaagcccgcgaccctgacaatgggtgcgggcaacctgctttccctgacggatcgcaaggtggttcacggggtggtgacccgtttcgagcgtaccggtggctccgctgatgaagcgcactactgcatcgtgctggagccttttctggcattgctggggaatcagttccgcacccatcgctttttcgtcaataagtcggtgccggaagtggttgcagaggtgctgcaggaacatggtctgaaaggctgggaatatgagtttaccctcaaagccgactatccaaagcgtgagcagattaaccagtatcaggaaaacgacctcgcgttcattgaacgcctgctggcggaggtgggtattttttacttcttcaccctgcagcctgacactcagaccgaagtggtacatttcgcagacaagcagagtgcctggacgtttggtaagaaactgcggctgaacagcccgtcagggatgaatgacaatgcggccgactcggtgtggggcgtacacgtctggcataacgtggtggagcgttcggtcaccgcctgtgactacaaccaccgcgaagctcagaatgtcctgatgtccgtaccggcggacatgacacgcggcgacggggaggggaacacctacggcgatgtgtatcattatcgcccgcgtcaccttgaacgtggcgacaaaattacaccgtcggcagaaacaggtaacttctgggcacgtctggagcatgagcgcttcctgtccacccagaccacagtaactggcagcagtaccgaccataccctgggcccggctcaggtgctgactatcaccgaaacggctattccgccgacgctgccgcgtgaaaccgaaaacggtctcgtcatcattagtgccggctactccgccagtcgccagagcgcgctgaaggtggaatgggctgccatgccgtactacgataaccgatgctggcgtccggcttctaaaaaacgcccggtggtcagcggtaccctgatggcgcgcgtgaccagcgccaaagataacgatatctacgcctggcaggatgcatcgggtatgtaccgggtgaagtttgatgctgaccgtgatgataagcgtcagggccaggaaagtatgccggtgcgttttgccaaaccttacggtggcgacaagtacggcttccatttcccgctgatacagggtactgaagtcgccattgcgttccatgagggtgatccggatcgtccgtatattgcccatgcccttcacgactcccgccacgttgaccatgtcactgtggccaacagtacgcgcaacgtgattcgaacagctggcctgaacaagctgcggatggaagataagcggggggaagagcacgttaagctcagtacggagtatggcggaaagacccaactcaatttagggcacaacgtagacgcttcaaggaagcttcgcggcgaaggtgcagagctgcgtactgaccgacatgtttccattcggggtggtgccggggtgtttatcactgcagataaacaaccatttgccggggacaagatgctttccatgcaggaggcgatagcccagcttgagaatgcactgagtattgccagaagtttgtctgatgctgctgaaacggcacaagcacttcctgctgatatacagagccaggtgaagttgactgatgctcttaaagaccttgcccagccaggaatggtgctaaatgcgcctgaaggagtaagcatcaccagcccgcaggcgattcgtatggcgtcgggtagtgccagcgttgggatcatgtcgcaacagaatacagacattagcgcacttaaacgatttaccgtagcagcaggtgaagccgtgagtatgctggcccgtaaggccggaatgaaactctttgcggctaagggaaaagtagaaattcaggctcaggatgatgcgcttgatgcgatagccaaaaaagatgtgaccgtaaccagtacagaaggacgaattgagatcacggcggcgaaagatgttgtgctgaaaaatctggatgggtcgttcatccagttgcagggtaagaatattattctgggctgtgaaggtaatatcctgtggaaatgtgccaatgcgcagaaaatgggtagtgtaagcatgagtagtgttatgccccagtttccatctggatatagtgggaaatttactgcatcgtctgatgcaggagttccagttgccgctgcggcatacatgttgacatcgagtaatgggcagaagttatttggaagaacagatgagaacggtgaaacagttccagtttattcatcaagcccgaatgagagttttgaacttgaaatgattcaaagtgattattggtacgatagtgaaaatattgtggacagagtacattgtacatcattttcagatatgtcattccaggacgatggttgccaatgcagagtttgtgaggaaaataaaagtgcgtaa

SEQ ID NO: 126945 - DNA, 576 bp, Enterobacter cloacae
atggttgccaatgcagagtttgtgaggaaaataaaagtgcgtaatattacttttaagtttaaatttttgttatgcatgtttcttactccatttttttcatttgcaagtaacgcatggaatgcaaaatcagcacaaatgcaatgtggctcagctttggtaaaggtaagtgctgaatgccagatgaatcaaaaaagcccaacggaggatatatgcaaaaattaccatttggaaataaagaacggtacaaataaaaaagagttttctttgccatacatcccgaacagccaaaaagctctcctggaaaaacagggttactccttcaataatgtagttaagcctggtgattgggctccctccacaatgaaatgttatgacaatgaaaatattgtgatcggatatcatcttgggctggatgaagaggagagcgtaaagggttcattattgtcctatattgatgccccatttattgatctttcagggaactttattacaggcaacaaactttctgagcttagatctcgagaaatgaaaaacccctacgacaatacaaacatagactttattagcaaccgctga

SEQ ID NO: 126946 - DNA, 1083 bp, Enterobacter cloacae
atgtctgatttatatgagtatttaaattctaaaaagggaaaggcatattttgatgaccagattaaaccattttctttaatctcactctatccggatatagatacatcccgaaagctaagaggtaacagtcgtacaataggagatgctgataaagatgtccaggatgcaattatagatatgataattaccatagctgtccgctatggattaagttataaagagatatcatatatattattaaccactaaggttgagtcgggatttaaccccgatgcggcagcggcgactactagtgcagctggtttagcacaaggaacggttggttttatcgaagatgcattgacacagtctgaagacattcttggttttcagctagatcttcgtaatgaagaagtttttgacgctgaaaaaggatgctatgcggttatttattcctttttacttaacaaatcaaaggtgatggagagttacacatcagatcaaagtgaatactgggactggctttatttgttacatcatgatggtgcctatagtttaggaaaatatctcaatggtacacgtgagaaaagtgctgacggcaagaagtgggcgctttatataaataagcatttatcagttgtggaagggttgctaaaaaacactgaagttaatactaaatttaaactatctacgggaaatgatacagcatacaaaaacaaaaattatattgctgcgatctctccatttccaagtttaacatgcccaaacttagtgtcagactatgagaaagctctagtttttatcaaaggcgtgactgatgcaaacgggatgactgaatcagtcaatgctatcgcaggttcagaaattgtgtttactattcttgctgataattacaaagaattagctaaagcacctgttgaaaaaaataataatggaacacataagactctaacttataccgttaagaaaggtgacaccttatcagcaatagcgaagaaatatagtgtgtcagtagagaaattggcaagaattaataagatccataacgtaaacatgttgcgtattggtgcgaaattaaaaagggtatacggatttaatggttga

SEQ ID NO: 126947 - DNA, 711 bp, Enterobacter cloacae
gtgttgcctaaaggaagtaaatctgcggactcagaaaagaaaaacaatgtaatacatattaaaactacgacgacggataattctgttgctagtagaagcaaaaatgaaccagagaagcatcaaactacttccgaggggaaaactaaaaatgtttctgttgacaaaaattttgagccggtggtggatttttctaaagatatccctctcagcctgaggaatctggtaaccaattattctcttgagattataaaaggaataatgaaatcgtcaggggtgcataaaattacgataactagtacgttacgttctgttgaaaaacaagtgaatgctatgtacgttaatatgcaaagcaaggggatagattcacagttagcatattatgcaaaagctggcagagaagtcattaaagcggccatagatgccggtgggaatgatcgtagcaaaacagctgcagttaaagcagccatgacagaaaaagtaattcaacttcaaagtgaggggcgattagtatcacgtcactgtgtttcagagctaatgtatgcagagagaaatgtgtttgatattagtaaaaacctatcaagtaaacgaagtgtgttattagcctttgataaagctcttacggaatatgctgctaataatgatggctttaaatacattagcccttttttgcatagcggtgagccagcattccatgtggagattgtacaatga

SEQ ID NO: 126948 - DNA, 669 bp, Enterobacter cloacae
atgaaaatatttttagtaacttttctgtttctttttccttttttttcaaatgcaagtgttttttctttagaacctggattataccatctcgaatgggcatatggacctaatgacaattataaaattattgctggcgttgttggaggggttgatgaggttaacggggtttattatttaaaaaataaaaatgatgaccagtctaacgatgaggtatatattgtaatcaataagggttctggtgcttttttcttcaaacatgaggaaattgaaggtgggccaactattgggtgggcaaacttccaattgaatgataaagcaatattaattgatactccaacaacaaagaatttttatgataatacagatggtgatagtgaccgttacataaaatatagggtaggtgttaaattccctggaaataagaaggctaaaaatacatctgaaattgctcctatagaaattttaaaaaatgatgttttcaagatcgactgttctgaatattttaaattaaacgaaaaatacgtaagtaaagcgaaaagaaataatccaatggaagactatagtagtcgtgttttattgagtaatgatggcttgtgtaactccattttaaataagaataataaagttgaggtgttaaaaggttggatgcttttcaagagaattagctaa

SEQ ID NO: 126949 - DNA, 474 bp, Enterobacter cloacae
atgctatatttagatagggttatgtttaagttaatgcccttcattgctttgttattacctaccattgcattcggcaatggcatcaaaacaaaagatgatttgttttatggctattgggtttataaagataagggagtgttaaaagaatatggggtattggctaacaatccaagaaaagatgctggtgaatacattttaagccccgcctctgaacttgccgccactgatgagatttacattcaaataaaagataatgtacctactatattcttttatcatgaaagtagtgatgccgatttaaatgttgttggttgggcgggtgctaagttttcagggggcgaaatgattgtttcagcaaacactattcgttttttaaaagaagattcgaaagaacgaatttctgttggtgataaatttaatggtaaagttgttcgccttgatattggagaaggcaccgatagaagaagtcaatga

SEQ ID NO: 126950 - DNA, 1161 bp, Enterobacter cloacae
atgagctgggagcgtcagaaagcgacaattgctgcagaacctgatgagccttcactggtcatctggctgattgcaggccttgttgctgttattgctggagtgttgctctttgtactccacgccaatcagtttcttggtggattgcaaaaatttaacctctggattgttgccggaagtcctcttttcatctggttcgtgacgatttgtattcgcggctggatgtataaccacgcaatggagcgtcaccagtttgaatctgctgaagcagattatgcacagcagcaatgggtttcctgggccgggcgttatctggcggttctgtatagccgggttattctgcctgataaattgacaccatcaacatttctgcaggcccccagagatctcgagcagagtagctctctttctcggagaataacgttacccgctggcgaagatactttttcagtattgattgggggactggacataacagaattacagcgcttatcagacctcccttttcacgcaaccttactgactgattcacacgatcctgatgagacattgcagagagaatttacagcatactggctccagttagttggaatggcctatcccgtaccgttactgacgattcttaaaggccgggccttcgattgggtgggcgaacgccttaaagcaccgattgtggatgtagagcttttgttggttcaccagactcagggaggaaatgagtacagtgattcgctctcggctttaatgttgacctctgatgatgtagcaacgaagtaccagctaaagcatcacgctcgcctgcttcggcctatgtcgattgaatcaacccaaatgctgagtaaagagctcgatatctttttctcgacccagtcacaggctattgctgcgcgtgcaattgtgggtgacagcattgagtggggcgatgatttttccgctcttctgaccagtgcaaaacaatatgaaggcagctggaaacctcagcagtgccactggctggaaaaatatgccggactcagggggcccttctcaccatggattatggccgccgtcgtcagtgatatagctctgctcacaaaagaagattgcctgatgctttcgggtgacaaagagcagcgatttgtaaataccgtaactacagggaatctgatgaatggcgaaggatag

SEQ ID NO: 126951 - DNA, 3417 bp, Enterobacter cloacae
atggcgaaggatagttcagtgtggcgtggtaactggggacgcctcagcattaccacactaattgctgttgcgataggattggtcatctggaaaaagggtgatgcgttcggactgacaagcaatggactaaagctgctgggatctgtggcagctttaatccttcttttgcttgtccgccatggcaaaatcattagtctcgcgcttaaacaacagtggtcgcgtttgcaggggaagcgtaaaaatgtcctgcctgccgatgaaggccgggtcaagcagaccgcacctcgcaatgtcaccgtcgacaccatccgtgacgccatgcgtaacctctacggtcgtcgctggggccgtaaaacacgcatcctgctggtcactggcaccgtctctgaggtagaacttctgacccctggtcttacagcccagctctggcaggaagaccgcggtacattgttactgtggggcggtgatctcaatacgccagcggacagtgcctggctcaccgcgctgcgcaaactgcgccgtcgcccggtagatggactggtgtgggtcacttcagcgtttgaccagctctcagcaccagggctggaacaaccgttgccggtaccgtctgaaagcaccatggattccctgtctcacgccatcagcgcccgtatggaaacgcttggctggaagctcccgctctatgtctggtccctgcatccgcgcgccggtaagccggaagggcgtatttcgcaggcgaccggctgtctgctgcctgccggttgccgtaccgaagggctggcagagcaactctccgccctgacgccggatttaacttcacagggtctgcagcagatctgcggtgaggtgaaacataacttcctgctgacgctagccgaccagctcattcgtgaacctgagagcctgactgtgccgctgtctgtgatactcaatccgtaccggccgttgctgctggctggcgtggtgttcagtcagccttctgccggagctgaacgtgccgtgcctcaccactggggcatggataagcgctgggatgtcctgcctgattctctccggacactccctgccgggctacgtccgctcaagcccggtattccctggcgcaggatcgtggcgtttgccgccggcctgacgatggcaggctgggctgcgtggatgagcatcgcgtatgtcaccaaccgcagccagattgacggtgcaaaggcccaggctttgcttgcctcccgacagaatcagccactggagcagcgcctgcacgcgctgtctgggcttcagaaaacactggcctgtctgcagtaccgttctgagcatggcgtgccctggtatgaacagggggggctgagtcagaatgacgcgctgctggccgcactctggcctcgataccgggacagcgcactgccgctgttgcgggatgcagccgcagaccacctgcagaagcagatcagtgccttcaatgcgctgccgccggagagcccgctgcgtgagcagaaggcaaaaaccacctgggagcagctcaaactctacctgatgctggcgcgtccggaacatatggatgcgacctggttcagctctgcattgctgaacgactggcagacgcgtgacggtgtaaaagacggcatctggcaggggatggctccttctctgctgtcgttttatggcgcgcagctggttgcgcaccctgaatggaaactgcgtgctgatgaaagcatggtcagccaggcgcgttccctgctggttcgtctgatgggcgtacgcaacagcgaatcgaccctctaccagaaaatgctcacccaggtgtcgcatctctatgtcgatatgcgactggaagatatgaccggcgataccgatgcatcccgtctgttcagtacctcggaagtcgtgccgggtatgttcacccgccaggcctgggagcaggccgtgcagcccgctatcgagaaagtggtgaaagcgcgccgggacgaactcgactgggtgctgactgacagcaaacgtcaggtgaataagcaagatgagacttcaccggaagccctgaaaactcgcctgacggaacgttactttgccgactttggcggtgtctggctggagtttctgaacagcctgcgctggaatcaggcggccacgctgtcggattcaattgaacagttgaccctaatggccgatgtgcgtcagtcacctttggtggcgctgatgaacaccctgaatgttcagggccgcaccgggcagacaagcgaagccatttcggattcgctggtgaaatctgcgaagaatctgctcggcggtgataaccaggatgccattgatcagagcgccggtgttcacggcccgctggatgcgacctttggtccggtactggcgctgatggataaaaaccggacaggtgcacaggagttgagcctgcagtcgtacctgacccgggtgacgcaggtgcgtctgcgcctgcagcaggtgatcaatgctgccgacccgcaggcgatgacccagaccattgcccagaccgtattccagggcaaagccgtggacctgaccgaaacccgcgactacggcagcctgattgccgccggtctgggccaggagtggagtggctttgggcggacagtgtttgtgagtccaatggagcaggcctggcagcaggtactgcaacccgccgctgaaagcctgaatgcacagtggcagaccgccgtggtggatgactggaacagcgcctttggcgggcggtatccgtttaaagatgtcagcagcgaggtctccctgccgttgctggccagatacctcaacgctgactccggacgtatcacccgttttctccagacccgtcttaacggcgtgctgcacagggaggggagtcactgggtgccggacagcatcaacgcccaggggttaaccttcaatccggctttcctgagggcggttgataccctgagccatatttccgatgtggtgttcacccgcggggaggcggggttgtcctttgaactgcgcccgggaacggcggatggcatcatggagacgcggctggttatcgacagccagaagctgacttatatgaaccagatgcccgcctggaagcgttttacctggcctgcggacaccgaagcgccgggtgcggcattaagctggataagcacccaggccggcacccggcagtatgcggatatgtccggggcgtggggctggatacggctgctggacaaggcgtcagtcagcgcgtatcccggcacgggcagcagttacagtctcacgtggcaggcgcaggatggcagaccgctaaactataccctgcgtaccgaggcgggagagggcccgctggccctgctgaagctgcgaaacttcagcctgccgttgcagatattcaccgtcagcgagcctgccgctgaccccctggctgatgacaccgaccccacagaggaaacgtactga

SEQ ID NO: 126952 - DNA, 1578 bp, Enterobacter cloacae
atggcatccgttcacacactgattacagcctgccaggccgcgccggcagcgctcgcgaaacaggcgcagcagcgcctttccctgtgggacaactggctgcggccagtacaggcggacaaccccaccggcgctgaccccggctacgatgatgattttcagcaaatgcgtgaggaggtgaataagctctccggcgcggataccgacctgatttgtacccttgcggaaaaactgctgaccaccacttcaaaagatattcgtgtcgccacgtattacgcctgggcgcgactgcaccgggatggtgaagcgggactggcggacggactggatctgctggcgggtttaatgcagcgctttaacacacagttgcacccacaacgcgaacgcagccgacagggggcgctggagtggctcgccagcaccagaatgctcgacagcctgtctctgtatccggaggccaataatactgacaccctgcgcattgccggtgccctgtggcttacggagcaggtggcggaaggcaccatccccggcgcgctgtatcaggcgctggaaacccggttacagaaatccggtggcccggatgcggtggtgccgcagaatgtcagcgacacgggccacgaagccacatcacacgtcagcgtaccgtcgttaacaggcatcgcctcaggccaggagttactctcacaggcgcggatcctggcggactacctgagaaatcagccggacggctggttatccgcccaccggctgataaagaacctgcgtcacgacaccctgcgccagctaccgccgcttctggccgacggcaaaacccgcatcgagccgccaaaaccggaccagcgcgcactgctgaaacggctctacctgcaacagagctggcgtgagctgatggaagaggcggacagcctgctgtcgcgcggcgcaaaccacctgtggctggatgtgcagtggtatctgcatcaggcgctgctgaaatccgggcgggagcacgaagcggcgattatccaggccgacctgaaaggcctgctctcgcgcctgacggggctggagacgctggcctttaacgacggtacgccgttcgccgatgaagtgaccctgaactggattcagcagcaggtgatggacagcggcgggggctggcaggaggactcagccgtgacagcggcgaccgtttccggcgataacgatatcctgcaactggagagcgaagcgctcacacttgccgacagcaacggccccgatgtggcgctgtcctggctgcaaaatcgtccgggtatcaccacggcacgcagccgctggctgctgcgtctgttaatggcgagagtggccgaacagaccggtaaaaacgagctggcgctgcacctgctgggcgagctggatggctgtgctgctgccatcacgctcacgcagtgggagccggacctgctgttcgaggtaaaagcccggcgcctgaagctgctgcggatgaaggccggacgtaatgatacggataaaacacgcctgaatccggagatggaacatctgctggcggggctgattgccatcgacccggcaagagccgccgtactgtgcgcctga

SEQ ID NO: 126953 - DNA, 1050 bp, Enterobacter cloacae
atggcgcaggtacggcaccagctgccgtatatgaatttttaccgcttctgccagctgctggaacagagcctgccggagatgccggtgcccggcagcgactggcgggtgcggcaggagccggtgcgttttcgcccgcatccggggatggggtttccggccggtgaaatccgcagtacagaagacccggaacatccgcacctgccgccgtcggtgcgcgtcacctttatggggctgtacggcgtggagtcgccgctgccgacccactacaccgacgatatcgctcagcgacgggaagggcacgacgcgacgcaggattttctggatattttcagtcaccggctgattacccagtattaccgcatctggcgtaagtattcctacccggccacctttcaggccggcggcgctgacaacacgtcacaatacctgctggggctggcggggctggggatacccggctgcgcgaagaccgctggtacgccgctgtcgcgatttctggcgctgctgccggtgatgatgctgccgggacggacggcggagggaatgggggcgctggtgcggctgctggcaccggatacccgcgcaacggtgtatcaccatgaccgttgccgtatcccgctgaagcagccggttgcgatgagtacatgccagccggtcagcctgaagcaccgtccggtgatgggcacgcatgccacggatgtgaacggccaggtgctgttgcgcctgagcacggacaacccggaagaggtccggggctggctgccgggcggtgacctgcacgctgacctgatggcgctgctgcacgtgtggctgggcgcgcacctggatgtacggatgcagttatgcgttgcccggcatttactgccggatgcgcggctgtcctgtaatgcggaacagaccgcgcaggtcgggcgtacggcggtgctgcgtccccttaatgcgcaacagaacagaaacgacattatcaccattcaccttggacgctttcagcgcgtccgggaaaacattcagcgaaggaagaacgatgaagatggcgattaccgctggtaa

SEQ ID NO: 126954 - DNA, 450 bp, Enterobacter cloacae
atggaaatcttgttgcggaataaattcagttcagtgggaatgttactcggggttattgcactgcttgtctcattagtgcagttcacctttggtcctttttcaacaaagtcgacagcgcttgaaattgttgtggctgaaaaggtttcggcggtgaaaaaagggattattgctggcatcaaaggggaacaaccgaccgttgaggcgaaaaagaaaacagtcgatatcgacattattcttatcaatagcggagtaattttgtctgtggtggcattagggcttgccttcacgggtgggatgcgcaaagagaaccgatggggggtgagtggcgcactgtttttttctggggctacgctcgcttttcatgcggcgttactggcttttggtctgatcgtcgcagtgttgctgctgctgttggttatttcagtcgtcagcggaagtacactgttctga

SEQ ID NO: 126955 - DNA, 1533 bp, Enterobacter cloacae
atgaaaacaacgctgcttacaaccctgattgccgctacgctcgccctgagcgcccctctcgcgctggcggcggtgccaaaagatatgttggtgattgggaaagctgccgatccgcaaacgctggatccggcggtcactatcgataacaacgactggacggtgacctacccctcgtaccagcgtctggtgaaatacaagccaggcaccacggaggtggaaggcgatctgtcgacgggctggaaggcgtctgacgaccagaaagagtggacgttcaccctggcagataatgcaaaattctccgacggcacgccggtgaccgccgaagcggtaaagctgtcgtttgaacgtctgctgaaaatcaaccagggaccttccgaagcgttcccgaaagatttgaaagtggacgcggtggatgagcatacggtgaaattcaccctcagccagccgttcgccccgttcctctacacgctggccaatgacggcgcgtcgatcgtcaacccggcggtgctgaaagccaatgccgccgacgatgcgcgcggtttcctggcgcaaaacaccgcgggttccggaccgtttatgctgaaaagctggcggaaaggtcagcagcttgtgatggtgcccaacccacactggccgggtgaaaagccgcacttcaagcgcgtctcggtgaagattatcggtgaaagcgcctcgcgtcgcctgcaactttcccgtggcgatctggatatcgccgacgccctgccggtggatcagcttgctgccctgaagcaggaaggcaaagtggccgtggcggaatacccgtccctgcgggtgacctatctctatctgaacaacagtaagcctccgatgaatcaggtggatttgcgccgcgcggtctcctgggccaccgattatcaggggatggtgaaaggcattctcagcgggaacggcaagcagatgcgcggcccgatcccggagggcatgtggggcttcgatgcgaacgccatgcagtacagctttgacgaggctaaggccaaagcggcgctggagaaagtcaacgataaaccggccagcctgacgttcctctactccgataacgacccgaactgggagcctatcgccctctccacgcaggcgagcctgggcaagctggggattaacgtcaagcttgagaaactggcgaacgccaccatgcgcgaccgcgtcggcaaaggtgattatgacattgcgattggtaactggagcccggacttcgctgacccgtacatgttcatgaactactggttcgaatcggacaaaaaagggctgccggggaaccgctcattctatgagaacaaagaggtcgatgcattgttgcaggcggcactgaaaaccaccgatcaggcggaacgcaccaaagattatcagcaggcgcagaaagtagtgattgacgaggcggcttacgtttatctgttccagaagaactaccagctggcgatgaacaaagaggtcaaaggcttcacctttaatccgatgcttgagcaggtctttaacatcgccaccatgagtaagtaa

SEQ ID NO: 126956 - DNA, 855 bp, Enterobacter cloacae
atgacgaccaaacctgaggtgttgagccgtatcgaagcgacctttagccagctcaccccgagcgaaaaacgggtggcaagctggatgctggcgcacgtcgggcagatcccctttgaaacggcagagagcgtggcgctggccacggcaaccagcgggatcaccgtcggacgctttctgcgcaagctgggctatcgcaacctggacgacgccaaaaaaagcctgcgcgatccccatcagccctggggcattaacgagcgtctcgactcctggaaacagcaacagccgctgtcggatcgccttcagcactccctgtcgctggaggtggacgccattgcccatgtctaccagctggcgcaaagcgaaacgttcaggcaggtggtccagcaacttacccatgccgacgccgtcttcgtgctggggatccagtccacgcgcgggatcgccaatgcgttcttcagccatctggagtacctgcgcccgcgggtgagctattccgaagggctctccggtagctgggtggagtcgcttaattccggctttgcgaacccgtatatcgtgctgacggatacccgcgcctactccgccattgcccgccagtactgccgcgtggcgagcgaaaaaggcctggcgatggcgctgatcaccgatatctggtgcccgtgggcgcgggattacccgattgatttactccaggtgaaaaccgataccggccatttctgggattcgctggcgccggtgagctgtctgttcaacctgctgctgtcgggcgttgtggaggcgctgggggatgcgctgccggaacgtctggcaatcaaccgacaactacaacaagagtttggacaatttgaacgctaa

SEQ ID NO: 126957 - DNA, 417 bp, Enterobacter cloacae
ttgttcaggccgtcatcctggacggcggtggctgacctgctgcccgaggcgaaaagacgttacagtgtcacgattgtgaccaatgccagccccgacaggtttgatatggtggcaaagacaacccctgcgggcagcaccagggaaacggtggcgccgctgtcggtggcgtatccgcaggaggtttattccctgtctcatgttgccattccgttcccgccggatgacgatctgtatggccgccatcctgcggtgaaaaaccactacggtatcagcctcgggacgatagccctgtggggagaaacatcggttctgagcgtcggcaaagatgcgctgatgcgcgtgacgtcgaatccgttctatgactacatgcagacgcggatcgacagccgtatcggggagaatcaagcccaacaatag

SEQ ID NO: 126958 - DNA, 600 bp, Enterobacter cloacae
atgccgcgtgatgctcaggccgtcagggtcacccgtaaggtgactgatgaggtcaacgtatacgaggaagatatcgagagggttatcgggatttatgcccctcatctcggggctcatcgtgtccatgtaacccgtacagccgaatggcgcatcgttccaaaggttttggccgttgagcctttgaccttaaaaagcggctctgccacgcctcggagtcctgtcaataactgtggaaagcttaccgccggggacgattcagttatgacccccacacagtctgagcaagccgcagcggtgttaaatctaattgagcgcggggttatcggctggaatgagccagacgccgtgaaagtactgaacggcgcgttaaaagctggaaggcctcgcaagaatcctcaacaaagaagcaatgcatcgctcaaaacgagcgagcaagcgccctcagctaggatgactaagcccgaaagggagcgtgtggcgaaaattcgtttcgatttgagtcagaagggcattgccttagacaatcgtgaattagagctcttggctcgtggtgctaccttaattctgggcgaattagtgctgacctgcccccacgattag

SEQ ID NO: 126959 - DNA, 357 bp, Enterobacter cloacae
atgaagttaacagcccgtcaagttgatactgctaaaccgaaagaaaagccttacaagttatctgatggcggtggtctctaccttgaggtagcgaccagcggctcacgttactggcgtttgaagtaccgttacgctggtaaagaaaaacgcctggcctttggtgtatatccagaagtctccttagctgaagcgcgtgataaacgtgaagcagccaaaaaggtactggcagcaggtaacgatcctggtgaagtaaagaaagcggagaaaatcgctcagaagctaggctttgaaaacacttttgaagtaattgcgagagaattgacctgctccccgttgattagtacaccccgatgttag

SEQ ID NO: 126960 - DNA, 2328 bp, Enterobacter cloacae
ttgagcacctcaacaaaaaccattctgaccgccgcccactgggggccgatgctggtcgaaaccgatggcgacactgtgctgtcgtctcgcggggctttgccttcgcgccatctcaactctttacagaccgtcgttcgcgatcaggtacacagcaaaacccgcgtccgctggccgatggtgcgaaaaggctttctggcgtcaccggataagccgcagggtattcgcgggcaggatgagttcgttcgcgtgagttgggacgacgcgctggcgctgatccatacccagcataaacgcattcgcgccagctatggcccgtcgtctatttttgccggctcctatggctggcgctcgaacggcgtgctgcataaggcgtccaccctgctgcaacgctatatgagcctggccggaggttacaccggccatctgggtgattactcgaccggcgcggcgcaggcgatcatgccgtatgtcgtgggcgggaatgaggtttatcagcagcagaccagctggccgctggtgctggagcatgcggaggtggtggtgctgtggagcgccaacccgctcaacaccctaaaaattgcctggaatgcgtccgacgagcagggcgtttcctacttcgatgcgctgcgcaaaagcggcaagcgcatcatctgcatcgatccgatgcgttctgaaacgctggatttcttcggcgacagcgccgagtggatcgcgccccatatgggcaccgacgtggcgatgatgctgggtgtcgcccataccctggtggagaacggctggcacgatacggaatttctgacgcgctgcaccacgggcttcgataaatttgctgactacctgacgggacaaaccgacggtattgccaaaaccgcagagtgggccgcggcgatttgcggcgttgatgcggctaaaatccgcgaactggcggcgttattccatagccatgtcacgatgctcatgtccggctgggggatgcagcgccagcagtttggcgagcagaagcactggatgctggtgacgctcgccgcgatgctcggacagattggcacgcccggcggcggttttggcctttcctatcactttgctaacggcggcaacccgacgcgtaaagctgcggtgctggcttccatgcagggctcggtgcagggtggcgtggacgctgtggataaaattccggtggcacgcattgttgaagccctggagaaccctggcgggttttatcagcacaacggtcaggatcgccatttcccggatattaagtttgtctggtgggcgggtggggccaacttcacccatcaccaggatactaaccgcctgatccgcgcctggcagaaaccggagctggtggtgatctcggagtgtttctggaccgcgtcagcgaaacatgccgatatcgttttgcccgccacgacctcgttcgagcgtaacgatctcaccatgacgggggattacagcaaccagcatatggtgccgatgaagcgcgtcgtggctccccgggatgaagcgcgggatgattttgacgtctttgccgacctgagtgaaatgtgggaagcgggcgggcgggagcgattcaccgagggcaaaacggatctgcaatggctggaaacattttaccagattgccagccagcgcggggctgcgcagggcgtgacgctgccgccatttgctgaattctgggaggcgaatcaactcttcgaaatgccggaaagcgagcagaacgcgcggtttgtgcgctttgctgacttccgtcgcgatccggagaatcacccgttaaaaaccgaaagcgggaagattgtgatctacagcgaacgcatcgccagctttggctacgcggactgtccgccgcatccggcgtggctggagccggacgaatggcatggcaatgcgcagccggggcagcttcagctgctgtctgcccatcctgcccatcgtctgcacagccagctcaactattcggctctgcgcgagcagtatgcggtgtccggtcgtgagccgatcgcgctgaatagcgatgacgcaaaggcgcgggggattaacgacggcgatctcgttcgggtctggaacgcgcgcgggcaggtgctggcaggcgccgtggtgagtgacgggatccgccctggcgttttctgtattcatcagggcgcatggccggatctggcgctggacgagggcggtatttgtaagaacggcgccgtaaacgtgctgaccaaagatctccccagctcgaagctggggaatggctgcgcggggaatacggcgctggcatgggtggagaaatatgagggaccagcgcttacccttacggcgtttgatccgcctgccagctcatga

SEQ ID NO: 126961 - DNA, 525 bp, Enterobacter cloacae
atgaaaaaggttatttttgcactgtctgctctcgctgtagtttccatttccgctttcgctgctggatcgggtgacggcaccgttaaattcactggtgaaatcgttgacgcgccatgcgtagtttccactgactctcagaaccaggaagttgtgctgggtcaggttaagaaatctatcttcaaagctgttggcgacaaatctgtttccaagccattccagatcaaactggaagactgtgatatcacttctaaaagtaaagttaacgtgagcttcaatggcgttgcggatgcagacgacgcgaaactgctttctgttaatactgaagcaggcgcggcaactggcgtgggcattggtatctacgacaacgctaacaaagcggtagacatgaacaccggtaaatctactaccactctggctgctggtcagaccgtgctgtactacaccgctaactatgttgcgactaaagccgcagtcaccacgggttatggtaacgcagaagtagacttcaacctgacttacgaataa

SEQ ID NO: 126962 - DNA, 699 bp, Enterobacter cloacae
atgaaccgcttacgtttggcatcttgcgcagcactggcactggcactgatttcacaacacagttttgcaggcggcgtggcattaagcagcacgcgtattatttatgacggcagcagaaaggaagcttctctgacggtacataataaaagtacaaccgatgaatttctgattcagtcatggatagatgatgtaaatggcaataaaaaaacgccatttatcatcaccccgcccttattcaagctaagtccgacgaagaataacgttttacgtatcgtgaatacgtctgatgccttaccgcaggatcgtgagtccgtttactgggttaacgtgaaatctattcctgccagaagtgaagacgcagaaaataaaaacgtcctacaaattgcggtgcgcacccgtttaaaacttttctatcgcccggcgggtctgaaaggtaacagtatggacggctggagcaaattgcagtttacccgcgtaggtaataatcagataaaagtcgaaaatccatctgcctttaatctgacattcaataagttatatgccaacggccaaaacatagaaaaagctggaatggtaccagcaaaaggcgcgctgaatattgaactgccagccggtacaggcaaggtaagcgaagttaaatacaacatcattaatgacttcggaacggctggcgacatgctgacacagcacgttaattaa

SEQ ID NO: 126963 - DNA, 2529 bp, Enterobacter cloacae
atgccatggacgcatcttcctccggtcaataagaccccgcgtttcccgctgtccgcgcttgcgctgatgattgcgggcacgctccccgcatatgcgggaacatttaacccgcgctttctggaagatgtgccgggtattgaccagcacgttgacctttcaatgtatgaatccaacaaagccgatcagctgccgggtaaataccgtgtgtcggtgatggtcaatgataaaaaaatggagtcccgcaccctggaatttaaggcagcgacagaggcccagcgcgcaaaaatgggggaaaccctggttccgtgcttaagccgtgtgcagcttgaagatatgggtgtgcgtattgagagcttccctgcgctgaaaatggcgccgccggaagcgtgtgtgccgtttgacgagattattccgcaggccgccagccatttcgattttgctgaccagacgctgatcatgagcttcccgcaggctgcgatgaagcagacggcgcgcggtacggtaccggaatcccagtgggacgaaggggtgaatgcccttttgctggattataactttagcggcagcaatgccagctacgatgcgcacgacggtaataccagctacgacagcgacagttattacctgaacctgcgcagcggtatgaaccttggggcatggcgtctacgtaactacagcacctggacgcgaaacgatggcaataaccaatgggacaacatcggcacctctttaagccgggcgattgtgccgctgaaatcccagttgacgctgggtgatacctcgacgtcgggtgatatttttgacagcgtacagatgcgtggtgcgcagttaacttctgacgaagagatgttgccggacagtcagcgtggttttgcgccagttattcgcggtattgctaaaagtaacgccgaagtgaccgttgagcagaacaactacgttatctaccgtacgtttgttcagccgggcgcattcgaaattaatgatctgtacccaacttcaaacagcggtgacctgacggtcactattaaagaagcggatggcagcgaacaaaagttcgtacagccgttctctgcggtggcaatcctccagcgtgaaggccatttgaagtacagtctttcggcaggggaataccaggccgggaactataacagcgccgagcctaaattctggcaactggatgccatgtatggtctcccgtacggggtgaccgtttacggtggttcgatcttctcggacgactattatgcgctggcgggtggtgtcggtaaaaacttcggctacatcggtgctgtctctattgatgtaacgcaggccaaaagtaatctggcgaacgaagagagtgcggaagggcaatcttaccgcttcctctactccaagagctttaacagcggcaccgatttccgtctgctgggttacaagtattcgaccagcggttattacaccttccaggaagcgacggatgtccgtagcgatgcggacagtacttacagccagtaccacaaacgcagccagatccagggcaacgtgacgcagcagttaggcacctggggctcggtctattttaacgtcacgcagcaggactactggaacgatgaaggcaaacagcgctcgctgaatgccggttataacggccgtattggtcgcgtgaactacagcgttgcctatacctggacgaaaagcccggagtgggatgagagcgatcgtctgctgtcattctccctctctattccattgggacgcatgtggagtaactaccaccttacaaccgatcagcatggccgcaccaaccagcaactgggtgtgagcggtaccgcgctggaagaccacaacctgaactatagcgtgcaggaaggctatggcagcaatggggtgggtaacagcggcagcgtgaacctggattaccagggcggtgtggggagtgccagcatgggttacaactacaaccgcgacggtcagcaattgaactacggtctgcgcggcggcgtgattgcccacagcgaaggcattacgctttcccagccgttgggtgagtccatggccattatttccgcaccaggtgcgcgtggtgcgcacgtcattaacaacggcggcgtggaagtagactggatgggtaacgcggtcgtgccgtatctcacgccgtatcgcgaaacggaagtctcactgcgaagcgacagtcttaacagccaggttgacctggataccgcctccgtcagtgtggtaccgacgcgcggcgcgattgttcgggcccgctttgatacccgcgtgggctatcgcgtgctgatgaaccttacccagagcaatggcagggccgtgccgtttggcgccaccgccacacttctggataccaaaaaagagtccagcagcatcgtcggagaagatggacagctctatatcagcgggatgccagagaaaggcgcgctacaggtgaaatggggtaaagaccagacacagcaatgccgcgtggcgtttacgctacccgaacaacaggataatgctggcgtagtgatggcaaatgccgtctgccagtaa

SEQ ID NO: 126964 - DNA, 1065 bp, Enterobacter cloacae
atgttgaaaaaagtactttcaattgtcggcctgatgggtggggcagtattgttttccggacaggcgcaagcggcgggggattgggggccgtgtttaccgcagggagggacgcacagcttttcttcagtgctggataaaacagtgacggacacttctaagaatgcggcgggtacggttttccaggatttttggtcgtgggatttggggggagattattatgcgagctgtgaatgcccggacgatccagaatcaaaggaatcttattattacaaagccacatcaacgcttccactgggccatgtagaaggaggacgcgaatattatgtgatcaataataatattcagttttcagctgatgtttggattgaggggaaacgtaaaaattatttcacggtaccgtttgaaaataagactaatgacgtttctgatcatgatgcttgtggagtccagactagatttagaacaggcagtaaggggaaattaagcctgtacattaaccatccctttgtcggaatgcttgatattccgaatacaaaaattctcgacgtttatggtgcccgtaaagcgggagcttatggagcagttccactgtcatccgtatttataagtggacatataatcgtgcctcagggctgtgaactcgacaccggaagtactctggaaatcccgtttggtgactttaagggcagcgatttcaaagatcgtaaaggccaaattccgcaaggtgccatgacttttactaaagatttgcagtttaaatgcaccaatatttccgatggcgtgaagatctttctgcgtattgaggggacgccaaacgccaatgattcgaatgccattgatatggggaatccggatatcggggctgtgattgcaggcatgaatggcaacattcttatacccaatgatactagctcgaatcaggcgctggaggtgtttggcctggtcgatgaaacgcatcgatttgccaagacgacgattacggcttacccgatcagtaccaccggtaaagtgccgaaggcagggaagtacgaaggaattgccactatgcgtattgatgtggagtaa

SEQ ID NO: 126965 - DNA, 528 bp, Enterobacter cloacae
atgaaatatgttcatgcgtttataacagcgaatctgctgttcacggctccggcgatggcggtaccgacaaatatcggttccgttggggatattcacttcaccctcaatgttatggcggcaacctgtgagcttgaaaaggataacattgacgtcgatatgggcagtgtggtgttgcaacggcctgtgaaggtgggtaaagaactcaaccagaagagcttcaggattgacttgaaaaattgtgcgtatgccgcgaaggcctacgtgacgatggatggtacagcagacgcaactgattcgtcactttttgccctggacagtggtggcgcgacaggcattgccctgaaaatcaaaacgcgtgatggtgtacagcagtaccctttcagcaccgacagtacgcccgtgggacacctgatttggtttgatgggacgaacaaactgaactatgtcgccagctatgtgcctgttaaaccggaagtcacggtgggtaaggcgaacgcgaccataaattttagcatcacatacgaataa

SEQ ID NO: 126966 - DNA, 1287 bp, Enterobacter cloacae
atgactttcgatgaaatagaaataagtatcagccaattaaatataatccttcatgatggtcatttgagtaataaatttgaagaaggtgctttcattagtccaatgaatcaatctaacttcgaggtggatgtaaccgatagcgattcaataaaatcaatatctgatgattggatttgctggtcaaacatttcccatgagaaagatgttataacgaaacttactcagaggcatattataaacataaaggctaagcgcagtttaaattatgaggaagttataaaagagtctcgccacatatgcttattatttacacttttaacattgatacagcttcacataaatttcgcgtggattgtccataagaataaacgttattgtatctacttccaatcgataaaacaaaactcaatcccaaaaactgaatggtaccactcaattattgacttgaaacagatcgattcggatacttggattaatatcattaataactcatataaaaacataagctttgataggatatgggcaagattttatggaatgttatcctataacagttactgggaatatgattttctaggatttatgagtatatttgattattatctcagcttgaaatataaatttaagaaacagcatttaaatagttttaaaaatagatatatcgcgcaaatgaatgatgtatcaaaaaatatcaaccgatttatatcattatcatcagggcagtttgaacggttattaattatacgtaatggtgttgcgcatagcgatccggataagctggatgtccttgatgatatttcggttttaatgatattaaaaaaaagattaataattctgttaaattatcttgcgttaaaagatttaggcatcagtgataacacttatgctaattcagcattatgttcttttaatcctattttactaaattcagcaccaagcaaaaagtggcttcataaaatattaggagatactaaaaccgtcatattgcaaaaagtaaattttgaacaattaaaaaataactcgcaaagcacaatcaatttgataataatcagcaatagagcaggcgaatttatttatgatgtaaggttaacagatatgcttaataaacaaatacataccatacacgggaaatatgataatacttgtgattatattgataatgaatttacaaaatacattgatggcaaatttatgtcaaaatacactgatagattacatatacacactattgatcaagatgactttatagaagctacatctgtttatattttatatgaaattacttaa

SEQ ID NO: 126967 - DNA, 351 bp, Enterobacter cloacae
atgtggacggtactgtttagtaaggtattcgagcaatggttgcttgaacaggaagatgggttgcaggaaaaggtattggcagacctgttaaatctacagaattatggaccgcgtcttcctcgtccctatgcggataccgttaaagggtcacagtataagaatatgaaagagttacgtattcaatatgcgggtcgcccggttcgtgcgttcttcgcgtttgatcctgtacgtcaggccattgtgctttgcgcgggcgataagcgtaatgacaaaaccttttatgaaaaactgattcgcattgcagatgccgaattcacccttcatctgacaagcctggaggcagccaagtga

SEQ ID NO: 126968 - DNA, 507 bp, Enterobacter cloacae
atgaaacagttaaattggcttaaggaagttgaaatgaaagatcaaggcatcaatgattttatttctatatgtgatgtagtgaaaaagcgaggaagaaaaggagggcggcaaccatacagtaacaaattaagtatatcacaaacatgccgtcgcattaatgatcaacaggtacgctttatgaatataaatatccctgaggatataatgtcaaaagctcgactcaaaaaaggagatcgtatagatattgcatttacagcaaatgggatgaaatggaggttaaaggtagtgcctaatggagagcaaggttacagcataacgactccttcaacaaattcaaaacgtggacaaatcagattaacttggtgcgaaggtataccaatcataggtggagatgaagcaattcgtaaggcgcgagcaattgcagttgaggaaacaatgagagtatctcctgcggagttaatcttcgagcttggagagatatcagtcgaagccaagcgcgaatcttaa

SEQ ID NO: 126969 - DNA, 393 bp, Enterobacter cloacae
atgctgcatatgctggacactaacatcgtaagccatctggtgaggcagcatcctgaagttgtaaaccgatattcgcaaattacgcctgaaaagatgtgtatttcaagcgtaacggaagcggaattgctttacggcgtagccaaaaagcaaaacaacaagctgcacgaaaccataatggaatttcttaaaaccatcactgtctgcgcctgggatagcgaagccgcagccatctacggtgaactgcgtgcggcaatggaaaagaaagggaaagtgatgggggatctcgatcagttgattgccgcacatgctatcagccggggcacgacgattgtcacgaacgatcatgcgttcgggatggtacaggatcttacggttgaggactggactcaataa

SEQ ID NO: 126970 - DNA, 261 bp, Enterobacter cloacae
atggaacgcacagcgaaactattcaaaaaaggacgaaaccaggccgtggtcttgcctgcggaatttgcgtttgaaacggagagtgtttatatccgccgggatgacgaggggaatgtggttttgacggcaaggtccgagaaagcacggcacagggataactttttgcgcatgttaaaagaaacgcatgtgcctgatacctttctaagtaaagaggagcgcaatcagagctatacgacaagaaaccctcttgaagggctgtag

SEQ ID NO: 126971 - DNA, 306 bp, Enterobacter cloacae
atgcacagcaaaaacttttgcgccggcacctgggacggcacgatccgcgcgctttcagccagcgggtatcgcgtgatcgcacccgaccagatcggcttctgcaaatccaccaagccggagcattatcagtacaccttccagcagctggcggataacacccacgcgctgctgaaaacgctgggcgtcgatcgcgtcacggttatcggccattcgaccggcggcatgctggcgacccgctacgcgctgatgtggccgcagcaggtggagcagctggtgatggtgaacccaatagggcttgaagactag

SEQ ID NO: 126972 - DNA, 678 bp, Enterobacter cloacae
atggcaacaccaggaagtttaacaatcgggggcgattcctcccgaatcaattcaactcagaacagtaataacagcagcgctacccgtaccaaaggtgaaaacggattcaccattcttgcatcggtatataacccagcctctgataactatattcgtaactatcaggcgatagtttttgatgctgtaacagatacgggagttcgtagacaggctgatattacgagctatcccgttgagagcggggctgaggtgagcgaccacattcagattaagaataatacattcaaaatgtctggagtaatcacggaaactccgatcagacttgagggagatttattatacagtgctggtgttaatggtacgcgaatatcacaagctatcacctatctcgatcaaatatttgacagtcgtcagcccatcacattagtgacagaacataaagtgtacgagaatgttattctctccggcatctcctacgattataaatctgaatacgcaatgcaattcgatcttgaatttgaacaggtcaggcttgtcagtaaagctacggttaatgtgattgcaactaaaacgcagggaaataaatctgtaggcggtacggtgaaacagaaagtagtgaacaatgcacctaagaaaaccgagggtgatacggttactacggagtttaagaaaaaataa

SEQ ID NO: 126973 - DNA, 1866 bp, Enterobacter cloacae
atgcttgaacttcagatcagtaaaattaataacacggtgacattcagcgttgatcgtaattcaatgaaggaagctatggacgctttcgatcaaattcagaagaaagccaaaggcattaaagaccctacgttgaacatgaagagattcagccaggggcttaaatctgctgagagagaattagacaagctgaataagaaagcctctaagcctcgtagcaacgatgaacgagaaaaggcaagggcagctaaggcgcaagcccgtgtagaggctcaggcagcgaaagaggccgcacgttcggcggctcgtcgtgaacgggctgaattgcggctattggacactgccagcagctttaagagtatgcaacaccttaccaatgttgagcttacacaggccgcgcttgcagcgtcacggatcactaaagcatatgcagcaggtactatctcactacaacgccaaaacagcgagatcaaacgccttcagcagagctacagacgtattaacgcagagcgtagggcagcggcaaaagcgggaggggctaacgctcttggtggcggtggtaaggctacaggggctatctctggctctctgatgggtttaggcactggtgcgctggctggcgctggtatcggtgcggcggcttacggtgcttattcatggggtaaagacgctgtaaccgcacaggaagagcgcagcgagattgtacagcgcagcagattgggcggggtggattataacgtgttacaggcgctttcgcagtatgccacggctaacgggatcgacagcgggatggggctgcaaggggagaggaagctgctcgataacggaaaagacatctcagaaaagctggcagacagctacaccaacagcacctttgataagaagtctggaaaatggaaaggcgggaacgccgcagtagatacagccctgaacatgggattcactaaagacgatctgaaatcctaccaatccaatgcgtttggcttcgtttctgcctataccaacaccatgcagggcaaaggctattcacaagagcaaatccttcataacctggaagaccttgcagacgatttaggcttgtatcacaaggcattttctaatcaaggaaaagcgatcactgatcaggtggacgtgctcaagcgtaacgggcagtggctggatgaagcccagcaggatcaacttgtggcctaccgtaagtttaaccaggagcttagcattctctccgatagccagaagctggcattcttcgaaggatttatgtcagagattgaccctgaaaccatgcgagagtttaaggaagctatgcaggaggcgttacccttctttaaaggtttaggaaaagcggcgggtgatgtagtggacggcttaatgaagctaaccaactggatcacaggcaagctgaatctccttaacggtgacaatacctctaaagaggccgttagtcagcattacggcactacgtcagcacctgcacagccaggaagtaatcctgtggctaacgcttacggagccagccagcctaaatcagacggcacacatgagccgaacatgttcgatacattccatgattggtggaacgggacaagcgacgctaaagacgtgagcagctacgcgcagagcacaaacggagattactctcctgtttctatgttgaaacagagtgcagcagcgccagctaagccagccagtacgccgatcatgcagcctgtagtgttgcagaatcagctaccggaagggcttatccatctaactatttctcctgatccaacttttggaaacatgcttaatgctaccgttgatcagcgtatcaatgataacaatcagcgtatggtgctggctgtttcatctggacaaggggcggggggctaa

SEQ ID NO: 126974 - DNA, 1038 bp, Enterobacter cloacae
atggcttattcagatctattttctggcaatatgtacgattttgccagcccgtttacattctctactcagttgaatgcaattgtaagtaatcttgggttatttaaaattgagaaccacgacgtcaatacaatcgctcttgagaaaatcacagatgtgaaaaatctcgttgcacctgaaaagatgccctacgctcaaagcgattggaacagtgcagaacgtccagaattcagcaatgtgctgtatcagcttaaatatactaactcccttaactccgtcacctctcgtgaccttgagcagtataaagcgcgtggaacagtagacacggctgatcaaatcaccctggctatctctgatttcagcgatgcacaatacgcgcaggtgagtaacaccgtagaggttgaccttgtagaggcgctgttagggcttcgtgtgcagtcacaatacgccggacagggcaatttagatttccttgcaggtgggagcaaaaccacttacacgatggatatcagcgcaggtgctaacgtgttccagcaactaagcgagattggacgaatccagaatgtgaaacttggctcagggttggcacaggctaaacagggcgtagtgatcctggcctccggtaaagcagccgtagcgctacgctatcacccatcagtgagagacttcatggtgtatacgctccctctggagcagggagacaacttctacacccgtactaaaagtgcaaaccctgctttcgaaacctggacactaaacggtgtcaccgtgatcgatgtgacaggctatagcctcatcactgacaaaatcggtgtggactcattcgtgagtcttcctgtaatggctcctgagagtaatgcctacgtcctgcatagcggtgtcggcgttcgccatgccacacagggcaaaggtgcagagctatatcaccagtatgttgtagttgatcagcgttggggcttccctgagatagcgacagaatgtagttatctgccaattgtgaatattccacaagcgatcatcttcggtactgtctcagaataa

SEQ ID NO: 126975 - DNA, 378 bp, Enterobacter cloacae
atgcaatttggaacatttcaaactctgaacgggaataacagccacgcccgatataaagtagtggcttacgcatctgatgcaattatgcaggataagctgatcaagacagctacaggaatccctgattcccttatcgtaggtgatcttgtagacgctacaggtaagaaagctaccgttcctggcaatattgcgtatgttgtcgtagaacctgcacgcgctggcgataaggcgtttattgtagcttctccagaacatactattttagccctggttggcattgaatttggaagtctggataaatctctggctcaagcgcaattagcaactcttggctttactttcacagactacgacacagtagccctacgcacaacctaa

SEQ ID NO: 126976 - DNA, 234 bp, Enterobacter cloacae
atgttccttatgaattatgatcgtgtgattacacacaaaggtgcttctcttattctctctgaaaagatgatgaaacaagcggcgaatgtattaggtgtaagtgtcgaagagattcgagaggctacagagaaattctggcctaccgccactatcaccaaatcaaaagaaggttctcacccatcatcagggcttgaggaacgattaaaactaaaagcaatagcaaaaggaaaataa

SEQ ID NO: 126977 - DNA, 336 bp, Enterobacter cloacae
atgattaatacaatgaacacagtaagtaccttgctcgattctttccataacacttggcatctacctattcttgaactggtcaatcatgcatggcgtgacagaacgccagaggcgcttttaagcgcggctaaacaggcggagcaggggattgatgcgctgatgtatctccaagaggttgtagagcgtctggtgaagcgtggagacagcactatcacaccagaagaagcctggcgtgtagctaatgaccttgaagagctggcttgctctctacaatacatcaccgttgaactcggagagcttgccatccagatcgcggaagaatgcactgtaacataa

SEQ ID NO: 126978 - DNA, 771 bp, Enterobacter cloacae
atgactgacattataaacagtaaggcttttagtttcaccaacaccgaagacgcatttaacgaatgcaccaggatcaccaatcttaaaacaggcgtaacagagttcctttctcctgctgataagcagttttacgtcagaatgcgccatcgttattatcgctttgcgatagagttgggcggcacttattacgatgatattgatcagcttggtgcaagtattggtgttagttcggcaacagcaacacgcattgttgcaaagttgaagaaaatcggactgatcgccagtaataagccaaagcgctcaaaccaatggactataacgccactcacgccggaaaacttcgcctttgaacgtgatcgtaatgcgatggaacgagattccgcgccggaatgggtcgattgtctgaaacatcccgtgtttggcaaagttaaagaagacatagcgccagaggagcaacgcaaagaggccaaagcagatccgatgtgcgagtttgacgaaataacggaagaaactaaacctattccaaaacgggaaaagccaaaggcagtaacgaagaagaaatctacaccacccccagccagagaaatagaaatcgaagccgttaaccctgtctcaatcggcgtgtatcgggatgaatgggagaatcctgaaaagaatctacctgtttcacaacatccgaaaataagatggatgctcattcatggatacctggactatacaatcaaccccaaacttaaatcaatctacgaggaaatagaacatttatgctga

SEQ ID NO: 126979 - DNA, 177 bp, Enterobacter cloacae
atgagcgaaatccagaagaagaaaccagccggaacattcgtaaaactgccggatgaagtgtttagcactttgttcaaagaggcgcgagcgagaggcgtaacagtgcaggagatgttaattgacgctgcaaccacactttccacatcaattaagaacggagaacgttctaccaaataa

SEQ ID NO: 126980 - DNA, 579 bp, Enterobacter cloacae; identical to SEQ ID NO: 126212

SEQ ID NO: 126981 - DNA, 402 bp, Enterobacter cloacae
atgagatggtctctctcatcgcttgccgatgaattgtcgcgccagcgcgatatttatattgatttaaaaaataacaatgatgtacttattataaaaatgaatgaatatggcgatttgccattaagtatttttattacatcccagcaaattatcattgaagcctatatttgtcctgttaatgacattaagcgccaggctgatttcaatctcttcttattacgtaatcaaaaaatgcttcccttatcttctgttggaatttcgcaaattcaacatgatgaatattatgtcgcttttggtgccttatccgtaagttcatctcttgaggatattattctggaaatcacaacccttgcggagaatgcgctggatttggctgagcttacacaagaatttataaattaa

SEQ ID NO: 126982 - DNA, 699 bp, Enterobacter cloacae
atgggcatcttgaagaatctttttacactgggtaaatcactactcaatcaggccgatgaagcgatagaagaagcgcagggcgttcggatgctggagcagcacatccgggatgcaaaagctgagcttgataaagcaggcaaatcccgggttgatctgcttgcccgggtaaagctcagtaatgacaagctttccgagttgcgggagcggaagcaatatcttgagtcacgagcgatagagggaatgagcaagaatattgatgctgcgctgctaaacgaggttgcagaggaaatcgcccgacttgagaataccattactcgtgaagcgcaggttttggagtctcttgaaacctcaagaaataatattgaaaaagccgtagctattacttcacaacgaattaatcagtttgaacagcagctggaggttgttaaagccacggaagccatgcagcgggcgcaacaggccgtgacgacgtcaacgatcggagcaacatcgaacgtaacgacggccgcagagtctttaaaaagacttcagacgcgtcaggctgaacgtcaggcgagactggatgcggcagcgcaactggaaaaagtggctgatggacgtgagcttgaagagaaactcgcgcaggcaggcgtgggtaccacaggaacaagctccgcacaggcggttcttgaacggttaaaacttacgcaggctccgtaa

SEQ ID NO: 126983 - DNA, 1086 bp, Enterobacter cloacae
atgtttctctcctgggtcgtgaatgtttgcaggcaacatttattccggcttacctggacagcgctgctgtgcttgtttgccgggcattatttgctttgctttgttgtctttcgttggctgggagagacgaccctcattggccggataagtgattttgtttattacagctcagtggttggggcgacgattggctttggcgatttgagtcctcagagcgaagcagggaagttgttcacagctctctggcaaatccccattggcgttggccttttcggcgcgctgatgggcaaaatcattgcattggtgcaggaattattagctaaaggaatagcaggaatgggcgattttcattctctacgtaatcatgttttggtgattggctggcgtggtcatcagacagagaaaatgatctcattgctgctttatgatgagcagcgggtatttagtcgcgtagtgttgtgtgagcagcaggatatagcgcatcctttatccgataatttatatgtcgattttctcaaagtaagtaactacagcgatccgaaagagcaaaaacggatggggttagtaaattgttcatgtgtagtcatttttgccagcaccgatgaacaaacctttacggccacactctcgctggtaaacgatgcgccagcgcattgccatatcgttgcttatcttgaggatgaacgctacgcaagcttactggagacccattgcccgacaattgagattgttcgcaatctttcagccgaacagctttcccgttcgatccaggatcctggctcttcacaatccgtagcatcaatcatgaacccgatgctgggtgatacaggctacgcgctgatggtacccacatcggtttcctgtattccttatggtgcgttaatgcattacatgaaactgcaacatgatgcgacggtgctggggattagccactgtaaaaatggtcgtggtatggagcttaaccctgtgatctccacagaggtaagaggaggaatgtggttgcatttaatcggcaatagtcgcatttcgtcgaatgaggtgtgctggcagaacatagggaaaagtcatgcggaacttattttttaa

SEQ ID NO: 126984 - DNA, 654 bp, Enterobacter cloacae
atgcggaacttattttttaatttatttaataaaacacctcagccagtgaagcgtggcccattgggattacatcaacgtgcggcgtttacacttgatacgctgacatttcgactgtccgcccgttttttgacgcaactaccagcagaggaatataccattgcagctagcagcgtgattgaagctggcgcgggttgtcgtatttatcgttattacacgtctggcgatgagtttttgcagataaatactactggtggtatggaaagggaacatattgatgatattaagctttttatttatcaggatagctttggtattacgtcggagaaacaatggcaaaaagagatcggtgcagctttaattggcagacccagtctgcaatggaatgaacgagactggacaagaatatttaacgagaatgaggtggggaacgttgagccggtttacctgctggaacacgttgaaaataaccagaacgaaaaatgggatgtgcataatttcatgatggcctatcagagggaggcgactgccgatctgtatgagtaccttttgcttactggcgaagagacattttgtaataatagcgagccagagtggatcttttcgtatgccgtaggtgtggatattccactcacttcgctaaatattgttggttaa

SEQ ID NO: 126985 - DNA, 393 bp, Enterobacter cloacae
atgctgggttcattatttgcttttctttcttacttcttaaccggtctggcgatgaccgtcatattcttattcatctactcaagaataacgtcacatgatgaatggaaactgattaaagaaaataacctggcggcggcggcagcattcagtggcacgctattggggtatgtgattcctctgtccagcgctgccgtaaactcggttagcatgccggattacctgatatggggatgcgttgcgctagtcgtacagttactggtgtatggctgcgtgcgcatttatatgccgaacatcagtgaaaaaatcgttaaccgccactacgccgcaggtttatttatggggatggccgcactggctggcggaattttaaatgctgcctgcatgacatggtaa

SEQ ID NO: 126986 - DNA, 615 bp, Enterobacter cloacae
atggctaaaaagaaaaaaacacggaagtctaatccgattcgatctgcatcaggaagccaaaatgcagcgttccgctcttcaccctcaaagcgcaaaagcgggaagtatttgacgctggccattatgggcggtgcagcatttatcgctctgaaggggggcgatagttcggctgatgataatgacggtgatggcgtgttttacgcatcgccgcaagcgtgcgttgacggtggcaatagcgctcaggtttgcagcgatgcatggaacaatgcgaaagctaaatttgaagcagatatgccgaaaaaaatgtccagggaagactgtatacgtcaattcgagaactgctattacgacaatatcgaaaacagctggataccggttctgtcaggattcttacttaataaaaaagtcagagaagacgctgatgaagggtacaggtatacaagcggaggttcattttactcttcccgtcctgtgtggcgaagctcttcatcctatgtctggcactccggtaagcaggccagtagtcaaatgggctatacaacaaaacgcgtatcaaccatttctcgtggtggatatgggcgctcatccagtgcgcgtggaagttgggggggataa

SEQ ID NO: 126987 - DNA, 1164 bp, Enterobacter cloacae
atgttacgtcatgacgtccccgttcgtccggggctggacaaaattgcccacgaccatggttttcattttcatatcatcgacgatgaaatttactgggatgaaagccgtgcctaccgttttacgttacagcaaattgaagaacgaatagaaaaacccacggctgaactccatcaaatgtgtctggatgtggtggatcgtgcggtaaaaagtgaagaactgatgacgcagttggccatcccgccgctttactgggatgccattgcggaaagctggcacagccaggatccttcactgtatggccgtatggactttgtctggactgaagaaggtagcgtcaaactgctggaatacaatgccgacacgccgacgtccttgtatgagtcagcctactttcagtggcaatggatggaggacgctcgtcgctccgggatcattccgcgtgacgccgatcagtttaattccattcaggataagcttgttgctcgctttgaagaattagccaccgatattccactttacttctgctgctgcaaagagagtgaggaggatcgcggcacgcttctttatctggaagattgtgccgtccaggccgggctgaacacccgctttatctatatggatgatattggcctgggcaccggcggatttttaacggacattgacgataacgtgatccgccgtgcgtttaagctctatcctctggagtggatgatgcgtgatgaaaatggtccacttctctgcgccagaagagaacagtggctggagccgctctggaaaagcatcatcggtaataagggtattttgcccctcttgtggcggttttttacgggccaccccaaccttctgcctgcgtggtttgaaaatgagttaacgtcgattccaaaaggcgttccgatagttcgtaagcccttgttttcgcgggaagggggaaatgtgactattttcgacgcgcagcgcaatatcattgagagtgaagcaggggattatgcaaacgaacctatgatttatcagggtttccaggcgttaccgcgttttggcaacagctataccttgataggaagttgggtgatcgatgatgaacctgcgggaatcggtattcgggaagacggatcgttgatcacgaaagatacttcgcgttttatcccgcactatatagcgggttaa

SEQ ID NO: 126988 - DNA, 1932 bp, Enterobacter cloacae
atgatcacctttttccgccgggcaggtctgggcacgaagctatcgctgctaacaggtgcaagtgtcgccacgctttttttgctgttcacttttctgttgagccacaacgccagccagcagcttgaagatcttgcggttgaagacctgcacaaccagtccaccggcatggtggatatggttgagatgttcaacaccagcctgagcgaagaggttgaaagctatacccgtctgttcacgacctttttgccacagccgctgaacagcgacagcagccagagccggaccataaatgggcttaccgttcctctgctgaaaggcggcgaaacggagttgcatgaaaacaatacgctttctgatgacttcctgagccgaacgggagccatctcgacgctatttgtccgcagcggtaacgattttatccgcgtggccacgtcgctgcgcaaagagaatggcgaccgcgccatcggaaccgttcttgataccaccagcccggcatttgcggctgtcaccaaaggggaggtctatcgcggcctcgcgctgctgttcggcaagcgctatatcacgcagtaccagcctgttaaaaatgcggaaggccaggttatcgggattatctttgtcggcgtggacatcacccattcgtggaacgtcatgcgcgagaaaatccttaaccgtcgtctgggcgagagcggtcacttctttgtactggatcgcagcagcggcaaaacgcgcggacagtatctgttccatgccagcgaagagggcaaactgcccaactgggacacggcgacacagcaacagcttctgagcgataaagccggcacgctggaacgcgtgagcgcggatggccgtacgctcaaagtcgcctacacgccgctgccgggctggaactggaccatcgtgggtgaagtggataaagccgtactgctttcaagcgtcaccacgctgcgcgatcgcttcctgatggcgggcgtggtgctatccgcgctcttcgcgggcctgttcgttatcctcattcgccggatgctaacccgcccactgcgcgcagtgatcgcgcttgcacggcagtatgccgcaggcgatctgcgcgccagcctgccggtaacccgccaggatgaagtcggccagctgattgatgccatcaacgggatcgggggcggcctgcaaaaaattgtgttgcaggtccgcgaggccgcaagcgaaatccatctggggactaacgcgctggcttcagataccggtgagatctctgaacagatcaacaaacaggccagcagcgttgaggagacctccgccagcatggagcaattagccgccaccgtgcagcaaaatgccgccaacatggagcaaacgcagcagctggtgggtgaaacctcgcgcgcggtgcatcagggtggagagacggtgacccacgcagtttccaccatggatgatattcgtgatgcatcgaaacgcattgaagacatcacccgcgtgattgagtccatcgctttccagaccaatatcctggcgctcaatgcggcggttgaagcggcgcgagcgggcgagcacgggaaaggtttcgcagtggtggcgcaagaggtgcgcgccctggccgcacgcagcgccaacgcggtaaaagagattgaacaactgattggcgacacgctgaacaaggtgagcgaaggccatgcgctttctgagcaaacgcgtctggcgatggatgccatcattgttcatatcgataacatcagccagcttgtcaccgagatcaaccacgcctcccgcgagcagtctgcggggattggtcaggtgaatctggcgatgacgcacatcggtgaggcatcgcacatcaatgccgatcgcatctcacgcagcgagcagacggcacagacgctgcgcgagaagggttcccatctcacccgtctggtgagcctgttccagctaaaggcttaa

SEQ ID NO: 126989 - DNA, 273 bp, Enterobacter cloacae
atgaccaccgaacaacaccaggaaatcctccgcacagagggcctgagtaaatttttccctggcgttaaggcgctggataacgttgatttcagcctgcggcgtggggagatcatggcgttgctcggcgaaaacggggcggggaagtcgacgctgattaaaaccctgaccggggtctatcacgccgatcgcggcgctatctggctggaaggtaacgccatttcgcccaaaaacaccgcgcatgcgcagcaactggggatcggcacggtctactag

SEQ ID NO: 126990 - DNA, 1569 bp, Enterobacter cloacae
atgcttaaaacgctatcgattcgtaccggcttgctctctttactggccgttatgacccttctgctgctgattgtcagcggcatcggcatttatgcccttacacaaagttccgcttctctccagcgcatcaatcatcttcagggtgaacagatggtgcagctgaatgccggctatacgctgatcctgcgcgcgcgaaacgaagcggggcaggccgtccgcatgatggaggtcggcctgctggacgatgcggccagggcggtcaaaaccattaaccaggaagtggcgctggcacagaaaacgctgaagggcgtgatcggcagcggcgtggcggatgagcaggggcaaaagctgctggataacgtcgccgcgagcctggcggtgtacaaccagcagggtatcagcccgatgctgaaagccctgaacgagcaaagcgcggacagctattacgatctgctggaaaacaagctggtcccggtggcgaagcagtttgataacgatatgcaggcgttccaggcatggagcgaggcgcgcggcaaagcggaggtgagcgccgtgcaggcgagtaaaacccgcgtgctgatcctgattatcgttgcggcgctgctgacggctggcattatcgtgctggcctggctggtgctgcgccatatgctgctcaagccgctttcagcctcgattgcccagctggaacatgtggcggccggggatttaacccataccctgaacgcgccagcgagccaggaatttaatcgccttaacgcggcgatcgaagagatgcgccagtcgctgatggactcggttctgcgggtgcgtgacgccagctcgcagattgataccggcagccgcgagctgacggccgggaatatgaacctggcccagcgcacggaatccaccgccacctcgctggagcagacggccgccagcatggaagagatcaccgccacggtgagacttaacgccgataacgccgagcaggcgcaccagctggcgaagtcggtctccgataccgccgatcacggcagcgaaatggtctgttatgtcattgagaagatgcgcgacatctccggcagctcggcgcgcatcgccgatatcctgagcgtcatcgacggcattgccttccagaccaatattctggcgctgaacgcctccgttgaagcggcgcgtgcgggtgagcaggggcgaggttttgcggtcgtggcgggtgaggtgcgtaatctcgccagccgcagtgctgatgcggcgaaagagatccgctcgcttatcagcgattcgcaaacccacgtgaacgagggcagcgagctggcgcagcaggccggtgagacgatggacgagatcgccaccgaagtactgcgtatgaccaaactgatgcgtgaaattgcgacggcgtctcaggagcagagccgcggcattgagcaggtgaatatcgccgtcaaccagatggatgaaacggcgcagcaaaatgcggcgctggtccagcaatcatctgcggcaacacgttccctggaggagcagtcgcgcgagctgatggaagcgatggcctccttcaagctgacgacgcaaacggcctga

SEQ ID NO: 126991 - DNA, 708 bp, Enterobacter cloacae
atgaacgcgatgtttaaaaaaggagtgctggcgtccgtactggcagtggcgacgtcctctgcaatggcagcttccagcgttgatattcaggttaccggtaaaattgttccgtcatcctgtacaccggcatttattagcggcggcgggattgccgatttcggcacgataaaagtcgcttccctgaattctaccacgccaacgccgctggccgatgttaaaattatcccgatctcaattacctgcgaagaagcaacccgtattgccgtaaccttcaacgatgcacacgctgactctgcgccaacggagacctactctatcaattatgtagacctggattttattacgtccccggaatataccgccggcctgggcatgtataacgacaagaaaattggcgcgtattcattaggtattcagcagacgaagggcgcagtaacaaacgatgccggtgatgatctatatccgaccgtttcggcagataacggtggaagctggggtagtaaagctgggattcgttatttacaggttaaaaccaacaaaagcgaactctattcttttagtacagaactgggcggcacgcctgtcgcacaaaccaaggtcaactttaacgtgggcgtcgccgcgattattaacccaaccaacgatttgcacgtgacggatgaagccacgctggacggcttaaccaacgttgagctggtttatctgtaa

SEQ ID NO: 126992 - DNA, 744 bp, Enterobacter cloacae
gtgaaaaaaattatcttactgattctgatcgttatcgcccttgccgcaggcggcgtgtactggatgaaagcgggtaatccaaatgcgttgcgtcatatcgttctcgaccagtgtgtgcccaaccagctgcataaccgtaacccggcaccgtgtgcgcaggtgaagccagatgcgggctacgtggtgttcaaggaccgcaacgggccgctgcaatacctgctgatgcccacgtaccgtatcaacggcaccgaaagcccgctgctgacagagccgcagacaccgaatttcttctggctggcatggcagtctcgtcattttatgagcatgaaacggggggccgacgtgcctgacagcgccgtttcgctgaccatcaactccccgaccgggcgcacgcaaaaccattttcatatccacatctcctgtctgcgcccagacgtgcgcgagaagctgaacgcgtcgcaggggcaaatcagcacccagtggttaccgcttccgggcgggctggaagggcatgaataccttgcccgtcgggtgacggagaacgaactggtgcagcgcagcccgtttatgatgctggcggaagagctgccggaagcccgcgatcatatgggacgcttcgcgctggcgatggcgcagcagtcggacggctcgtttgtcttgctggcgacagagcgtaacctgcttacctttaaccgcgcgtcggctgaggaattgcaggatcatcaatgcgatatcctgaagtga

SEQ ID NO: 126993 - DNA, 2181 bp, Enterobacter cloacae
atgagcacgtcagacgagaccaataacgcggcatccgccggcaaatgtccgttccaccagggcggcgtcgatcacagcgcgggtgcaggtaccggcagcaaagagtggtggcctaaacaactccgcatcgatcttctaaaccaacattccaaccgttcgaacccgctgggtgaagacttcgactaccgcaaagaattcagcaagctcgactactccgcccttaagggcgatctcaaagccctgttaaccgactcacaaccgtggtggcctgccgactggggcagctatgcgggcctgtttatccgtatggcctggcacggtgcgggtacctatcgctccgttgacggtcgcggcggcgccggacgcggtcagcaacgctttgcaccgctgaactcctggccggataacgtcagcctggataaagctcgccgtctgctgtggccaattaagcaaaaatacggacaaaaaatctcctgggccgacctgtttatcctcgcgggtaacgtggcgctggagaactccggcttccgcacctttggttttggtgccgggcgtgaagacgtatgggaaccggatctggacgtgaactggggcgatgaaaaagcctggctgacccaccgtgacccggaagcgctggcgaagcgcccgcttgcggccaccgaaatgggcctgatttacgttaacccggaagggccaaacgccagcggtgaaccgctgtctgcggcggcggcgatccgcgctacctttggcaacatgggcatgaacgacgaagagaccgtcgcgctgattgcgggcggccatacgctcggtaaaacgcacggcgcaggtgaagccacgcacgtgggcactgacccggaagcgtcgccgattgaagcgcagggcctgggctgggccagcacgcacggcaccggtattggcgctgacgccatcacctccgggctggaagttatctggtctcaaaccccgacccagtggagcaactacttcttcgagaacctgttcaaatacgaatgggtgcagacgcgtagcccggcaggcgcgattcagtttgaagccgtggatgcgctggaaatcatgcctgacccgttcgacccgtcgaaaaaacgcaagccaaccatgctggtcaccgacctgacgctgcgttttgatccggaattcgagaaaatttcccgtcgcttcctgaacgatccgcaggccttcaacgaagcctttgcgcgcgcgtggttcaagctgacccaccgcgatatggggccgaaatcccgttacatcggcccggaagtaccgaaagaagatctgatttggcaggatccgctgcctcagccggtgttccatccgacgcaggaagatattgaaagcctgaaagcggaaatcgcggcctctggtctctccgtgagcgaactggtttccgtggcctgggcgtcggcatcgaccttccgcggcggcgacaagcgtggcggcgctaacggcgcgcgtctggcgctggcgcctcagcgcgactgggatgtgaacgccgcggcggtgcgggcgttaccggctctggaagcaatccagcgcaccacgaataaagcctctctggccgatatcatcgtgctggcaggtgttgtgggcgttgagcaggcggcgaaagcggcaggcgtttacgttaacgtaccgttcaccccgggccgcgtggatgcgcgtcaggaccagacggatatcgagatgtttaacctgctcgaaccggttgccgacggttttcgcaactaccgtgcgcaggtggatgtgtccaccacggagtcgctgctgatcgacaaagcccagcagctgaccctgaccgcgccggaactgacggtgctgatcggcggtctgcgcgtactgggtgcaaacttcgatggcagcaagaatggcgtgtttaccaaccgcgagggcgtgctgagcaacgacttcttcgttaatctgctggatatgaacacccagtggaaagcgaccgacgactcaaacgagctgtttgccggtagcgatcgcgccagcggtgaagtgaaatacaccgccacccgcgccgatctggtcttcggttcaaacgccgtcctgcgtgcgctggccgaagtttacgccagcagtgatgcacatgagaagttcgttcgtgatttcgttgccgcgtgggcgcgagtgatggatttggatcggtttgacgtgaagtag

SEQ ID NO: 126994 - DNA, 2157 bp, Enterobacter cloacae
gtgagcattaaggggcagttgcgcggccagaccctctctatcagccagttcgatgtgcaactgccggatcagccgcagcccgtgaagctggtcggtgaatttaccctgccgctggtgccggacggcgtgccggtgaaagggcatacggtcgcgacctttaacgtgccacagttatcctcgctggtcgatgccgatctggactgggaggacaatcagggccatctggtggtcatggtgcgggacaaccccgatccgctgctcgatttaccgtggcagatcaccgctcagcagctgaccatcagcgacggacgctggaactggtcagcctccggtatgccgatgagcggtcgcgtcgggctgaaagtggataactggcagcaggggctggagaaagccaccttcacggggcggctcaacgtgctgaccgagggagatgcgggtaagggcaacgcggtgctgaatatcggtcccggctcgctcagtatggataacagcgctatgccgctgcacctgagcggggaagccaagcaaaacgatctgatcctgtatgccaggctcccggcgatgctgaccggcagcctttacgatccgcagcttacgtttgaacccggcgctttattgcgctcgcgcgggcgcatcatcgactcgctggatatcgatgagatccgctggccgctggcgggcgtgaagcttacgcagaagggcgtggacggccgcctgcaagccattctgcgggcgcatgaaaacgagatgggcgactttgagctgcatctggacggccaggctaacgactttttaccggacaacggtgtgtggcagtggcgctactggggtaaagggaatttcacgccgatgaacgcgcgctgggatgtccggggaaccggggagtggcgcgacaacgttatcgaactgactgatctttccacgggtttcgacaaattgcagtacggtacgatgctggtcagcaagccgcgcctggtgctggatcacccggtgcgctggtcgcgggacccggataaccccacctttagcggcgcgctcgcgcttaacgccgggcaaacaagcttttcaggcggaagcgtgctgccgccgtccgttttgaccttcagcgttgacgggacagacccgacggtgttccagtttaaagggaacctgcatgcggacgacatcggcccggtccaggtgaatggacgctgggacggcgaacgccttcgcggtcaggcctggtggccaaaacagtctcttacggtgtttcagccgctgatcccgccagactggaaaatgaccctgcgcggcggcgaaatgtacgcgcaggtggctttctccgcggctcccgatcaggggtttgaggccggggggcacggggtgctgaaagcgggcagcgcgtggatgccggataacgaaatcaacggcgtggattttgttctgccgttccgcttaagccagggcacctggtcgctgggcacgcgcgggccggtaacgttacgaatcgacgaggtgaaaaacctggtcacagcccgaaatatcaccgcggatctccagggcgattatccctggaccgaagcgaacccgctcctgctcaccaacgtgaaggtggaagcgctcggcgggaaaatcaccatgcagcagttgagaatgccgcagcacgatccggctttactgcgcgtggataatatttcctccagcgaactgataagcgcggtgaatccgaagcagtttgccatgtccggcccggtgagcggcgcgctgccgttctggctggacaatgaaaaatggatcattaaagatggctggctgaccaacccggggccgatgacgctgcgcatcgaccaggacacggcggatgccattgtgaaagacaatatggttgccggggcggcgatcaactggctccgctatatggaaatttcacagtcgtggacaaaactcaatgtggataatctgggtgtgttaaccatgcaggcggccattaaaggcaccagccgcgtcgagggcaaaagcagtttcgttaacctgaattacacccatgaagagaacatttttaccctctggcgcagcctgcgctttggggacaatctgcaaacatggtttgagcaacatgcggcgataccccttctccgcagttcgacaggcaaggaaagtgaggaacaacaatga

SEQ ID NO: 126995 - DNA, 540 bp, Enterobacter cloacae
atgagtaccgcaaaagttgttgatgtcatcattcgcaaaacggcagagaagacgaaattaaccggtgaagggaatctctcggtctctatttcctcaccgagcgtgattgaaattcagggttctgctcaggacgtggtgcgttatgtccgccaggggaatgacctcctcatttatatgaaagatggcagcgtgatccgctgcaataattattttgtcgaagacgcggaaacccataatcattcagaactggtatttaacgataatcaggagctgacgcatatttcatttgccgatgccggggaagcatcaggcgttgccgccaccgaattaaccgcccaggctgcacccattagcagcattgaacctttcctggagcagggaagcgtcttaagcgatgcgccgtggggctggattgccggtgcggcgttaggggcggtgcgatcggcgcactgctggctcacggcggcgatggtgaaaccaaaaccaaagttattgataatacaaaagaagtcgaaagcgccacgccgacatttttgctga

SEQ ID NO: 126996 - DNA, 1350 bp, Enterobacter cloacae
atgaaacttagaaaaatcaaatggaataaccatacagttcttggtaacctctttctcgattttgttaattctcaaacaaataaaccttacaacaccatcttattggctggcgaaaatggtactggaaaatcgacaatccttgatgaaataagtcaagtattaaactatggctctcatgatggctttgattacattgaataccaaataggtgacaatatatttaaaacatcaaaattaattgatagaaataattatggtaactttttccaaatctctgatgaaaataacaatatcaagcaaatcagatatgacaaatcgtatagttctgaacttataaattcagatgaacaggatcttaggcgatacggttgcgtttactctcgagctcgctctgattataagactcaaccaatcatatcgacgactattagcgagcttgataaaattacacatgatgtcgatgttttagatgattttacttctttaaaacaattaatcgttgatgtagttaatcaagacagttccgattatgtcgaaacaaatatagttctcggcaacaatccccagccttgggatgttttttatccaacatctaaattatttagattcaaaaacgcgtttgatgccttctttgataaaatgaagtatgaaaaagtagctgataaggatggtgagaaatcaattttattctcaaagaatggtaagtcaattccaattgataagttaagcacaggcgaaaagcaggttgtatttagaggtatttttttactcagaaatacaaatgccttagatggtgctgttatcatgatagatgaacctgaattaagcatgcaccctaaatgggaaaagaagatactaagttattatcaaagcttatttttcaaagctaatcaacaaactgcgcaaattatatttgcaactcattcagatcacgtccttaaagaagccctagctaataccacagataatattgtagtgactcttgttgagaaaaatggtactattgaatgtcgcaatattgatgctccaacagtattaccttcgattacgtcagctgaaacaaactattttgcttttgatgttgtatcaaacgattatcatattgagctctatggctggcttcaggacaaagagaatctaaactcagttaagcgttgcgatgattttataaagaatcattcaaattatgatcctttaaagcatgccaaactctctaatcatttaaccacaacctatgaaacactttgcacctatattcgaaatgcaattcaccatcctgactccggtaacaaatttacagaatcagaattaagaacatcaattgagtttttaattgatatttgcaaataa

SEQ ID NO: 126997 - DNA, 777 bp, Enterobacter cloacae
atgcttcaacggttagcaaagaaaaaggtgctgttactctctgctctgatggtttcagggctggtcagggcagaggagtcgcttccggatgtggtgaagcacttcagtgaacagcaggacatcaaaatcatcaagaaaattgacgcccccggcggcgcgccagcgtggctggggcaatatcaggatatgggcgtgacgctctttctgacccctgacggaaagcacgtcgtgtctggctatctttatgatgagaagggaaccaacctcagcgaagcctttttccagaaagagatctacgccccgatgggccgcgagatgtggaaaaagctcaatgccgcgcatcccctgaaagagggcgcggagagtgccccgcgcaaagtcttcgtctttgccgacccgttctgcccgtactgcaagcagttctgggctgaagcgcagccgtgggtgaaggccgggaaggttcagctcaacacgctgctggttgcgtttcttaacccgaacagcgggcgtaacgcctccgcgatcctgaatgcgaaagatccggtgtcggcctggaaagcgtacgagctgtccggcggtaaaaagctgccgaaacctgaaggagcggcgtcccgggaaaccgttgagatcctgcaaaatcaccagacgctcatggacagtctcggcgcgaatgccacaccggctatttattacctgaatgagcaaaacgaactacaacaggtcgtgggtatgccagacgcaaaacagcttgaggcgatgttcgggccgaagccgtaa

SEQ ID NO: 126998 - DNA, 540 bp, Enterobacter cloacae
atgtcttcagaaatcatccccgtaacccaggaaatcgaacttcgcgccgtcgaagagcgctataccaccgatctgcacaacctcgtaatcaaaaacaaaacctggctgcaaagcgccttcgactgggcgcagcatgtcggcagcgaagaggacacgcgccgcaacgtgcagagcaaccagatgctgcaccagcgcggttacgccaaaatgttcctgatttttatgaatgacgagctggtgggcgtgctgtccttcaacgcgatcgagcctgcgaataaggccgggtatatcggctactggctcgacgaagcgcatcaggggcagggaatactttctcaggcgctccaggcgtttatgcgctattacgttgagcgcggcgagatccgccgttttgtgatcaagtgtcgcgtggataaccagagcagtaaccgggtggcgcagcgcaacggtttcacgctcgaaggttgtttgcgggaagcggaaatgctcaacggtcgctacgatgacgtgaacctgtacgccagaatcttcccgctatag

SEQ ID NO: 126999 - DNA, 132 bp, Enterobacter cloacae
atgcgtttcgcgcctgtctgctcagtcgaggctgacgtggtgtttcatcacccgtttgaagaggctcatacgggcacgcatgaagcggttttcaagccgaaaacctgcatgtttattcacaccgatacgtaa

SEQ ID NO: 127000 - DNA, 126 bp, Enterobacter cloacae
atggcattgtgggggcaaattgtcacggatacggtcctgcgtggcgtggcgtggcgtggcgtggcgtggcgtggcgtggcgtggcgtggcgtggaggctctgaaacccgatcagcaaattctctga

SEQ ID NO: 127001 - DNA, 273 bp, Enterobacter cloacae
atgcacacacgaaacgtcaacgtcaaaaccgccgctcaagaatcttccaggaagatgggggaagaacaaaaccctgtttctgtcgcacgggagtgggtggctcaggccacttcgctgaaggcgggggtcaccgtcaccttgtccgacgtatcccgatacggcgacgtgcaggtggagatccgcaccaacggaacgcttaactggcgcgcctggtcgtttgaaccggattttctttttgaactgaaacgcaatctgcaatacgtgcagctttaa

SEQ ID NO: 127002 - DNA, 366 bp, Enterobacter cloacae
atgcagaaccttaacacccgtccggcgacccgtaaggtcgggcagagcaccgaaatcgtgaagctgctgcgcattcaggccagcgacacccacgtggtcgagtttgacaacgtggacacccgatttaatgactgcaacaactggcaggtgatggcaggaggcaaacgagtcctgttcagcaaccgcatgtatgagcgtttttcagatgtgaaatcggggatcgtggcaacgatcaacgtgtgtgaaaacagcggcagcgtaacggataaagcgatgctggaaggggcaaaagtcatgatgcagcttcttgatggctatccgtcctttggagcactggcagcacacccgaaacgcattaccggttaa

SEQ ID NO: 127003 - DNA, 2013 bp, Enterobacter cloacae
atggtcgccaccaatactacggcaaaaaaaccagccaagaccacccgtcagactaaatctacggaaaaaatcgcgcagtctaccgagcagaagctcgtccagctgcttgctgatacgcccgtacaaatcttcccgtactcccgcctgtcacacactggcttaaacacgcgcatcattccgcataccgatcaggaagtggaagagatggcagacagcattcaggcaatgggcatcctgcaaaacctgatcggtgcagaactgccggacggtacgatcggcattgtcggcggggaaggtcgccgcagaggcacaggcattctggtgatgcgcggtgtgctcgatgcagacacgccgtttgttccggtgaaagtcctgcccgtggagatggctgtggcggcctcgatgatcgagaacggtcgacgtaaaaacatgcatcccgccgagcagattatcggttttcgtacccttcagcaggaaggtaaaacggcttctcagatcggcgcactgatgggctatcacccgcgccacgttcagcgctgcctgaagctggcgaatcttgcctcgtccctgctggatgcgctggcgcgggatgaaatctcccttgaacagtgtgaagtcctgacacttgctgatacccatgagcgtcaggagcaggtctggaaagaggctgttgtacagtggcgcgatcctgccgtacagaccctgcgcaaaatggtgaccgacgacaagatggccatcagtcacccgatgtttgagtatgtgggcgaggaagcctataccgccgctggcggtacgctgaccgcagacctgttcagcgacaaggacagcacctttgccgatgcggcgctggtgaaatctctgctggctggcaagctcaccgtgctcgccgcccgcgttaagcaggagcagggctggggctgggctgagtatcgtatgacggaactaagcttcagtggtgaggacggtgaactttaccgttttgccatgccgaaagctgtcctgacggaagaagaacagaagcgcgtcagcgagctggaagaacaaagggacgccactgaaacctgcgatgacgaatacgagcttcagcagcagatcgatgacatttactgcgaggcagagtatcgcgaagccacgccggaatttcgcgccgcgcacggaatctgggtgtcatgggacggtagcaattttcaggttcagcctggtatccgcaagctgaccgacgaagaccgggcagaagaagaacaggcgcgtcaggaacgtgaaaagaacgttatcagatacaccacgcctgacattcccgctgacgcctatccggcaacgctggttaaggccatgtcggcggagcgcactcttgccgttcaggcggaactggcgggtcgacctgatgtatcggtggcgctcctgacgtggacgctgtgtcttgcgctctttgaccgcacccacggcaagcgcagcgaaccgctgaaagcctatgtgacctcgaatcagtatcaccttgcatcactggctccatccggtgaagaagggaaggcgctgacggcgctcattgcacagaaaaaagcgcttcaggcaacgctgcccgaaaactggcatctcgatttcacctggctgctgtcatggtcagccgagcaggtgaacacactgctgggattctgtgcagtgcacggtatcaacggcattcaggaacgcctgtataaccgcacggacaccagtgaactggacgcgctggaagcggcgctggactttgacctgcgcaagtggtggcaaccgggggcagagagctacttcggcaagcttaccatcgcccagatcggcaaggcctacgaagaagccggactgagtgcccgcgccggagagattgtgaagctcaagcgccgcgatgcggcaaaggccgccgaacaggatctgaatgctcagggctggctgcctgactggatggtgcgccctgcgccagccgctgaggctgaagaagccactgaatccgacgctgataccactgaccacgctgcttaa

SEQ ID NO: 127004 - DNA, 822 bp, Enterobacter cloacae
atggtcagtttcgcaagccgctatcgtatgcctacctcgatccgtaaagaccgtccgttgacgaatgaggaattacagctcatcgttccgagcgcgttttcatcggataaacacgattcacgctctgaacgctatacatatatcccgaccataaacatacttgatcgtttacgtgatgaaggttttcagccgtattatgcaacgcagtcacgtacacgtgaccaggataaacgcgactttacaaagcatatgcttcgcctgcgtcgtcatgaccagattaacggaaaagaagtaccggaaattattctgctgaatagccatgatggttcaagcagctataaaatgatccccggtatgttccgtcaggtttgcagtaatgggttggttgcgtggaaggattttggtgaaatccgcgtaccccacaaaggagatattgttgggcaggttatcgaaggcgcttacacggtgctgaaaacatttgacgcggttgatgaaaatatagacctcatgaaaagcattcagctgactttgcctgagcaacgcctttttggtgcgaccgccctggaacttaagtacgatggaaaaccagcgccgattacaccggagcaaattattaaccctcgccgtgtgctcgacagaggccaggatttatggaccacgtttaacgtggtgcaggaaaatgtgatccgtggggggattcgtggcagaacggaaaaagggaagatcaccagaacgcgggaagtcaccggaatagatggtgacatcaaattaaatcaggtgctctggaaaatggctgaggagtttgcaaaactgaaggcctga

SEQ ID NO: 127005 - DNA, 465 bp, Enterobacter cloacae
atgcgtggcgaagagcgtaataacagcctgctcaggagcatgcggatacatattgctgaatgggaggcgggacgcgccactccggaaggaagccggttcatgtttatctggcttgccatgtaccttgggaccgcgtggccggctctcgcgtactgccagccacttttggcgctgggttttctggttatctggttctttccgagtcaatggatatgcaggcgaattgtcccccgctacaacgaaagctgggcggaggtattcgacaggaagctttctgattatgaacccttgaatttgcccgcctgggaacaccttaagcaccaggccgaaacggaggggctgacggtcagcattgtcagcaactggtatcaggaggaagcgaggtccgtctggccagaaaagaaaccagacctgaagtttctccataaaactactgaccgtcgcgggaaaacgggagaggagtga

SEQ ID NO: 127006 - DNA, 885 bp, Enterobacter cloacae
atgagatacacaaccgattcagaaataggtcttaaccctcgcgggcttttcctcatcatggggggagctatcatcatcgccagcctgcttattgcctggctctcattttacagtattaacgaaggtgaaaggggagtgctgctgcgaaacgggcgtattgttaaagtcgctcagcccggcctgggactgaaatggccgatcatcgaaagcgtggagaaaataaccgtaaggaatgaggccatgctttatgaaggtatgagcgcctacagcttcgatcagcaacccgcaaaaatgaccgtatccgtgaacttccatgttctgccgaccgaagtggaacgcgtctacagtggttatcagacggttgagaacatgaaaacgcggctgattgcccggcagatacctacacagctggaaaacgtttttggacgatataccgcaataagcgcggttcaggacagagcgaagctggtacaggatatgcaggccgcgctacggaaaagtgttgatggaccggtggtgattgataccgtacagattgaaaacatcgacttctcgccggcgtatgagaaatccattgaagacagaatgaaagcagaggtggccattgccacacggacgcagaacctccagacagagaaaattcaggctcagatagcggtcactcaggctcaggcccaggctgacagtaaactggcggcagcaaaggcagaagctgaatcaatacgccttcgcggagccgcagaagctgaatccatacgccagcgcggcgatgcacttcgggataatcccggcctggtcagtctgacgacggctgaacgctgggatggaaagcttccggcatcaatgatccccggaggtatcgtacctttcctttcggtgaagtaa

SEQ ID NO: 127007 - DNA, 396 bp, Enterobacter cloacae
atgtctgcaattagggcacgttcttcattactaaaaaccctgcacaactatcgctatttcctcattccagcactggtattcactatcgaactgacagtgtgggcagtgctcaatcttagaggcgtgggtgatatgggctgggtctcctggcgagtgtccctgctattaagcgtgttcctcgtatgctttagcggctctgcctttaacaaacgcgatgactggtactttatgtatggttcagtcgttccgtggggaggaatgctgatagggaccattgtttatggcttcatccagatgaacctgaacttcctgacgctggacatgttttatgccggcgtgttttgtagccttgctgtgcagttgcttttcactgtgattcagtgcaactgcaaataa

SEQ ID NO: 127008 - DNA, 417 bp, Enterobacter cloacae
atgagtgaacaacagagcaaaccgtatgacggcgacaccgttcgggacggtgcaactatggcgggatggttgacctcccgaagaatgaaattagcaatctgtgtgcttgtctcgcagatggttatgacggggataacatggatttacatgaaaaacacagagccagagattgtcgttttcgacatgaaggggacggtggacctcttcatgcagcagtccgctcagttacagctcgatgaaaaccgggctaaagcgatgacccagcaattcaacgcggcgctgaccggcagcctggatgcgtggcagtcctcacacaacgccatcgttctggtgaagccggcggtgatgagcccgcagcgcgatatcacgaatgaagtccgtgctgatattgcccgacgcatccaggggggccagtga

SEQ ID NO: 127009 - DNA, 279 bp, Enterobacter cloacae
atgtcactgatacacaataccgctgtgccgccagcatctcagcatatggctggtcacaatgcttataccaaaagctgtgacgaaaccgtaaatcaactctgtcagctataccctgagatcgcttcatggcaaccggcgctgatcgccggtgcctggcaccagtggtgcgcgaataaccagcgtcagcctgtagcgccggaagaacgagatgaggcgtttcccctgtacctcgtcaggcttatccgcaacagaatggaggagatgaacgcatggcgttaa

SEQ ID NO: 127010 - DNA, 468 bp, Enterobacter cloacae
atgacaaagatgcttttacccctcatccgtgatgcagggcgtttcgccctgtacacctttgtcttcggccccgcgctgttgctgtacggtattgtgatagccatctcgctggagggctcgctggcgggacagtttgtgaaagaggcgcaaacgctaaccgaaggcgcgcccgccggaaaggtgatgcagtgcgtcacgcatcatgaagcggcaccacaaccccggctacctgagcccggcgaggacgcaagtccccctccttatgagttcccgccggtacagttttgccatcgtgaaccggttgacagcgagctgtggataaagccgatgaatgcaacgctcctcaacctctggctgatgggcgcgctgttcggcgcggctgtggcctttctggctcatctttatattcatcgttccaccacctcacggcagatgccgggggtatggcaaagggagacacacgaatga

SEQ ID NO: 127011 - DNA, 405 bp, Enterobacter cloacae
atgaggcccatcagactgaagacgcttatccgaaaccaggctttcgcgatactgacagactgtagtgcggatactgaaacccgaaaatggacggatttgttaaccctgaaactgttttatgccttaatttttaccgccgtagtcgaaagggtatacgtgacgtgcgccatcacaacgctcagtgagctgtccgttgaccgcgccgaacagtttacgctctcgcttctcatccactatccgcagtacctgttgtggggcgttatggccgcgatttgggtgctcattgcggtgaatttacttgtctgcagctggctctgtctggccagatatctttgccgcaaaattaaccgtgctgacagcccggcaggcaaggatacgcaagctgtggaggtgccaaatgattaa

SEQ ID NO: 127012 - DNA, 690 bp, Enterobacter cloacae
atgaccaaaaaggtaagtgcttattgttgtttcattccaatcggcatttatgcagcttattctgtaagcctgcaattactttttgacgtgccatttatggctaagagcatgctcttatcagtcatacccagcgccatatatatgttctgcatttggaagttacgaaacagcaaaagagggatgagcttaaaagcgacgctcctgtgtaacacgatgcttgcagtcttgctaactttcttggtggcatttgttggcaatgataccgaaagtgctctcatagcaggcatagccgttcactcgctgatagctttcatctttgtgggaacagtattgcggcctattactttcaaggataatacccttcttaaggatgaagataatggccggatatatgttatccgaaatgggatagctcatatgttgccagataatgaggctcaactcctcagcactagtgacaacaaaattatcagtttttcaggcagtcatatgagtttccaggatggtggaataaccaatattcctctgaatacttccttcaacgattcgttcagtaacggaataactgtgaaccctgcgtcaggaatgccaatggttggtggcatctctggcctggatatacacggaaacagttggggaacaaacttcaacgaaccttcaaatacgtatgaccctaaccggggatactga

SEQ ID NO: 127013 - DNA, 312 bp, Enterobacter cloacae
atgatgcatcagataaatgaacgtgcagattactcagctgaattctggtcgcttatccatctggaaagtgagctgatggtagcgagggcttatctgaatgtctttggttcacttcctgaggggcacggaatgaccttcattactggctgggctggctatgaattcactctatatggtctggaaccccaggaatggtattcaccggtttataaggatgtggcctcctcagtccgctctatggctgcatacattaatgcacaggactgggaggacggatgtcagcaggccagatatgaactgagtctgatgtaa

SEQ ID NO: 127014 - DNA, 789 bp, Enterobacter cloacae
atgaaagcaaacaaattagcagcatttatagttacaacatacattggctttatttcaacggcacacgcttcagcccctcagccattattcagcccggagcaggaggcacgtatcggcgaaatcgctgccgactatctggtttctcacccggagattctggtgacggtcagtcataagctgcaggaacagcaggaggcacgtaagcagaagatgtttgcactcagcgtaatggagaatcaggcgaaccttctgcatgatccggacacaccggcttacgggcctgataacgcaaaggtcgcggtgattgaattctttgattaccagtgcgtgttctgcagccgcttcgcgccggagctggagaaggttatgaaagcgcagccggacgtccgctacctctttaaggagtggccaatatttggtggtcgttgggaagcttcactgcaggcagcgcagcaggggctgacggtctggcaaaagaaagggccgcaggcctatgtcacctatcacaatgccgtctacgccaccggccataatgaaggcaagctgacggcggaggatattctcgcggcagcgtcaaaggcaggactggctgccccagctcctggcgaccataccgcatcccttgagaaaaacagtaacctggcagaggaactgggactcaccggaacgccggggatcatcgtcatgcccgttagcggtgcgactcccgacaccatcacagttttcccggaagccgtaaccgctgaaagactccaggcagcaatccggaaagccaccagagtgaaatga

SEQ ID NO: 127015 - DNA, 1014 bp, Enterobacter cloacae
gtgaatgacaatcagatttctgttcactggtcagatctaccgaaagatgagctaacccgtttctggcaggatgtcgatgccggcactcagggtaatttcctcattgcaccgatcaaaaaactgacccgccgcaaacgcggtgagcattccacaaaagccaaatgtgagaacccggcctggtatcgcccggagcattataaaaagctctccggacagctcggtcatgcctacaatcgcctggtaaaaaaagacaaagaaaccgggcaggtcagcctgcgcatgcatgtttcgcgtcaccctctctatgtcgccggccgccgtaaggcgggacgtaaatatggcttccgtccggaacgtcagcgcctgctcgatgcgctctggccagtgctcatcagcttctgtgatgccggcaagcataccattggcatgtgtatctcccgtcttgcaaaagaactcagtgcaaaggacgcaaaaggcaatgtcattccggaaacggaggtgacggtgtcacgcctttcacggcttattgaggaacaggtaaggtttggcgttcttggccttgcggaagaacgcacctgggatcgtgaatcccgctcctggctgccaacgtatgtctatatcacccccgtgggattccagatgctgggcgtcgatatggacaagctgtttaaagagcaggagaagaagctccgtcagagcgccgagcgtgagcagctgatccgggaaggggtgatgagcgaacatgatgatgttcagccccactccgcgcggaaatgctggtctgaccgtaagcgccgggaggcactcgtttaccgccgcaaaaaaggcgcagagcgtaaacgtgccaacaatctgattaagctgccggcagatgaacgactccatgcaatgtctgaatggatttaccgcaccctgccgcctgacgaagcgtactggtgcacatctgagcgcctgaaggctctggccatccagcatctttaccagctggatctggcgctttctccaccggactag

SEQ ID NO: 127016 - DNA, 324 bp, Enterobacter cloacae
atggctatcagtgagaaagagctgcttgaggcaggtttcagcaagagcgaagtggacaatttacagggccggcttgcagcaggcggaggcaccatgcagcatctcatcgatgcgctatcacggcgcttccgggtgtcggtatggatcactgtcgcgctggttctggttatgctggtcaccctcattgctggcagccggacacacattctttccgggggcatgagttcccttgtcgtcctgatcattgcctgggtgaccttcccacctgtactgggctggaaagcattccgcctgcagaagactatttcccggaaggctcaatag

SEQ ID NO: 127017 - DNA, 249 bp, Enterobacter cloacae
atgggcgagatgggggttgttgaagcggagcagactgaaagcggcggactgactatccgcctgtttaagcggaaatacatgctgagcgatgaaggggagatcgtcaaaacaaaaggggctcctatagatgttcctgccaacagctggatcgacgttcgcctcgatatgccagaggatagcatctggaaaacaagagcttccgaagcttctcttgaactgacagagcagcctgaggacattcagccttaa

SEQ ID NO: 127018 - DNA, 240 bp, Enterobacter cloacae
atgccccgaatttcagatattcaggccgcctttattgcggccatagagcttaacccaaagggctaccgctacctgagaacagacagctttatagaaaagttgcgtggttttaactggcacttcacccgagccgacgccaatgcatggatagagcgcaatcagccaggcttcgctgacaagacgacagacggtagcgacaacaggtactggatcctgcgtaacatggggagggtgcactga

SEQ ID NO: 127019 - DNA, 321 bp, Enterobacter cloacae
atgggatttccttcaccagcaacagactacattgagcgccgactaaccccagcaattctgtgcaatatgggggctgatagtagggtgcttgaaacggatgtggggtttgcggtcatagagccagcaacgaaaaagacacctggagatgtgttgttaattttgtgcgacggtcacacgcagtttgcaaaactgatgggtaagtcacttatcacggatgatggtgaagcgattgagggagcagcgcttgaagaagtggaagtgctgggtagggtgacattcttcatcaatcgtgcattagatgatgattgccctgcaatatag

SEQ ID NO: 127020 - DNA, 1602 bp, Enterobacter cloacae
atgttaaatcgtattcgtatctcgaccacactgtttttgattctgatcctgtgtggggttttgcaggttggcagtaacgggttgtctttctgggcgtttcgcgatggctatcagaatttgcaggaagttgagacgagtaatcagcagcgctccgcactggcacaaacgcgtgccgtgctgttgcaggcaagcactgcgctgaacaaagcagggacgttaaccgcgctgagctatccgccggaggatattaaggcgctgatggtcgtggcccgcagcagcctgaagcaggccgacgcgcagtttaaggcctttacggcgcagaaggcggtcagtgagaaagagaaagcgctgaaagtcgccatgaaaaaaacctttgatgtgtggtacggcgatctcgaccatcaggcgacgtggctggagaacaaccagctttcagatttcctgaccgcgccggtgcaggcgtctcaggcggcgtttgacggcagctttaacgcgtggcagcaggatattaaccagtttgtggcgcgtgccggtgcggacagccgtaccagctaccgcatgtcaggggcgatattcctgaccatggtgatcctggccgccctgctgaccggcggctcgctgtggtggtcgcgcaaaatgatcgtccagccgctggccatcgtcagcagccacttcgacagtattgcgaagggcgacctggcgcgtccggtggccgtgtatggcaggaatgaaatatcagcgattttcgccagcctgaaggcgatgcaggggtcgctgcgggaaacggtaagcaacgttcgccagggcagttacgccatgcataccgggatctccgagattgcggcaggcaataacgatctctcatcacgcaccgaacagcaggcggcatcgctggcgcagacggcggccagcatggagcagctgaccgcgacggtaagccagaacgccgataacgcgcgtcaggcgtccgacttgtcaaaacaggcggcgatgacggcgaaacgtgggggcgatcaggcttctcacgtcgccagcacgatgcaggagattgccgccagctcgcagaaaattggcgacattatcagcgtcatcgacggtatcgcgttccagaccaatattctggcgctgaacgcggccgttgaagcggcgcgtgccggggagcaggggcgcgggtttgcggtggttgccggtgaagtccgtaacctcgccagccgcagcgccaatgcggcgaaagagatcaaagggctgatagaagagtcggtctcccgcgttcagcagggctccgcgctggtggataccgccgcgcagaccatgcacgagattgtcacctccgtgacgcgggttaacgacattatgggcgagattgcctcggcgtctgatgaacaacgccgtggtattgagcaggtggcgcaggccgttacacagatggatcaggttacgcagcagaacgcctcactggtggaagaggcggcggcggcgaccgatcagctggcaaaccaggcggatcaccttaccgggttagtcgccgtatttaatgtgaaagagcacgttgaagcagtaacagaagtcggacggtcacaggccgtgcccgttgtatcctga

SEQ ID NO: 127021 - DNA, 753 bp, Enterobacter cloacae
atgaatatgaaagtcgtctccagccatcaacgccttaagctaagaatcgaagatttctttgacgttagcgaagagcgaaagcaagccagagcgctcatcgacgctctggctgagcgctcgcacgcgtggatttttggcgggatgattcgcgatatcggtctttttgggcgtggaggctttacttcggatatcgatctggtcattgatctgtcacgagaagagctgattaacgcgctgaacagacacaacatcgaatgtttcagcgtaaataagctgggcgggatccgcttccattacatgagtctggattttgatatctggagcatcaatgatacctgggcctttaagaacaggattgttgagtttaaagatacctatagcttattgaatacaacgctgatgtcatgggattcaattctttacgatgtgaagaagaaacatctcattagtcctgataactatctccatgacttgcatcaccgtcggcttgaactcgtattacagaaaacacctaacgaagtgggttctgtaatcaagatcttgcgcacaatctataacaagcgagtccagatcctggggccacagttgaccgattttttgttacaggctctgcatgaacacagctttgaccagctaaggcagtatgaatacggtagttatcgctcttcttcctttagcgtcgaggatctgcgtcgtctcaaagaagacctctgtcatttccgaaccggattcgatattaaaattcgaatttaa

SEQ ID NO: 127022 - DNA, 1449 bp, Enterobacter cloacae
atgaagtggagtaagttgttaaatagcagcagacgcaaagataaagagaaaaatccgggttcaaaaaagtccgacctcgctgccggtaggcaagagattgaacgagactttgaccgcttactcttcgcagcgccaacccgtcgtttagctgataaaacgcaggttttcccactggatctgaatgacagcgtacgtacccgattgacccattcccacgaagtggcgaattttgccagaggcatcgggatgcgtcttgcctttgaaatgaaacaagaaatatttggaagcgactgtaaccacttaatactggaacgcgatgtccccgctctgttggcaacgattggactggcacatgatttgggtaatcctcctttcgggcatcagggagaggcagcgatggcggcgtggtttcgtcgcaatttggctcccctggttgcgcatgaattcgatgaagaaagcggcaggatattcaatgatttcatgaacttcgatggcaattctcaaacgctgcgccttgtgaccagacttcaaattatcaatgataattatggtttgaatcttacgtatgcgtcacttgcggccatgattaaataccctcagtcctcctacatcaaaaacaagaaatggagtaaacatggatatctgttctcggaagaaaaagtggtacatgatatttggcaggaaacaggcctttctgaaggactcagacatccctttacctatttaatggaagcgtgtgatgacatagcgtattcaattcttgatgcggaagacaccataaaaaaagggctagcatcctatcaggatctgattagttttctgacaagctggaaaaacggaacagatcaaacaattaatcagttggtaaaaaaagtacaggataagaatcaggaatgggacgaccgaaaacaagagctttcccccgccgaaatcaatgatatgagtatgcaaatgttccgtgtgcacggaacaaatgtactcatcacgagtgttgttgaggcttttcgacggtgccataaacaactttgcaataccgagtgcgctattaaggatctgataagtatcagtgatggaaatgaactttgttcagcgttgaaaaaatttgatcaaacccgtggctatcgtcatcgaaccgtacttgagctggagctgaaaggctcaaactacatacaggggctcatggacatgctctgggtaggtataaagggtcgtaaaagcggtggaaaggaatgggatacaccatttggtcgttatgcgtatggccgaatctctgaaaactaccgccgagtgtttgatgataaagaaaacaacttacccccgctttataaagaagcgcagttgctcgctgatgctgtttcaggaatgacagacagttatttgatacgccttcacgatgagctaaaatcgctttatgaatatgaaagtcgtctccagccatcaacgccttaa

SEQ ID NO: 127023 - DNA, 147 bp, Enterobacter cloacae
atgaatacagcttttgaaatatgggttcgtaagcgatacggaaaccgctacgacctgacacgggatattcaggggctttattgccgggaagtggttaagcggatgtttgaagtgtggtgccactgccgtggcctggatgtagtgtga

SEQ ID NO: 127024 - DNA, 612 bp, Enterobacter cloacae
atgaaatggggggatctgatggcacttacagcgatacgaattcctgaatcagattatctcaacgagtgcttttattacgaacaaaaaactggagagttgttttggaaacatcgtcccttaaaacacttttcatcatcaagtatacaaaaacaattaaatacaagatttgcaggtaaacctgctggcgcgtttattaaaacaaaaacaggagcatatcgtatcgtgcggttagatggtgtcatttactatgcccatcgcctgatatttaaaatggttaatggtgttgagcccgaagtagtcgatcacattgatgggaacaccactaataacagaatagaaaacctgcgttcatgtacaaaccaagacaatagtaagaatgcgcgcttatctaaaaccaacacatccggccatacaggggtgagctggtcacatcacaagaaaaaatggtgggcaaatattgttataaacgcgaagcaaatatatctgggatctttcacggatttcaataaagcagtcgaggcaagacgaaacgcagaaattaaatatggatttcatgataaccacggaaaaaacagaacacgattcacgggagagaccggaaatgaacgataa

SEQ ID NO: 127025 - DNA, 225 bp, Enterobacter cloacae
atgagcttattaaaaaggcaagacattcaggttgtgaacatcaaagccgagcaactggctggtttatcgcaaacattatttgaatatcacgacaaactggaccatttccaacttaaaactatttgctctcttgtttatgacattgctggcgaaattcatgattggaccgaaaaagaagaggaaattgttatgagcttagaggaggaggctcgccgcaatggataa

SEQ ID NO: 127026 - DNA, 387 bp, Enterobacter cloacae
atgcaaaattccgtcgcagttaatcagccagttaaaacgcctcaaatgctgttcggatctgacaacatcaatgactttggcaaccgcgtacaaagctgccggatggaaggtgattcaatgcagccgaccatcgaaccatgtgaggttgtggctttcgttgattgcggtggatgtgcgcttacctctggcatttatgtttacacaatggatgcttttggtcgcccatgtcttttcattaagagaattgagccattagctgatggctcattaaaaatcatttctgataaccatcattacgaaactttcacccttaataccgatgaacagaaagaaatcaaaattcacggtcgggtggtggcttctttggctgtgaggcgcttcgtatga

SEQ ID NO: 127027 - DNA, 432 bp, Enterobacter cloacae
atgaatactcaaatcaccgtagccaaaaccatcggcaaaagaatattaaatcaaagatcttcgcttcgactgtctcaggattttttggctgatcatcttggtttaacaaccgaaaccattaacaactgggaaacggaaaaaactgttccgtttgctgaccagttaatccaattggctaacattcttcattctgatgttctgtggctcatttcaggaaacgagcagtgtggtgaatttacagagccaacaagcattataacttccaatcaacttaattcatggtctgcggatattggcaattgcagaatggctttatccaacgctatggattgtatgcctccggaattgtcggctatcggtacgctaactatcgtttatgaaaaattagacgacttgcaagaaaccatctgcaagcaagccgacaagatttaa

SEQ ID NO: 127028 - DNA, 699 bp, Enterobacter cloacae
atgaacacattctcagatcgtcttcaaaaagcgatggttgacgcaggccttacacaggcagaattagcgatgaaagttggggtttcgcaaccagctatctggcgtcttgttgcaggcaaaaccaacacaacacgtaagttggttgagattgctaatgcgctgggtgtgagccctgaatggctatcaactggaaaaaatcatgtgcctcatagacagggctatgtgatagagaccatgcccgaaagggaggtaaaggataacgctggcatattcagggtcgaggttcttgacctttcagtgagtgcaggacctggcacgttcatgctttcagaatatgtggaggttttacacgctattgagttcacgactcaacatgcaaaatccctcttcgggaatcgtagtgaagatgtcgtaaaagtaatgaccgtcaatggcgacagcatggccagcacgttcaattccggtgatcgtgtcttcgtagacatttccgtccgacactttctaacggatggtgtgtatgtgtttgtttttggtaaaacatttcacctaaaacgtctccagatgcagggaaacaggctggcagtcttatcggataatccggcatatgagaaatggtatatcacggaagaaaaccaagatgacctttacgtgatgggtaaagccataatgcatgaatcaatcaattacaataggctctaa

SEQ ID NO: 127029 - DNA, 198 bp, Enterobacter cloacae; identical to SEQ ID NO: 119845

SEQ ID NO: 127030 - DNA, 1872 bp, Enterobacter cloacae
atgagcccagctgaactatcagaaaaactatgggataacgctgaacgcgtcgctaagtttctccttccgaaaggacatctggaggggaaggagtggtgtgctggcaatacgaacggtgactcaggcaaaagcctcaaggtcaatatcggcggtaaaaaatcatgggctgactttgccagcggtgacagcggtgacctgctggatctctgggtgttggttcgtaactgccagctgcatgatgcaatgcgagaggcgaaagagtttcttggcctgaaagatgacgaccaccacttcgaagcgaagaaaaaactgttctctcgtccgacgaaaaagggcgttaaatcggccagcaaatgctatgactaccttgcttcacgtggaattacccgtgaaacagccgatcgctttaaggtaacagacgcggtggtctggtatcacgacgaaagccgcgaggtaccagcagtggcattcccgtacatccggaatggtgaactgctacaggtaaaacgtattggaaccgaaaggccaaacggcaaaaaactgattatggctgaagctgattgcgaaccatgtctgtttggctggcaggctctggataaaaacacccgcctggtagttctgtgcgaaggtgagattgattgcatgacctttacgcagcttggctatgatgccctgtctgttccctttggcggtggcaaaggggccaaacagcagtggattgaatatgaataccataacctcgatcgcttccaggaaatttggctgtgcctggacaacgacaatgtaggccgtgaagctgcaaaagaaatcgccagacgtcttggggaacatcgttgccgcatggttgaacttccccacaaagatatcaacgattgcctgatgaacggcatggacagcgactccattctggaatacatggagcgcgccaaattcttcgatcccgatgagctttgctcagcaggggacttgcttcaggaaactatcgaggcattcgaacatcgggataccggtctgtttacaagcccatgggcttcgctgaacaacaactttaagttccgtgccggtgaactgaccctcgttaatggcgttaatgggcatggaaaaacagagctcgttggacatatcgcgattgatgcgatgagtcagggcgtcaggacgtgtattgcttctctggagcttaaaccaggcaaaatgcttgcccgactcacgcggcaaaccatctgcacttcctcaccgaaacgtgaagaaatcattatgaccaacgaatggttttctgaccgcctttgggtattcaaacttaccggaactgccaaagcagaccggcttcttgagatttttgcctatgcccggcgtcgctatggcattgagctgttcgtcatagataacctggctaaatgtggcttagacgaagaagactacacaggtcagaaggacttcatcgatacgctgtgcgacttcaagaacgagcataactgtcacgtcctgctggttacccacgccagaaaaacaaacgactccgctccaacaggaaagatggacgtaaaaggcactggcgccttaaccgacatgcccgacaacgttatggccgtctggcgcaacattccccgtgagctggcgcagagaaaagcggatcgtatgggttatgagagcctcgacaaagacgaacaggccgcgatcaatctccccgcttcaatgattcgtttgttgaagcaacgagaaggggaagggtggatcggtgacatcggagctaatttcgactctcgctctcaccagttcctggaaggcgagaaaaaaccatttaactacctggtcggtaagccgcaaagcgagcttgatctcgagtgggaagccagcaacgtaacgagggtttga

SEQ ID NO: 127031 - DNA, 816 bp, Enterobacter cloacae
atggaacttgaagcatcactaaaacactttagccctcagggaatgcagatcagcgacgacgtgaagggaacttctccggaccgccttacaggaacagacgtaatggcggcgattggtaccaccagcagccgtgcgcgcttcggcctggcggcgttcttcggtaaagcgggaatcagcaaaacggatgaacagctcgcagttcaggcgctggcgcgatatgcgatggatgtcgcaccgaagaatgttcgcaaagcagctggtgggcagttcggatggtgcatgcagatgctggcgcagtttgcctttgctgattactcccgttcggccgccaccagcgcgacgtgtcacagctgttgcggtaccgggcgaacaacccgcgagcagattacccgcaaagtttcttacccatggggtaaagcgccatactgggcctgccgctctcgtgctgttcgaccatctgactgggagcagtggacggaggtaacagaggttgtaccggcggtctgtgatgtttgcgaaggcaagggaacgatcagcgcccggtgcaggtgcggcggtaaaggtgaagtgctggatcgcaaagcgaccaaagaacgtggcgcaccggttttcaaaacgtgtgaacgttgctctggtaatggcttctctgctatctcctcggcgacggtacaccgtgccattctgaagcgtctcccggacctccatcagtcctcatggtcacgcaactggaaacccttttatgaaatgctggtggacacgctgcgccagggggagcgtcacgcggcagtagagtttgagaaggcgacaacttattaa

SEQ ID NO: 127032 - DNA, 561 bp, Enterobacter cloacae
atgagcggacttgttagaaatgcaggaaaaacctgttccgttaattcatgtgaacggccagcgcattgcaaaagcatgtgccagatgcattatctgcgactctataaaaccggctccctcgaagcaaaatcaccgctcgatagattgagcagcaagtatatggttgatgattcaaccggatgctggaactggcttgcatacataaatccagacggatatggaatgtttaaacacaaagggatgatgaccctggcccacaaagccagttatgagatattggtcaagaatgttcctgatggctttgaacttgatcacctctgccataaccgaaagtgtgttaacccaaaacacctcagggtggtgacccacacagtaaacgtctggaaccgaataaagccggtgagttccactggggtgatgggcgtatctgtcagggagagcggaaagtacagggcaacacttacgcgaaacggcgatgtcatttttcgaaaggaatttgagacattatccgaagcaacggctgcggttgaaaaagcacgatacgaatttgaggggaaataa

SEQ ID NO: 127033 - DNA, 1461 bp, Enterobacter cloacae
atggacgtcattgttgatggggttccttatgtccgcgtcgatagcgtttctcacaataaaatcgggatcgcgataactacgcataacaggccgcaggtactcgccaattcacttgagcaacatcgaaaacatttacctcccggcgcagtggtattcgtcattgatgacgggtccaaccctcctgcaaaagtgccggagtggtgcaatttaatccgacatgataagtcacgaggaattgtcgcatcgaaaaattccagccttgaatgccttatggactcaggatgcgaacatttatttttgtgggacgacgatgcgtatgccatcgctgataactggcacttgccatacatcgaatcacccgaactgcacctggcttaccagttcctcgatcttgctggccagaataagctcaatgacctttcggtgctttaccgtgacgatcagcatgtggcgtacaccgggcagcgcggagtgatgctctattaccaccgtagcgctatcgagaaggttggtggtttcgatcgggtatacggtcgcggcatgtacgagcacagcgatctcgccttgcgcatccataacgcaggactaactacgtgggcttacggtgatgtggtcggttcagaaaagctgattcattctctcgacgagcatgaagcggtagagcgttcggtgccgcgtcccgaccgacaggcgctggttgaacgtaacgtgaagatccacaacgaacggcgtgatgccgggtttactggttacgttgaataccgccagcagcgcgatgtggttatcacaacgctactgaccagtcagcctgacccgcagcgcggcacaaaaatggcggcctcgcctgacatgctggctaaatgggcctcatcacttcggaattgtggccgcatagcgctggtggatgagctgcatgcagccccggcagatgttgagctatgtcgcgttcctgacgtgaagatgaatgtctactttcgtcgctggttgcacatctggcagcacctgcgagaacaccctgaataccggttcgtctggtgtaccgatggtaccgatgtcgaaatgcttcgcgcgccgtgggaagaaatggaagccggaaaggtgtatgtcggttcagaaccaaagacctacgccgatacctgggcaaagcagaatcatccggagcgcatctatcaggagtttattgaagaacaccgcaacgatgtgatgcttaacgctgggctgctgggtggtactcgcgctgatgtaatggcgttcgctcacggcatcatccgtctttactaccggatcgagagttatcgtttctggaagaaagaacaggctggcgccgcggtgggtgacatggtggcgttcggcattgttgcgcagtcattcgctgacaggctggtcaccggccctctggttcacacggtgttcaaaactgagggcatcggtatagaaagcgcttggtttaaacataaataa

SEQ ID NO: 127034 - DNA, 231 bp, Enterobacter cloacae
atgatgcaaaatcacgagttagtagtttcgtctttcatcgctaacggcgaagttattaatgctaccgtgagcgtacgggcgatggcggtaccaatgttaaacatcttcagtatggaggtttttattgctcgaattgagggaggtacggtcgaatattatgaaggtgaagccataaaaactgctgcaaaggtcatcagtgttgtaaatgaagaaattaataaagcggcctga

SEQ ID NO: 127035 - DNA, 285 bp, Enterobacter cloacae
atggaccaacaaacagcttctcttctgcacaaaatcgctacacttgaacagcagatggcaaaacaaggtgcagccgcaaactttgtaatcactcacatgattaagcttctcgatgaacaatcgggcgatagtcagttttcatccaaactcagagagaccctttcagaatctctggataaactcaatcacagtcagtcagcacctatcaagtctgccatcaacgagttgcttcagccgtctgtccaaataatgttccaaccgaaaccagagaagttcattaagtaa

SEQ ID NO: 127036 - DNA, 1737 bp, Enterobacter cloacae
atggctaaggttgcagaaggcatccgctacgccgagagggtggtggcgggggaaattattgcctgtgagtatgtgcgccttgcctgtcagcgttttcttgacgatctggcacacggcgaagagcgcggtattttcttcagtgaaccgcgcgcgcagcacattctgaatttctataattttgtacctcacgtaaaaggcgcactggcagggcagcctattgagctgatggactggcatgttttcatccttattaatatttttggttttgttatcccgctggtgaacgaagagacgggggaaaccgtcctgcgtaatgacggcagcggtcggccggtgatggttcggcgttttcgtacagcagatgttgaggtggcccgtaaaaatgccaaatcaacgctttgctctggcgtggggctttatatggctggcgcagacggcgagggcggggcggaggtttattccgctgcaaccactcgtgaccaggcgcgaattgtttttgaagacgcgaaaaatatggtcaagaaggcgaaagccactcttgggcggatcttcgaattcaacaagctcgctatctaccaggagcaagccgcctccaaattcgagccattatcatcagatgcgaacaacctcgacggcctgaacatccactgcgccattgtcgacgagctgcatgctcacaaaacgcgtgacgtctgggacgttctggagacggcaaccggcgcgcgtctgcaatcgctgcttttcggtatcaccacagccgggttcaacaaagaaggcatctgctacgaattgcgtgattacgccatcaaggtgctgcgtgggctggtaaaagacgatacgttttttgccatcatctacaccttagatgaaggtgacgatccctttgatgaaaaagtctggcagaaggcgaatccggggctgggtatctgtaagcgctgggatgacctgcgccgcctggctaaaaaggcgaaagagcaggtttcggccagaattaactttttcaccaagcacatgaatatctgggttaccgctgagtcagcctggatggacatgatgaaatgggaaaaatgcgagtttatcgccccgcagcacgaacttaaaacctatccctcctgggtgggcgttgacctttcaaacaaaattgatatctgtgcggccgcgaaagtctggcgcgcgccagatggccacgttcatgcggatttcaaattctggctaccggaaggacgccttgagaaatgttcacgccagatggcagagctctatcgtaagtgggccgggatggacaagctgatccttaccgacggggatgtaatcgaccatgctcagattaaggaagagctacagctgtgggttgctggcgagagcctgaaagaaattggcttcgacccgtggagtgcgacgcagttcagcctagcgctggcagaagaagggttgccgctggtggaagtgccgcagacggttcgcaatttctctgaggcgatgaaagaggtcgaagcgctggtatacggtggccgattccatcacagcgatcacccggtgatgaactggatgatgtccaacgtaaccgtcaaaccggaccggaacgagaacatattcccgaataagtccacacctgaggccaaaattgatggccctgcggccttgttcacagcaatgagccgcgttctggttaacggtggcaacgaccagcaggatctctccggattcttcaataatcccatcatggtaggtttctga

SEQ ID NO: 127037 - DNA, 849 bp, Enterobacter cloacae
atgagcaaaaaacaacttccggtagcaccggcgggtcgcccctgcgcgcgcgttacctgtgaaacattaccgtccgcactggaccgctgggacggcgggatcaaagctgcggccaccgacgacaacagtatttctgtttttgatgtgatcgggcaggactactggggtgaaggcgtaacagccaaacgtatcgccggtgcactacgggcgatgaatggcgccgacgtcacggtcaatatcaactcccctggcggtgacatgttcgaaggcctggcaatctacaaccttttgcgagaatacgaaggccgtgtgacggtgaaggtgctcggtattgccgccagcgccgcctcagtcattgcgatggccggggatgatattcagatcggtcgtggtgccttcctgatgatccacaactgctgggtctacgcgatgggtaaccgccatgactttgcggaactgtcacagtctctggagcccttcgataacgctatggcagacatctacgcggcgcgttccggccttgatatggcagctgttcagaaactgatggacgccgagagttatatcggtggcagtgacgctgtggcgaagggactggcagacagcctgctttctgctgatgcggtcagtgatggcgatgaatcacctgcggccgcgcttcgcaaacttgatgcgctgctggctaaaaccaacaccccgcgctctgagcgcagaaaactcattaaagccttatccggtggcatgcctggcgctgtcaccaccaacgacggtacgccgggcgctgccgaagatatcaaacctgaaaccctcaattcacttgaaaacgctcttgcggcgttagtcaaataa

SEQ ID NO: 127038 - DNA, 327 bp, Enterobacter cloacae
atgcttgatcagaatgtggtgaaacagcattgccgcattgataccgactttacgggtgatgatgctctgctggagatttacacaggtgcagcggcccggtacgtccagacatggacacgccgaacgctctatgaaaaggaaagcagccctggctacgctgacgacccggacccgatactgctcaatgatgatgtgaaggcagccatgctactgcttatcggtcactggtatgcaaacagggaagcggtaaacatcgggaacataacttcagccgtaccttttgctgtggaagcgctattgcagccataccgtatttatggactgtag

SEQ ID NO: 127039 - DNA, 339 bp, Enterobacter cloacae
atgcaggccggaagactgagagacagggtggtaattcagaacatcacaacatccagagacccttctggtcagcctgttgaaacatggtatgacggcgcgactacatgggcagaagttaaaggtatcagcgggcgtgagcttgtagcggcaggtgcagaaacggctgtagccactatcagggtatggactcgatttcgtaacgatataactgctgcgtcaagactcagggttgtgactggcccgttcaagggtgtcattttaaatatcattggtccgccgatacctgattctcgcggcattcagctcgaaattctttgtaagcaggggatcgaaaaatga

SEQ ID NO: 127040 - DNA, 1944 bp, Enterobacter cloacae
atgaatgcattagatacagataacatcagcacagcatttaattcaatcttgcgagctgactatatttcacttgataacatcaaggaactttctcttcttgaggattatttcattgattactttggaatattaaacggcttactccaaaaacaagacaacttcatatctggtcgtcgtggaacaggaaagacaacaaatctgctccgtggatattatgagtgtttaaaatcaatatcacctgagttaaaaggaacaacttctttacttggcacgaaaaaagttcttcctatttttatcgacttaagtacatgtatagatatctttgactcaacgagtgacctagagttaatagaaattcacttcattagacaaataatcgactctttaaaaaaacagctagcactgatgtacaatgaaaaacatcttattcttttcaaaaaagaaaacccagcgctagatgatcttgactatatagagaagatacttgttgaaggtataacaatcagcacgagccgaaaagtagaagaaaataatcaacacaaacacaaagccgatgtcaacctttcagcaaaggcagatttcaccaaggcagagataggtgcaggcatcactgactcagttgaaaaatcaactaatagcagccacacaaaaataaaaggcctaaatgttcaagatttcttgaacaagattagccaaataaaaaacaaagcaaaactggatgctatttatatttttttagatgaatactcagatctcaactctgagtcacaaaacaaattcagctctttattaaaatcattcttaggctcaaggatcgggatgttttttaaagtcggcgtaataactgaccggtacgactttggcgaaaaaataattattggaagggatattttcgccatccctcttgacttcaacgagtatgttgaaagatttgatggggcaatagctggcattaacaaaatgcaagtttttgtagagcaattaatcaataaaagaattgataaattctgtccaaatttaaaattcactgacatattcaaggggaatagagaagagattttctatcgaataacacgagaaactcttggggtatcaagaactattggaataatactccaaaatgctttcattcaagccagagctaactcgcaagaccataaaattggtttagcagaaataaactatggcattacatgtgcaagaaaaacctatcaaaaacaatttactggaagctctaaaaagggattaatacctccatttaatatggatatttggaactcaataatagaaaaagctttacaagaaaaaaataaattcccagatagagcagcaagtcatttgatgatcgatccttctaggagggattatctcaatgtcttatgtgaaaacttcatgctgcactttatatccgaaaatgtagtttctaagcatggtggaagctataatctctatgccattgattatgatgtttgcttagaaaacaatattaaatacgctaataaaaaagatgattacacaccaatacgatttatttatgacgaagttttagccaaatatgccccatactttgtcaaaacaaaacgcaagagttacaaatgccctgcttgcaataaaatatatgatgaaaccgaactaattaaagtcaaaataaaaagatgtttcgaagatgatgaaaaacttattgaaatcattcatcaggatgctcctgtaactcatggaaacttcgctgaggttgaaattaaaatattgggtttaataactcaattaacttttgatgaggctatgacagctcgtgaaatagcagatgcagttggttgtacaagacagaagatttctgcatggggaggtcgagtgctggaaagggaaggtcatattcgtatcgacaaaaatagaaaaccacatcgatactacgcgagtgaccttgatgaatcatcttcagagtaa

SEQ ID NO: 127041 - DNA, 564 bp, Enterobacter cloacae
gtgaccacactgacgctacagaaagcctttgaggcctgtcaggcaaataaatccgcctggctgcaacgcagggaagaactgacgcaggccgaacaggcataccgcgaacagcttgccggcagcggccacagcggccggagcctgcaaacgctgcgtgagattatcgacgtgaaaaaatgggaaattaatcaggctgccggtcgctacatccgctcacatgaggaggtgcagcgcatcagcatccgcgaccgattaaatgattttatgcaggcgcacggcgcggagctggccgccgcccttgcccctgaactgatgaattattccgggcaacattccgccgttcagcgctgcgctatgcagcactcactcgattatctgcgcgaggcgctacagctctggctgtccgccggtgaaaaaatcaattattcggcgcaggataatgacattttaacggccatcggattcaggcctgacgcggcttcgcgcgatgataatcgtgaaaaattcacgcctgcacagaacctgaattacacccgccgccgtgcagagctggccgcgcagtag

SEQ ID NO: 127042 - DNA, 219 bp, Enterobacter cloacae
atgtttcactgcccgttctgtaaaaccagcgcgcattcccgcaccagtcggtatctgtccgataacgtcaaacagcgctatcaccagtgcatgaacattgaatgctcggccacgttccgcacgcttgaatccatcgacggggttattcgttcaccggtgacagagccggttatcccgctacccgcaccggcggccaccgttaaccgtgccggtgcgtaa

SEQ ID NO: 127043 - DNA, 744 bp, Enterobacter cloacae
atgaaacccgaaacagtcattaccgccctgcaagaagttgccgctcagcagtacgcagagaacaacccgcacattaccgacaagctgagcgcattcactgcggccagagacacccacgcggccagcatgcaggtactgaaagagattgatacggccattgaacgctgtaagcaggagcggcagaccgccctcgatgagagcactgaggcggagcaggactggcgcagccgctttcgcaccctgcgcggcagtctcacccctgaaatgaaagctgagcacagcaggcgtatcgccagtcgtgagctggccgacgagttcaccggcctgattgccgagctggagaccgaccggacacgcgccatgctgaatgcctgctccaccggcaataaatacctgtcagcgcatgaagatgcctttaccgcttacgccggtgcggaatgggcacaggctgtcaatgcgattcccgtcacccttatccgcgctttcctgctgcgtgttcgtgccctcgaaatgaagggtgtaagcgccccgcagtccgtggccaccggcgagctgcgcgatgcgctgagccgtcagggcatcctgtatcaattcgatatgacgcaggagccggtgttgtccgtgacgggcatgcaccggccgcagattaccggcgtggatacggagcttttacgcagccctgcgaagagaatgatgctcgccagaaaactggctgaaaatggcgagacaaaagcggaggagtaa

SEQ ID NO: 127044 - DNA, 342 bp, Enterobacter cloacae; identical to SEQ ID NO: 78932

SEQ ID NO: 127045 - DNA, 318 bp, Enterobacter cloacae; identical to SEQ ID NO: 78933

SEQ ID NO: 127046 - DNA, 222 bp, Enterobacter cloacae; identical to SEQ ID NO: 21303

SEQ ID NO: 127047 - DNA, 477 bp, Enterobacter cloacae
atgaaacagctttcctttttacccggcgagatgacgccacaggaccggcgtctcattcagcgggcgctcagggctctggaccgccacctgcatgagcccggcgtagccttcacctctacccacgccgtacgtgaatggctgcgactgcatatggccgcgcttgagcgggaagagttccgggtgttgtatctggacaaccagaatcagttgattgcccatgaaacgctcttcaccggcacgattaaccgcaccgaggtgcatccccgggaggtggtcaaacgtgctctgcacttcaacgcggcggcggtgatactcgcgcataaccatccttccggcgagacgacacctagccaggccgacaaaaccctcacgcagcgactgtttcaggtgcttcagctggtggatatccgtgtccctgaccatctgattgtcggtggcaggcaaatctattcgttcgcagaacacggtctgctttga

SEQ ID NO: 127048 - DNA, 459 bp, Enterobacter cloacae; identical to SEQ ID NO: 21301

SEQ ID NO: 127049 - DNA, 240 bp, Enterobacter cloacae; identical to SEQ ID NO: 21300

SEQ ID NO: 127050 - DNA, 468 bp, Enterobacter cloacae; identical to SEQ ID NO: 78936

SEQ ID NO: 127051 - DNA, 444 bp, Enterobacter cloacae
atgaaacgtaaaacactgcctctgctggcgctggttgccaccactctgtttctcatcgcatgcgatgacagaagtgatgacctgaaggccatcagtaaatttaaggacctcaccccaccgcgtttcagtgatgtggtcagccaccaggatgatgtcagcgaagaatggtcacaggttgactacttatccggtcccaccttgcaggttttacgtacccgccagtcgcccgatggctgcgaggatggcagttactactacctcgtggatatgcaggaaaaaaccgtccagccactgatgaatgcgctgtgtattgccgataacatcaaactggaataccaggaggtgacggacccgtataccaaagaaaaatactttgagtacgcccatgacggcaaactgatggggcagctactgataccctcgaaccctgacaatcaggaataa

SEQ ID NO: 127052 - DNA, 237 bp, Enterobacter cloacae
atgcccgttattgccattatcgccattgttgtcatcgtcatcattctgaacaaaaccggggtgtccgacagtctcgcggccctgacccttgccactgttgccgcactgctgacgggaggtggcgcagccggtgctgccagtgtagcgctaacaccgttcgtcggcgtgccggtgggtattttcgtgggcatttatgtctttgccaaagtggttcgtctgatttcaggaaaaaaataa

SEQ ID NO: 127053 - DNA, 702 bp, Enterobacter cloacae
atgacacaggcagaacgccgccatgaccggctggctgtcaggctgtcactgataatcagccgtctggtggcaggggaaacgctgagtgtgcgtaagcttgccgctgagtttggtgtgtcggtgcgcacgctgcggcgtgattttcgtgagcggctgatgtatctggacctggagtatcagtccggatattgccgcttacgcactgcgggcagtgagacgcagatggtgcccgacgtgcttatctttgcccaccgcagcgggatggccggtcttttccctggctttgaccgtcgtctggtaaacgcactgctgatgtgcgatgagtctccctgcgtaatcgcacccgccagtccggctccttcgccatcaggcgcattgtctttctggcgactgattcaggccattaccgggcgcaggcgggtgactctgattgccgaggggcagcgctgtgagcggctggctccctgccggttacttatccaccagcaggcctggtatctggtggcagagcacgacggacatatcgccgtattctccctggatgaaatccatctggttcagcccctgcaggagactttccggcgtaacgacagtctgtgtcgtcttgttgaagacccgggctttattcagtccttaccccattttcgctttatccagcagtcactgcttacgtttgttccggccaacagctcaccagaatag

SEQ ID NO: 127054 - DNA, 822 bp, Enterobacter cloacae
atgacccgtctggcttcgcgctttggcgcagcaaaccttatccgtcgcgaccgtccgttaacccgtgaagagctgtttcgcgtagtgcccagtgtattcagtgaggacaaacacgagtcccgtagtgagcgttatacctatatacccaccatctccctgctcgacagcctgcagcgagaaggcttccagccattctttgcctgtcagacccgagtgcgtgacccgggtcgtcgtgaacatacaaagcatatgctgcgtctgcggcgggaagggcagatcaccggtaaacaggtgccggaaattattctactcaactctcacgatggaaccagttcgtatcagatgttgccgggactatttcgtgcggtttgtcagaacgggctcgtctgcggtgagtcgtttggcgaggtgcgggtgccacacaagggggacgtggtgagtcaggtgattgaaggcgcgtatgaggtgctggggatttttgaccgggtggaggagaaacgggatgccatgcagtcgttgctgttgccacccccggcacagcaggcactggcaaaagccgccctcacataccgctttggtgaagaccaccagccggtgactgaatcgcagatcctctcccctcgccgctggcaggatgagagcaatgacctgtggaccacgtaccagcgtattcaggagaacctgattaagggcgggctcagtggccgtaatgccaaaggaggacggtcacatacccgtgccgttcgcggtatcgacggggacgtgaaacttaaccgggcactgtgggtgatggcggaagccctgctcacgcaactgcagtga

SEQ ID NO: 127055 - DNA, 864 bp, Enterobacter cloacae
atgaataattctgaaggtttgaagtcgtttcagcaatcgcttgctgatctgccgcaatgggtatcagagcggcttctgcagcaaattaaccagttaactaactacgagccagtgatcggcattatgggtaaaaccggtgttgggaagagcagtctgtgcaatgccctgtttgccggagatatatcaccggtcagcgatgtggcggcctgtacacgtgagccactgcgctttcgcctgcaagtcggcgaccgctatataacgctgatggatctgcccggcgtgggcgaaagtggcgctcgcgataccgagtatgctgcgctgtaccgcgaacagcttcctcgcctcgacctggtcctgtggctgattaaggccgatgaccgggcgctgacggtggatgaacatttttatcatcaggtgattggagaggtataccggcataaggtgctgtttgttatcagccagtcggataaggccgaacctaccagcggtgggggacagttgtccacggcgcagaagcagaatatcagccgcaaaatctgcctgctgcatgagctgttccagcccgtccatccggtgtgtgctgtgtcggtccgtctacaatgggggcttaaggtgatggccgagcggatgattaagtgcctgccacgtgaggccaccagcccggtggtgtcgcaactccatccttcctttcgcacgacggtagtccgggaacaggctcgtagcgattttggtgaaaccgtcggggccgtactcgatagcatcagtgcctttcccctgatacccgccccggtgcgggccgtcattcaggccgtgcgcaccacggtggtgtcagtggcccgcgccgtctgggatttcttcttctga

SEQ ID NO: 127056 - DNA, 273 bp, Enterobacter cloacae; identical to SEQ ID NO: 78938

SEQ ID NO: 127057 - DNA, 285 bp, Enterobacter cloacae; identical to SEQ ID NO: 78939

SEQ ID NO: 127058 - DNA, 786 bp, Enterobacter cloacae
atgacaaaaaacacctcacgctacccacagcgcgtgcgtaacgaactacgttttcgcgaattaaccgtgctgcgcgttgagcgtatcggccaggcgttccagcggatcgtgctggggggcgaggcgctggatggctttgtttcacaaggttttgacgaccacaccaaactgtttttcccgcaggcgggcagcgtatttacgccgccggaagtgaccgacgaaggcattaactggggcgagggcgtgcgcccggcgacccgcgactacacgccgctgtacgatgccgaacgccacgagctggcttacgatttttatatccacgatggcggtattgccagccgctgggcgctggaagccaacatcggcgataagctggtgatcggcgggccgcgcggctcgctggtggtgccggaagattacgcctggcagctttatgtctgtgacgagtcgggcatgccggcgctgcgccgtcgcctgctgggattacgtcagctgccggtgacgccgcaggtgacggccatcgtcaccgtcgcggatgcttcgtataaagattatctggcggatctcgacggctttaatatcgaatgggtggtaggccacaacccggcgttcgtcgccgagcggctggctcaggtcaaggtgccgtcagaagattattttatctggctgaccggagaaggcggcgtggtgaaatcgctgctggcgcgctttgaggagccgagtatcgatcagcaactggtgcgttcgcaggcgtactggcatagcaaatattcggcagtgtggtaa

SEQ ID NO: 127059 - DNA, 1650 bp, Enterobacter cloacae; identical to SEQ ID NO: 78941

SEQ ID NO: 127060 - DNA, 1419 bp, Enterobacter cloacae; identical to SEQ ID NO: 78942

SEQ ID NO: 127061 - DNA, 633 bp, Enterobacter cloacae; identical to SEQ ID NO: 78943

SEQ ID NO: 127062 - DNA, 1071 bp, Enterobacter cloacae; identical to SEQ ID NO: 78944

SEQ ID NO: 127063 - DNA, 1098 bp, Enterobacter cloacae
atgctaaaagttattcaatctccagccaaatatctccagggacctgatgccgccatgctgtttggcgaatacgctaaaaacctggccgacagcttttttgttatcgccgatgacttcgtgatgaagttggcgggcgacaaagtattgaacggcctgcatagccacaatattagctgccatgcggaacggtttaacggcgagtgcagccatgcggaaatcaaccgcctgatcgccattcttaagcagcacggctgccgcggcgtggtgggtatcggcggcgggaaaaccctcgataccgcgaaggcgatcggctattatcagaagctgccggtggtggtgatcccgacaattgcctcaaccgatgcgccgaccagcgcgctgtcggttatctacaccgaggcgggcgagtttgaagagtatctgatctacccgaaaaacccggatatggtggtgatggacacggcgattatcgccaaagcgccggtacgcttgctggtggccgggatgggcgatgcgctctccacctggtttgaagccaaggcctgcttcgatgcgcgagccaccagcatggcgggcgggcagtccacggcggcggccttgagcctggcgcgcctgtgctatgatacgctgctggctgaaggcgaaaaagcacgcctggcggctcaggctggagtggtgaccgatgcgctggagcgtattgtcgaagccaacacctatctgagcggtatcggttttgagagcagcggcctggccggcgcgcacgcgattcacaacggtttcaccatccttgaagagtgccaccatctgtatcacggtgagaaagtggccttcggtaccctggcgcagctggtgctacagaacagcccgatggacgagattgaaacggtgctgggcttctgccagcgcgtcggcctgccggtgacgctcgcgcagatgggcgtcaaagaggggatcgacgagaaaatcgccgcggtggcgaaagccacctgcgcggaaggggaaaccatccataatatgccgtttgcggtgaccccggagagcgtccatgccgctatcctcaccgccgatctgttaggccagcagtggctggcgcgttaa

SEQ ID NO: 127064 - DNA, 1926 bp, Enterobacter cloacae
atgactgttcagactcaggaaaccgggaaggtggtctcttccgtcatcgcccagtcatggcaccgctgcagcaagtttatgcagcgcgaaacctggcaaacgccgcaccaggcccagggcctgaccttcgactccatctgtcggcgtaaaaccgcgctgctgaccatcggccaggcggctctggaagacgcctgggagtttatggacggccgcccctgcgcgctgtttattcttgatgagtctgcctgcatcctgagccgttgcggcgagccgcaaaccctggcccagctggctgccctgggatttcgcgacggcagctattgtgcggagagcattatcggcacctgcgcgctgtcgctggccgcgatgcagggccagccgatcaacaccgccggcgatcggcattttaagcaggcgctacagccatggagtttttgctcgacgccggtgtttgataaccacgggcggctgttcggctctatctcgctttgctgtctggtcgagcaccagtccagcgccgacctctccctgacgctggccatcgcccgcgaggtgggtaactccctgcttaccgacagcctgctggcggaatccaaccgtcacctcaatcagatgtacggcctgctggagagcatggacgatggggtgatggcgtggaacgaacagggcgtgctgcagtttctcaatgttcaggcggcgagactgctgcatcttgatgctcaggccagccaggggaaaaatatcgccgatctggtgaccctcccggcgctgctgcgccgcgccatcaaacacgcccgtggcctgaatcacgtcgaagtcacctttgaaagtcagcatcagtttgtcgatgcggtgatcaccttaaaaccgattgtcgaggcgcaaggcaacagttttattctgctgctgcacccggtggagcagatgcggcagctgatgaccagccagctcggtaaagtgagccacacctttgagcagatgtctgccgacgatccggaaacccgacgcctgatccactttggccgccaggcggcgcgcggtggcttcccggtgctgctgtgcggcgaagagggggttgggaaagagctgctgagccaggctatccacaatgaaagcgaacgggcgggcggcccctacatcgccgtcaactgccagctatatgccgacagcgtgctgggccaggactttatgggcagcgcccctaccgacgatgaaaatggtcgcctgagccgccttgagctcgccaacggcggcaccctgtttctggaaaagatcgagtatctggcgccggagctgcagtcggccctgctgcaggtgattaagcagggcgtgctcacccgcctcgacgcccggcgcctgatcccggtggatgtgaaggtgattgccaccaccaccgtcgatctggccaatctggtggaacagaaccgctttagccgccagctgtactatgcgctgcactcctttgagatcgtcatcccgccgctgcgcgcccgacgcaacagtattccgtcgctggtgcataaccggttgaagagcctggagaagcgtttctcttcgcgactgaaagtggacgatgacgcgctggcgcagctggtggcctactcatggccggggaatgattttgagctcaacagcgtcattgagaatatcgccatcagcagcgacaacggccacattcgcctgagtaatctgccggaatatctcttttccgagcggccgggcggggatagcgcgtcatcgctgctgccggccagcctgacctttagcgccatcgaaaaggaagctattattcacgccgcccgggtgaccagcgggcgggtgcaggagatgtcgcagctgctcaatatcggccgcaccaccctgtggcgcaaaatgaagcagtacgatattgacgccagccaattcaagcgcaagcatcaggcctag

SEQ ID NO: 127065 - DNA, 531 bp, Enterobacter cloacae; identical to SEQ ID NO: 78945

SEQ ID NO: 127066 - DNA, 354 bp, Enterobacter cloacae; identical to SEQ ID NO: 78946

SEQ ID NO: 127067 - DNA, 1164 bp, Enterobacter cloacae
atgagctatcgtatgtttgattatctggtgccaaacgttaacttttttggccccaacgccatttccgtagtcggcgaacgctgccagctgctgggggggaaaaaagccctgctggtcaccgacaaaggcctgcgggcaattaaagatggcgcggtggacaaaaccctgcattatctgcgggaggccgggatcgaggtggcgatctttgacggcgtcgagccgaacccgaaagacaccaacgtgcgcgacggcctcgccgtgtttcgccgcgaacagtgcgacatcatcgtcaccgtgggcggcggcagcccgcacgattgcggcaaaggcatcggcatcgccgccacccatgagggcgatctgtaccagtatgccggaatcgagaccctgaccaacccgctgccgcctatcgtcgcggtcaataccaccgccggcaccgccagcgaggtcacccgccactgcgtcctgaccaacaccgaaaccaaagtgaagtttgtgatcgtcagctggcgcaacctgccgtcggtctctatcaacgatccgctgctgatgatcggtaaaccggccgccctgaccgcggcgaccgggatggatgccctgacccacgccgtagaggcctatatctccaaagacgctaacccggtgacggacgccgccgccatgcaggcgatccgcctcatcgcccgcaacctgcgccaggccgtggccctcggcagcaatctgcaggcgcgggaaaacatggcctatgcctctctgctggccgggatggctttcaataacgccaacctcggctacgtgcacgccatggcgcaccagctgggcggcctgtacgacatgccgcacggcgtggccaacgctgtcctgctgccgcatgtggcccgctacaacctgatcgccaacccggagaaattcgccgagattgctgaactgatgggcgaaaatatcaccggactgtccactctcgacgcggcggaaaaagccatcgccgctatcacgcgtctgtcgatggatatcggtattccgcagcatctgcgcgatctgggagtaaaagaggccgacttcccctacatggctgagatggctctgaaagacggcaatgcgttctcgaacccgcgtaaaggcaacgagcaggagattgccgcgattttccgccaggcattctga

SEQ ID NO: 127068 - DNA, 429 bp, Enterobacter cloacae; identical to SEQ ID NO: 78947

SEQ ID NO: 127069 - DNA, 1668 bp, Enterobacter cloacae
atgaaaagatcaaaacgatttgcagtactggcccagcgccccgtcaatcaggacgggctgattggcgagtggcctgaagaggggctgatcgccatggacagcccctttgacccggtctcttcagtaaaagtggacaacggtctgatcgtcgaactggacggcaaacgccgggaccagtttgacatgatcgaccgatttatcgccgattacgcgatcaacgttgagcgcacagagcaggcaatgcgcctggaggcggtggaaatagcccgcatgctggtggatattcacgtcagccgggaggagatcattgccatcactaccgccatcacgccggccaaagcggtcgaggtgatggcgcagatgaacgtggtggagatgatgatggcgctgcagaagatgcgtgcccgccggaccccctccaaccagtgccacgtcaccaatctcaaagataatccggtgcagattgccgctgacgccgccgaggccgggatccgcggcttctcagaacaggagaccacggtcggtatcgcgcgctatgcgccgtttaacgccctggcgctgttggtcggttcgcagtgcggccgtcccggcgtgttgacgcagtgctcggtggaagaggccaccgagctggagctgggcatgcgtggcttaaccagctacgccgagacggtgtcggtctacggcactgaagcggtatttaccgacggcgatgatactccgtggtcaaaggcgttcctcgcctcggcctacgcctcccgcgggttgaaaatgcgctacacctccggcaccggatccgaagcgctgatgggctattcggagagcaagtcgatgctctacctcgaatcgcgctgcatcttcattaccaaaggcgccggggttcaggggctgcaaaacggcgcggtgagctgtatcggcatgaccggcgctgtgccgtcgggcattcgggcggtgctggcggaaaacctgatcgcctctatgctcgacctcgaagtggcgtccgctaacgaccagactttctcccactcggatattcgccgcaccgcgcgcaccctgatgcagatgctgccgggcaccgactttattttctccggctacagcgcggtgccgaactacgacaacatgttcgccggctcgaacttcgatgcggaagattttgatgattacaacatcctgcagcgtgacctgatggttgacggcggcctgcgtccggtgaccgaggcggaaaccattgccattcgccagaaagcggcgcgggcgatccaggcggttttccgcgagctggggctgccgccaatcgccgacgaggaggtggaggccgccacctacgcgcacggtagcaacgagatgccgccgcgtaacgtggtggaggatctgagtgcggtggaagagatgatgaagcgcaacatcaccggcctcgatattgtcggcgcgctgagccgcagcggctttgaggatatcgccagcaatattctcaatatgctgcgccagcgggtcaccggcgattacctgcagacctcggccattctcgatcggcagttcgaggtggtgagtgcggtcaacgacatcaatgactatcaggggccgggcaccggctatcgcatctctgccgaacgctgggcggagatcaaaaatattccgggcgtggttcagcccgacaccattgaataa

SEQ ID NO: 127070 - DNA, 585 bp, Enterobacter cloacae; identical to SEQ ID NO: 78948

SEQ ID NO: 127071 - DNA, 426 bp, Enterobacter cloacae; identical to SEQ ID NO: 78949

SEQ ID NO: 127072 - DNA, 1824 bp, Enterobacter cloacae; identical to SEQ ID NO: 78950

SEQ ID NO: 127073 - DNA, 804 bp, Enterobacter cloacae; identical to SEQ ID NO: 78951

SEQ ID NO: 127074 - DNA, 339 bp, Enterobacter cloacae; identical to SEQ ID NO: 78952

SEQ ID NO: 127075 - DNA, 414 bp, Enterobacter cloacae; identical to SEQ ID NO: 78953

SEQ ID NO: 127076 - DNA, 558 bp, Enterobacter cloacae
gtggatgccaccatcattgaggcacccagctctaccaagaacaaagagcagcaacgcgatccggagatgcatcagaccaagaaaggcaatcagtggcactttggcatgaaggtccacattggtgtcgatgccaagagtggcctgacccacagcctagtcaccaccgcggccaacgagcatgacctcaatcagctgggtaatctgcttcatggagaggagcaatttgtctcagccgatgccggctaccaaggagcgccacagcgcgaggagctggccgaggtggatgtggactggctgatcgccgagcgtcccggcaaggtaaaaaccttgaagcagcatccgcgcaagaacaaaacggccatcaacatcgaatacatgaaagccagcatccgtgccagggtggagcacccgtttcgcatcatcaagcggcagttcggcttcgtgaaagccagatacaaggggctgctgaaaaacgataaccaactggcgatgttattcaccctggccaacctgtttcgggtggaccaaatgatacgtcagtgggagagatctcagtaa

SEQ ID NO: 127077 - DNA, 345 bp, Enterobacter cloacae; identical to SEQ ID NO: 78955

SEQ ID NO: 127078 - DNA, 297 bp, Enterobacter cloacae; identical to SEQ ID NO: 78958

SEQ ID NO: 127079 - DNA, 621 bp, Enterobacter cloacae; identical to SEQ ID NO: 78959

SEQ ID NO: 127080 - DNA, 468 bp, Enterobacter cloacae
atgaaacgtaaggtcttttacagctttcactttgataacgatgttatgcgggtacagcagattcgcaacatgggggtactggagggtgacgaaccagccagccctaatacttgggaacaaattaagcgaaccgagcagggagtgaagaattggattaaccagagtctaaatggcaaatcctgcctagtagtactgatcgggagtcaaacagcgaatcgtccatggatcaagtacgagatccaaagagcctggcaagagggtaaggccgtggtaggcattcatatccatcgactgaaatgtcctcgtaacggctacgggacaaagggggcgaatcctttcgaccaattcaccttcaagcgaggcgaccaagtcattaagccgctcgtatatgaacctagctttaacgacgcttataacgatatcaagaacaacttggcgacttggatagaaaacgccatcaaacaataa

SEQ ID NO: 127081 - DNA, 1308 bp, Enterobacter cloacae
atgaagcgcctgataccgccagacgactgtccggaggaaattgcccgccgtctcgacgtcatacagcagcaccgggcgctcaacgcgatcctcggggttaaccctgacgccatgtctcaggcggaacagcatcagcagcagcgacggcgtggagagccgatcggccccctgcacggcgtgccgctgatcgtcaaagataatattgcctgcgcgccgatgccgatcacccttggctgccgtgcgctggcctcacttaacgcgacagcggatgcacgggtcgtgcagcgattgcgcagagcgggggcgattattctcgccagggccaatatgtccgagttcgcgttcgatgtgcgctcgcgaagctcgctggggggcgatgtggcgaatccactttgcccgacactcaccgccggaggttccagcggaggatgcgccgcggcggtggcggctggaatggcggatggcgcattgggtaccgataccggcggctctatccgcattccctgtagctataccgggctggtggggctacgacctgcctttcgccgttcacagctggacggcgtggcgccgctctcacccagcaaagataccgttgggccaatggtacatagcgttgaggatgccgccttgctgcatgcggtgatccatggcctgccgccggttgcgcttcctgtgcgttcgctgaaaggcgttcgctttggcgtggtgaccgcgttacagggagaggatgaggtacagctggaggtctggcagtcggcgctgcacatgttgcgccgtgccggagcgacgctggtggaggtttcactccctttccttgaagaggtgaggcaggccacctgcctcagtctgtatgaatttcgcgtggcgattgacgactggcttagcaaacagccaggcgctccctccggactgacaagcattgtggactccggcgctttcctgccagagtttgcgccgtttctacgtcagatgctggcgagtaacacgctgaaaaccccgctctggctggcggggcgtcgctttcagcgcctgttgcggcagaacctttgccaggtggcggaggtgcagcgcatcgacggatttgtgtatcccaccgtacaacgattaccagaaagtatggcgaagatgccgccaggctgcgcgccggaactggccgccatcagcggcctgcctgccattacgttgccctgtggcgtaagccgtatcgggctgccggtggggatggagatgttatcggtgcaggaggatgagacgatgctgatgacgctggcgctggcgtgtgagggggcattgcacagtaaatga

SEQ ID NO: 127082 - DNA, 1401 bp, Enterobacter cloacae
atgaaattattcacagcaatcgcctgcggcctgctgttatgccaggccgcctgggccgagccggtcactatccggattgtggaaaaagatctgctgaccaccaaccgcgaagatgtcgcgcatattcagcgaatcgagcaggcgctggcacgtcagggacacgatatccacattgaaatcgtcaacctgtcgtcttccggctactccgacgtgctgaacgtgatgctactctccggcaccatccctgacctgatctacttcaacggcagcgaccagaagatggtcgaacagggcattcttgaagactggcgtccgtggattgcgcaaacccgctatctgaaagaggcgctgtggccgcacaaccggcttcgcctgcaaaaccatccgaccctgctgtatgtctttccgctgcgcgcgcgccagccggtgatccgtgaggactggttacagaagagcgggttcagcgcatcacccaaaacgctggcggagtacgtcacgctgttcaatgcaatccacgccggtgactacaacggcgacggtaagacggatagctgggggatcacctccgagaaagacctgcgcgatctcgacggttttatgaacccggcgtttggcattcacgccacctggctcaaggacgatcagggcaagctgatcaacgcccagataagcccgcaggagcggagcaagctggagttctaccattcgctgtatcagaaaggactgctctcctcccagtacatcaccaccaactgggagctaaaagaggatgagttttataccggcaaggttggcgtggtgtctgtctcatcgccgggcaacgtcggcgtgtaccaggaaaagatgcgccagatccatcctgacgccaccctcaccctgctcgacccacccgaaggcccggcaggtaaagggctggcggcgacagatgtttccatggaaacgcgcggctttgccatgtcctcgctctcgaaacataaaaaggaagtgatgatcctgctcgattttctggcaagcccggaagggcaaatgatggagcagatgggcttcgagaacacgcactacgttcggaagggcaacacgataaacgtgacgccacaaattaatgcctggtatccgcggtttatccaggccgccaactggaagccgccggtggagtggcggacgcccgcgatgctgcgctatatcgacaattcacaacgttattttacggcggataacgcctttatcttcccggcgtcatttgccgccgccatcgactcaaccagcagtatttacaaccagtgggcgtaccagtttgtctctggcaaagcgtcatttgacaagtgggatcagtatgtcagcgcctggaaagccgcaggtggaaacgccatgaccgaatatgcagaggaaaaattaaaatga

SEQ ID NO: 127083 - DNA, 810 bp, Enterobacter cloacae
atggtcgttgttatgtcgccggtacaactggcggcggtgctttcagataagagcgtcaccgaggcggaaacactgagtaaccgattgttgggtggacttggtgttttactcggagcggtagaaatggccggtgccacagcactatgtatcgcgccagaaccaacaggactaacgaaagcgggatgtgtggttgttggtgcacatagtcttgacgctgttcaaagcgcagccagacaggtgataaccggtcgtgatacacgctcagccacctggcagattgctgtgagtgcagcaagagaacttggtgctgatgaagacaccgccctcaatatcggcatgacagttgatatagccgttccgcttggatttgcagctgctattggtgccgcccgtgtagctgcaattaaagctggtcgcatcaaattgatccagcatgaatcagttaccggtcttaaacccggcgggcatacactcgcaaatcatgtcggaaaaactgacagtgagttacttgcccggttcgagaaaaataaacgacttgttatgtcttcaacatttaaagatttaaatgttgctgaaaatgttatttcgagggcagtctatcttaacagggcaaatatcaaatccttactcggaggtggtaaaaacggtggacgccttacaatcaattatcctgccggtcaggaggttgggtatggattcacgcgaggcagcacacagcgcattagcatgcgtggagtgaggattgttatcgaactgcaagagtataacggaaaaccttactatatccttacagcattcccgaccccatag

SEQ ID NO: 127084 - DNA, 2334 bp, Enterobacter cloacae
atgaaaatgaacgtaacagagacggtaaaacaggcgtgcggccactggccgcgcattctcccggcgctgggtgtgaaggtcattaaaaaccgccatcaggcctgtccggtgtgcggcggctctgaccgtttccgctttgacgataaagaggggcgagggacgtggctctgtaatcagtgcggcgcgggggatggcctgaaactggtcgaaaaggtgttcggtgtaaaaccatcagaggcagcccaaaaggtgaacgccgtgaccggcaacctgccaccggttgccccggaagtgattccgacagcagaggctgaaaccgaagctgaccgtaaagcggcggtctcgctggccgtcagactgatggagaaaacccgcacggccagtggcaacgcctatctgacccgcaagggcttccccgaccgggaatgtccggtactgtcggtcatgcataaaaccggcggcgtgacgttccgcgccggtgatgtggttgtcccgctgtatgacgataccggcgcactgattaaccttcagcttatcagttctgacggtctcaaacgcaccctgaaaggcggggcggtaaaaggagcgtgccataccatcgaagggaaaaaacaggccggaaaacgcctgtggataacggagggctatgcgaccgcgcttaccgtgcatcacctgaccggcgaaaccgtcatggtggcgctgtcgtccgtgaacctcctttctctggcgagccttgtccgccagaaacacccggcctgtcagattgtcctcgccgccgaccgtgaccttaacggtgacggccagaacaaagccgctgcggccgcaggagcctgtgagggcgttgttgccctgccgccggtgttcggtgactggaatgatgcgtttatgcagcacggcgaagaggcctcgcggaaagccatttatgacgccatccggccaccggcgcaaagcccgttcgataccatgagcgaggcggagtttaccgccatgagcgccagcgacaaggctctgcgggtgcatgagcattacggcgaagcgctggcggtggatgcgaacggacagctcctgtcccgctatgaaaacggcatctggaaaaatatcccggccgccactttttcacggaatgtggctgacttattccagcgcctgcgcgccccgttctcatccgggaaaattgcctcggtggtggagaccctgaaactgattattccgcagcaggccgcaccggcacggcgtctgattggctttcgcaacggggtactcgatacccaaagcggcatattcagtccacatcttaaatcgcactggctgcgcacgctttgcgacgtggattttaccccgccggtggaaggcgaaatgctggagactcacgcgccgaatttctggcgctggctcgaccgggcggccggtaaaaatccacaaaagcgcgacgtgatactcgctgcgctttttatggtgctggcgaaccgctatgactggcagctctttctcgaagtcaccggtcccggtgggagcggcaaaagtattctggccgaaattgcgaccctgctcgccggagaggataacgccacatcggccgacatcgacacgctggaagacccgcgcaagcgtgcctccctgattggcttctcgcttatccgtctgcctgaccaggaaaaatggagcggtgacggtgcaggacttaaagccatcaccggcggcgatgcggtctcggttgacccgaaataccagaacccgtattcaacgcatattccggcggtgattctggccgtgaacaataacccgatgcgcttcaccgaccgcagcggcggtgtgtcacgtcgccgggtgattattcatttcccggagcagattgccccggaggaacgcgacccgcagctcagggataaaattgcgcgcgagctggccgtcatcgtgcgccagcttatgcagaaattcagcgacccgatgaccgcgcgcgcactgctccagtcgcagcagaactccgacgaggcgctcagcatcaagcgtgatgctgacccgacgtttgatttttgtggctatctggaaatgctgccgcagaccagtggaatgtttatgggtaatgccagcattgtcccgcgtaattaccgtaagtatctctatcacgcgtatcttgcctatatggaggctaacggacacaggaacgtgctcagcctgaaaatgttcgggctggggctgcccatgatgctgaaagaatacggcctgaattatgagaagcggcacacaaagcaggggatacagaccaacctgtcgctgaaagtagaaagctacggcgactggctgccgaaatgcgatgaacccgcagcgacataa

SEQ ID NO: 127085 - DNA, 321 bp, Enterobacter cloacae
atgaaaaagccattaccgcccgtattacgcgccgcgctgtatcgtcgcgccgtggcatgtgcatggctgacagtatgcgaacgccagcgccgctatccgcacctcaccctcgacgcgctggaaagcgccattgccgtcgagctggagggcttttacctgcgccagcacggcgaggaaaaaggccgtctgattgcctgtgcactgctggaagatttaatggaagccggaccgctcaaggccgcgccgtcgctgtccttcctcgggctggccgtgatggatgaactctgcgcccgtcacatgcaatcgcctgttatgcactga

SEQ ID NO: 127086 - DNA, 228 bp, Enterobacter cloacae
atgagacacaccaccattacctcccgtgacctcgaatgccttgagcacatgcgcaacgtcggccagctcgtcaacgagctgatgcaggtgcaggactgcgcgaccgttcgtcgtgacccggcgcagcagtcacagctcacctccgtgatttacctcatgaccgcccagctcgacggcgtggtagagcgctgcaatcagcgctggctgaccggggagggcaacgtatga

SEQ ID NO: 127087 - DNA, 195 bp, Enterobacter cloacae
atggctactaccctcatcccatcgtacccgcagtttgtctttgtgtttgccgccgttcgtcgtgcagaccgtaaaccccgtatctgtatgctccgcaccgttgccggtgatgaacacgccgcacgcctgtcgctcgttcgcgactacgttctgtcgttcgctggccgcctgccggttgcggaggtgcgtgcatga

SEQ ID NO: 127088 - DNA, 267 bp, Enterobacter cloacae
atgcaaaccgctttttcttccccgtcttctgcccctgccgcgccactgatgccggtttctgatgccgttcaggagcgctttatccgcctgcccgaagtgatgcatctgtgtggcctgtcccggtcgaccatttatgacctcatcagccgggaagccttcccgaaacaaatctccctcggtggaaaaaacgtggcgtgggcgcagtctgaaatcaccgcatggatggcagatcgcattgccgaacgcaaccggggctatgacgcatga

SEQ ID NO: 127089 - DNA, 2124 bp, Enterobacter cloacae; identical to SEQ ID NO: 11329

SEQ ID NO: 127090 - DNA, 1449 bp, Enterobacter cloacae
atgaaccttatacggcgcgtttcagcgatatataaagaacaggagttacctgagtatcgtggcaatcccttaattgaagcacttcctgaagcgcttacggaagatgaagtacttctggaaatgagttatttccccgaaattgacgaaaaaatccgctggactgccccggcgaatgttagagagcagtatgtcgaacgtataaagaaattccgttgccctcaaaccaatcttatccaggcttataagatgatcttacgggcacttagggaaagctatgcagctcgtaatcctttaaaaagcggaacaattcaatatcttcattactatggaaatgagcgtcctgatattgagccagaaagtggatattttaaatcccaggctgaaactattacgatagttggaatgagtggttctggaaaaactaccatgattgagcaagtcatggatcatttccctcagattatagaacacagcagctataaaggagtttttcccggcttcagtaagcaaattgtatgggtaaagattaattgtccatacaattcaagtgtgagagacctttgtgaagagattttacaaaaattagatgatgcaattggtattgaacgaactacacctgagattagaaatggtgctctggctcgccagattgcacaaagaattaaatcatcatttttgggtatccttgttattgatgaaatgcagaggcttaaattttcaagaaccgggggtgagagtaagttgattgattttttacatgaaattgtagattccatgggggtatctatggttttttgtggaaatcatccttttgacgagacgctgacaaagaaaatgagaattgccaggcgggcagagtctggtggttacatgaaaattaagaatgttagatacgattcacaagactggcaatcgtttattcattatttatggccattacaatggacaaatgttgaaactccattaaatgatgagttaaacgaaaaattattcattttatctaaaggcaatattggattggctcagatgatttatcggggggcacaattaaaggttatcggtagcggcaatgaaatcatcactggcgcagtcttgtcggcctctgtaccggtactcgtgagtcatacggaggaatataaggatactccactcccgggggccgcgactgaagatgaggaagctaaatggctctctgcatctaatgagggtgatgcttcggctaaaatcatggcagagaagtccctaaagtctttgatccctggggatatagacaggccacagcacaaggaattcgtaggaaaaatagacgaggttttgcgcaatttcgacgagaaaatactgtctcttgaccacgatcttgttatcaacaggacagctgaaaagaaaaatacctacgatgctcttcagcgttgcgggcttataaatatagatccacttaataaattgtaa

SEQ ID NO: 127091 - DNA, 1500 bp, Enterobacter cloacae
atgaagaaggccattgccgttgctatcatctcaacctttatggtcgtcctgtcgctgtatgcggttaacgccattatcgttgagcagcaaaagaaccggcagagggagatctcccacacgctcttaagctattccgaagagttaacgcaaaatatcgccagtacgcttaaaaatacctccgcgcagggatgcgatagcgccagtctgaacgtctaccgaaaattaaagatgcgcagtctctatttcgccgatgtggggtttattgaaaaggggaaaatcacctgcaccgcgttttggggcaagctggcaaatcccatcgcccttccctctgagctgcataaaacccagaacggattcagtctggcgcagttttcgcagaaagatttctttgtcggcaatgcgacaatttataaccaccttattatctttacctcccgttcagcctacgataaatttgcccccgttaccgccaattattcgcttcgttcttccactaaagatttcggccgcacctttttcaccgttacgccgccatcagaaaaccttagccgcttacagtctctgttatttacgctggctgtgacagagtgcagtacacgctgggatttgtgcgttaccgtcacacaccatgatgccggactggcttcgctctcccacgtagtgatggtgctcctgtgcctgtttttatactttatatggatatccctgacgctgttttctcttcgactttatgaagaccgacgttctctggagcgaacgctggtcaaggcggtgaaagcgaataccatcagcgttcattttcagcctgttattcgggttgctgataagaaaattgtcggggttgaagtgttatcaagatggcaggataacaatcacaaagaggtttctcctgagctgtttatcccgttaatcaaaaaaattggcctgtataacgtttattatcagaacatgataaagaaatccctggcggaaattgccgcgctggccgctgaacatcagttaatgatttcactgaacgttggccggacggaaattgaagacggcaaattcctggcggtattacgtcatgcatgctcagagaacgcgattcccttatcgttaatcaaagttgagttatccgaaaatggcgtttccacctcggccatccttgaagagttttgtgaggagcttaaatcggcaggcgtcaacatttcaatagacgactttggcgtgcaaaactcaaatcttgccaggctctcgaatctcaaatatgacgaaatcaaggtggataagtcgttagtggacggcatcagcgagcactataaacaggatatcctggtgatcttcagcgacgcgctcgctaaactgcacaaaaccctggtttttgaaggggtcgaaagcgaaacgcaatatcagttcatcgcgcagagataccccgatgccctcgtacaaggctggtacttttcaaagtcgctaacccggcacgacctcgccaggctgctggcagactcagcgcgatga

SEQ ID NO: 127092 - DNA, 183 bp, Enterobacter cloacae
atgagggagaggctaaaaaaaagccccgatgttgagatcggggcaaaacatcttgattacggaatgatgttctctggtcagtgtgagaacaggcatcactataagggggaatcgtgcaggtttaatggagaaatcatggagaaaacggcgatgacccgttactctgacgtttttacaccctga

SEQ ID NO: 127093 - DNA, 1188 bp, Enterobacter cloacae
atgactactgctattcaaccttccgggaaacagggtgcgctgctgattgcaggcatcctgatgattgccacgacgctgcgcgtcacctttaccggtgtcgcccccctgctcgataccatccgacaggactatggcttaagcacggcgcaaaccggcctgctcacgacgctgcctctgctggccttcgcctttatctctccccttgccgcaggcgtcgcccggcgtctgggcatggagcgcagcctttttatcgctctgctgctgatttgcatcgggattggcgtacgttcgctaccgtcggcctcgctgctgtttatcggtacggcgatcgtgggctgtgggattgcgctgggcaatgtcctgctacccggcttaatcaaacgtgattttccgggccaggtcgcaaaactgacgggggcttattcgctgacgatgggggccgctgctgccgcagggtcggcgctgatcgtccccctgtcgctggggagtgctggctggcacggggcgctgttgatgctgatgttcttcccgctggtggcgctgctgctgtggttaccgcaatggcgccacagaccggctgccaccctgaccggagcgggcgcgttgcacaatcgggctatctggcgctcggcgctcgcctggcaggtgacgctttttctgggcattaactcgctgatttactatgtcattatcggctggttacccgcgattttgcttagccacggctacagcgaaacgcaggctggctccatgcacgggcttctccagctggcaaccgcggttcccggtctcgccattccgctgatcctgcaccgtcttaacgatcagcgaggcattgccgggcttgtcgccctgatgtgcgccgtcagcgcggccgggttctggttcgcgccggggctggccgtcgtctggacgctggtgtttggctttggatccggagccaccatgatcctcggcctgacgtttatcgggctgcgcgccagctcggcccatcaggccgcggcgctctccggcatggcacagtcgattggctatcttctggcggcctgtggcccaccgctgatggggaaaattcacgataccgccggagactggcgcattccgctgctcgcctgcgcgctggccgcggtggtgatggcgttatgcggtatgcttgccgggcgtgaccgggagatcacaccccgctga

SEQ ID NO: 127094 - DNA, 1542 bp, Enterobacter cloacae
atgtcttatttacttgaaatgaaaagcatcaccaaagccttcggggcggtgaaagcagtcgacaacgtaagcctgcggctgaatcccggcgaagtgatgtcgctgtgcggcgaaaatggctcgggaaaatccacgctgatgaaagtgttgtgcgggatctatccgcacggcagctacgagggcgaaatcgtctttgccggcgaggtgctccaggccacgcacattcgagataccgaacgtaaaggcatcgctatcattcaccaggagctggcgctggtgaagcaccttaccgtgctggaaaatatctttctcggcgccgaactctcacgccacggcgtactggattacgacaccatgacgctgcgctgcgaaaaactgctggctcaggtgaacctggctatctcaccggatacgcgcgtgggcgacttaggtttaggccagcagcagctggtggagatcgccaaggcgctgaacaaacaagtgcgcctgctgatcctcgacgagccaaccgcttcactcaccgaacaggaaacggccgtactgctcaatatcatccgcgacctgcaaaaccacggcatcgcctgcatctatatttcgcacaagctcaatgaggtgaaagccatttccgacaccatctgcgtcatccgcgacgggcagcacatcggcacgcgtgaagcagaaggcatgagcgaagatgacatcatcaccatgatggtgggtcgcgaactcaccgcgctgtatcccaacgaaccgcacaccatcggcgaagagctcctgcgcgtggaaaacctgacagcgtggcatcccgttaaccgccatatcaagcgcgtggataacctctccttctcgctgcaccgcggcgaaattctcggcattgcgggtttagtgggtgcgggaagaaccgaggccgtgcagtgtctctttggcgtctggccggggcgctgggaaggcaaaatttatatcgacggtcagccggtaaaaatcgacaactgccagcaggctattgctaagggcattgccatggtgccagaagaccgcaaaaaagacggcatcgtgccggtaatggcggtgggaaaaaatatcacgctggcggcgctcagccagttttccggtgcgctgagcagcctggatgatgccgcagaacagcagtgtattctccagtcgcttgcccggcttaaggtgaaaacctcctcgccggagctggcgataggacgcctgagcggcggcaaccagcagaaagcgattctggcgcgctgcctgctgcttaatccgcgcattttaattctggacgaacccacccgcgggatcgatatcggcgcgaagtatgaaatctacaagctgatcaaccagcttgtgcagcaagggatagccgtcattgttatctcgtccgaattgcctgaagtgctggggctgagcgaccgcgtgctggtcatgcatgaagggaaactcaaagccaacctgaacaaccagaacctgacgcaagagcaggtgatggaagctgccttaaggagcgaacgccatgtcgaaaagcaacccgtctga

SEQ ID NO: 127095 - DNA, 273 bp, Enterobacter cloacae
atgccaaataaactcgtcggcgggtactgcaccgtcggcaatgatctcttccgcttccttcccgcctacgtcctggcgcatccattcccttgcagcttctggcgacagaaccagcggccgccgatcgtgtatatcaacgaggcctttatccgcagcagaggtcactatgagaaatccctcggcttcatcgccgcgctcaaacggcgtactgccgatcgccgccatgaatatcggctgcccgtcggcccgattgacctgctccccgttgattag

SEQ ID NO: 127096 - DNA, 582 bp, Enterobacter cloacae
gtggccgccggcgacacagtgcactggatcatcggcgacaccgagagcggatcgggggcaacgcgccagatccacatcctagtaaagcccacccgcgccgacctgatgacaaacctcgtcatcaacaccaacatgcgcacctatcacatggagctgcgctcgacagagcgcacctatatggcgtcggtctcatggcagtatccgcaagaccagctcattgcgctgcgccgtcagaacgccgaggcgcaggcggcccagccggtggcgagcggcgtcgatctcgcgaacgtcaacttccgctatgcgatcgagggcgaccgtgcgccgtggcggccgctgcgcgccttcgacgacggacgccaggtctttatcgagtttccgcgcggcatcggtcagggcgagatgccgccactcttcgtcgtcggccccgagggcaacacctctgagctcgtgaactatcgcgttcgcggccaccacatgatcgttgatcgtctgttcgcggctgccgaacttcgcttcggctccggccgcgagcagaagcgcgtcaggatcgtccgcacagacgggaggccgacctcgtga

SEQ ID NO: 127097 - DNA, 1221 bp, Enterobacter cloacae
gtgagcgagaacccgccccggattgaggaagtgccggacgacgatgcgcagcccctgaccggcgagccggtcgggcctgcgccgatgcggctgcgggccgaaccgccccgcgtcacccggttgtcgcggaaggttctcgccggcctcggtcttgtcgccagcgtcgggctcggaggtgcgctgatctacgcgcttcagacccgcgacgccggtcggccgaacgacgaactctattcgaccgagaaccgctcgaccgctgacggactggccggcctgccgcgagattacagtggcgtgccacagctcggtccccctcttcccggtgacctcggccggccgatccttagtacccaggatcgcggacagccggtgcccacacccgggacggccacgcccaatcccggcatcagcccggaagagcagcgccgccttcaggaaatcgagaccgcgcgcaccagccgtctcttctccggatcggaaagccggggcacacccgctgctgcgggagctgccccagcgctcgcgccggtgccggatttggcgagcattggcctcgctccgccgcccgccacgccctcggcgcaggaccggcagaacgcgtttctgaacgccgcggccgatcgcaggacggttgcgcccgatcgcgtcgctgcgccagtatcgccgaacgtccttcaggcgggagcagtgatatccgcggcgctgatcaccggcatccgatccgatctacccggccagatcaccgcgcaggtcaccgaaaacatctacgacaacccaaccggccgtatcttgcttgtgccgcaaggcactcgtgtggtcgggcagtacgacaacaacgtgcagttcggccagagccgagtcctgctcgtctggactcggctcgtcttcccgaacgggcgctcgatcgttctcgagcgccagcctggtgctgacgctgaagggttcgccgggctgcaggatggcgtcgattaccattggtgggatctggccaaggctgcgggattgtcgacactgctgagcgtcggcgccgaactcgcggtcgacaacgacgatcagctcgttcaggcgatccggaacggtgggcaggacaccatcaacgacgcagggcagcagattgtgaggcgtcagctcaacgtcgcgcccacgatcactattcggcccggatttcccgtgcgcgttctcgtgacgcgagacttggtactggagccatatggagggtga

SEQ ID NO: 127098 - DNA, 897 bp, Enterobacter cloacae
atgcccgacctgactcttgatctccgatacctgaagtacgccgttcaggtcgccgaggccggcagcttccgccgagcggcggagcgcctatcgatatcgcaatccaccgtcagccgacgtgtgcagctgtttgagcgccaacttggcttttctctcttcaagcgtacgcgagcgggggcagggctgactccagaaggtgagcgcttccttcaacaagcggtggtgggagcgcgctaccttcgtaacgccgcaacggagatccgctccgcgcggaaactcaagaccgggctcgtgaggtttggaatgcttgaagcgttcccggcgtgcccgatcatcaacattctctcggcattcagaaatagacatccgacgatcgaggtaaagcttgaggaaggcacttcagaagaaaacactttgggggtgaagcgtggattactggacgcagcaatcagcctgagtgcgagcaagagccctcagttccaagttcgacgtctctgcgaaccagatctgttcgtggcattgtccccgcttcacgagttggcagcacggccacagctgtcgtgggaggacgtttgtgacgaagtcttcctcgttcgctcggatggcgctgggcgtgagctcgctggcatactccggcgcatggtgggcgccggagacggagcggttcaactctcgatccaacaagtcagccgagaaaccctgctgacgatggtcgaacagggcttcggcttgaccatcaccagcgtgatctaccggccggatatcgcgttgatcccgctcccatcggcgcgggcgccgacggccgctataatttcttccagtgacaacgacaacccgactctgccgctgctgctgaagtgtttcgacaccccctctagagcggggaccacggattaa

SEQ ID NO: 127099 - DNA, 600 bp, Enterobacter cloacae
atgcatgcggcggtcatacattttcacacgcttgaagtctatgcgcgaagcatatattcttgcggtatggagcctgaggtcgccaagtaccatttaggtgcactcgcgttggccgttgcagacagcatcgccagtgtctcggcctcgttttcaccaagcggcccggggaccgccgtgatggtgttactcagcatggagcccggactgccgatcagcgttttggctacctcgatcgggctttctcatgccgggacggtgcgattgatcgataggctcgagcgcgaacagttggtggaacgacgaagacaaatcaccgacaggcgggcgcgcttcattcacctcaccaattcggggaagaagataacggacgccttgctcaaggcacgggagcaggtgatctccgaatgtatttcgcccctgtcgcccaatgacctcgacattctaggcatgctgtcggagcggctccttgtggcaaacggcttcgacaaagatggctcggtcagcctttgccatctgtgcggctacagcaggatcgcgccttcccgtggtaaagctaagccggggcgctcgccacgctggaacgtcgcatcagaaggctga

SEQ ID NO: 127100 - DNA, 960 bp, Enterobacter cloacae
atgggatcgtttgcgctcgaacttcttctatgcgtacttgccttcgggttcggatatgcggcgaaccaaggcggaacctgtttagtggtggccgctcatgagttacacagaagacagccgccgaaaatgttcgtcggatttctcgcagcgtcggcagcggcaggcctggttgcggtcccgatagtctggacgggaacactgggcgcaacactcgcaccctcgaccagcatcaatttcctcctgctcatcggcgccatcgccttcggcctcggcgcactcattaatgacacatgcctgctcggatcgctggcgcggcttggggatggggagatgcgacttctagctctacccttgggattaacgattggtatcttggctgccgaccatggcaggttcggctacgattcaacatggccaagcttaatctccaaaccgagcgcaacaggcctcgttactctcctagccttcctagttgtgctcgtgctggcactcgttttcgtttccacgaagagcgttctgcgaacaaagccgggttggtcgttcggcgcttcgatgattggactcggtatcactggcggacttctatatgcactctcgccggcctggaccttcgcagacgtgattcaacgcgcccttcctctcagaatgtccccggccggcgaggtcgcgctcactgcggtgatctcttcgatcgcaggcgccctaaccgcctcctttcgccaaggcaatctgcgtctccaactgccgacagccaatggcattctgcgatctgtcgtcggcggcacattgatgggtatcggcatcgcgctcatacccggcgggaatgatgggttgatcctcgcagcggttccgactctttcacctggtgggatagtcgcctaccttctgatgacgacgacaatcgtcttcggatttgcagcgcgtggtaagttattccggcgctgcctttcacggccatga

SEQ ID NO: 127101 - DNA, 387 bp, Enterobacter cloacae
atggacgcggccctggacgagataaccatgcccaccgaaatcgtagcagcgatcggcgaaggcgcgctcgcttatcgagagagcggcattctctcactggcagatggcagagtattctccgcgtgccggcagtatcgctatcgcttgagcgaggacagtgttgtcgtcgagttcgcagacggacctcatatcgggacgcagttcctcagcttgagtttctcgcggacggataccgggttggaagcgagtggcgtctatgcctgcggagacgacacctaccatgcaacctacaggattctggggccggcggcctttgaagtggtcatcatggtccaagggcctgcaaaggcatacgagctagtcagccgatattcccggtcgggataa

SEQ ID NO: 127102 - DNA, 489 bp, Enterobacter cloacae
atgagcattttcgaccgttatgaatttcttgtccccgagcacggtcggagggatcttggcctgcttagatgggctctcgtgatcgtatttctgtggttcggcgcgatgaagttcacagcgtacgaggcctatggtatcgccccgtttatcgaacacagcccgatcatgaattggctcggcatgttcgggacgcaggggcaaagctatttcatcggcgttatcgagttatcgaccggtctcgttctgatccttggtgcatttcgtccactcttctctgcgctaggcgcactaatgtcagcagcgacctatctgatcacgctgacctttttcatcaccactccaggtgtcgcggagcagactgccggcggctttcctgcgatttcggctgcaccagggcagtttctactgaaggacgcagttctgctagcggcgtccctcgtgctgctgcgtgcttcggtccgccacagaggggcgcttgtgctctcgtga

SEQ ID NO: 127103 - DNA, 255 bp, Enterobacter cloacae
ttgtgctctcgtgactgtggtcctctcgtgacggcgggcgtgcaaatcctgcagaacctccgcggggcatggatgctccgtcgcgatatcgagcccggaggcgctcagctgcatggcgacgcggtcttcgcccgtttcgccgcaatccccgacgtcgtggagcacggactgttcctcaatgggattgatacaatcgtgatcgcgcgcggtgacacgatggaagtgcgacgccgggggcaagctaggtctcgctga

SEQ ID NO: 127104 - DNA, 495 bp, Enterobacter cloacae
atgatcagcgacgacatcgttcgcgctagttcatcgcgggcgccggaagctggacccgccgcctcagcgctggcgttgctcgcgcacaagcccgggctctcgatccgtatgcttgcgatcggggtgggcctttcacatgctggaactgttcgcctggtggatagattggtaagcgagggattgatcgagcgtagggagcattcgacagacgggcgcgcgcgatccctctatcttactccaactggcaaggtcgcgagcgacgaggtcctggcctcgcgcgatcaagtgattgccgaagggctatcgatccttaatccagacgaactgaaaaccttatcggacatcgctgaacgcgttctccgaaatcgcttggaaaacctcgagcagtcataccgcatctgccgcttgtgctgctacgagggctgcacgaactgccccgtcgatgccgaattgcatgagcgaggtgtggaccgcgagaagaacgacgacgcgtag

SEQ ID NO: 127105 - DNA, 1023 bp, Enterobacter cloacae
atgaccgaaaccgtgactaatcaggccgcctggcagaaagcgccggggcagccactgaggatcggtgtcaccgctctgccgcatctggcggcgaacgagatattgatccgcaacgcggccatcgcgatcaacccactcgactggattctgcaggacgtcgcgcttttgccatggctcgactatcccgcgattctcggcagcgacgtctccggtgaggtcgcggcggtcggtggcgcggtcgagcggttcaaggtcggcgatcgagtcatcggacaggcggtcgggacaaccgtaaatcaacctgcgcagggtgcgttccagcaccacacgatcgtgctggaccacatggcggcgccgatccccaacaacattgccttcgctgatgcggcagtcctcccgcttggccttggcaccgccgcaagcgggctctacggacggacacagttggctctcgcgccaccgttacactcgccgaccgcgcgtccagaggtcgttctggtctggggtggatcgtcgagcgttggctgcaacgccatccagctcgcggtggcgtcgggctacaggtgcgtcgccaccgcttcggcgcgcaacgtcggcctgttgaaggagctgggtgcaagcgaggttcttgaccactcgagtccagccatcgtggaagacgtgattgaggcaatgcgcgggcgcagtctcgctggaacgcttcacgcgaccggtcacatgaaagactgttttgccgtagttgcgagatgcgagggctcgcgccgggtggcagcgacgctggccccgcccgacgagcgttcatttggagtcgaggcgacgcacatctccgggacgagcctcaaggatgacgaggttggtccaatgatctaccgcgaattcctgccgcaggctctcgcggcgcgcacgttcgtccccgcccctccggcgaagatcgtgggccagggccttgaaatgctccaggctgccttggaagccctgaaggcgggtgtatccgcagcgaaaatcgtcgttaccctgccttga

SEQ ID NO: 127106 - DNA, 423 bp, Enterobacter cloacae
atgcctgatccgacctacgcgagacattacggccatgcggaagcagtggaagtgaccttcgacccttccgttctcgcctatcgctcgctcttggaactcttcttccagatacatgaccccacgacctacgagcaacaaggcagcgatgtcggtccgagctatcgatcggcgattttctacaccaccgaagtgcagaaggaagtcgccctcacaaccatcgcggaaatcgaggcatcaggaagctggccaggcccggtcgtgtcggagatcaacccagaagaacccttttgggaggcggagccagagcaccaagaatacctggtgcgctatcctgggggctatagctgccacttcgtgcgcccgacctggcggttggaccgctcagacgaacgcccagctgtaatacttgacagaaagagttga

SEQ ID NO: 127107 - DNA, 1233 bp, Enterobacter cloacae
atggacatggcaggaagatcatttacgtttgtcagtggggctggctctccgctgtccgggcacctcgaaccgccggaagggacgccgcggggctgggcgatcttcgcccactgcttcacgtgcgggaaagacagtcgcgccgctgttcacatctcgcgcgcgctgtcgcgtgcgggcatcggggtcttgaggttcgatttcgccgggaccgggatcggcggtgggacgggagaacctgtgaacttcgcgtcggacgtcgaggaccttcgggccgccgcaaatgcgatggcggcggcgggcatgtcaccgtccctcctcgtcgggcacagcctgggtggcaccgctgcgatcgtagccgccgccgacatgcctgatattgcggcggtagcgacgattggtgcgccggccgaccttcagcatatcttgcgcctcttcggaccgaatgatctggacaccatcgcgagcgagggcgaggcctcggtggagattgccggtaggcccttcctcattcgccgagggttccttgaggcggttgaggggatcgacgtcgagaaggccattgcctccctgcgacggccggtgctggtcatgcactctccgctggatcaggtggtcggcatcgaccacgcgtcgcgcatcttcgtcgcgtccaggcaccctaaaagcttcatctcgctcgacaacgcggatcaccttctcaccgacgtcgcggacgcgaactacgccgcggccatggtggcggtttgggcgagccgctttctcccaccactcagcgcggatcttccgcaggtcgaggttgcggagggcgtcgtctccaccgaaactcttgcagggacgttccagctcaaggtccgcagcggcgagcacactctgttcgccgacgagccagcatcggtcggtggcctcgggaccggactatctccctacgaactcgtatctgccggcctcgcagcctgcacggtgatgacgatgcgtctctatgcgaaccgcaagggctttccgctcgaacgggcgagcacgaccgtgcagcacgagaaggtgccggacatgatgccacccgaccggttcacccgcaccattgtcctcgatgggccgctgagtgatgatcagcgcgctcggatcctcgcgatcgctgatcggtgtcccgtcgatctgagtctcatccggggttcggacgtgcagaccgagctcttgagcgccagtcaggctgcggatcccgcgaggctggcttga

SEQ ID NO: 127108 - DNA, 960 bp, Enterobacter cloacae
atgcgccaagcatacttctgcgacctgctttccaaaggcggtctcacggaagaggtatcagtcaggcgcgtgggccaaaggactatggaactcaatcaagtcagctatttcatcaacttggccgagacgctgaatttcacagcggccgctcgcttgagcggtgtgtcacagccaagtctgacccgcgcgatccgccgcttggaagatgagcttggcgggccgctgatctatcgcgacgggaagaacagccgcctgactggccttggccatgacgtcgaggcagaattccggcgcatggtggtcgcgatgaagagcgttcgcaatcactcggagcactgggcgatgggggggcaccgcgtgctggatgtcgccgtcgcgcccaccgtcggaccaaaggaatttacggcattcttcgagagcgcattggcggagatgccatccatcgaaatcaagctgcactcgctccagtcgaacgaggacacatcggaggtgctttcaggaaaataccacgcgtgcatcatgccgcgtgaaacaagaccggaacgcaagctggatgtgcatcctctatttcgggagcgcttcgtgctcggctgttctgcaaaccatcccttggctgccaacgagatcgtgcgcggcgaagacctgctcgagtttcctttcgtcgatcgcctgaaatgcgagtttcgcgatcggatcctcgatcacttcgcgcgacgggacttgctcatgcgacctcgctttcgatcagatcgcgaggactgggtgcaacgggtcgtcgctgacggccacgccatatgcattcttccggaacgatcgccgaccgtgcaaggcctcgtcactcggccgatcgacggatttgtcttggagcgcgaagtcgtgatcgcgacagtatccggctccacggcaacggtcgagatacggaacatcgcgcagctggcagcccggtatgagtggaactga

SEQ ID NO: 127109 - DNA, 1032 bp, Enterobacter cloacae
atgccgatcatagcaccaataccccgtggcgaacgacgcctgatgcagaaagctattcataaaacgcgcgataaaaatcatgcccgcagactcacggccatgctgatgcttcatcggggtgaacgggtcagcgatgttgccagaactctctgttgtgctcgttcatccgttggtcgctggattaactggtttacgcactcaggtattgaaggcctgaaatccttacccgcagggcgctcccgacgctggccttttgaacatatctgcaccctgttacgtgagctgataaagcattctcccggcgattttggttatcaacgttcacgctggagcaccgaattactggcattaaaaatcaatgagataaccggttgccagttacatgcaggaaccgttcgccgctggttgccatctgcggggcttgtatggcgcagggccgcgccaactctgcgtatccgtgacccacataaagatgaaaagatggcggtaatccacaaagcgctggatgaatgcagcgcagagcatccggtattttatgaagatgaagtggatatccaccttaatcctaaaatcggtgcggactggcagttgcgcggacagcagaaacgggtagtgacgccggggcagaacgaaaaatactatctggccggcgcactgcacagtggcacgggtaaagtcagctacgtgggcggcaacagcaaaagttcagcgctgtttatcgctctgctgaagcacctgaaagccacttaccggcgggcgaaaacaatcacgctgatcgttgataactacattatccataaaagccgcgaaacacagcgctggttgaaagcaaatcccaagttcagggtaatttaccagccggtttactcgccgtgggtgaatcatgtggaacggctatggcaggcacttcatgacacgataacccgtaatcatcagtgccgctcaatgtggcagttactgaaaaaggtccgccattttatggaaaccgccagcccattccccggaggaaaacatggtcaggcaaaagtgtag

SEQ ID NO: 127110 - DNA, 444 bp, Enterobacter cloacae
atgaagtttgagaagtcacaggcagcagttgaccgcctgacccccgagcaacgccggattacccaggattcggggaccgaaaggcccttcacgggtgagcacaacgacaacaaggagcctggcatctacgtcgacatagtgtcgggagagccgctgttcgcttcaacggacaagttcgattcgggtactggctggcccagcttcaccaagccgatcgttccggcaaacgtgaacgaggtgcgggacagtgcacacggcatggtccggacggaggtcaggtcggtacacgccgacagccatctgggccacgttttcccggacggtccttccgaccgcggcggtctgcgctactgcatcaactctgcgtcccttcgcttcatcccgcgcgacgagatggagtccgagggatacggtgaatatctcgatcaagtagaggaggcttaa

SEQ ID NO: 127111 - DNA, 540 bp, Enterobacter cloacae
atgcatcagcgcgctgttctcgcaggaggatgtttctggggcatgcaggatctgatccgcaagcggcccggcatcatctcgacccgtgtgggttacacgggcggcgatattccgaacgccacgtatcgtaatcacggcacgcatgccgaggggatcgagattgtcttcgacccgacagtgacgagctaccggcacatcctggaattcttcttccagatccacgatccgacgacgctgaaccgccagggcaatgatcgtgggctctcctaccggtcgggcatctattatgtcgacgaggagcagaagcgcgtcgccgaggatacgatcgccgatgtggatgcctcggggctgtgggatggcaaagtggtgaccgaggtccagccggtcggcgagttctgggaggccgagcccgatcaccaggattatctggagaagcggccgggcggctacacctgccacttcgtccgtcccgactgggttcttccaaagcggcatgaggccggcgatgtgagccctgcggccggggctgcagcggaatag

SEQ ID NO: 127112 - DNA, 705 bp, Enterobacter cloacae
atgacagacctctcctcctttcccatcacgcagcgctggccagcatcttatccggatcgcttgcaactatacgcggcccccacgcccaacggcgtcaaggtctcgatgatgctggaggagactggcctgccgtatgagccccacttcgtcgacatctcgaacaacgagtcgaaggatccagcgttcgtgtcgttgaatcccaacggccgcatacccgcgatcatcgatccggctggccctgacggccagcccattggcatatgggaaaccggtgcgatcctcatctatctggccgacaagacggggcagctcatctcaacaacacccgcccagcggtacgagactctggcctgggtgttctttcaggtgtcgggcgttgggccgaccttcggacagctaggctttttcctgcgatttgccggcaaggactatgaggacaagcgacctcggcagcgctttgttgatgaatccaggcgtcttctcggggtcctggatcaccggctggagggccgcgaatggattgtcgatgattactcgatcgcggacattgcgacgtttggctgggtgaatgcgctggtcgaattctacgcagcgggcgacatcctcggcctaagcagctattcgaacgtgcaggcatggctcgaacgcgggctggcgcgaccggctgtacagcgtggcctgcgaattcctgcgaggcctgcatga

SEQ ID NO: 127113 - DNA, 969 bp, Enterobacter cloacae
atgaccattatcgccgcatattattacaacgaaggtaagcgagtccgtgaaatcaggctcgatgagcacgtcgaactaaacgagaatcgctcgggcttctgctggatcgcgcttagcgagcccaccgcagacgaactcagcgcgatccagacgacgtataacctccatcctttggcgatcgacaacgccatgcacccgctgtgcccgcccaagctcgaggtctacaacgatgagttgtacgtcgtcgcccagaccgccgagctggtcggcgaccggatcagctacggcaagatggcgatcttcaccggtcacaatcaccttatcaccgtgcggcacggcaatgccggagcgctgggcaaacttcgggagcaactcgaggcatcgccgacgcagttcggcaagggtgtcgactatgtgctgcacgcgatcttgcaccgagtggtcgaccagtatctgcccatcttcgaaatgatcgaggacgacgtcctggcgatggagcgacggtcgctgcacgatttcctcgggccagaagaggtggcgcgaatcttcgaactaaggtccgaactcacgcggttccagcgcacgctcggggctatggccgagctggtgcgaaagctcgttcgcggccactttccctgcatcagcgccgaaatgacaccatatttccacgacgtcgcggaccatgtccaccgcgtgcagtccatggtcgacggcctcctgcttgtcctgtccacggtcttcgaggccagcagccttctggaagcgcaaaggatcggtgtggtcactcgccagctcgcggcctgggcggcgatcttggcggtcccgacggcgatcgccggaatatatggcatgaacttcaagcacatgccggaactggacacgccatatggctacttcgtcgtgctcggagtgatagcggtgttctgccttctcctattcatgcgcttcaagaaggccaagtggctatga

SEQ ID NO: 127114 - DNA, 573 bp, Enterobacter cloacae
atgacctcccaggtgaccgacgttctagaagcagtccagtcattcatcgccaaaggctatgaccgcgaataccgcgtcaaggacggcaatctcgtcgatctcgaactagggtcaaccctcgatgcatgcagcattcgcgtcgatgcggcgttgcgcctcgagagcggggacgacggcgaagatgcctccaacatctacgcgatcaccgatccggcgacagagcataaaggcctgttgatcgacgccttcgacgtgttccacgaaatctgcccccgcgacttgtccgagcgccttgtggcgcatcgggaaacagcaccggcaggtgaccaggacgcgccgagcaagcacggactacggaaagtctacaagagcgagtttcacagcgatcccgagcgttacgttctgcgcgagggctttccagacttcccgccatgccctttcggccaatccttcagcatcctcggcttcgataccgccgagcaggaatatgtctggctcgtcacgagcatcattcgagatcctcggctgatcagggttccataccagggcgaagacgtcatcagcgacgaatag

SEQ ID NO: 127115 - DNA, 327 bp, Enterobacter cloacae
atggactggaacaaggaccacatacgagaaactatgctcttgctggagacagcagcgttgcacagcgctcgcgaaaactacctggactatgtctctaccgctcggctcgatcggagcgaaccgatcgaaaacgacgaactagctcaggccgaggtcgcgagcgacttcgctgaagcgctcgatgacacgctccatgactacgccaataaactcgaaaagctcaggacgatcgatttcggccccaagttggggtcgtctcagaaaacggaatctatggtcactcccgtttttgcaacaccgattttgacgacaagttggcttgcttga

SEQ ID NO: 127116 - DNA, 372 bp, Enterobacter cloacae
gtgggggcaggtcacgccgataaaggcaagccgcacgaagctggcatgaccctcggtattgaaggtgaccagagcaaggtagtgtttaaagctgatcgctttcatgtacatgaagcggcttcatccatcatcgaaaacgccgtcgcaacaagcgctaagacgaagattaggcttggcgatgaaatgaagcaggccgtcattgatgccgtgcgtgaaagcgatttgttcgcagccctccaggcaagcattaatgcgcaggaagcttcagtagctggactgcaacaggcgatgcgcgatttggtgaacgatgctatccgcaatgcgctcaagcctggcggtatcctctggaatgcacggtcgcgtggattctga

SEQ ID NO: 127117 - DNA, 228 bp, Enterobacter cloacae
atgcgtatcactgtattggatggcgatcccggcaggaaaattaacccagctcaggaacgatatgccgtttttctcaatggtattgaggttaagcacgtattcactgctgatgatgaaaaaggcgaggtaattgctgctgtgcgggatgatcgcggacacatgaaggcggagcgaggcattgtgaagcaacaaacgctttacggaaaagtcaccattaagcgtcaataa

SEQ ID NO: 127118 - DNA, 336 bp, Enterobacter cloacae
atgatttcgtatgaggttgagtttccgactcaaaaatcttttagcttaaaaattaatggttactcttcagcagagggactggactgtaaaacggttgaggctattggcggagacgtcaaagtacatatcaataagaaaacaatgctgactgtaccttatcgtgaagacattacagcagactttactcttgaaggttacaagcagcgcgctgaaactcacgcgaaaactgtaatcgatcagattgtgaatgcggctcagcaccgagccgctgacgatttaattcaggaagttacgaacgcggttgcttcttctgaattattttctcaactctcttaa

SEQ ID NO: 127119 - DNA, 258 bp, Enterobacter cloacae
atgggttccatgtcagaactggaaaaagcagttgcagatttgcaacgtgaattaaagattgaaaaagccaccaataaactggttttttctttgattattgaagctgttaacaagctgtcgccaaaacagaatgttggggacgttctgatggatgtactgaaggaggttacaccgcctgaaatttcatctgccccagatgctcacgaagcgattaagagagttgagaaaataattcagaagaagcaaccgcgttcgtaa

SEQ ID NO: 127120 - DNA, 570 bp, Enterobacter cloacae
atgactagattctgcaatgtttccggatgctgcaataaagttttagcgcgcaacctatgcaacaaacactacattcggatgaggaaatttggcgatcctctcgccgggaaagacaggtttgcctcacctgaggtgagatttgaatttagtaccgagatatcaggtgagtgcttactgtggaccggtgcaaaaaacagcaaaggatacccacaactaaaatcggaaggccgcatcatttcagcccaccgatatgcctgggaaagagaaaaaggccgaatacctgacggaatggagattgaccacatttgccgcaatagagcatgtgtgaatgtaaatcatcttaggttggctactcgctctcagaatatgcaaaatctttcacttgccgggagagccgaatcaggtgtgagaggtgtatataaggacggaaatatgtggcgggccactctgttcaactgtggcgaagtggtgtggcaaaaatggtttaaaaatctttctgacgcagaaaaagaaattatcgctgccagaaaacgagttcacacccacgcaccgacagaggcttacacatga

SEQ ID NO: 127121 - DNA, 579 bp, Enterobacter cloacae
atgaaattcgtagtttgcgctcatcatactcgcttaggacatgcacaacgtcttgctgcgctgctggatgcccatctgcttattgatgacggtaaccaaggtgcgaactggaatcaccgacgcgcgctggagtgggcagcagaacaaacatgccgcgtagtagtgttggaagacgacgcactgccggtacatggattcaccgaaaagataactgactggctggctcgtttccctgacgacatgctgagcttttatctcggtaccgggcggcctccacaatatcaaatgcagattgctgagcggctaatcgtggctgataagacacgcgctgattacatcacgctgtcgagactcattcatggcgtttgctatagcgtcccgcctgagcatgtgcatcgcgtgctatcccgttgggataacagcaaacccgccgattacgctgtgggtgatgcatggggtggctcagtgatctatccgtgttactcgctggtggaccatgcagatggtgaaacggtagagcatcaccctgactcagcgccacgtacagaacgccgccgggcgtggaggttgcatgtctaa

SEQ ID NO: 127122 - DNA, 369 bp, Enterobacter cloacae
atgtctaagctatcaacgttaaagccacgcctgaaagccattgatacgcgacgcatcaagccaatctacggtgagcagcgccggataagtggaagtgcaagggtgagtttgaagcgccgtatctatgcgcgtgacagtggtcgctgctgtatgtgtaatcgggttgttgatttgactgacagtgaactcgaccaccgtatcgcgcttcagttcggaggcgataactcggagcacaacctgtggacgctctgcactgaatgtcatgcaggtaagtctgcacgtgaagccgctactggtcagcctgatgaacaagccctgaagcataaggtgcatgatggcgatcaggaatcagggtttgtagggctctga

SEQ ID NO: 127123 - DNA, 495 bp, Enterobacter cloacae
atgttaacagcgcagaagcggaaatatgctctcgcgctgatgtccgggatgtctcagaaggatgcggcaataaaggcgggatattctgaaaaatccgcgcgttccaaggggtcgcagcttgctaaagacccggaggtcatcgcgtttattgagcggaaaaaacgagaaaaagttgaggtggatgacgaacctgcgtatcgcaggaatgtttataccccagcagtaaacacgcctgaagaaaaaagacctcctgcggcatcgtccgccggtgagtatgaagaccctctcgacttcctgaaatcggttatgaacaacgttggttacgaaattgaaaccaggaaagatgctgcaaaggccatgctgccttatatgcatcagaagaaaggtgagggcggtaagaaggatgcaaaagctgaggctgccaaaaaagcggccaataagttcgcaattcagcagccgccgaaactggtggttaacaatcgcgggaatacatga

SEQ ID NO: 127124 - DNA, 1659 bp, Enterobacter cloacae
atgccggagtggacaactgcctgccctgactgggcggagcgcctgaagaaaggccagtctattattcctgccccgatttacccggagcaggctgaaatagccctgaacgttttcaggcaactgaaaatcgttgatgctccaggatcgccaacgttcggtgaatcctgcgcacagtgggttttcgatctcgttgcggcgctgttcggctcctatgatgccgaaaccggccgcagacacattacagaagtgtttgtactgatccccaaaaaaaactccaagtctacgctggccgccgggataatgatgacggccttgctgctcaactggcgtcaggctgccgggtacaccatcatcgccccgactgtagaggtggcgacaaacgcctttaacccggcgcgcgatatggtaaagcgggatgatgatctggatgacctctgtcaggtgcagacacacatcaggaccatcacccacaggggaacggacacgacgctgaaagtggtggccgccgaccccaacaccgtttctgggattaaatctgtcggcacgctcattgacgagttgtggctttttggtaagcaacataactccgaagatatgctgcgtgaggcagtcggtggcatggcatcacgacctgaaggctttgtgatgtacacaaccacgcagtccaacgaaccgcctgctggtgtgtttaagaaaaagttacagtacgcccgtgacgttcgcgacggaaaaattcacgacccgcattttcttccggtgatatttgagcatccaccggaaatggttgccagcggagagcatcttcttctggataacctcgcgatggttaaccccaacctgggttactccgttgacgagcagtttctttaccgtgaatacaacaaagcgaaagaggccggggaagaagacttccgtggctttatgtccaagcacgccaacgttgaaatcggtctcgccctgcgcgctgaccgatgggcaggggcggatttctgggagcaacaggcaaggcgcgtcacttttgaagatattctgcgccgctctgaggtggtcacagttggtatagatggcggtggtctcgatgaccttcttggcctggccgttatcgggcgcgatcgccagactcgcgaatggttatgctggtgtcatgcatgggcgcataccatcgccctggaaagacgaaagagcgaaatttcaaaattaaaggattttgagagggccggtgacctgacgatcgttaagcgggtgggcgaggatgttgagcaggttgcagagtatgtcagccggatttatgaagccgaactgctggacaaaatcgggattgacccttctgaggtcgggcaaattcttgatgcgctcagtgaggcaggcattcctgatgaggctgtaaccggggtcagccagggctggaaactcggcggcgccattaagactactgagcgaaagctggctgaaggtgttttgcttcatggtggtcagcttctgatggcatggtgcgtaggcaacgcccgtgtggagccgaaaggcaacgccatactcatcaccaaacaggccagcgggaaggggaaaattgaccctcttatggccacattcaacgccgttacgttaatggctcttaaccccgaaccggtcaaaaaagactaccaggtatttttcgtttaa

SEQ ID NO: 127125 - DNA, 1935 bp, Enterobacter cloacae
atgacgcttaaacgcgcctgcaccctcatgacggtgaagtcggtaaatgaggatgagcggattattaccggcatcgcctcaacaccgtctcccgatcgtgacggtgacattatggagccggagggggcgaaattccgcagcgatacgccgttcctctggcagcacgaccgctctcagcctattggcacctgcacgccaaaaatggtgaaagaggggttgcagatcacagcaaagctcgtgaaaccaacccctgacatgccatcccagttaatcgcacgtcttgatgaagcgtgggcttcgattaaggcggggctggtacgcggcctgtcgattgggttccgcccaattgagtattccttcctggatgaaggcggtattcgctttttgtcctgggacctgcttgaggtctcggcggtgaccattccggccaatgccgaatgctccatccagaccgttaaatctttcgatcgccagtttctcgccgcgtcaggcaatgagaaaccggtagtgaaaacttctaaaaccgctggcgctacagcacccaaaaccaaaaaaggaaacatttcgatgaatatcgcagaacaaatcaagagctttgaagcgaagcgtgcagcgctggccgcatcacttgatgaagtgatgtcaaaggcggctgaagagggacgcaccctggacgctgaagaagaagagagctacgacaacacatccgcagaaattaaatcagttgatgcgcacctcaaacgactgcgcgacatggaaagcaatctggcatcgactgcaaaaccggtatctaaagctgctggtggcgaattcaccaccgtgaagacaaacgcgccggggatcattcgcgttgagcaaaatctggagaaaggtatcgcctttgcccgttttgccaaggcactggcggcggcaaacggcagccgttctgaagcgctggaaattgcacgtaagcagtacccggatgatgcgaaacttcaccatgtgctgaaagccgctgttggtgctggcacaacgaccgatcctcagtgggctggtgcgctggtggagtatcaggaatacgcaaatgattttgttgaattcctccgcccgcagaccattatcggtcgtttcggtcagggtggtattcctgccctgcgtcaggtcccgttcaacattcgcattccggcacaaacttccggcggatctgcaagctgggtaggtcagggtaaggccaagccgctgaccaaattcgactttgagtccatcacgttcagcttcgccaaagtcgcagccattgcggtgctgaccgatgagctgatccgattctctaatccggcagctgatgcactggtgcgtaatgcgctggcagaagcggtcattgcacgcctggatacggacttcattaacccggcgaaagctgaagttgctaacgtctctccggcctcaattaccaacggtattgtggctgttccatcaaccggcgatccggatgcagatgctgaagcggcattcgctcagtttgtctccaataacctccagccaactggcggcgtgtggatcatgtccagcaccaacgcgttggcgctgtccatgaagaaaaatgctctgggccagaaaatgtatccggaaatgaccctgcttggcggcacattccaggggcttccggctatcgtttcgcagtacgccggaagcaatcttaccctgctgaacgcgccggatatttatctggctgacgacggtggtgtggcagtggatatgtcacgtgaagcctctctggaaatggaaagcgatcctactggcgacagcgtcagcccaaccggaacggagctggtttccatgttccagacgaacagcgtggctatccgtgccgagcgctggatcaactggaagcgtcgccgcacggcagcggtggcggttatttctggtgtgaactacggctctaaccagggaagctaa

SEQ ID NO: 127126 - DNA, 1362 bp, Enterobacter cloacae
atgtggaatcctttccgaagaaaagaggggcaagtcaaaaatctacagcagcctgttgtcaaccgcgggggctggacaccgatgttcagttatgtccacgaaccctacgccggggcctggcagcagaatatggaaattaagcccaaaacggttctctcctattatgctgtgttttcctgcatatctctgatcgcaagtgatatcgctaaaatgcctccgcgcctgatgaaacaggatacaaatggcgttcggagggaaattaaaaccggaaagatagcctcgctgtattccaggccaaatgcctttcagaaccgcatccagttctttgagcactggctgaattccaagctgtgcgaaggtaataccgttgcgctcaagatccggaacaatcgcggcgagataaccgagctgaggctgctggactggaacaaggttacgccgctggtagctgatgatggctctgtcttctaccagatcaatccggataacatggtcggtattgaatcatctgtgactgtaccggcacgagaggttattcacgatcggttcaactgtctgttccatccccttattggtctttccccgatttatgctgctggtctggctgcaatgcagggtcaccatattcaggaaagctcagcgtactttttccgcaatggcgggaaacccagcggtgttatcgaggttccgggctcgattacggaagagaacgccaggaagatccaaaaaaactgggacactggttataccggggaaaatgcgggtagaaccgccattctgagcaatggtgcgaaatatgttccccggacggtctcagctgctgatgcacaaactgtcgaacagcttcgcatgaccgcgcagattgtctgttcagtatttcacgtgcctgcttataaggttggcatcggtgaactgccaacgcatgacaacatcgaggcgcaggatcagcagtattactcacagtgtcttcagtcactgattgagtccatcgaattgctgctggatgaagcgtttgaacttgagggtgatacagggactgagtttgatgttaatgcgctgctgcgtatggacagcgaacgccgtatcaaatcactcggcgagggtgtgaaaaataccattctgacgccaaatgaggcgcgacggagtgaaaaccttccgcccttacccggcggcgacgcactgtatcttcagcagcagaacttcagtcttgaagcgctggcgcgccgtgatgcttcggatgacccgtttgccaaatccggcgccggcagccgtaccacatctgacgatgcgaacgggaaatccatgtcggaatctgaactgacagcggcaaaagccatgctgagaggattgttaaccaaatga

SEQ ID NO: 127127 - DNA, 1044 bp, Enterobacter cloacae
atgaatgaacgtgaactttcccttatcagggctcttggagaggaattttcccttgcgcttggcgagcttcgtgagtctttcagaaaaagcctcagtgactatcagcagacaacggaagagcaccttaccaggctctctcttgaggttgcgtccctgaaggatacaccggcacctgactttaccaagctgctggctgatgcagtggcatcccttccggttcctgaggctcctgaattgccggatatcggcgctatggtcagcgaagcggtcgctgctatcccggcaccgcaggacggtaaaagtgtcacggtcgacgatattacccccgttttacaggaactggtcagcaatgccgtggcagagatacctgtaccaaaggacggtaaagactttgatcccgccatgcttaaacaggcagttgaagaagctgtcagcgaggcggtagccgccatcccggtaccgcgtgacggtaaaagtgtcacgactgaagacgtccagccgatgattcaggagctggtttcagcatccattccggagctgccagatgtgaaatcgctggttaatgaggcgattgcagctctgcccgcagcagagccgggtaaagatggagaaaatggccgggacgccctgtcgctggagattctacctttcattgatgaggggaaaagttatccacgtggcagctatgccacgcataacggtggcctgtggcgcgcttacgagaaaacccatggtatgcgtggctgggagtgtcttgttgatggtgtggcaggtattgatattcagcaatctgagcagcgtagcttcaccctgacggttaaccgcaccagtggcgccagcgaaaccaaatcctttgacgtgcctgtgatgatttatcagggcgtattcaaatccggtcaggaatatctgcctggcgacacagttacatggggcggttcgctctggcactgcgacgagcagacccagtacaagcctggtgaggcaggttcgaaaggctggacgctggcagccaagcgtggccgcgacgggagggataaaacgtga

SEQ ID NO: 127128 - DNA, 327 bp, Enterobacter cloacae
gtgattgaacttgtgacactggatgagataaaggaacacctgcacattgatcatgatgctgacgacggcccacttaaggaaaaaatacaggaagccagttcggtgttgctggcttttattcagggaagccgggacaaggtcgttgatgagacaggaaagttaatagagggtgaagcgctcagtcggatgaaggccgccacgatgcgtctggtgggcatgttgtaccgaaatcccgacctggctgataaggaagatttacttcatggagagcttcctttctctgtatcgtttttaattcatgatctccgacttccgacaattatttga

SEQ ID NO: 127129 - DNA, 786 bp, Enterobacter cloacae
atggaaaacattgcgctcattggtatcgatctgggtaaaaactctttccatattcattgccaggatcgtcgcgggaaggctgtttaccgtaaaaaatttacccggccaaagttgatcgaatttttggcgacatgccccgctacaaccatcgcaatggaagcctgtggcggttctcactttatggcacgcaagttggaagagttggggcattccccaaagctgatatcaccacaatttgtccgcccgttcgttaaaagcaataaaaacgactttgtcgacgccgaagctatttgtgaagctgcatcgcgtccgtctatgcgttttgtgcagcccagaacggaatctcagcaggcaatgcgggctctgcatcgtgtccgtgaatccctggttcaggataaggtaaaaacaaccaatcaaatgcatgcttttctgctggaatttggcattagcgttccccgaggagctgccgttattagccgactgagtaccattcttgaggataatagtttgcctctttacctcagccagttattgctgaaattacaacagcattatcactatcttgttgagcagattaaagatttggaatcccagttgaaactaaagttggacgaagatgaggttggacagcgcttgctgagcattccctgcgtcggaacactgacagcgagtactatttcaactgagattggcgacgggaagcagtacgccagcagccgtgactttgcggcggcaacagggcttgtacctcggagtacagcacgggaggtcggacgacattgttag

SEQ ID NO: 127130 - DNA, 759 bp, Enterobacter cloacae
atgagtatttcatctgatgtccagaaactggaaccgggtaagcgcgtccgcctgatcgaggtggacggctcagcgttcggtgcgggtattcttcgctttcacaacgagacaatcccccataccgaggcggaaatcatcgccgcaggcggcgacgagtcaaaacttgagccgaagtcggtgtggtggcaggggcaggagtatggcgcgtggccgtatgaactgaccggcatatctgtcagcagtgacggccagagttcacggccgtctctcaccgttgcaaacatcagcggcacgattggcgcgctgtgccgaagatttcaggggatggctaaggcaaaggtgatcatccatgacaccttcgcccactacctggacgcaagaaattttcctgacgggaacccaactgcgaatcccaacgaggagcgcaaacaggtttattacatcgaccgtaaatcaggatcagacgatgaaaccgtagagtttgagctttccagtccagccgatttgcgcgggcaactcattccgactcggcaaattcagccaatgtgcacgtggtgcatgcggggctggtacaaaacagggaacggctgcacctacgccgggcaaaacggctggttcgataaagacggcaaccgggtggacgacccttcacaggatgtttgctccggattgctgtcaacgggctgtaaacctcgcttcggagagaatgaacagctggattatggcgggttccccggcgcttcacttctgagaggataa

SEQ ID NO: 127131 - DNA, 339 bp, Enterobacter cloacae
atggcagtcgaaaccttcagctggtgcccaaaggttgcctctcaggttgatacaagttttcgtacccgaaaggcgcagtttggcgatggctatacacaggtggccggggacggcatcaacccggtaacacctcagtggagcgtgagctttaccggcgacgaggcttacattcaggccattaaaaactttctgaacagacatacagggtggaagtcatttatctggaagccgccgcttgagccttcaggtttatggcgcgcggaatccttccagatatctacccacggcaacaaaaaatacaccctcagcagcacattcatacaggcataccatccatga

SEQ ID NO: 127132 - DNA, 1362 bp, Enterobacter cloacae
ttgtcacgccggaagggtgaagcaaaagagcgcctgcgactgagttatgcagccgatgacctggggttaaccagtgatccgcaattccagacaggccgtcaggagttgattaataacggccttgctgaatggcggaataatgaggccaacaaacctaaggcgaagggcggtaaaaccgaaggcgagaaaaccgaggatgtgtataagcgccttatcaagcagcaaaaagagcagattgccctgcaaggccagaatactgaactggcgaaggttaaataccaggtcagccagggcgaacttgcttctctgacagaagcccagaaaaagacggtattgcagaatgctgcgctgattgaccaggttaaattgcgtgagcaactgcgaaattacgaagccaaccttgctgacagtaacgccagcccccgcgcagccaatgaagcgcaactgctgggctacgggcagggaaccaggttccgtgaaagacttcaggagcagttcaatctgcgtaaggagtttgagcagaagaataccgatcttctccgccagcgtcaggctggtgaaatcgacgagacgttctatcagcaggggctggcacttaataagcgctacctcgaagagcgcctgcgcgaccaggagggatattacactgcttctgatgcgcagcgtgacgactggatgacgggactgtctgagggttatgcgaactgggtggacgaagctactgactattcttccatggccgctgacggcatgaagcaggccatggggggggcggtcaccacgatcaccgacatgcttaatggcaacgttgacagctggaaggactggggcgtgagcgtactgaagattatccagaacgttctggtgaacatggctgttgctaatggtgtcagctcaattggatcactgttcagttttggtgcctcgtcagccgcaaccgccagcagcggtaccgctattcagaatgctggcgcgaacttcacatttaatgcgaagggtaatgtttacgactctccgtccctgagcgcttacagcaatggcgtttttcagacgcctcagctgtttgcttttgccaaaggcgcaggggtttttgccgaggctggtccggaagccattatgccgcttacgcgggcacctaatggtgatcttgctgttcgcgcagtagggatgccacaggtctctggcggtgtgccttcagttaacttcggcgatatcaatattcagggcggatctccacaggcgtccagtcagggtactgccggagcagcaggcaggcagcttaaggatgccatcactggtgtcattaacgaacaggccagcatgccgggctcgcctctgtggcgattaatcaagggagtttaa

SEQ ID NO: 127133 - DNA, 576 bp, Enterobacter cloacae
atgcaaattggctacgtaagggtgtcaacaaatgaccaaaatacggatctccagcgacaagctctcgaacgcgcaggatgtgaacaggtttttgaggaaaaaatgagcgggacggtagcgaaccggccagcgcttaaaaagcttcttcgaacgctgaatgagggcgacacgcttgtggtgtggaagttggatcgccttgggcgaagcatgcggaacctggtactgctggtcgacgaactccggcagcgcggcattcacttcaaaagccttactgacagcatcgacacttccagcccaatggggcgtttcattttccacataatgtcagcattggccgagatggagagggagttgatcgtggaacgtacccgggcaggattggcggcagcccgggagaagggacggataggtggcaggcgcccgaaattaaccccagagcaatgggctcaggctggcaggttgatcgcaaacggagtggatcggaagcaggtggcgatcatttacgatgtggccgtttgtactctatataaaaaattcccagtaaataaagacgttacacgaacttcaacacattaa

SEQ ID NO: 127134 - DNA, 585 bp, Enterobacter cloacae
atgtgcagatatgccacctccgcaatgcaagctctacaggctgataacactacccttgcattcaacgtgaaggatgcaaatggctggaggggttgggttaagctttatagcgaatacaatacaattcgcgccagcgacggaacgctcaaggctgcatcgccggtgatcaaagtattttcagatggaacataccagactaacgatgaatctgagggctgcactgtaacccgtctggccacaggccaatatctggtggaagggtgtcaggggctgaactcagacgcagcatggggcggcatcgatggaggttttgacatccctaccgatcgcaacaagcaaccgcttatctggctggattatgaggttaacgccgttggttcggtactggtgaaaacctatcaccgtactcaccctgatgcgcctgcattcgccagaaacgaactggaaggcgtgggtgacggtgatcctgtcgacattccccgtgaccagtttgtgtcggtacgtgtcgaaatgccagccgattctttatacaaccaaaaaatcagagcagcagagctggccatgactgctgatgcgggtgaataa

SEQ ID NO: 127135 - DNA, 228 bp, Enterobacter cloacae
atgggcgagatgggggttgttgaagcggagcaaactgaaagcggcggactaattatccgcctgtataagcagaaatacatgctgagcgatggcggcgagatcgtcaaaacgaaaggagaaccaatggacgtgccggtgagtagctggatcgatgttcgcctggatatgccgacggattcagttttcaaacgttcacagcagcgtctgcaaagtgatgaagagagttag

SEQ ID NO: 127136 - DNA, 231 bp, Enterobacter cloacae
atggatgagattgatttttcttgtgaaatggattttcatgttgaacttaaattttatgataaagacttattcggaaaattagtttttccaaaagaaacagcagcttatcttgaattgattgtaaacgacatttttctatcactaaatagtgaatgtaaggaaactattgaatgtaagtgtggatatgatatctacacattaatgggatgtaataaaattggcacaaaatga

SEQ ID NO: 127137 - DNA, 321 bp, Enterobacter cloacae
atgaatactcaacctgcaacaactccgcaggcggcgaagccatgtctgtcgcccctggctgtctggaaaatgttactgacaatcctgctagaccagcactatggtctcacgctaaacgacacgccgttcagtgatgaaactgttattcagaaacacattgaggcaggtattaccttggctgatgccataaattttctggttgaacgctatgaactagttcgtattgaccaaaaaggcttctctgtgcaagatcaagaaccttggttaacttctatggatgtccaccgagcacgatttaaactcaacgtggcacgtttataa

SEQ ID NO: 127138 - DNA, 327 bp, Enterobacter cloacae
atgtcattaataccagcccatgaatggggactacaaagagaaattgttccacggtttggtgccagattagttcaggaaggcaaccggctgcattatctggctgacagggctagtttgatgggcaatttcagcgatacggaatgtttcaaattgaatgacgcatttccacactttatcagccagatggaatcgatgctgaccactggtgaactgatcccctgtcaccatcactgtgtcactctctaccacaacggttttacctgcgaagctgacacccttggcagttgcggctacgtgtacatcgctgtttaccccactcaacgctaa

SEQ ID NO: 127139 - DNA, 1101 bp, Enterobacter cloacae
atgaaatctatgaataaaacctttattgctatttttgtaatgggcgttgtcttagcgggtacaatgagccaggctgaagccgcgaatacggtttgggacgatcagcaaatcactaatattgtcaatgaccatcaggatcagattgcacaaaacaacgctgatagcattaaccgtgatatcgcaacggataaccgcttaacgcaggtcaatgacgaccttcagtccacaaaattaggcgtgttagtcgtggataaaatggctaatgacgcacatcagaaagcattgcttgcaggcgcgcttgccgataccgccagtctgaaaagtgagacggccctacagggtgtggcgactaacggcgcagccattatcaaccttcaacacgtcgataatattcaggatagccgccttactgctctcgaaaatgcatctaaacccaacaacggtacagatggagcgaaaggtgataaaggggataccggtgcgactggcgcaaagggcgataaaggggataccggcgcgactggcgcaaagggtgataaaggggatatcggtgcaaccggcgcgaagggtgaaaaaggcgatgctggcgcgacaggcatgaaaggtgataagggtgatactggcgcacaaggcattgcgggaagaaacggtcgcgacggtgtagacggtcataacggtaaagatggtgtgacaaccaccgtgacacaacgacagctggatacggctacccaggcgaaggtcgctaaaaatagcctggctgttactgccgccacgcaggatctgcaagccaccaggcagacattacaggcaatgaatactaacaccagccagcaatttaaatctctgcgtgatgaagtggacaataataagaagcaggccaatgccggtatttcaggggcgatggcgatggcgggtttgccacaagtgcaaaccaatcagcgcgtcatgttctctgctggcggcgcgacttacaacggcgagagcgcgcttgctgtcggtgcgtccgttaactttaattcccatgtcatcgcgaaagtgagcttttcagatgatactgcgaataatatgggcgcttcggttgggattggaatgggcttttaa

SEQ ID NO: 127140 - DNA, 336 bp, Enterobacter cloacae
atggaaattttacttgtttcaattgtaataggcttagttccagccttaatagctcaaagcaaaggccgctctttctttgcttggtgggtttatggtgcattgctgtttattattgcctttgtacactcgctggtaattaagaaagatgttgcagctgaagaaaaagacttaattgaaaatgagggtatgaaaaagtgtccgttctgtgcggaaataatcaaaaacgcagccattaaatgtaaacattgtggcagtgatttgatggccgaatcacctccggctaaaaccgatgaagaataccttgaagaagccaggcaaaaggtctggaaacaataa

SEQ ID NO: 127141 - DNA, 342 bp, Enterobacter cloacae
atgaaaaagttaattatagccgtcatgtgtttgttttttatcagcgcgtgtaagcctgagaaaaatgattttattaaaaatggcgaaaacatcgtcagagagaaattaaataacccagatgatgctaagtttaacgctgaatattttaagtatggtgataatgcagcatacgtttgtggtgatgtgacttacaaaaaaaataatgatggcacaagttatcgtaataaattttacgtctatgtcgagattatcgatgggaaattaacaagtaatggttcagcagtggtgattaaagaggacgacaaggcatttcttgaggtctataagacgctttgcaggtag

SEQ ID NO: 127142 - DNA, 264 bp, Enterobacter cloacae
atggcgttgaagcttaccgacggcagaccggtatcgacggtcacattatgcgtgccgctgccggtgttgcccgccgcgtcggtgactgacgcagtgatggtcgcggtaccgtcgctgaggccggaaatgacgttggccgggacgcccacgctccagttacccgccgcgtccagcacggtggtatacgactggccgccgatggtgacggtgacggtgtcgcccgccgccgcgccggtggcggagccgctgacgatctgcgcctga

SEQ ID NO: 127143 - DNA, 1431 bp, Enterobacter cloacae; identical to SEQ ID NO: 95299

SEQ ID NO: 127144 - DNA, 633 bp, Enterobacter cloacae
atgattgtcgtgtcatcctttgaaataacggaatccggaagacgttcccaaccatggggtgcaaccgaaggacatcagtataaagcggggaaatactataattttagagagcaccccggactcatcactacacatttagaagactttgtagagcacgcagaccaaatatcggtacaaaatttttacgattttattagatggataaacggtccaggaagtgccctggaaagcactgactgtatgctctctggagaacctaaggatgatccatcagcagccttattcaggtgtacacatggaataacaggccgcttcgaatttttccttcgacagatagaaatgaatgcaaacaaagaagcaatcatatgggtttacgataaattatcgatataccttcagatagaaaggtccgattttagaaaaggctccttccgcatcagccccctcataacggactacatcacccccgacgggaacaagttgaccgggcacagattctgtatctatttccaggcttacgggaatggcatccaagatgcctggctctcgcttgaaacaatgtttgatagtctcgtgaaaaccacaaaacggctgaactctgaaatcatcagtggccaggctgtaccgctgtaa

SEQ ID NO: 127145 - DNA, 585 bp, Enterobacter cloacae
atggaaagaaaaaccgttatcaaactcagcggctcaatggctcagcgatttggcaggacacatcgccgcgcactaacgtctgccagcgaagtgttcagggcgctttctaacaccattgacggctttgatgcttatctgcgtgaagctcgggcaaagggactggattttgttattttccgggatcgccgcaatatcggacacgaagagtttgagctcctgggcccaggtgatgaactgagaataatccctgtaataaggggaagcaaaagagcgggagttttccaggcattgctcggaacggctttggtggctgcggccatatggatgccaggagttagtattgcagcaagtaacctaatgttttccgtaggtgccgcgatggccgttggcggtgtagtgcaaatgctctctcctcaggtctcaggtctgcgaatgcggcaagatcctgataacaaaccttcctatgcgtttggtggtcccgttaatacgacagcttccggtaatcccgttcctttgctttatggtcagcgagaaataggcggcgctattatctccgccgggatatatgcagaagatcagcaataa

SEQ ID NO: 127146 - DNA, 279 bp, Enterobacter cloacae
atgagcggtaagcgttatcccgaagagtttaaaactgaagcagtcaaacaggttgttgatcgcggttattctgttgccagcgttgcaacacgtctcgatatcaccacccacagcctttatgcctggataaagaagtacggtccggattcttccactaataaagaacagtcagatgctcaggccgagatccgccgtctccagaaagagctgaaacgggttaccgacgaacgggacatattaaaaaaagccgcggcgtacttcgcaaagctgtccgactga

SEQ ID NO: 127147 - DNA, 264 bp, Enterobacter cloacae
atgaagaagcgtttttccgacgaacagatcatcagtattctccgcgaagccgaagctggggtacccgcccgtgaactctgccgcaagcatgccatttccgatgccacgttttacacctggcgtaagaagtatggcggtatggaggtgcctgaagttaagcgcctgaagtcgcttgaggaagagaacaccagactcaagaagctgcttgccgaagccatgctggataaagaggcgcttcaggtggctcttgggcgaaagtactga

SEQ ID NO: 127148 - DNA, 831 bp, Enterobacter cloacae; identical to SEQ ID NO: 119722

SEQ ID NO: 127149 - DNA, 1002 bp, Enterobacter cloacae
ttgattgaggatagtcttaaagagaactaccgcgtcgcagatatcaagcgcaagacagatgaccttattaccactcgtcctaaacgggacgctgtcgtttacaaaatgcatggtgacgtggattcgccaggcgcagccatactctacaaagcgcagtatgagcagtactacaagacccacgaaggttttgtaaccgcactgagtggagacctaatttccaaaacattcttatttattggcttcagtttcactgatcccaatcttgattacatactgagccgcttgcatgtgccggagaagcatcgacgtacacactactgcttccttcgcaaggaaccctctgtgccgcaaggaaatgaagacgaagccagcgcaatgtatagacagcgtcgtcaagagcatcatattcgcgatttgctccgctttggtatacaggcagtactagttaacgagtacgaggacattccggttatattgaaagagatcgagagccgcttcctcaagaagaccatatttatctccggaagcgcagaagagtatggaacttgggacaagcaggaagcgctgaactttgtacattctctctcggcatccttggtgaaggctggttatcgagttgtcaatggatttggatggggtattggcagtgcagtcatcaacggagctctcgatgccatctattccaagcctgacaagtactccgaagatcaacttatcatgcggccattcccgcagcatccatcaaacggtaaagcgctgagcgagctgtgggatgagtatcgacaccgtatgatcggtctttctggagtcgctatatttcttttcgggaataagctccatgatggtcaaattgtcaatgccggtggggtgcgaaaggagtttcaaattgctcagaatactggggttgccgtgcttccgcttggcatcactgggtatatggccaaggaactggcagacgagatgttggcagatccaagtaaactgacctgcccccacgattag

SEQ ID NO: 127150 - DNA, 378 bp, Enterobacter cloacae
ttgcgcttcattggctgcgcgggcgctggcgttactgtcagcaaggttggcttcgtaatttcgcagttgctcacgcaatttaacctggtcaatcagcgcagcattctgcaataccgtctttttctgggcttctgtcagagaagcaagttcgccctggctgacctggtatttaaccttcgccagttcagtattctggccttgcagggcaatctgctctttttgctgcttgataaggcgcttatacacatcctcggttttctcgccttcggttttaccgcccttcgccttaggtttgttggcctcattattccgccattcagcaaggccgttattaatcaactcctgacggcctgtctggaattgcggatcactggttaa

SEQ ID NO: 127151 - DNA, 228 bp, Enterobacter cloacae
atgacggcaagcgagcttctgatgtggattgagtacgacaggcaaagtccggttggcgatattcgtggtgacattcaggcagctcagctcgtctctgccatctacggctcgcagggggcaaaagtaccgcttgacgatgcgatcctgcgctggggtggcgataagcaatcagaaccgaaggacccgtttgcagggcttgaggctgcacttacagctgcaactcagtga

SEQ ID NO: 127152 - DNA, 384 bp, Enterobacter cloacae
atgaagaatattaaaaatctcgccctggctaagatgtcgggatttcgtcataagacggtcgccgttcctgagtgggaaggcgtcaaagtggttcttcgtgagccgtcaggtgaagcctggctgcgttggcaggaagtggtgaaaacgggtgctgatgatgaaaatgtgtcggtatcggaaaaggcacaccgtaatctttgcgctgacgtggtgctcttcattgacgttctgtgtgacaccgataagcaaccggtattcagcgtagacgaagaagagcaggtgcgtgaaatctacggccccgtccattcacgcctgctcaaacaggcgcttgacctgatcaacaacgcggacgaagcgcgggaaaagtctcaacccccggcgtaa

SEQ ID NO: 127153 - DNA, 444 bp, Enterobacter cloacae
atgtctgcactttatgaaaaatcgcagctgacgaagatccttatttcctccctgccagccaccaaagaaacgatggattccgcaaccttcctcgatctgagttgcaccatcaaagaaattcagttcaccggtggccagaagcaggatatcgacgtaacaacgctttgctcagaagagcaggagaacattaacggcctgccttctccgtcagaaatctccctgtccggaaacttctacaagaatccggcgcaggacgccttgcgtgaagcgtatggcaacgatacgacctacgctttccaggtgatcttcccttccggcaagggctttaagttcctggctgaaattcgccagcacacctggtcttcaggtaccaacggcgtagtggcggcaacgttctccctgcgcctgaaaggtaagcctgaaaacattgagtctggctcctga

SEQ ID NO: 127154 - DNA, 531 bp, Enterobacter cloacae
atgaaatatccaaccgtatcagtaaacggcgtttccgttcgcgttgatgacgagggacgctataacctcaatgatctccatgctgcggcggtcgcaaacggagaggctacagagcagcagcgtccaagtcagtttttacgtagcgctcaggtaaagcgatttatcaaggcacttaaatccaaagtgcaaaaaagcactctggaacaaattcaaccacttagagttgttaatggtggtgatgaacctggagtgtggggcgttgagctactggccattcgctacgcagcctggattaagcctgagtttgagattgaagtatatgaggtgttcagaacagtggttcgcctcggcatcagtgccatgtcacgcctgaataaattagatcacatcattaatactgagactaaagcgataagccagtgcgccagccagatggcgaagtggggtgtcggcggcagaaagaaaatcctcctttctgcgcgggagcgggtggttgatgaagtacagatgtacttaccaggcatcaattaa

SEQ ID NO: 127155 - DNA, 588 bp, Enterobacter cloacae
atggaaagaaaaaccgttatcaaactcagcggctcaatggctcagcgatttggcaggacacatcgccgcgcactaacgtcggccagcgaagtgttcagggcactttctaacaccattgacggatttgatgcctacctgcgagagaccagagcgaaagggctggactttgtcatcttccgaaaccaaataaacataggcaaggaagagtttgatcttcttgggcctggtgatgagctccgtattatccctgtcatacgcggtagtaaaagggcggggctctttcaaattgttactgccgccgcaattgcggcctttacctggtggaacccaataggatgggcagcaagcacacaaatggcactatatgccgcagctggttctatggccgttggtggtgtagtgcagatgctctctcctcaggtttcaggtctgcgaatgcgtcaggaacctgataacaaaccctcctatgcgtttggtggtcccgttaacacgacagcatctggcaatcccgttcccctgctttatgggcaacgggaaattggcggcgccattatatccgccggggtttatgcagaagatcagcaataa

SEQ ID NO: 127156 - DNA, 432 bp, Enterobacter cloacae
atgtacagcatcaaggtcgggttatccagcaatggccagtattatgcggcagggatggggatcggtgtagagaatacgccgtccggcatgcagtcgcaggtcatcttcctggctgaccgcttcgccgtcactcaccaggccggagccacggtgaccttaccgttcgttatccagaacgggcaggtaattatcagggatacggtaataggtgatgccactatcacccgagcgaaactggctgaaacaatcagctcggttaattacgttcagaaccaggctgggctgtccataaacttcagaacgggcacgcttgagaactacggttcaaccgctggggaaggggcgatgaagcagactaatcaaacgatcagtgtcaaggatgccaacaatgtgttgagggttcagatcgggagaatcacgggaacatggtaa

SEQ ID NO: 127157 - DNA, 279 bp, Enterobacter cloacae
atgagcggtaagcgttatcccgaagagtttaaaactgaagcagtcaaacaggttgttgatcgcggttattctgttgccagcgttgcaacacgtctcgatatcaccacccacagcctttacgcctggataaagaagtacggtccggattcttccgctaataaagaacagtcagatgctcaggccgagatccgccgtctccagaaagagctgaagcgggttaccgacgaacgggacatattaaaaaaagccgcggcgtacttcgcaaagctgtccgactga

SEQ ID NO: 127158 - DNA, 318 bp, Enterobacter cloacae
gtgatcgcacgtgcaccggtacgcaccggaaaactgaaaaaaaacgtggtggttgttacccaaaaaagccgccgccgcggggagatttcttccggcgtccatattcgtggcgttaacctgcgcaccggcaacagcgataacacgatgaaggcgaataacccgagaaacgccttttactggcgattcgttgagctgggcaccgcgaacatgcctgcacatccgtttgtgcgacccgcttacgatactcgcgaggaagaggccgccagcgtcgccattgccaggatgaatcaggctattgatgaggtattgagcaagtga

SEQ ID NO: 127159 - DNA, 228 bp, Enterobacter cloacae
atggacaactggcaggaatgcggttttcgtgagtacgacggtcccgctcagccaggtgacatggttatcatgcaggttcagtccaccgtcccgaaccatgccgggattttgcttgatggcaacatgctactgcatcacatgtatggccagctaagccagcgtattccctacggtggctattaccgtgaccgtaccatcaaaattctgcgttataaggatttgatgtaa

SEQ ID NO: 127160 - DNA, 228 bp, Enterobacter cloacae
atggataactggcaggaatgcggtttccgtgagtacgacggtcccgctcagccaggtgacatggttatcatgcaggtacagtccaccgtcccgaaccatgcgggtattctgctggaaggcaacatgctgctgcaccacatgtacggtcagctaagccagcgcattccttacggcggctattatcgtgaccgtaccatcaaaattctgcgttataaggatttgatgtaa

SEQ ID NO: 127161 - DNA, 1362 bp, Enterobacter cloacae; identical to SEQ ID NO: 114635

SEQ ID NO: 127162 - DNA, 219 bp, Enterobacter cloacae; identical to SEQ ID NO: 114639

SEQ ID NO: 127163 - DNA, 261 bp, Enterobacter cloacae
atgcgttatctgagcaaggacgagcggcgggaagagatcctccaggccgcgatgcgcgtggcgctgaccgaaggattcgctgcgatgaccgtgcgccgcatcgccaccgaagcgggcgtcgccaccgggcaggtgcatcaccactttgcgtcggcgggcgagcttaagtcgctggcgtttgtccggctaatccgcgatttgctggatgctgaaatcgttggcgaaaacgccgcgcctgcatgccatgctcggcagcgatga

SEQ ID NO: 127164 - DNA, 1896 bp, Enterobacter cloacae; identical to SEQ ID NO: 117999

SEQ ID NO: 127165 - DNA, 795 bp, Enterobacter cloacae; identical to SEQ ID NO: 117998

SEQ ID NO: 127166 - DNA, 231 bp, Enterobacter cloacae; identical to SEQ ID NO: 117997

SEQ ID NO: 127167 - DNA, 165 bp, Enterobacter cloacae; identical to SEQ ID NO: 117996

SEQ ID NO: 127168 - DNA, 351 bp, Enterobacter cloacae; identical to SEQ ID NO: 117995

SEQ ID NO: 127169 - DNA, 387 bp, Enterobacter cloacae; identical to SEQ ID NO: 117994

SEQ ID NO: 127170 - DNA, 201 bp, Enterobacter cloacae; identical to SEQ ID NO: 117993

SEQ ID NO: 127171 - DNA, 4005 bp, Enterobacter cloacae; identical to SEQ ID NO: 117992

SEQ ID NO: 127172 - DNA, 609 bp, Enterobacter cloacae; identical to SEQ ID NO: 117991

SEQ ID NO: 127173 - DNA, 735 bp, Enterobacter cloacae; identical to SEQ ID NO: 117990

SEQ ID NO: 127174 - DNA, 924 bp, Enterobacter cloacae; identical to SEQ ID NO: 117989

SEQ ID NO: 127175 - DNA, 243 bp, Enterobacter cloacae; identical to SEQ ID NO: 117988

SEQ ID NO: 127176 - DNA, 432 bp, Enterobacter cloacae; identical to SEQ ID NO: 117987

SEQ ID NO: 127177 - DNA, 288 bp, Enterobacter cloacae; identical to SEQ ID NO: 117984

SEQ ID NO: 127178 - DNA, 312 bp, Enterobacter cloacae; identical to SEQ ID NO: 117983

SEQ ID NO: 127179 - DNA, 222 bp, Enterobacter cloacae; identical to SEQ ID NO: 117982

SEQ ID NO: 127180 - DNA, 228 bp, Enterobacter cloacae; identical to SEQ ID NO: 117981

SEQ ID NO: 127181 - DNA, 1089 bp, Enterobacter cloacae; identical to SEQ ID NO: 117980

SEQ ID NO: 127182 - DNA, 306 bp, Enterobacter cloacae; identical to SEQ ID NO: 117979

SEQ ID NO: 127183 - DNA, 537 bp, Enterobacter cloacae; identical to SEQ ID NO: 117978

SEQ ID NO: 127184 - DNA, 255 bp, Enterobacter cloacae; identical to SEQ ID NO: 117977

SEQ ID NO: 127185 - DNA, 204 bp, Enterobacter cloacae; identical to SEQ ID NO: 117976

SEQ ID NO: 127186 - DNA, 312 bp, Enterobacter cloacae; identical to SEQ ID NO: 117975

SEQ ID NO: 127187 - DNA, 507 bp, Enterobacter cloacae; identical to SEQ ID NO: 117974

SEQ ID NO: 127188 - DNA, 1842 bp, Enterobacter cloacae; identical to SEQ ID NO: 117973

SEQ ID NO: 127189 - DNA, 207 bp, Enterobacter cloacae; identical to SEQ ID NO: 117972

SEQ ID NO: 127190 - DNA, 1590 bp, Enterobacter cloacae; identical to SEQ ID NO: 117971

SEQ ID NO: 127191 - DNA, 1344 bp, Enterobacter cloacae; identical to SEQ ID NO: 117970

SEQ ID NO: 127192 - DNA, 399 bp, Enterobacter cloacae; identical to SEQ ID NO: 117967

SEQ ID NO: 127193 - DNA, 354 bp, Enterobacter cloacae; identical to SEQ ID NO: 117966

SEQ ID NO: 127194 - DNA, 555 bp, Enterobacter cloacae; identical to SEQ ID NO: 117965

SEQ ID NO: 127195 - DNA, 399 bp, Enterobacter cloacae; identical to SEQ ID NO: 117964

SEQ ID NO: 127196 - DNA, 738 bp, Enterobacter cloacae; identical to SEQ ID NO: 117963

SEQ ID NO: 127197 - DNA, 423 bp, Enterobacter cloacae; identical to SEQ ID NO: 117962

SEQ ID NO: 127198 - DNA, 2517 bp, Enterobacter cloacae; identical to SEQ ID NO: 117960

SEQ ID NO: 127199 - DNA, 1164 bp, Enterobacter cloacae; identical to SEQ ID NO: 31753

SEQ ID NO: 127200 - DNA, 747 bp, Enterobacter cloacae
gtggtactgccagtttcacgaggacttcaaaacagaatatcgaccagcttcaagaatgcttctgtcagtacttctacccctgctgaagaggcaagcatatttgttaatggtggcgatgtctttatttcaactaataccgataaaccaatcgggattatgttgtctgaagatcaggtacctgaatcgacctataacctgaccctggtaccgcttgatgttcccggtgcgatgatttcagttactacatctttaagcccatctatgcaagccaaacgtgaaacctcattggataagcaaaactatgaggaaatgttggcccgctcccagtcagaagaactggctccaacggatccaaaacaagacgatcataaacaaagaatcattgatttattgactcctgtggctcttggtgaggtcccttcaggattcagtttacaacaggaccgactttctcgtattcctgcgccagagcagtcaccatgtaactttaatatgtatgcaaagctcggtcagagactggttggctcacgtgaacttattgatgtaattcttgtgaaaaacgataaaccatacggtcaaatcgttgctgatcagcagtgtatggcagaaggcgttattgcaagtgctttatttgataaagcatacctgcaaccgggagaagaaacagagctttacatagtccgggataaattgttcaaggaacgcgaggcccgggttacaaccagaccaagtctaatcagaaaataa

SEQ ID NO: 127201 - DNA, 519 bp, Enterobacter cloacae
  misc_feature (496)..(505): n is a, c, g, or t
atgattaaaaaaaagggcttaggcttcaacgcaattacagcattgatcatgctcacgacttcgaactgcgtaatcgctgaagaataccaattgccagcaacaattaataacccggttgtaatgccagttggtgctgacggatttcagaatggagctgcaaaagccattattccgggtcaagctggttctgaacagtcaggtgcacaaacaaaccttagtgaagccggtaatgcgcagggacaaaaacctacaactgatctccctaccgtgcaactttccccagccagcaatgcttcgcctgcggtaagcgctattactggagcattatcaaataatcctagtctccccggatttgacgcacagacccgatctggtgcaattgatagctatgggagaccaacaggtacctcttcccagcagaatgcaaccaatgcgaccgccacgtcaaaagccgatgaactttatgtcgaagctcgtaaccgatataaagaagttnnnnnnnnnnagttcagcgtgtaa

SEQ ID NO: 127202 - DNA, 1164 bp, Enterobacter cloacae; identical to SEQ ID NO: 118569

SEQ ID NO: 127203 - DNA, 1020 bp, Enterobacter cloacae; identical to SEQ ID NO: 118568

SEQ ID NO: 127204 - DNA, 1005 bp, Enterobacter cloacae; identical to SEQ ID NO: 9478

SEQ ID NO: 127205 - DNA, 840 bp, Enterobacter cloacae; identical to SEQ ID NO: 6027

SEQ ID NO: 127206 - DNA, 516 bp, Enterobacter cloacae
atgccccgccgttcgatcctctccgccgccgagcgcgaaagcctgctggcgttgccggacaccaaggatgagttgatccgtcactacacgttcagcgaaagcgacctctccatcatccggcagcggcgcggcccggccaatcggctgggcttcgcggtgcagctctgctacctgcgctttcccggcgtcatccttggcgctgatgagccaccgttcccgccattgctgagactggtcgccaaccagctcaaggtcggcatcgaaagctgggacgagtacgggcagcgtgagcagacccgacgcgagcacctggtcgagctgcaaacggtgttcggcttccagccgttcacgattggccactaccggcaggctgtccagttgctgaccgagctggccatgcaaaccgacaagggcatcgtgctggccagagccttgatggggacgatagagaaaacggaatctatggtcactcccgtttttgcaacaccgattttgacgataaattggcttgcttga

SEQ ID NO: 127207 - DNA, 186 bp, Enterobacter cloacae; identical to SEQ ID NO: 10399

SEQ ID NO: 127208 - DNA, 228 bp, Enterobacter cloacae; identical to SEQ ID NO: 10398

SEQ ID NO: 127209 - DNA, 279 bp, Enterobacter cloacae; identical to SEQ ID NO: 118679

SEQ ID NO: 127210 - DNA, 219 bp, Enterobacter cloacae; identical to SEQ ID NO: 114627

SEQ ID NO: 127211 - DNA, 192 bp, Enterobacter cloacae; identical to SEQ ID NO: 114628

SEQ ID NO: 127212 - DNA, 1449 bp, Enterobacter cloacae
ttgcgagtaaaagtccttcagcaggtaggtcacaaagaaaccctcgatccgttttttgactatgcccaaaagatactttctccagtaatttctgatgttgaggaaatttttcatgatgctcttggttgtgaaaatactcagggctgtgaatcccttgctcgtaagaccctggctcttttagagagactgcgggatgaggcaaaggaacaacagcagcagacagagcaggaggagcaggaggcatatgatgaatccgagaccgataccgataccgaatcagaagataaatcgcttacgtcgactgatagtcgtgaggatgattctgaggacgatagtgaaggtcaggcagatacttccgataacgctgatcttgctcaagagggatgttctgagccttcagaacttgctgaagataacgagggaaataatgaacccaccggtggcaatcccacgggtgataacattattgaagacgatactgatgcgattaacccttccgagagtgaatcagatgaagccagttcgactaacgttgaagatgaaagtaacttttcatcggctcaatgggagatactggcagatttgttggatgcctttcttagcagtgatgaggatagcgaagattatcacgatgctttggctaaagagattgaaggtattgcatcaaaagtatccgatgacgtgaaagccgaattcggtgcttctgaatgggatatccctgatctccttatcgatttgaatgtttacaatgaggctttgtctctgagtcattcaatcggtagcgacttgtctgttttacagcaggttaaaatgcgtggccgaaacaaaactcatgagcgtggaattaccttcgatggaaatcgattaattctgtcacaaatgggagttcgtgatgtcttcagagctcaaagcgaatctaaaaatagagggcatgttggcctcgtattagttcgtgatatttcagcgtcaatggctaatgatgaaagatatattcatgccattaagtcagatcttgctttatcgatggccgctgaaagtttgtcaaaaatgcatgtctccaatatagtttttcccttcaaggaaagtgaatttgagattatcaaaacgtttgatcaaagcgttgaggaatctctatcgaaattcactcttggatgtaagggttattatacccctacgggatctgctttaatggcagctgttgatctgttacttgacagccaattcgataggaaaataatttttcttataactgatggttatccgaataaatcggaatttactatcgtcgaagttatggaaaaggctaaatgtaatggaatagaaatcgttggtgttggtattaagactgatgaaataattggttttgaaacggacactttcgtaacagttgatgatacttctttattgtctattgaagtcagtaagctagttcatcaaatactttcttaa

SEQ ID NO: 127213 - DNA, 900 bp, Enterobacter cloacae
atggagcagattctgccatggcagaatatgaccgctgtcatcgagccgttttatcccaaggcgggcaatggccgacggccctatccgctggagaccatgctgcgtattcactgcatgcagcattggtacaacctgagcgacggtgccatggaagatgccctgtacgaaatcgcctccatgcgcctgtttgcccgattatccctggatagcgccctgccggatcgcaccaccatcatgaatttccgccacctgctcgagcagcatcaactggcccgtcaattgttcaagaccatcaatcgctggctggccgaagcaggcgtcatgatgacccaaggcactttggtggatgccaccatcattgaggcacccagctctaccaagaacaaagagcagcaacgcgatccggagatgcatcagaccaagaaaggcaatcagtggcactttggcatgaaggcccacattggtgtcgatgccaagagtggcctgacccacagcctggtcaccaccgcggccaacgagcatgacctcaatcagctgggtaatctgcttcatggagaggagcaatttgtctcagccgatgccggctaccaaggagcgccacagcgcgaggagctggccgaggtggatgtggactggctgatcgccgagcgtcccggcagggtaaaaaccttgaagcagcatccgcgcaagaacaaaacggccatcaacatcgaatacatgaaagccagcatccgtgccaaggtggagcacccgtttcgcatcatcaagcggcagttcggcttcgtgaaagccagatacaaggggctgctgaaaaacgataaccaactggcgatgttattcaccctggccaacctgtttcgggtggaccaaatgatacgtcagtgggagagatctcagtaa

SEQ ID NO: 127214 - DNA, 249 bp, Enterobacter cloacae
atgcatgtgcgttggggttttgacgctgcgcagggataccatggcgatgactccccccgccagacaaaacgccagtgccagccacagggtgcccatctccccgatgtgcggaatggtaaagctaggaatataactgcccgccacgccaatacctacggaataaaccgcccagtaccagcccagcgccgagctggatttatcgctacgcacattatgaataatgaccacgatgaaggcgtacaaaaataa

SEQ ID NO: 127215 - DNA, 690 bp, Enterobacter cloacae
atgcgttttgtacagcccagaactgaatctcagcaggcaatgcgggctctgcatcgtgtccgtgaatccctggttcaggataaggtaaaaacaaccaatcaaatgcatgcttttctgctggaatttggcatcagcgttccacgaggagctgccgttattagccgactgagtacccttcttgaggacaatagtttgcctctttacctcagccagttattgctgaaattacaacagcattatcactatcttgttgagcagattaaagatttggaatcccagttgaaacgaaagttggacgaagatgagattggacagcgcttgctgagcattccctgcgtcggaacactgacagcgagtactatttcaactgagattggcgacgggaagcagtacgccagcagtcgtgactttgcggcggcaacagggctagtgcctcgacagtacagcacgggaggtcggacgacattgctgggaattagtaagcgaggtaacaaaaagatccgaactttgttggttcaatgtgccagggtattcatacaaaaactggaacaccagtctggcaaattggccgattgggtcagggatttactgtgtaggaaaagcaactttgtcgtcacttgtgctctggcaaacaagctggccagaatagcctgggccctaacggcacgacagcaaacttatgtagcataa

SEQ ID NO: 127216 - DNA, 453 bp, Enterobacter cloacae
gtggcgttcgctgaacacgaccatgaccatgaccactctgagcttgatgggctggatgtgaattcgaaagagtatcaggacgctcacgaactggctcatgccaatgacataaaacgccgcttcgacgggaaagaagtaaccaacgggcaaatcctgatatttggactgacaggagggcttatcccttgcccggcagctataactgtattgttgatctgccttcagcttaaagcgcttacgctgggtgccacactggttgtttgtttcagtatcggcctggcattgaccctcgtaacggttggagtgggtgcggcgatcagcgttcgtcaggtcgccaaacgctggagtggcttcaataccatcgccagaagagccccctatatttcaagcgccctgattgctgctgttgggatttacatgggtatacatggctggaatgggctggtgcattaa

SEQ ID NO: 127217 - DNA, 672 bp, Enterobacter cloacae
gtggtgctgaccccggatgaagtggttcgcatcctcggttttctggaaggcgagcatcgtttgttcgcccagcttctgtatggaacgggcatgcggatcagtgagggtttgcaactgcgggtcaaggatctggatttcgatcacggcacgatcatcgtgcgggagggcaagggctccaaggatcgggccttgatgttacccgagagcttggcacccagcctgcgcgagcagctgtcgcgtgcacgggcatggtggctgaaggaccaggccgagggccgcagcggcgttgcgcttcccgacgcccttgagcggaagtatccgcgcgccgggcattcctggccgtggttctgggtttttgcgcagcacacgcattcgaccgatccacggagcggtgtcgtgcgtcgccatcacatgtatgaccagacctttcagcgcgccttcaaacgtgccgtagaacaagcaggcatcacgaagcccgccacaccgcacaccctccgccactcgttcgcgacggccttgctccgcagcggttacgacattcgaaccgtgcaggatctgctcggccattccgacgtctctacgacgatgatttacacgcatgtgctgaaagttggcggtgccggagtgcgctcaccgcttgatgcgctgccgcccctcactagtgagaggtag

SEQ ID NO: 127218 - DNA, 705 bp, Enterobacter cloacae; identical to SEQ ID NO: 8686

SEQ ID NO: 127219 - DNA, 423 bp, Enterobacter cloacae
atgaattttcaaactaacgaagtttttaataaatttgctgctgttataaaatcgcgcatcgtcaatgaaccatcgtcatgctatttgctgcattgtgacaaatatttctatccgaaatattatcttcgttgccgtggagattataagtcattcatatatgtccatcttgatctacatagtggtgaagctaaagaaatcacatgggagcaagcagacgatatgctgtctagtccaggaaaacccccattaaaaggaaatcttggacgatttgagtatataaaagttgtggttgaggaccttcgtattcgaggttacgctgattatcttcctgcgtataatcttgatgaccttcgccgttttgccttacaggacgaccgcccatcccttgtcagatacattgacaatgtaatggcaacggtctga

SEQ ID NO: 127220 - DNA, 129 bp, Enterobacter cloacae
atggggatccacgttatcagtatgtgcgccattctggccataatcccgctctattggttacccgttttgcctgatttgcatattgtctggttgctgattgccgcaggaattgcgttatccgtacagtag

SEQ ID NO: 127221 - DNA, 1230 bp, Enterobacter cloacae
atgtctctaccgcaattctcacttgcagccgcacgaaacctgcatcttgccgcccaggggcttctgaaaaagccccgccgccgcgcgcagccagctgatatcctctctaccgtgcaacgcatgtcgttgctgcaaatcgacaccattaacatcgtggcgcgtagcccgtatctggtcctgtttagccgcctgggaaactatcctccgcagtggctggataatgcgctaagtcagggcgaactgatggaatactgggcgcatgaagcctgttttctcccgcgaagcgattttgccctgatgcgtcaccgcatgctcgccccggacaaaatgggctggaaataccgtcaggagtggatggtggaacacgcggatgaaatagagcaactgattgcccatattcaggaaaacgggccggtacgctctgcggattttgaacacccgcgaaaaggcgcaagcggatggtgggagtggaaaccgcacaaacgccatcttgaagggctgtttacgtcgggcaaagtgatggtggtcgagcgccgcaactttcagcgcgtctatgacctcacgcaccgtgttatgcctcactgggacgatacgcgtgacctgctgtctcaggacgcagccgaagccatcatgctcgggaacagcgcccgcagccttggcatcttccgcccacagtggctggcggattattatcgtctgcgtcagccgcagctaaaaccactgctggaatcgtggcagcgcgaacagcgcgtcatgccggtctcggtagagtcgttaggtgaaatgtggttgcatgcggatttgttccctctgctggcgcaggcgcaggagggcaaactccaggcgacccacagtgccgtgctgtcgccgttcgaccccgttgtctgggacagaaagcgggccgggcagttgtttaatttcagctaccgtctggaatgctacactccggcgcccaggcggcagtatggttattttgttttgccgctgctgcacaaaggccagctagtcgggcgcatggacgctaaaatgcaccgtaaaaccggcatgcttgaaattatcgcgctctggcttgaagaggacataaaggtgacggctggcctggaaaaagggttaacgactgcgctcagtgaatttgcccgctggcagggggcgcatgaaattgtacttggtcgcgtgcctgcggggctgtttacgacctgtcgaggtggctgggaaacaggcactccctga

SEQ ID NO: 127222 - DNA, 138 bp, Enterobacter cloacae
atggggcctgtaacccggcgcaccattatcttttccacctgcctggagggcgacacggtggaatgcctcaacatcctctttgtttttttcattgaaggcaagatgcattcggggtgtggagggagttccctgtgttaa

SEQ ID NO: 127223 - DNA, 555 bp, Enterobacter cloacae
atgcaggctgatgccgcccgtggaagacagccctgctcgggctcaaaagatggcatagcacactgtacatcggatggtcgttttgtctgcaatgacggaagtctgagccagtcgaagcgattctgttcaggttatggtgcctccgaactgccccggcaggtaaaaccctccccctccgccaggcaagcgcagacgaaaaagaaaacagccgtgaaaggccaggagcagcgtgttgtagaaaacaatgcgcagttcgatacacaaccgcggcaacctacatgcgcccttctctatatggccaacaagcccggattcacccatttacccgtttgttcaggaaatcagtatttatccgccagtgtaaacgttctttgtctgttattcgaactgataagacgcttgcaggtggaaacccacctgaacgcgctggacgacgctgttacagcgtatggcattaaagcatgccgttcgcaccttccggctacatggcgaacttactgcatggctggggtttatgttttctgcatgattgataaaagggagggaaaattatga

SEQ ID NO: 127224 - DNA, 1311 bp, Enterobacter cloacae
atgaacgcactggcgcagtacattcagacattagctccacaactgagcgcatggcgtcgcgatttccaccattttgcggaatccggctgggtagagtttcgaacagctgcgaaagtctcggaaatcctcgactcgctgggctacgaactggcgatgggtcgcgacgtggtcgatgccgaaagccgtatgggactgcccgatgatgccaccctttcgcgagagtttgcccgcgcccgggcgcagggtgcgccggagaaatggctggcgccgtttgagggcggatttaccggcattgtggcgaccctgaataccggacgtccgggcccgacgctggcgtttcgggtagacatggatgcacttgatttaagcgaagcgcttgacgaaagtcatcgccccttccgcgacggttttgcctcctgcaatccgggcatgatgcacgcctgtggccacgacgggcataccaccattggtctggggctcgcgcaggtgcttaagcagcatgaagcgcagctcaacggcatcatcaaactgatcttccagcctgccgaagagggtacgcgcggcgcgcgggctatggtcgccgcaggcgcgctggacggcgtggactactttaccgccattcatatcgggaccggcgttccggaagggacggtgatctgcggcagcgataacttcatggcgaccaccaaatttgacgtgcgctttaccggggtcgccgcacacgctggcggtaaaccagaagagggccgtaacgccctgctcgcggctgcccaagccgccatcgcgctgcatggcatcgcaccacacagcgaaggcgcgtcccgggttaacgtcggggtcatgcaggcgggcagcggacgcaacgtggttccggctgatgcgttgcttaaggttgaaacccgcggcgaaaccgaagccattaatcagtatgtctttgaacgcgcgcaggcggttatcaccggcgcggccgcgctctacggcgtaagcgccgaaatacgcctgatgggtgccgccaccttcagcgcgccgacgccggcctgggttgcttatctgcgcgaacaggcgagccaggtttccggaattgagcacgcaattgataaggtgacagcgccagcaggctccgaagacgccacgctgatgatggcccgcgttcagcagaacggcggcatggcgtcgtatatggtcttcggcacggaactgagcgccggacatcataacgaaaaattcgattttgatgagcaggtgatgaacgttgccatcgaaacgctggcgcgaactgcgcttaatttcccgtggacgcgaggtgtgtaa

SEQ ID NO: 127225 - DNA, 654 bp, Enterobacter cloacae
atgggtcagaaaatcattacgttgtccggcgctgcgacggatgttctttatgcactgttttttcgtggtgcgttgactggtggagatctgccatctaaatctggcgcagctgagcttcgagaactggggtttgctgaaagtcgccataccgctacaaaatatcatgagaaaaacttcttcacgttcctgactgctgaagggcaggagtttgccattaagcatctggcaaatactcgctttggtgttcccgctggtggttatatcggctgccctatagatgagccaagagacggcatcaatagctactgcccaattgaagactttaaatggggctggtttgtcgataaatcagggcaagcctacatccataaggcgctgatcggtgatggcgtattgtctacgggttataacgtgaaattgaacgtgaacgtcaccgacaagggtaagcagcacgaagctggcatggcactcgatgttgacgatggtaaaagccgcgtgaagattttggctgaaaagttggcggttgccgccaatcaccaaaacgcgttagagaccgccttacagcagtccatcaaaacggttgtggacgaaactattcaacaagctatgcagccaggcggtgcgatctggacttccttacggcgtggaatctga

SEQ ID NO: 127226 - DNA, 1458 bp, Enterobacter cloacae
atgcaggtcactattgatggtgtcccatacgctcccgccagcgtcgtttcatcccggatcggcattgccatttcgacacatcagcgcgcagacgtattaaaacgagcactcgaacagcacatgaagcatcttcccgccggcgcgctggtggtggttgtcgatgatggttcaaaacctgcggtggtagttccccacggcgtgcagctgcttcgccatgaaacatcactcggcattgttgcatcgaagaacgccagtttaaccgcgctgatggacgccgggtgtgagcatctcttcctgtgggacgatgacgcctggcccatcgctgataactggcacctgccatacatcgaatcacccgaaccgcacctggcttaccagtttctcgatctggcagggacgaataagctgagggatatggcggtcctgcaccgggatgataagcacatcgcttacaccgggcagcgcggcgtgatgctgtattaccaccgcagcgctatcgagaaggttggcggtttcgatcgggtatacggtcgcggcatgtacgagcatcccgatctggcgctgcgcattcacaacgccgggttatcgacctgggcgttcgctgatgtggtcggctctgaaaagctgattcactccatggatgagcatgaagaggggacgcgctctattacccggcctgaccgtgaagcactggtgaaacgaaacgtcggaatcttcaacggccggcgggatagtggttatgccggattcgcttcatacagtaccaatccgaatctggtgattacgacgctgcttacgagtcagccagacccacagcgcggcggaaaaatgaagcctgacccgcgggctcttcaggtttgggcggactcaatatccggcgcgttgccgattgtcctggctgacgaattaaaagagtcgccaactggtgctgatctggttgaagtcccgctggtggacatgagcccttactttgctcgctggcttcacatctatcagtttcttcgtgcgcaccctgagtatcaccttgtctggtgtacggacggtactgacgttgaaatgttgcgagagccctgggcagaaatggagccgggtaaaatttacgttggctcagagcacaagacgtatgccgacgaatggatgaaggcaaatcaccacggcaaagcgtatagcgatttcattcagcagtatcgtgatgaaccactgctgaatgctgggctgcttggtggcagccgtgaagacgtaatggagtttgctcaccggatcatccgacagcattacctgattgaaagccaccgtttctggaagatggagacagcacccgccacgctggtggacatgggcgctttcggtatggcagcaaagtctttcggagatcgcatcgttaccggtcctaaggtgcacaccatctttaaaacagatggattcgggaaggaggttgcatggtttcgccacaagtga

SEQ ID NO: 127227 - DNA, 591 bp, Enterobacter cloacae
atggtttcgccacaagtgaggtttgttgttgttggtcaccacacccggatagatcatgcacaacgtctcgctgcgatgctggatgcccatctgcttattgatgacggtaaccacggcgcgaactggaatcaccgacgcgcgcttgaatgggctgctgaacaaccttgccgggtagttgtgctggaagacgacgcgctaccggtgcagggattcaccgaaaaggtaactgactggctggtgcgtttccctggtgacatgctgagcttttatctcggcacgggccgaccgccgcagtatcagaaagagatagccggaatgctggtggatgcggatcgcgtctgcggtgaccacatcgtattaagcaagctgattcacggggtatgttatagccctcctcagggcaggctggggcgcatgctcagcgcatggaataaaacgctggcagctgattacgccgtcggtgaggcgttcggtggcagggtgatttatccgtgttactcgctggtggatcacgccgacatgccggcggttgagcgtcaccctgacaacgagccgaggacagaacgccgccgtgcatggagactggcatga

SEQ ID NO: 127228 - DNA, 342 bp, Enterobacter cloacae
atgaacaaagagccccgtgtatatggcagccgatgggataaggcccgtctgcgttttcttcagcagcacccactatgtgtgatgtgcgagcagcaggggcgcataacaccagcaacggtggttgaccatatcgtgccccacaaactgaaagatgcgcttaagtcaggtaacccgctggccatatcgaaagcacagttcctgttctggagtaaagataactggcagccattgtgcaaagcacatcatgattcaacgaaacagagaatggagaagagcggcgcggtaataggctgtgatgccaacggctacccgctcgatcctgcgtctcactggaggacataa

SEQ ID NO: 127229 - DNA, 237 bp, Enterobacter cloacae
atgaaagacctcatcattgaataccgcgatggtaagtttgttcagctggcaattgatggcgtggcgatgaagactgttacctctattcagttctctcacacggtaggagaaaacgtgccgacgctgaccttctcaggtcatgtgtggcccgagcctgggaaaggcgctcagaaactcgaacgggttgataaacagacctcctggcatgacgaagcagtgcagattatgaacgattga

SEQ ID NO: 127230 - DNA, 486 bp, Enterobacter cloacae
atggcagataaacgaacccgttccgacagttcggcggcagcggttcaggccatgaaaaatgcagctgtggacaccatcgatccgccgtcccatgcaggtttggagaaaaaagccgaaccattctggcatgacaatatcagatcgaaagctctggacagctggacgcctgccgacctgctggccgccgtagaactggctaataatcagctctatatcaccgttttacgcaaagatttacgcaaagaagagcgtatacgcggggaggagcgagacgaaggccttatcaaagacctccgcaagcaaattgttgagctacaacgaactattctggctcagcgccgcgacctccagatccattcccacgcaaccaacggcgaaagtcgcgaccagaagaaacgtaatcagaacgatcgtgatgcacggaataccaaaaacgggcatcaggaccaggacgacaacctgatcgcctttcccaagcacggataa

SEQ ID NO: 127231 - DNA, 1515 bp, Enterobacter cloacae
atgacgcgaggtgagcgtgtaatagcgttcattgagcgcttttgcattgtgccggaaggcaaacttctcggtaaggccatgcggcttgaccccttccagaaagaattcatcctggcggtttacgacaatccagtcggtaccgataaagcgatactgagcatcgcccgaaaaaacggcaagacggggctgatagccggcatcctgctggcgcatctggtggggccagaagcggtacagaatacccagatcgtcagtggcgctctgagccgggaacaggcatccatcgttttcaacctggcggtgaagatggtcaacctgaacccgaagttgcaggagattgtgcacatcacgcccagcggcaaaaagctgatcgggctgccgtgtaatgtcgaatataaggcgttatctgctgagggtaaaaccacgcacggcctgtcgcctgttctggcgattctggacgaaaccgggcaggtaagggggccgcaggatgattttatcgatgcgatcaccacagcccagggcgcgcatgagaatccgctactgatagttatcagcactcaggcggcgaacgacgccgatctgttaagcatctggattgatgatgcggtcaaatcgaaagatccgcacattgtctgccacgtttacgaagcgccaaaagacgctgatatcagtaagcgagaatcctggcttgccgcgaacccggcgctaggaaccttccgttccgaaaaagacatggcgcgccaggcagaaatggcctcgcgaatgccgagcttcgagaacacattccgcaacctcaacctgaaccagcgcgtttccaccgtatcaccgtttatctcccgcagcgtgtgggagctgtgcggcggcatgccggttaatacgccgaggaagtggtacgcggggctggatctttcagcaaggaatgacttaacggcgctggttatcgctggtgaagcagaagatggcatctgggatatcttcccgttcttctggacacctgaaaagacgctgggagcaaggtcaaaaacagaccgtgcaccgtatgacgtatgggcaagagagggacttctgcgtaccactccaggtgcttccgtagattactcattcgtggttgccgacatcgctgaaattattggcgatttcgacattacctcgatggcattcgaccgctggcgcattgaccagttcaggaaagaggctgacgacatcggcctgaaccttccattggtagaatttgggcaggggtttaaggatatgggcccagctgtagacacccttgagtcactgatgctgaacgggcgggtgaggcatggcatgcacccggtattaacgatgtgtgcctggaacgcggtgatcgtaaaagatgccgctggcaaccgtaagctggataaatccaaagcaacgggccgtattgatggcatggtcgcaatgacgatgtccgttggtgctgctaatggggaagttaccgaacaaggtggtgacttcgatgacttcattttccgaccgctgagcatgtga

SEQ ID NO: 127232 - DNA, 1275 bp, Enterobacter cloacae
atggaagaacctaaatacacaattgacctgcgaaccaataacggctggtgggcaaagcttcagtcctggtttgtcggcgggcgtttagtcaccccaaatcagggctcacagacggggcctgtttcggcccacggacacctgggcgattcatccattaacgatgaacggatactgcaaatttcgactgtgtggcgctgcgtgagcctgatttcaacgctcacggcatgcttaccgcttgatgtcttcgaaacagaccagaatgacaaccgtaaaaaagtggatttgagcaatccactggcgcgactgctgcgctactcaccgaatcagtacatgaccgcccaggaattcagggaggccatgacaatgcagctctgtttcttcggtaacgcgtatgcactgattgaccgcaacagtgcgggtgacgtgatcagccttctcccgcttcagtcagccagtatggatgtgaaacttgtcggaaaaaaagtggtttatcgctatcagcgagacagcgaatatgccgacttttcgcagagagagatttttcaccttaaaggcttcggattcaccgggctggtcggcctgtcaccaattgcttttgcctgtaaatcggcaggggtggcggtggcgatggaggatcagcaacgtgatttctttgctaatggcgctaagtctccgcaaattctcatgaccggagacagagttctaaccgaaccacagcgaaatcagcttgaagagaactttaaagagatcgccggcgggcctgtaaaaaaaaggctctggattctggaagcaggatttaccacctcacctatcggcgtaacgccacaggatgccgagatgatggcgtcccgaaaattccaggttagcgagctggcgcgattctttggcgtaccgcctcaccttgtcggcgatgtggagaagtcaacgagctggggctcaggcatcgagcagcaaaatctcgggtttctacagtacacactacagccctatatctcccggtgggaaaacagcattcagcgttggcttatcccggctaaggatgttggccggattcacgctgagcataatcttgatggtcttttaaggggcgattctgcatcccgcgcagcctttatgaaggcaatgggcgaatctgggctccgcaccattaacgagatgcgtcgaactgacaacatgcctccattacctggtggcgatgtggcaatgcgacaggcgcaatacgtgccgatcaccgacttaggaaccaacaaagagccccgtaatgacggggcttaa

SEQ ID NO: 127233 - DNA, 678 bp, Enterobacter cloacae
atgcctgaaattgtaaaaacgctctctttcgatgagacagaaatcaaattcaccggtgacggaaagcaggggatctttgaaggatatgcctctgtctttaataacactgattccgatggcgacatcattcttcccggggcgtttaaaaacgcactggcaaaccagacccgaaaagtggcgatgttttttaaccacaggacgtgggaactgccagttggaaaatgggacaacctggaagaagaccaaaaagggctgtatgtgcgcggtcaactaacgccagggcacagcggggccactgatctgaaagctgcaatgcagcacggtacggttgagggcatgtcggttggcttttccgttgcaaaagatgattacaccaccattcccaccggtcgaattttcaagaatgtccaggcactgcgtgaaataagcgtctgcactttcccggccaacgaacaggccggcattgcagctatgaaaagtgtcgacggcattgaaacgatccgtgatgtggagaactggctgagggattcagtcggcctcaccaaatcacaggcagttgggctaattgcccggtttaagtcagcgattcggagcgagtccgagggcgacggaaacgaagcacaaatcaaagctctgcttcagagcatccaatctttcccttctaacttaggtaaataa

SEQ ID NO: 127234 - DNA, 1158 bp, Enterobacter cloacae
atgtctgaactcgctcttattcaaaaagctatcgaagaatcccagcagaaaatgacccagcttttcgatgcgcagaaagcagaaatcgaaagcacgggccaggtttccaaacagttgcagtccgacctgatgaaagtacaggaagagctgaccaaatccggcactcgcctcttcgatctggaacagaaactggcatccggcgctgagaatcctggtgagaagaaatccttctctgaacgggctgctgaagagcttattaagtcatgggacggtaaacagggcaccttcggcgcgaaaacgtttaacaagtcactaggcagtgacgcggattcagctggctcactgatccagccgatgcagatcccaggcatcatcatgccaggcctgcgtcgtcttaccattcgtgatctgctggctcagggccgcacttccagtaacgctctggaatatgtgcgtgaagaggtgtttaccaataacgccgacgtggtggcagagaaagcgctgaagccagaatcggatatcaccttcagcaaacaaaccgcgaacgtgaagaccatcgcgcactgggtgcaggcatcacgtcaggtgatggatgatgcgccaatgcttcagtcctacattaacaaccgcctcatgtacggcctggcactgaaggaagagggccagctgctgaatggcgacggtaccggggataacctggaagggctgaacaaagtggcaaccgcctatgacacctcgctgaatgcctccggcgacacccgcgctgacattatcgctcacgctatttatcaggtgaccgagtctgagttcagcgcttccggtatcgtcctgaacccgcgcgactggcacaacatcgcgttgctgaaagacaatgaaggccgctatatcttcggtggtcctcaggcattcaccagtaacatcatgtggggcctgccagtggttccgactaaggcgcaggccgccggcacctttaccgtaggtggtttcgatatggcatcacaggtctgggatcgcatggatgccaccgtggaagtcagccgtgaagaccgcgataacttcgtgaaaaacatgctgaccatcctgtgcgaagagcgtctggcgctggcgcattatcgcccgacagcaatcatcaagggcaccttctcttctggctcatga

SEQ ID NO: 127235 - DNA, 327 bp, Enterobacter cloacae
atggcgatagatgttctggatgtaatttccctcagtctgtttaagcagcagattgagtttgaggaagacgacagggacgagctgatcacgctgtacgcccaggccgcttttgactactgcatacgctggtgcgatgaaccagcatggaaggttgcggctgatattcctgccgccgttaagggcgccgttctgcttgtctttgctgacatgtttgaacaccggacggcacaaagcgaagtgcaactttatgagaatgcagccgccgaacgcatgatgttcattcatcgcaactggcgcggtaaagccgaatcagaggagggctcctga

SEQ ID NO: 127236 - DNA, 339 bp, Enterobacter cloacae
atggaacctggacgattcaggcacagggtaaaaattctcaccttcacgacttcgcgcgatccatctggtcagccggttgaatcgtggagtggtggcaacccggtcccggctgaggtaaaggggatcagcggcagagagcagatgtctggcggtgcggaaacggcgcaggcaaccgttcgcgtctggatgcgcttcagggctgagctgaatgcctcttctcgtctggaagtgctcagcggcccgtataaaggtcaggtgctaaatatcatcggtcctcctgtagcaaatgcgaccggcactcgcctggaaattctttgcaaaacgggagccgaaaaatga

SEQ ID NO: 127237 - DNA, 450 bp, Enterobacter cloacae
atgattgagacgagcctcgatttttccgggctgaatgacatcgcaaaggatctggaggcgcttagccgcgctgaaaacaacaaggttctgcgtgatgccacgcgcgctggcgccgaagtgcttaaggaagaagtgatcgcccgcgcgccggtgcgcaccgggaaactgaaaaaaaacgtggtggtggtgacccaaaaaagccgccgccgcggggaaatttcttccggcgtccatattcgtggtgttaacccgctcaccgggaacagcgataacacgatgaaggcgagtaacccgagaaacgccttttactggcgattcgttgaaatgggcaccgcgaacatgcctgcacatccgtttgtgcgacccgcttacgatacgcgcgaggaagaggccgccagcgtcgccattgccatgatgaatcaggctattgatgaggtattgagcaagtga

SEQ ID NO: 127238 - DNA, 348 bp, Enterobacter cloacae
gtgaatgaagataatatctacgccttgctttcttccctggcagaaggacgggtatacccctatgttgcgccattaggtagtgacgggaaaccgtctgtctctccaccctggattatcttttccatcgtcgatgatgtttccgctgacgtactgtgtggccaggcagagagcagggtttccgttcaggtcgatgtgtattccacttcgatcgctgaatcacgatccctgagagatttggtgctcgcttcgcttgagccgttaacccctacagaggtggtaaaaatccccgggtacgagccagattatcggctctaccgtgccaccctggattttaaagttaccccctga

SEQ ID NO: 127239 - DNA, 189 bp, Enterobacter cloacae
atggaaccactagtagtagtgtttggaatattcggctggttgataaatctaattgtgattttttatttaatacggtttagcacaagggcaaatgaacaagttgaagcccttaaagagataaataaaaaacaagatgcgcaaatagatttattaatacaagtcgctcacaaaagaaaagacagtttataa

SEQ ID NO: 127240 - DNA, 1947 bp, Enterobacter cloacae
atgttgggtgctggggcgtggtacacgatgtatcaacgccaagaacaagccagggaatctgcaatccaatatgcggacacaatcgagcaggtacgagataatctgaaatcaatgtctcagacgcagatatccgccaaccttggacaggcgaatatttcactggatgctcaaaatagtgcgattgaacagcagaagcagaaagttgctgaattatccaatcaactttataacgcaaaattagcagccaattctgcttcagagggaacatggctgtataacgatgcggttgagaaagcagcagagtttgcttcagaacttgcggttgaagaaggccgacttgagcaaatgctcaataaaagaaagcaaacacaacagttaataaacgacataactgatcaggctataaataaaacagtagaaatggctggcgccgtaagttctcttacagagatgtatgaccgtctgaacaaggtttccagacagtctacagcagtatccccaccaaaatatgcagggcctgtacttcctgcacttgataataagcagcagcaagctatagacaaggcgcagcgacagcttgagttgtccggtcttaagggattggacaaaacccgcaagcaggcggaattcgatgcatctgaccttaatctccctgctggttggcgtgagaagtatgtcagcatggaagttgagtcagccaggcagttgcaagctattcgtgactcaagccgccataagggcgggaaatccgaggcggaaaaaacagctgatgcctatgacaagctgatcaaacagcaaaaagagcagattgccctgcaaggccagaatactgaactggcgaaggttaaataccaggtcagccagggcgaacttgcttctctgacagaagcccagaaaaagacggtattgcagaatgctgcgctgattgaccaggttaaattacgtgagcaactgcgaaattacgaagccaaccttgccgacagtaacgccagcgcccgcgcagccaatgaagcgcaactgctgggatacgggcagggaaccaggttccgtgaaagacttcaggagcagttcaatctgcgtaaggagtttgagcagaagaataccgatcttctccgccagcgtcaggctggtgaaatcgacgagacgttctatcagcaggggctggcacttaataagcgctacctcgaagagcgcctgcgcgaccaggagggatattacgcagcttctgatgcgcagcgtgacgactggatgacgggactgtctgagggttatgcgaactgggtggacgaagctactgattattcttccatggccgctgacggcatgaagcaggccatgggtggcgcggtcaccacgatcaccgacatgctcaatggcaacgttgacagctggaaggactggggcgtgagcgtactgaagattatccagaacgttctggtgaacatggctgttgctaatggcgtaagctcaattggatcactgttcagttttggtgcctcgtcagccgcaaccgccagcagcggtaccgctattcagaatgctggcgcgaacttcacatttaatgcgaagggtaatgtgtacgactctccgtccctgagcgcttacagcaatggcgtttttcagacgcctcagctgtttgcttttgctaaaggcgcaggggtttttgccgaggctggtccggaggcaatcatgccgctgacccgcgcaccggatggttcactcggtgttcgtgcggtcggcgcaggtggtggtcagtctgtatcttcggcgccacaggtttatatcaccatcgatagcaacggaaacactcaaactcaggcgacaactggctatgagcaatttgcgcgggaagttggtgcttttacagataagcgttacagggaactgataatgagagatttagcgccaggaggcgctatctggaatatggctaaaggggggcgctga

SEQ ID NO: 127241 - DNA, 225 bp, Enterobacter cloacae
ttgaataccagaacccagcagtggacgctcaactttactggcaacgaaacctatatttccgccattaaatcttttctcgacaggcatgaagggacgaaagcctttcagtggaagccaccgctcgaacctttgggtttgtatcgttgcgaaacgtataaacccaccgggctcggcgcggggaaattcaaccttgaagcaacattcatccaggcatttaaaccatga

SEQ ID NO: 127242 - DNA, 759 bp, Enterobacter cloacae
atgagcttaaacgcagactatcagaagctggaatcagggaacgacgttcgcctgattgaggtggacggttcttcttttggactgacggacgttctccggtttcacaattacaacattccccacaccgaagcggaaatagtcgccgctggcggggatgaggccaagctcccggcgaaaccaatctggtggcagggtaatgaatattccgcctggccgtatcagctggaagggctggagaaatcgaccagtggcagcaatgcgacgccatcactgacggtcgcgaacatcgaaagctctatttctgccctgtgtcttgcgtacgacgatttgctacaggctaaggtcactattcacgacacaaaggcaaaatatctcgatgcgaaaaacttcgcaggcggtaaccctacagcagatccgactcaggagaaaattcaggtctggtatatcgacgggaaaacgaccgagcttgccggcgaaaccatcgagtttgtactgtccagccctatggatcttcaggggcaaatgatccccacgcggcagcttcattccctgtgcacatggtgcattcgtaataagtaccgcaccggcgacggctgcgactatgccggtacgcgctatttcgacaaaaacaacaacccggtaagcgatccgtcactggatgaatgcaacggcacactgacggcctgcaaacttcggttcggtgaaagcaacgaactctcgtttggtgggttcccgggtacgtcgctgatcaggagttga

SEQ ID NO: 127243 - DNA, 711 bp, Enterobacter cloacae
atgcgtcagaaaaccattgatgcgattatggcgcatgcagccgctgaacatccacgtgagtgctgtggtgtggtggcgcagaaaagccgcgttgaacgttattttccttgccggaatcttgccgcggcgccggaggacaattttgtcctttgccctgaagattacgcagccgctgaggactggggtacggtaatcgccatcgttcacagccaccctgacgccactacgcagccgagcgaactggataaagcgcaatgcgacgcaacgcttttaccctggcatatcgtgagctggcccgagggggatttacgcaccattcagccgcgcggagagttgccactgctggagcgcccgtttgtgcttgggcacttcgactgctgggggctggtaatgagctatttccgacaaacgcatggtatcgaacttcacgattaccgggttgattatccctggtgggaaaacgactacccggacaacttctatcaggattgctggtacgagtgcgggttccgtgaattcgacgggccgccgaaacctggcgatatggtgatcatgcaggtgcaggctgataagtggaaccacgcgggtatcctgctggagggcaatatgctgctgcaccacctgtacggtcacctgagtcagcgcgtgccgtatggtggatactggcaggaacgaacgatgaagattctccgttacaaatctctgtgctaa

SEQ ID NO: 127244 - DNA, 171 bp, Enterobacter cloacae
atgagccagcgtcaaatacttttcaatcaaagaaaaaaattgatgcggtatctgaatgtatacttgttggctggcaagaagaaagccaaaaatacggaagcgtttttattcagccttatgacggtggcaaaactgtttttacacagtctcaacttgagatggttgatttaa

SEQ ID NO: 127245 - DNA, 594 bp, Enterobacter cloacae
atgacaacaattcagctcggcggagtattaggaaagaccttcggcaaaacacataaacgactaatatcccgaactggtgaagcagctattgctttaagtaaaacattacccggtttcgaaagcttcatgatcagcagtaggcgtcgtggattaacgttcgcagtatttaaaggaaaaaggaatattgccgccgatgagatgggttttccgtgtgaaggcgacgtagtaaggatcatgccagttgttatcggtagtaagcgcgctggtctttttcagaccatattaggagcagttttaatagccgcggctgtctttgtttctggtggtgttggcgctgctttcgctgctggtggcttgacagggtttactgctgccaccggtgcctccttggttctcggtggagttattcagcttctttcaccccagccatccggcatagccagcaaacaaagcgcagataaccgtgcatcgtatgcattcggtggggtgactaacaccgccgcgcagggttacccggttccgctcctgtacggccgccggagaatcggcggggcaattatttctgccggaatttatgtcgaagatcagcagtag

SEQ ID NO: 127246 - DNA, 1698 bp, Enterobacter cloacae
atggaaaataatgtgaacgcaaaaattaaaaaacttatcaatcatatttacggtgaatcattttcagatgcacaccttaacgtgttattaactaagcttgaaaaggcggcggttaatattacggaaaagcgtaagtcaggctgggatgaaaaagacgttgtgctgattacctatgccgatcagttttccgcgaaaggggagaaagcgttgccggtatttacccgtttctataatgaatggctttctcgcacgttttctcatgtccatctgttaccgttttatccgtggtcgtcggatgatggattttccgttattgattatcacgaagttgcacctgaaaccggaacctggcgagatgtcgcggaattaaaacagtctgccagcttaatgtttgacttcgtttgcaaccatatgtcagcgaaaagcgaatggtttgctaattatctggcgcagaagccgggctacgaagatttctttatttctgtcgatcccgaaaccgatttatcggcggtgacgcgtccccgcgcattaccgctgctgacgccgtttacgcttaatgatggcagcgttcgtcatctgtggaccacattcagcgatgaccagatcgatctcaatttcgcctcgccgcaggtgctgattgccatggttgacgttctgctccattacctcatggaaggggcgcgttatatccgtctggatgcggtcgggtttatgtggaagatcccgggaaccacctgtatccatctggaacaaacccattgccttatccagctgttccgcgccattatggacgccgtggcgcctggaacggtgatcatcactgagacaaatgttccccacaaagacaatatctcttacttcggtgatggtgaaaatgaagcccagatggtctatcagttttccttaccgccgctggtgctgcacgccgttcatcgtcaggatgttaaagccttgtgccagtgggcgggctcgctggcgctgccttcaacttacaccacttggtttaatttcctggcttcacatgatggtatcggattgaacccgttacgcggcatccttccggaatcagagatcctctcgctggtcgaaaagcttcagcaggaaggcgcgctggtcaactggaaaaataatcctgacggaacgcgaagcccctatgaaattaatgtcacctatcttgatgcgttgagtttgcgagacagctcagatgatgagcgcattgcgcggttcatcctggcgcatgctgtgttgttaagttttcctggcgtaccggctgtatatattcaaagcattcttggttcgcgtaacgattatgaaggtgtcgaacgtctcggatataatcgcgcgataaacaggaagaaatacaccgcaggtcaggttgatcgggagcttaataataataagagtatacgttatcagatttattctcgtttgagtgagcttattgctattcgtcgcggcgagcgtgcgttccatccggatagtcaggctatttttgacgcaatcggtgaacatattcttaaaattgttcgtgttgctgaaaatggcgagcgaatgacagcattatttaattttagcaataaaatgcagaccgtttatggacaaacgctctttggtagggaattactctcaggacaagatattagcggtacggaactgaccctcaatccatggcaggtaatgtggattaaagaaaactaa

SEQ ID NO: 127247 - DNA, 2256 bp, Enterobacter cloacae
atggcgctttccaatactgctcagccaattaacacgtcgctgcgtaaaatcgcggtcgtcgtagccacagcggttgccggcatgtctgcttatgctcatgccgccgaaaccccgaaaaaagaagaaaccattactgttactgccgcaccggctgcgcaggagagtgcctgggggcctgcggcgacgattgctgcaaggcaatccgcaaccgggacaaaaactgacacccctatacagaaagttccacagtcaatttctgtggtaacggccgaagagatggcgctgcatcagcctcgctcggtgaaagaagctctgagctacaccccgggcgttgcggtaggcacgcgcggagcgtccaacacctatgactatctggtgattcgtggttttgctgccgatggtcagagccagaataactacctcgacggtatgaagatgcagggcaacttctataacgacgcggtgattgacccttatatgctggagcgcgctgaaatcatgcgtggtcctgtttccgttctgtacggaaaaagcagccctggcggcctgctgaacatggtgagtaagcgcccaacaaccgagccgctgaaagagatccagttcaaagtgggtaccgatagcctgttccagaccggctttgattttagcgatgcaatcgacgatgacggcgtttactcgtaccgtctgacgggcgttgcgcgttcgaacaattcgcagcaggaggataaaggcgagcagcgttatgccatcgcaccatcgttctcatggcgtccggatgataaaaccactttcacgttcctctcttacttccagaacgagcctgaaacgggctactacggctggctgccaaaagagggaacggttgatccgctgccgaacggcgatcgtctgccaactaacttcaacgaaggcgcgaagaataatacttattcccgtaaccagaaaatggtgggatacagcttcgaccacgaatttaacgatacctttaccgtgcgccagaacctgcgttatgcgcagaacaaaacctcgcaaaacagcgtttacggctacggtatgtgttccgatccgctctattcgagtaatcctgcatccagcccttgcgcgagcgttcctcagtcgcagtgggggcatacgctgactcgccagtatgtaattgataacgagaagctggaaaacttcactgttgacacgcagttgcagagcaagttcgcgacgggttctgtcgagcatactctgctaactggcgttgatttcatgcgcatgcgtaatgacattgactcgtggttcggctatgccggctccgttgcaccatctgatatctataacctcgatcgtagtgacttcgatttcggttctcatcctggaccgtcaggcgcttatcaggtactgaacaaacaaaagcagaccggtatttatgcccaggatcagatcgagtgggataaagtcctggtgacgctgggcggtcgttatgactgggccgatcaggaatcatacaaccgagttttgaacaccacctccgagcgtgatgacactcagttcacctggcgtggcggtgttaactacctgtttgataacggtattacaccgtactttagctatagcgagtcgtttgaaccggcttctcagaccggagcgaacggcaacgtctttgcaccgtctaaaggcaagcagtacgaagcgggcgtgaaatatgtgccgaacgatcgtcctatcgtcattactggtgcggtgtatcagctaaccaaaaccaacaacctgatggctgaccctgcgggttcattcttctcggttgaaggcggcgaaatccgtgcgcgtggtgttgaactggaagcgaaagcggcactgtctgcgagcgtgaacgttgtgggttcctatacctacactgatgcggaatacaccactgataccaactacaaaggcaacacgccagcccaggtgcctaagcacatggcatccgtctggggtgattacaccatgtttgatggcccgctgtctggcctgacgctgggtacaggtgtccgatataccggctccagtaaaggtgacccggcgaactccttcaccgtggggagctacaccctggtcgatgccctggtcagatacgacctggcgcgcgtgggcatggcaggttccaacattgcgcttcacgtgaacaacttgttcgaccgtgagtatgttgccagctgctttaacacctatggctgcttctggggtgctgaacgccaggttgttgccaccgcgaccttccgcttctaa

SEQ ID NO: 127248 - DNA, 591 bp, Enterobacter cloacae
atgacacttcactactatcagaatcacgcacaggatttcttcgatggcacggttaatgtcgatatgaccccgctttacgaggccttcacccaacatctgcctaacggtggccgtgttctggatgcgggctgcggttcaggacgagacgcaaaagcatttcatgagatggggtatcaggtggatgcttttgatgcctcttccgctatggtggagctggcaaggcaacataccgggttacccgtgcaactgatgacgttttcagagatcgacggtaaagcgcagtacgatgggatctggtgttgtgcatctttgctgcatgtcccctcttctgagttgcctaaagtgatgcagaagattgcggatgcgcttaagcctggcggcgtttggtacgtatcttttaagtatggcaacggtgaacgggtacagggtgaacgacggtttacggacctggatgaagaggggctgcggatgggaataagtaatataacagatgtggcgataacttcgctttgggttacgcaggattatcggcatgaaagaagtgagagatggttaaatgggatattacataaaaaaaacactattttttag

SEQ ID NO: 127249 - DNA, 3297 bp, Enterobacter cloacae
ttggttcaatcagaatgcatttcatggacaaaatgtacttcatggctaacaaactttcttagtcgtagaggattgagacaacccgatggtcgcccgctttatgaatatcaagcgacgaatgaagaatatgtggacttaacgcagttacttcgagcggttagccaaactacaaatattgttgatgataaaggctatgcttcctgttttgtgtttttttgctctgaatggtaccgcagagactatgagcggaattgtgggtggacttgggagcccatttataaaaagctaggtacatcgttaacggcgacggaactaaggcatatcgttcctaaagggatggagagttactggatgcgaccaattcgattttatgaatcggatagacgtaactttctaggaacgttgttcagtgagggtggtctaccttttcgtttactgaaggaatcagatagtagttttcaaaccgtattttcccggatccttaatcagtatgaacaagctcagatagcaggtttttccatgctttcgctggtaagaaacattatagaaagatcttcgcttccagctgtttttattgaagacacatcagtagagctcatcagtcatatggcagaaaaactcagctcattggtactgatgtataatctaagcgatgattctgaaccagtagcgcagcttgataaaacgcatccaaaatggcgggatgaattccctatgccacttgatgatgaaacaggcacccgctttctaaatggattgttacgtactgcatctatagaaacaaaaccccgttcaaaaaaaaataaatgtaccggttttcagttcttttggacagaaaaatcgccggatcaaatacgtgcgatagtttcgttaccagatgaactctcttttccaattattagtgaaccttcaactacacgatttgaacttgctatttacgaaggcattaacgaagttgcaagccttggtgtagtctatgcgtccctcgaaaaatcacatgccagaattcgcatccgtaaaaatgaatcacgatttgccagacatgccccttctgcgagtttatcgttagttgctcgggcaggcggaatgaatgttggcgcaataaaactggatgatagcgaaatcgccattggtgaggttccacttacttttgttgctgaaggagaacgatggctattacaagggcaagcttcgtgcaatgttcgtaacagcgatgttcttattgttctacctcgagataagacaactgtttcaggatatgaaacgactttgaatacaatttcagtcttaggcttcgaaacactctccgtaaaaggttgccatgaattaattatttccggagatgaaatatatcgtatacgcactgggaaagaacagactaaccctggtggggttgagttttatggtaaaagagtaaattgggtatgcaaccctactgaaacattccttggggtccctaaagtcacctcgaaaaatcctgatgtaaaacatatccaatttaaaccttattttaatagtaaatcaatcgaagaatgccagttacaagagatgatgggatctcaatttgtttccgtcaggaatagtgataatgagacgatactccgtcgaaaaattggaatattaccggcagactttaatgttgagattcacggtggcgatcaggctaatgaaggtaccattgtcatctcaacgcaacatccctgcatgtctgtcttaaaaaataaaacattcgagattgcgcgaaagcgcgcagcaggacgcaccgagatattactcaaagccgaaggcatccctcccgcctttatctctctggaaatttatcctaatttgggggctgactcaattgaattgactttaccttatcctgctaaaggttgtttggtttttgatgcaaatggagaccttcttgataaaaatatcactttgcatgatttacttggttcaagagcctacttgtttggtaaaaatggtgaaccgactcgattttcactggaattacatctacgcactataaatggtcaacaggcatggcatgaatggttttatacggcagtagaacgccctattgaactcaatttatacagtctaagagaacatattgaaaatttgctatctcttgaatcaggaattgaccaggttgtggatatgcgaatcagaggtgctggcgtagcgatgagctggcagattcggcgctacaaatacagtttgcgttatgattatgaaaaagaagttctcaccagccagtcgacaagctatcgtgccgggcaactcccttctcccgtcatcatgttattgagcgagccagagcgaaaagcagtctcgttgtcatcgaggctaagtgagggtgtacctgttggtgaatatgaactgagttcaatcgttagcaaaaacgggccttggctagtagtcccaaaggaaggtgatgaaatggcgtttcgtccatgcttcattcgtggcgaatcttccttacatggcgatgaaagtagcgttcgttcacttcagaaagccacccaactttttaatccccaggcaaaagtgaataccataacgctggtgcttgatcagatggctaccgatcctgcgcactccggttggcagtttatgcacagtctttatgaacattttggctatcttccgctggctacatttgaagtatggcgagcactcgtacaacatccaagagcgctggcgatgtctctcttcaaatttgaaatgtccgccgagtatttaaaccgcattgagaatgaattccctgttttttgggagtttttccctatattagaaatcaaatccgcagcagaaaccttcaaacgattcctgacccaaaaaggggcacaagatgaagttttggtaacactgctgagtaagatgtatcgacaattagggatcgtatttccaacttatgccgatgaaattgaaaaatggttaagttatgggaaatttcctcctcccattccaacatcctttgtccgtgagtggtatcaggagcttttacgcgaacacagtgaagctcggtggccagaatatggctgtaagcgactgcataactggatgtcatcacaaacagatgtagtgatagatatttatcccgaggctgattatcgctattcagttgcctggttacctgttttcgcggctgcagtggcaagcggtaaaacttcctttgaaactgtgtttgaacacaaacctggcgccgtatttttcctgagacaagtccgggacttcgattctcgctggttcaaggccatattccagtgcagccttctgcgttatatttcaaaaaataaaaaggattaa

SEQ ID NO: 127250 - DNA, 6321 bp, Enterobacter cloacae
atgactacacgctttttttcgtcgcttattgaacaatcgttgtctcgctcaaccgaagcaacgctcagtattatggggatcacaaacccgaacttacgcaagcatctcgcagagcaaatgggtgccgattgtgggaaatcaggctcatttcttgcctcaccagtattccagcaaatgtttggctggaaagagtcaaattatacaatgcgcaacctgaccgaaggtaaggcattactgagtaaagctgttgttgattcactagatgatcataacaacggtcgttaccgttttggtgcagactggaaacccttcactcaccagctagccagttggaaggctttactggaagataaacattcggtagtggtgacaagtggtacggggtcaggcaaaacggaatgttttatggttcctgtgctggaagacctctacagagaattacatgaaaatagcaacaacccacttgtcggcgtcagggcccttttcctctaccccctcaatgccctaattaattcacagcgggagcgcctggatgcgtggacacgtggatttggtactgggatccgttactgtctttataatggcaatacagaaaatcttcacgcttcggtaaaaagcgagcaggcaaaaaggccaaatgaagtgctttcacgcgaaaagatgcgtgaagaacccgcaccaattctggtaacaaacggcacgatgctggaatatatgatggtccgccagattgatgctccaattattcaacagtctaaagcacaaaaatcattacgctggatagtactggatgaagcgcatacctatgtcggatcgcaggccgctgaattagctctgcagttacgccgcgtaatgacggcctttggcgtgacgccagacgatgtgcgtttcgtggcaacctctgcaactattgccggaagcgatgccgaaaaacaactgaaaaaattcctctctgaattatccggtataccgcaggagcgcatcgacgtactggacggaagccgggtgattccgaaactggcatcatgcaaacacgtttatattcctttagaagaaattgaacaaatccctgatacagacatgaagggcgtaagccctgagcgctttgaagctcttacgcattcacctgaagcacattacttgcgtgagatgttagttactcagccggatccaatgaagctggatacgatgacgaagcggttgaatacgctgaccaagcagaattatagccagcaggaagtacttcgctggatcgacgtctgctctggtacacaacctaatcctaaagatccggcattcctgaagataagagcgcatattttccagcgcaatacccagggagtatgggcttgtgttgataaagagtgcagacaaaagcatggcactccgctggaaaagggctggccctttggttatgtgtatgtgaatcaacggcaaaattgcgaatgcgggagcccggtctacgaactggcattctgcaatgaatgtaacgaaccgcatcttctggcccgggataaaaatggcaaacttgtccaatgggaaaataaaggtggcgatgaattctctttgcaggatgaggtgaatgttgaaaacgtcgctactgaagaaaaagttgagaaagaaagtagttaccgccctccacttattattgcggcagaaaaggccagtgaaactggttatatcctacagcgactcgatcgcaagactcgtcgtattggtgtagttaataatgaaagtattgaactgattattaacgatattgaacaggtatgtagtgccagtggctgcggctacagaggcacgagtggaaaacaacctttccgccgcgcattgttgggtggaccgttttatgtcaccaatattgtgccaaccgttctggagtattgtcaggactttgtcagcgaagatggaaaggagggagtggggcctgattcactgccaggtagaggccgccgtctcattaccttcaccgacagccgccagggaacagcgcgcatggcggtacgcatgcagcaagaagctgaacgcagtcgcttacgtggcagcgtagtagaaatattgggctggcatcaacgaaaacagacttccaccacaccaaatgccaatacagatcttgaaaagttagcagcgttggcaaaacaggcacgcgaacaggccgatgaatttagaagctggggattacctgaacaagcgaagctggcagaagtacaggccgagcagcttgaacaagcttttcaggctgcgaccggaggtaacgtagcgaccattctcatttcccgaacctggacagaaatagttaatgagcttagagagaaagccgatattagcggccctattctgcaatataatcactatctgaagcctgaaattttcaacgaaaacggcgggccgctgaagctatcggaaatgttgcttttccgggagtttatgcgtcgtcctaaacgaactaacagcctggaaacgcaagggctggtgcgggttggttatcaggggctagagaagattcataagatgccgatgcattggcatgagcaagggctgacgctggatgactggaaagattttcttaaggttactctggatctgtacgtacgtgaaagcaacttcacacaactggacgatgagttaaaaaactggattggtagtcgtttttcgtcaaaattcgtccgtaacccggaaacaaaagatcctgaagataatcagaacagacgctggccacaaattcgtaatggcaatttgtcccatcgtttggtgaagttattaatgcttggtgcgggattgaaaaaagtaaatacggcgacgattgatattatcaatacatggttaaaagaagcatggaaccagcttaccgggtcacttgccgtactgaagcctgatggtaaccgtttctatttgccgaaagagcatttgaccttctctttaataacggatgcctggatttgtccggtcaccaataaaattctggacactgcttttaaagggttaaccccatatctacccactcacatttcctttgaacaactcacccagacgcaatatgacgcatttgtcgcgcaaaaggtcaccatgccagagatctggaaggtggatcgctcacaagaagactacgctccgggtttggctaaagtacgtgactgggtcagcaacgagccgctgatcgcacaattgcgttcggaaaatgtctggacggatatcaacgatcgtgtcgtagaaggtggcttctactaccgcactgccgagcactctgcccagcagtcttcagaacgcctgcaaagctacgaaaagatgtttaagaacgggcagcttaatgttctcaactgttccaccaccatggaaatgggggttgatatcggtggcattaccgccgtggtgatgaacaacgtaccgccgcatccggcaaattatttacagcgagccgggcgagccggacgtagcaaggaatcgcgcgcgatatcttacacattgtgtaaaggtaacccgcacgatcaacaggtatttgccaacccgctctggccgtttgaaacgatgatccctgcaccgatggtggcgatgaactcagcccggctggtgcaacgccacgtcaatgcgttattgctctctgactttttatgtcacgttattggcgaaacggacaaagaaaaaaccagcctcgacagcctctggtttttcggtgatgacgaagatcaatcaaaatgtgaacgctttaaagtctggcttgaacgccccgagcttgatattgacgcggcgctggaaaggctggtaaaaggcacggcgctgcatggcgccagctcccacaaattgcgagagaaaacagttgatgcgattactcttctgcaacagagatggctttccgtctatcgcgatcttgttgcacaggaacgcgaatcgctgccgcaaacgccttatcgcaagcgcatagaactggaaaaaaaacgacattgcggcgaatatctactgcgcgatctggcggccagaaccttccttcccggatacggcttcccaacggatgtggtgacgtttgataacttcacaatggaagactatattcgcgaaaaatcgcagaaaagccgggataaaaaagatcgcgaagataacgtgtcgcgttataaagggctcccctcccgcaaccttggggttgctatccgtgaatatgcaccaggtgcagaaattattcttgatggtagggtcttccgttctgccggtgtctccctgcactggcacaatattaatgccgatacgaatgaagcgcagcgtctggattgcgcctggcgctgccacaaatgcgggaccatcggctatgaagagggaatgagcagttccggggtattatgctgtaccaacagcacctgtggtgaaaaaatcatcatggataatcgccgtcaggtgctgcagcctgccgggtttgtaaccgatgcgcatgcgccggtgacaaacaacattgaaaccatgaaatttatcccggttgtccctgcctgggtgtttgttaaagcggaacccgtaccactgcctaacccgacaatggggtatatgacgtctggtgctgatggtcatgttttccagcaaagtctcggagaaggtggtcatggttacgcattatgcctgagctgtgggcgtgcggagtcgatgctgaatgaaaatgatgcaccgagaagtatggaagctcactacccacctcgtccaggaaaagcggaccgcgatagccaaaatcagcggctgatttgccccggttcgacggcactgatgaaaaacgtcacgctgggggcattagcacgaacagatgtatttgaaatggttctgcggaagccacaaaacggtgaatacctcccggataatacagaagaaggtcggcttgtcgccatgactctggcggttgccctgcgtcaggcgctggcgggtgtattgggtatttctgctgcagaactgggctacgctgtgcgtccggtcaggctggaagatggacaatcggtattagccgttcaactttacgatgtgattagcggtggcgcaggttttgcgtccagtgctccattacacattgagaccattctgctggggatggtgaaacagctgggctgcaaccattgtgataccgcatgcagtgaatgtttgctcgattcccaaacccgccacgatcatgacctgctggatcgtaaagcggcgctgacctggcttggggatgacttcagtttctacattggtttaccagatgaagagacattctcgctaccagatgcccgatattgcccgggaccgattagcgatacccttcgtcgggcgattaacgagggagctgaaaaactcacactgtggatgaatgggccactcaatgaatgggatctttatgcccgtcaattccgggcggcgattcagaactaccggattaaagacaatgttgcggtcgaccttgtcattcctgctggcgtcgatgatccggagttgttgcacgaactttcgcagtttactgctttgggcgtgcgtttgtgtcatagcgaacagattctggaattgccgattgttgcgcaaatcgcctttgccgatcgcataatgacgctggcttcacgcagccagcaggcaactatcccgggtccaggctggcaccttaatgacgaactggtcgttcgcagcctcggctataaaacggtaaaactgaacgagtttgttttgccggggaaagcagcgaacgctgttgagcgtgtcaaagacatagagattcataaacagttaaatggtgcactttcgcagttcggacaacgcttctgggacacgctgtttaacagccatgaagaagcacaatcgctgatgaaaaaccagcgaatcaccagcgttcactataccgatcgctatctgcaaaacccggttgcgctggcactgctgggggcgatactgaaaccgctaaaaacaaagctgaccgatgacgcggagcttgagcttgatactctgtttaagcccaaggatcgtcccggcaaccggccgttccatgactggatgagcgatgcggattttcaggatttcgccgaccagtggtttactgcggcaatgggcagagcggtagaactgacggtgttcgattcgccacgtgatattccacatcatcgtaagctgacggtgacctttgaagatggtcagacgttgaagattcgattcgaccagggaatgggatactggcgtatcgacttcccgtatgtatggcgtaattttgactttgccgaagatgtgacttatcagctagtaaaactggcgcaagcctgccaggagggcaaagtccttaatagcgaggaaagctgggcaacggatgtgctgatagaggtgatgccgtcttaa

SEQ ID NO: 127251 - DNA, 1473 bp, Enterobacter cloacae
atgagtacggggaaatttccggaggggtgggttagcccccaactggatgagatcgctactgatattaattatggttataccgcttcatcaacatctgaaaatatcggtcctaaaatgctgcgtataaccgatattcaagataataaagtggactggaactcagtacccttttgtaagattgaggataatcaaaaagataaatatttactttgtaacggcgatcttgtattcgcacgaacaggggctactgttggtaaaagtttcttaattaatgaagatatatcgaacactgtatttgcatcttatttaataagagttagatgtaacaaaaaaataagtagccattatctttcttattttttccgatcgcctacgtactggagtcaaataacggagtttagtgcagggattgggcagccaaatgtcaatggttccaaacttaaaaaattaaatttaccgttagcgtctgtctatgaacaaaaaatcatcgccgaaaaactcgatacacttctggcgcaggtagacagtaccaaggcacgtcttgagcaaatcccacaaatcctgaaacgttttcgtcaggcggtgatgaaactcgcgataacaggtgagctaacatcagaataccgcaataattttcctactaatctagttcaagaaatcgcgggtattgtcgaaaaagaacggatagaaaagaagataaaaaacagtaaattatcgaaagaaccataccctgcaaagataccatttttgataccaaaaagttggcaatggtacagactgggtcatatcagtttaaaaataacagatggagctcataacactcctaaagtgttaagtgaaggctacccatacattatggctaaagacctaacaaaaggtaagctcgatttttctgaggaaagatttatttcagaaaaagaccataaagaactttattttaaatgtgccccagaagtaggtgatcttcttgttgttaacatcggggctggaacagggaacaatgttttaatagacagcgacattgagttcagttttaaaaacatcgcgataataaaaaaatccaaactgataacaccaacttatctaaagattttctttgattctcaaagaaatagaatattcaatgagcagacaaagggaggagcgcagccttttcttagtttatctgtattaaacgatattccttttgccctccctcctttacccgaacaacacgaaatcgtccgccgcgtcgaacaactcttcgcttacgccgacaccatcgaaaagcaggtcaacaacgccctgacccgcgtcaacagcctcacccagtcaatcctggcgaaggccttccgcggcgagcttaccgcccagtggcgtgctgacaacccaagtcttatcagcggagaaaacagcgctgccgccctgctggaaaggattaaagccgaacgcgcggccagcagcggtaaaaaaaactcgcgtaaaaaagcgtaa

SEQ ID NO: 127252 - DNA, 1590 bp, Enterobacter cloacae
atgaacaataacgatctggtcgccaagctgtggaaattgtgcgacaacctgcgcgacggcggcgtctcctatcaaaactacgtcaatgaactcgcctcgcttctgtttttgaaaatgtgcaaagagaccggtcaggaagcagactacctgccggaaggctaccgctgggatgacctgaaatcgcgcattggccaggatcagatgcagttctaccgtaacctgctggtccagttaggcgctgatgagaaaaagctggtgcagtcggtgttccataatgtcagcaccaccattgagcagcccaaacagctgactgagctggtcagctatatggatgcactggactggtacaatggcaatcacgggaagtcccgcgacgacttcggcgatatgtacgaagggctgctgcaaaagaacgccaacgaaaccaaatccggcgcgggtcagtacttcaccccgcgtccgctgatcaaaagcattatccatctgctgaagccgcagccgcgtgaagtggtgcaggatccggccgccgggaccgcaggctttttgattgaagccgaccgttacgtgaaatcacagactaacgatctggatgaccttgatggcgacacccaggatttccagatccaccgcgcgtttatcggcctcgaactggtgcccggcacccgtcgtctggcgctgatgaactgtctgctgcacgatattgaaggcaacctcgaccacggcggcgccatccgtctgggcaacacgctgggcagcgacggcgagaatttaccgcaggccgatatcgtcgccaccaacccaccgtttggcagcgccgcgggcaccaacattacccgcaccttcgtgcaccccaccagcaacaaacagctgtgctttatgcagcatattatcgaaacactgcgccccggcggccgtgcggcggtagtcgtgccggataatgtcctgtttgaaggtggtaagggcacggatattcgtcgcgacctgatggacaaatgccatctgcacaccatcctgcgtctgccgaccggcatcttttacgctcagggcgtcaaaaccaacgtgctgttctttaccaaaggcacggtagccaatccgaatcaggataaaaactgcaccgacgacgtgtgggtgtatgacctgcggaccaatatgccgagcttcggcaagcgcacgccgtttaccgagcagcatctgcagccgtttgaaaccgtctacggtgaagatccgcacggcttaagcccgcgtaccgagggtgagtggagctttaacgctgaagagagcgaagtcgctgacagtgaagagaacaaaaacgccgatcagcaccaggccaccagccgctggcgcaagttcagccgcgagtggatccgcacggcgaaatccgattcactggatatctcctggctgaaggataaggacagcatcgacgccgacagcttgccggagccggatgtgctggcggcagaggcgatgggtgagctggtgcaggcgctgggcgaactggatgcgctgatgcgcgagctgggggctgacgaggaagccgataagcaacgtcagttgctgaatgctgaatttggtgaggtgaaggaatga

SEQ ID NO: 127253 - DNA, 3513 bp, Enterobacter cloacae
atgatgaataaatccaattttgagttcctgaagggcgtgaacgatttcacctatgccatcgcttgcgcggcggaaaataactacccggatgaacccaatacggcgctggtaaaaatgcgtatgtttggggaagcgacggcaaaacatcttggcctgctgctggatattcctccctgtgaaaatcagcacgaactcctgcgtgagcttggcaaaattgccttcgttgacgacagcattctttccgtgttccataaattacgtcgtattggtaaccaggctgtccacgaataccataacgatcttgatgatgctcagatgtgcttaaggctgggctttcggctgggggtctggtactaccgtttggttacgaaagattatgacttccctgtgcctgtttttgttttaccggagcgcggagaaaatctttaccgtcaggaagtactgacgttaaaacaaaagctagaagagcagtcacgtgagaaagcactcagtcaggctgaactcgaagcacagcagcagaaactgattgctctgaacggctatattgccattcttgaaggtaagcagcaggaaactgaagcacagacattggctcgtttctcagcactggaagcgcagttagctgagaaaaatgcgaagctggccaagctcacggaacaggaaagaaaatcctaccataaagaaattaccgaccaggccgtcaagcgtacactgaatctcagtgaagaggagagtcgcttcctgattgacgctcagttacgtaaagcgggttggcaggcggatagtaaaatgctgcgctttgccaaaggtgctcgcccggaaccgggtattaataaagcgattgccgaatggcctacgggcgtagatgaaacgggtaagcaaggatttgcggattatgttctgttcgtgggccttaagcctatcgcagtggtcgaagcaaaacgtaaaaatattgatgttcccggcaagctgaatgaggcttatcgatacagtaaatatttcgataatgcgtttttgcgcgatacgcttctggagcaatttacccccgacgatatacacgaaaccctaccggtttacgaaatcagctggcaagataccagcggcacacagcgttttaaaatccccttttgctactccaccaacgggcgtgaataccgcgcggcaatgaagaccaaaagcggtatctggtatcgtgacgtccgccacaccaccaatatgtcgaaagcgctgccggaatggcatcgcccggaagagctgctggatatgctgggcagcgacccgcagaaacagaatcagtggtttgccgataaccccggaatgagcgaactgggcctgcgttattaccaggaggatgccgttcgcgcggtagagaaggccattgtcaacggccaacaagagatcctactggcgatggcgactggtactggtaaaacccgtaccgctatcgccctgatgttccgtctgatccagtcgcagcgtttcaaacgcgtcctgtttctggtcgaccgacgctcgcttggcgagcaggcgctggggtcgtttgaagacacacgaattaacggcgacacctttaacagtatttttgatatcaaaggcttgaccgacaaattcccggaagacagcaccaaaattcacgtcgctacggttcagtctctggtcaagcgtacgttgcaatccgatgaaccgatgccggttggccgctacgactgtatcgtggtcgacgaagcacaccgcggctacattcttgataaagagcagaccgaaggcgagctgcagttccgtagccagctggattacgtttccgcctaccgtcgcattctcgaccacttcgacgcggtaaaaattgccctgaccgccacgccagccctgcacacggttgatattttcggcgaaccagtttaccgctacacctaccgtacggcggtgatcgacggctacctgatcgatcaggaaccgcccattcagatcgttacccgcaacgcgcaagatggggtctatctttccgagggcgaacaggtggaacgcctgaacacgcaaggcgagctgatcaacgacacgctggctgacgatcaggattttgaggttgccgattttaaccgcggcctggtgatccctgcgtttaaccgtgcggtatgcggtgagctcaccaaatacctggatcccaccggacagcaaaaaacgctggtgttctgcgtcaccaacgcccatgccgacatggtggttgacgagctgcgcaccgcgtttaagaaaaagtatccgcagcttgaacacgacgccattatcaagatcaccggtgatgccgataaagacgcgaagaaagtgcaaagcatgatcgtccgcttcaacaaagagcggttgcccaatattgtggttaccgtcgatctgttgaccaccggcgtggatattccttcaatctgtaatattgtgttcctgcgcaaagtcaaaagccgcattctatacgagcagatgaagggtcgtgccacgcgtctgtgcccgtcggtggggaaaaccagctttaagattttcgactgtgttgatatctacagctcgctggaaagcgtcgataccatgcgcccggtggttgtgcgtccacaggtggaactgcaaacgctggtcaatgaaattaccgactcagaaacctacaaaaccattgaagcggatggccgcagttttgccgagcacagccatgaacagctggtcgccaagctgcagagaatcattggcctcgccacttataatcgcgatcgcagcgaagcggtggataagcaggtccgccgtctggatgaactgtgcatggatgccgcaggcgtaaacttcggtggcctggcttcgcgcctgcgggaaaaaggaccgcactggagcgccgagattttcaataagctccccggctttatcgcccgcctcgaaaagctgaaaaccaatatcaacgccctgcgcgatgcccccatattcctcgatattgacgatgaggtggtgagcgtcaaatcgctgtatggcgattacgacacgccgcaggatttcctcgaagcgtttgatgcgctggtgcagcgttcccctaacgcccagcccgcgctgcaggcggtgatcaatcgcccgcgcgacctaactcgtaaagggctggtggaattgcaggagtggtttgaccgccagcattttgaagagtcgtccctgcgcagcgcgtggaaagcaacgcgcaatcaggatatcgccgcccggctgatcggccacatccgtcttgcggcggtgggtgatgcgctcaaaccgttcgacgagcgtgtcgaccacgcactgacgcgtatcaagggcgagaacgattggagcgacgagcagataagctggctcgaccgtttagcacaggcgctaaaagagaaagtggtgctcgacgacgacgttttcaaaaccggcaatttccatcgtcgcggcggtaagccaatgttacagcgtgcctttgacgacgacctcgacagcgtgctggataagttcagcgattacatctgggatgagctcgcctga

SEQ ID NO: 127254 - DNA, 2334 bp, Enterobacter cloacae
atgaaaatgaacgtaacagagacggtaaaacaggcgtgcggccactggccgcacattctcccggcgctgggtgtgaaggtcataaaaaaccggcatcaggcctgtccggtgtgcggcggctctgaccgttttcgctttgacgatagagaggggcgcgggacgtggtactgcaaccagtgcggtgcgggtgacggacttaagctggtagagaaagtgttcggcatgaacgcatcagaggctgccgggaaggtgaacgccgtgaccggcaacctgccgccggttgccccggaagtgattgcggccgcagaggctgaaaccgataccgaccgcaaagcggcggccgcactggccgtcaggctcatggagaaaacccgaccggccagcggcaacgcctacctgacccgcaagggcttccccgaccgggaatgtccggtactgtcggccacacacaaaaccggcggcgtgacgtttcgcgccggtgatgtggttgtcccgctgtatgacgataccggcgcactggttaaccttcagcttatcagttctgacggtctcaaacgcaccctgaaaggcggggcggtaaaaggagcgtgccacaccatcgaaggaaaaaaacaggccggaaaacgcctgtggatagcggagggctatgcgaccgcgctcaccgtgcatcacctgaccggtgaaaccgttatggtggcgttgtcgtccgtgaacctcctttctctggcgagccttgtccgccagaaacacccggcctgtcagattgtcctcgccgccgaccgtgaccttaacggtgacggccagaacaaagccgctgtggccgcaggagcctgcgagggcattgtcgccctgtcgccggtattcggtgactggaatgatgcgtttatgcagcacggcgaagaggcaacgcggaaagcgatttatgacgccatccggccaccggctgacagtcctttcactaccatgagcgaagcggaatttaccgccatgagcaccagtgaaaaggcaatgcgagtacatgagcattacggcgaagcgctggccgtggatgcgaacggccagctcctctcccgctatgaggccgggatatggaaaatcattccaccgtctgactttgcgcgcgacgtggccgggttgttccagcgtctgcgcgccccgttctcgtcggggaaaattgcctcggtggtggagaccctgaaactgattattccgcagcaggatgccccggcacggcgtctgattggctttcgcaacggcgtactcgataccgccaccggcacattcaacccgcaccataaatcacactggctgcgcacgctctgtgatgtcgattttacccccccggtggaaggtgaaacactcgaaacccacgccccggatttctggcgctggctcgaccgtgccgccggtggcagaccggaaaagcgcgacgtgatacttgccgccctgtttatggtgctggctaaccgttacgactggcagctctttctcgaagtcaccggtcccggcgggagcggaaaaagtattctggccgaaattgcgacgatgcttgccggggaagataacgccacgtcggccaccatcgaaacgctggaatcaccccgcgaacgtgcggctctgattggcttctcgctgattcgcctgcctgaccaggaaaagtggagcggtgacggggcaggactaaaggccatcaccggcggggatgcggtctcggtagacccgaaatacaaggatgcatactccacccatattccggcggtgatcctggccgtgaacaataacccgatgcgctttaccgaccgcagcggcggtgtttcccgtcgccgggtgatcctgcatttcccggaacagattgccccggatgaacgcgacccgcagctaaaaaacaaaatcgctcgcgagctggccgtaattgtgcgccagcttatgcagaagttcagcgacccgatgactgcccgtgctctgctccagtcacagcagaactccgacgaggcgctcagtattaaacgcgatgctgatccgacatttgatttttgcggctatctggaagcactgccggagcctgagggtatgtatattggcaatgccaacatcattccgcgccagccgcgcctgtatctgtatcatgcctatctggcgtatatggaagcccacggctacaagaatacactcagcctcaccatgttcggtaagggactgccggccatgctgaaagagtacgggctaagttatgagaagcgccgaaaaaatcagggcatacagacaaatctggcactcagagaggaaagtaacgccgactggttgccaaaatgtgatgaccctatagcgaaataa

SEQ ID NO: 127255 - DNA, 321 bp, Enterobacter cloacae; identical to SEQ ID NO: 114083

SEQ ID NO: 127256 - DNA, 729 bp, Enterobacter cloacae
atgcgtattggaactgtagaggaaattcacaattttttaagtgaatactatatcaactccgaagaccctatatccccgccaggagtgaaagatattgggttattagaatcagcgtgtgcaagaccgtttgcttccgccggtgggcaggatgcttttggagatgtataccacaaagcagcagcactattccatggaattatttccaaccactgtttttataacggaaacaaaagaaccgcattattatcagccctttatttcttgagcgaacataacctttggttagaaagatgtaatgatgaggaaatgtttgagtttactcgtcaggttgccgctcatgaaatatgtgagaaaagggatgatgagatagatatcatagcagattggtttaacagaaacactcggcgaatagtgaaaggagaaaagccccttaacttttcgagcctacgagaaagtttatctcaatttgattttcaactagaagatgaagggcaatatgcatttatctataaaaatggtgaaatcgttgagaaagtgctaaaaaaagggaagcaaggaatgcaagaatatgatcaagcatatattgctgagcttcgaaaacgtttagatttaacgcctgaacatgggattgatagcgctcgtttttatggacagaaaggtttgaatgaggatttgaatgaatttatgaaacttcgtgtaaaagtttttgattggctggccaagatctaa

SEQ ID NO: 127257 - DNA, 840 bp, Enterobacter cloacae
atgtataaatatcttccctcagaaagaatcgatatacttgaaaataacttaatatgttttaataaccctttaaattttaacgacccatttgaattcaatacttctcttaactttagtagctttgaatccaatttatacgattcgttaagcactgtagaccttctcaaagaatttccagctgaattattaaatcagattgaaaaactgcctaaagaaattgtcagtaatttacttaaagatgcaaaaaaaacaatgctctcgatgtataaaaaagaaagaggaaatataataagagcagcagatactacaatgcaaagttttaactctaagttgataggaataacgaggattctatcattaacagaaacccctacgaatattttgatgtggggacactatgcacaggcccacagtgggtttatcattgaatttgatatcactcatccatttttctcacaacgtcgcggccaaaaagatgaatttggttatttacgaaaagttatatatcaaaaagaatatccattcttggatccattctcagacgatcaaataaatcatttcctagtaaaaagcaaagactgggaatatgaacatgaatggcgaatgttgttaccacaggccaattctggtaaaacaattaatgtatgtgaaaaagaatttgatctctatgaactaccatccgatgctatcaaaacgataatttttggttgcaatacctcagaacattttaaaactaaaatgttcaggttaataagttcacgaaccgactatgaacatatcagttttatacaggctaaaaaatcaaattcaagatttgagattgtattagacccgttatga

SEQ ID NO: 127258 - DNA, 342 bp, Enterobacter cloacae
atggcaaaaccggactgggaggccatcgagacggcgtaccgggccggagtgatgtccctccgagaaatagcatcacaacacggtatcagcgaaggcgctaacccaactccgcgctatccggccaccgcccgtagcgacacgaagtacggattcaccgcggcaatacccggcattcagctcaatatctggaacggagacactgtccagctcccgtcgcgctacctcattgcgacggtggaggaactggacagccaactatggacagtcaacagcatcaaaccgaacacagataacacggtatctctgaccgtcgcggaatacagcgacgccatctaccaataa

SEQ ID NO: 127259 - DNA, 468 bp, Enterobacter cloacae
atgaaaatttcactcgctgaatatgtcgacgaggttggtcaggtaaaagcagctgatgccattggtgttcatcaaacggcaattagcaacctgaaatgctccgatgacttcacccagcgcaattttgcgcccattgatttcattgataaaaatggcgatgttcagcctatgtataacatcacccgtgacggatgcatgatgctcgtgatggggttcactggcaaaacagctgccgcagtaaaggagtgttacatcaatgcctttaactggatggccgagcagctaaaccgacgcatggcgatgggtgaagaaatgcagcaccgcttcgccattaaagaaacgcgctcaaagctgaaaggcacgatcggaagccgattgatgaatgagcggaagaaagagaagcgcgttctggagctcgagcatgagcacatcatgcaggttacgcagcctgagttgctgattagctaa

SEQ ID NO: 127260 - DNA, 717 bp, Enterobacter cloacae
atggaaaagaaaaaagacatcacaccgactcaggctgaggacgcaaagcgccttaaagccatctatgaggcgaagaagaaagtactcggagttacccagcagtcgattgctgacgagctggatattactcagggagcggtaggccattaccttaacgggaggaatccacttaaccttcctgtagcttcagtttttgctcgccttctgaaagttggcgttgaggaattcagtccgacactggcaaaagagctttcagaaatggggctaaccagcgttaatgagccatcagttccgtatgtaattggatatacaccaggtaaacgctacccggttattagcagcgttcaggccggatcatggtgtgaggcattggagccatactcgattaaggatgttgatcagtggctggaatcagatgctcacattcagggagatgcattctggttgcgtgttgaaggggattcaatgactgcgcccgctggcttaagcataccagaaggcacgtttgttcttttcgataccggacgagaaccaatcaatggcagcctcgttatcgctaaactatctgattcaaacgaagctacatttaagaaactgatcattgatggaggccaaaaataccttaagggccttaacccgcagtggcccctcgttcccatcaatggtaattgcagaattatcggtgttgctattgagacgaaactaaagctcgtttga

SEQ ID NO: 127261 - DNA, 387 bp, Enterobacter cloacae
atgaggttacttgtagctgcggtgttagctttaccaatggtttctaacgcatcgtgctggaccgtgaaagatcttaaagggtcaagctacagtgagagagaagggtattcgcggattgacgacgcgttttctggaacattcacaatcgtaattgatggcgataatgcgacagtactgtatgacggtcttgatggtggagggatggtatatcgagctatgagtaaaaatgttgtcgtagggcttaccactgagcctggaaagcacgccatggagacttgggttgtacagcctgatggcgtggtgttgatgagtaaaacactgtctggttttggagggatggattcaacgaaggcaatggtgggcagggtcgccggtcagtgcaaatag

SEQ ID NO: 127262 - DNA, 153 bp, Enterobacter cloacae
atggagattgttgtaagggtaacagttgctgagcttgaagagtcgaatttgtcgactggcgaattgcacagcgcaatccttgaggatttagactccgcacgggactacccaggattcaacgtgaaaattgaaattgttagtcagcaaaaataa

SEQ ID NO: 127263 - DNA, 696 bp, Enterobacter cloacae
atgtacgcacctacttggtcgccggagtcggttgagcgtgttaccggccagaagctcactggacgggctgagcacggcattattcatctgatcaactccggctcggcggcgctggacggtacagcggagcagaaaaacgccgaggggaaaccgaccctgaaaccacactgggacattactgagcaggaagccaacgcgtgcctggccgtaacccactggtgtccggcggtgcatgaatacttccgcgggggcggtttctcatcaaacttcctcacccggggtggcgtgccatttaccatgacccgcgtaaacctcatcaagggtgtgggtccggtattacagatagcggaaggctggagtgttgagctgccggaacacgtacatgacattctgaataagcgcaccgattcaacctggcccaccacctggtttgccccacgcctgaccggtaaaggcccgttcagcgacgtctattcagtgatggcgaactggggcgctaaccacggggtattaaccgtcgggcacgtcggcgctgatttcatcaccctggcgtccatgctacgcatccctgtatgcatgcataacgtaccggaggcgctgatttatcggccgacggcctggggcgctcacggtatggatccggaagggcaggattaccgcgcctgtgaaaattacggaccgttatacaaacattaa

SEQ ID NO: 127264 - DNA, 1500 bp, Enterobacter cloacae
atgtcagagactcttattcagatgacgcgcatcaccaaacgctttcccggcgtgctggcgctgaatcaggttgatttcgatttacgccgcggcgaagttcatgccctgttaggtgaaaacggtgctggcaaatcgacgctgatgaaaatattatccggtgtttaccaacccgattccggtgaaattcgctttgaagggcaatccgtatcattcagcgatccgctaagtgctcagcacgcaggtattacgattatccatcaggaatttaatctctttcccgatttaaccgtggaagagaatatctttattggccgtgaattctgcaaaaatagtcgctggcagttagataaacgcgcccagcgacaggcggttgagaaaatactgcacacgctgaatttaaaaatcgccccggacgcccgcgtcagtgaattaaccgtagcccagcagcagatggtggaaattgccaaagcgatttcggtcaatgccaaagtgctaatcatggatgaacccaccgccgcgctgaccgaaagtgaaatcgagagtttatttgacgtcacgcggatgctcaaggctcagggcacggggatagtctacatctcgcaccgtctggaagaattggcgctgatcgccgatcgcgcgaccgtcatgcgcgacggacaatacatcgccaccgtagattatgaaacggttcagatcggcgagcttatcgccatgatggttggccgcaatctcgataacatctacccaaaacgcccgccgcatcagcgcagagaaaaagtgctggaggtgaatggcctgacgcgaaatggtgtactgcacgacatcaactttaccctctggcgcggtgagatcctcggcctcgctggcttaatgggcgcaggccgaacggaactgggccgggccctgtttggcgccgatgcgatcgacgccggtaccctgacgctgaacggcacccccacacggattaaagacgtggctgacgccattgagaaaggcatcagctatttaacagaagaccgcaaaaaagagggactcgccctcggcctttccgttgagatgaacattatgctcggcaattacccggactacgccggcgccgcgggtaatgtcgatgaaaaacgctgccgggtgtccagtcagaaactggtggatgcgctgcgaataaaaacgccgcatctggaacaggcggcactgaatttaagcggcggtaatcaacagaagatcattattgcccgctgggtctgtaaagataccgatattttaatttttgatgagccaacccggggaattgatgttggcgccaagctggaaatttatgaactaatgaaccgccttgtcgctaaaggtaaatcgatcatcatgatttcatccgaactgccggaagtattaggaatgtgcgaccgcatacttgtgatgcgcagcggccgcattgccggcgaaatagaggctgagcacgccacccaggaaaaaatcatgcaatacgccacgctggaggattaa

SEQ ID NO: 127265 - DNA, 984 bp, Enterobacter cloacae
atgtccgttaccgttccatcgccgcaaagcggaagtcatacgatgaaaataaataaagcgctcctgatgcgtctggcgcctctttttagcctggtattgctggttctgtttttcagcttcagctcaccgttcttctttaatactgaaaatatcatgactatcgccctgcaaacggcggtgattggcatcatggccattggcgtaacctttgtgattattaccgccgggatcgacctgtcgctcggatcggtggtggcgttctcaggggttgcggtgggcatcgccgccgggtttggtatgccgctgccggtctgtattctggcaggcgtgctcgccggcgggctttgcggctatgtgaacgcgtttctggtcaccaaaatgaccataccaccgtttattgccaccctcggcttaatgatgtcggtacgcggcatcaatatggtgatgaccgatggccgcgcgatttatttttctgactacccgcagttcaagctgctagcgcagggtcgcctgttcgacgtcctgccttacccggtgttctacctggtcatcgtggcactgatcgccatgtggatcctgaagaaaacggtgatgggccgctatatctacgctgtcggcagcaatgaaacggcggcacatctttccgggatcaaagtccagcgagtgaaaattttcgtttacgccttatgcggcctgttaaccggcgtggccggggtgatcctcgcctctcgtctcaattcaggccagccaaccgtaggcgtgggttatgagctggaagccattgcggcggtagtgatcggcggtaccagtctgatgggcggcgtgggcacgattggcggcaccatcataggcgcgttcattatgagcgtgctgaaaaacggcctcaatctcatgggcgtgtcccagttctggcagatggtggcgatgggcgtggtcgtcgttgccgccgtctacctggacacgttacgtaaaagaatgcgttag

SEQ ID NO: 127266 - DNA, 210 bp, Enterobacter cloacae
atgacccaagatatcgtcgccgcatcatgttatgctgaatggcttgaaccaaaaattgtcattcccgctataacagccgtcatgactggtgttctagcatcagttatcgtacctctcttcatgcattattcaaaatcaaaaagagaacagaaatataaaattttagatataagaactaaaatatataccgaatattttaaaaaaatatga

SEQ ID NO: 127267 - DNA, 1047 bp, Enterobacter cloacae
atgaaacgattaatacttaccgtagttgttctgtcatgtgcagctttgcttccactatcctgtcaggcaaatgccgattcacttggcatcaataaagactgcgataaccacccggtcagtcagtatggcatggattccatcactgcttccggtcagtacaaagccgaacctcaaaaattcatgaaagccatgactgaattttgtaacagaggcaaaactatgggtgacatgggatttgacgctgcgtacagcctgtcgctggcggagtccaaaaaatggacggatgccaacctgcgcggtcaaaacgaagagcagaaaaagtttaccagcaatatcgccagccttctgagcttcgcaatgctgaacggctttagtggatttgactatccggagccaccagagcagaaagacgcattgccgacagattcatttaagccatttgaaatctgtgatgcaatttcgtccaatgcagccgaacggtccacctctcagttgcctccgcaggtgcaaatttcactggctgaatggaatcaaataaagaaagagtttgcatcagtatgctttgttggaataatggccggtaacagtcgcaagccagctgataacagaatgctggccggacttaatgatattgccagaagtgtctattctcaggcatatgatactggctcaaaatatccggcacctgaaagcactcaaaaagcgaagacatatagagaccttagtagtggaaagaatccaccccggaatgccagaacagaaccgcaaaaggaacaaaacaagggcgtcgatataagcagcacagttaccgaaattcagcgttcttttcaacaggcatcgggtgacatctcccgattcacaggtaaacaatgcatgctgagagtgtggctctctcaaaaaggcgaagtattatcggttaaaactgaagacggggatgcagaactttgcactgtggcgtcagaggcggcaaaaaaaataaaaatcaacccaatgagtgatgaggtatatagcgtattccgtaacgtgccacttaatattaaaccttaa

SEQ ID NO: 127268 - DNA, 948 bp, Enterobacter cloacae
atgccccgctacaaaaaaggtatccgtaataattgctttcatcaaaattatactcatgacgtattgtttcccggtgcaacattcagaacccgacataatggagaatgcgccattcttggtcgctctgatgataaatcaaggcgaggctattatgtcgtggaattcaaagacagtggcatcatcaaggaagcctatggctcgcatattaaaactggttctgtatcagacgaagcttttccatcatcggaggaagaacgacaaaagttactgatgacaccaaaatattacggcgtcggatatattggtaatggatgtcattcaactattgaaaacacccgaacacaccaaagaacgagagcattcatactctggcataacatgctggcaaggtgctacatgacaaccaaaggaaagcagtattttaaaggctacaaaggtgtcactgtatgcgagcgatggcataactttcagaacttctgcaatgaccttccaaaattgcatggctacaacaaatggaaggataatccgggagagtatgagctcgataaggattactcacatcgccgaatttattctgctgacacggtggcatttatcagcacagaagaaaatgccagggaagccggattacgacgcgttgccatgaagattccttccgggcattatcatgaaataaataaaattcgagatgagatattaatggaggctgaaggtgaattaaaaaacaatcaaattaattataaagttgttcttaacgggaatatgaaagtaatcctgtctgaaaccccttatggcacagtgttgttctggcctctcacgaaaaagattcagcgtaattgctacatgattgatggtgatgtacaggtttatgttcattacctgcgctggctcatacttcagtgggaaaacagaaatcccgacataaactgtgttgctacaacctgttga

SEQ ID NO: 127269 - DNA, 915 bp, Enterobacter cloacae
atgcaggttgtgctggtggcggttgcgctgctgcaaatgccatccatggcgctggcaaaggatatcagggtgacttatgccggttccatgggcaaagtaatggaccaggggttaggtccggctttttccagagcaaataacgacggctatcaggggcagggccagggtgcatacgggatggcacgcctgcttgcaagccacaaaattgaggccgatgtgtttgtctccatcaccccggggccgatgcaaattctcaaagacgccgggctgatagatgaggcggtccctgtcgccagtaccagcatggtggtcgcttacagtcctgaaggtaaatatgcagcgcagtttgaacaggccaacagaaagaaagacggctcgtggctgactctgctgacgcagaaagatgtcttatttggccgcaccgatccttatgtcgacccaaaaggccagaatattgtgtttagcctgatgctggcggaaaagtattacaacatgccgggcatcaccgataaaattttaggctcgctgcaaaacccacagcagactcatcaggaaggagggctgctggcgcgtctggaaagcggtcaggtggatgcagcagcgggatacgagagtgaagttcgctcagcgcatttgccgtatgtcgcgctgccggatgaaataaacctcagcaacccggcgatgacgaaacagtggtatgacactgtcagttttaccattaaagacagcaaaggccaggatcaaatcctgcacactcaaccaatggtgttctatgcggcagtgctgaaaaacgcgccgaatggtgtagaacagggacaaaagttcgtatcgttcatgcaaagcgccgaggggcagaaattgttcaaagcgtttggctacgccgaacctaaaggagacagcttatacgcccgctaa

SEQ ID NO: 127270 - DNA, 390 bp, Enterobacter cloacae
atgaacacattccattggctaaaaggaaagacatggggcttaagcattcttaccgcggcgttaaccctgagcgcaacggcgtcagcagccctcccgggttcggctgagctcaagcagcgcgaactcgctgacggtctgtatgagatggtttactccccaacggcaaacgcgttgtacgttgcgagcgcacagagtttcaaaaacgtcaacggcggggtgctctataaactggatcccacaacgcttgccacgcaaggtgaaacccacaccgacctgaaaaacttcggcatggcagcggacgataatggcaaggtctactacaccaccaacacccttgatggcggggtatcgaaagtggacgtgcaagcggcaaggtgctacagcgcctga

SEQ ID NO: 127271 - DNA, 447 bp, Enterobacter cloacae
atggctgcgaagaattctatgccagagcgggctattgcccaaacagaaaatgcagatttagagattcagcaagaaaatcgcgagaagctacgcaaaaaacgcatccgggcgttgcatgacgagccggttcactctgcgtatctgcatgaaagaggagaggcgggttccgcctgtgtggaactttatactcgaatggagcgcaactatctgccgttaaccggcacgtggttaacccgcgcagggtttaaagcaggaatagccgtgaagatccgcgtgatgccggattgtattgtgatcacgccgcaaaattcccgtgagctgtggggctgtctggaaggcgtcagtgcaacgtataccaacaaactgaagatgatgaagtggctggagacgtttccgggagcgttaattgatacgggggatttgcccgtgaacgaaagtagaaaatag

SEQ ID NO: 127272 - DNA, 306 bp, Enterobacter cloacae
atgctgtctgccatcgtgattgaaattgtgctcaccgcaggcttcctgttggtgatccacggcgcaacggacaaatacgcgcctgcgggctttgcccccatcgctattggtctggcgttgacgctgatccacctcatctccattccggtgaccaacacctccgttaacccggcgcgcagcaccgcggtggctattttccagggcggctgggcgcttgaacagctgtggctgttctgggtgatgcctattatcggcggtattctaggcggcgtgctgtatcgcaccctgctggaaaaacgcgattaa

SEQ ID NO: 127273 - DNA, 900 bp, Enterobacter cloacae
atgttctcaggactcctcatcattcttctgcccctgattgtgggctaccttattccgctgcgtcatgaatcggccttaaagcttattaatcgctttctcagctggattgtttacgtcattctgttctttatggggatcagcctggccttcctggataatctggcgacgaacttgctttccatcctgcattattctgcggttacggtagtggttattctgctgtgcaatattgctgcgctgttctggctggaacgcactattccctggaaaaatcaccaccatcaggaaaagcttccctcccgtattgcgatggcgctggaatcattaaaactgtgcggcgtggtggtactcggttttttactgggtctgaccggctgggcatttttacagcacgcaacggaagccagcgaatatacgcttattttcctgctcttcctgattggtattcagctgcgaaataatggcatgacgctgaaacagattgtccttaaccgccggggcatgatggttgccgttatcgttgtggccagctcactggcggggggagtgattaacgcctttattctcgatctgccgctgaaaaccagcctggcgatggcgtccggtttcggctggtattcgctctccggtattctgctgaccgaatcgtttggtccggtgatcggcagcgccgccttctttaacgatctggcgcgcgagctgatagccatcatgctgatccccggcctcgtacgccgcagccgctctaccgcgctgggcctgtgcggggccacctcaatggactttaccctgccggtgttacagcgctcgggagggctggagatggtccctgccgccatcgtacacggctttattctgagcctgctggtacccattctgatggcgttcttctcagcctga

SEQ ID NO: 127274 - DNA, 819 bp, Enterobacter cloacae
atgggacgacaaattccacagccagttatttcggttttatctgaccatatgggctcagtcgaaactcacgcaaccatgaacagtttgttcatgtacgctgatgcacctggcgatgctcctgatttagcgaaagcggcgaaagcacaggactggctgagaagaatcaacaaagaatgtgacgacccattagcaatccttggcagattgatagaaggctacatggaagctgatcagcctaaaggcagcatattcggttgggagcaacccaaggttgattttgccgaaaaaatgactgatttgcttggtcgatatggattgcgatatctaactggcggacatatttctgatggagcttcgataacttctgtcaccctaaaagaggcaattggtaaacgcaacattcccgcagtagagatggagttttccagggcacttgagaatatccacactgatccgagagaagcagtatccgcagcctgtaacattatggaatctaccttcaaagtgtttattgccgatgaaaaacttcaggttccagctaagcaagatctccagggactatggaaagttgttcgcgagtctttagggcttgatactaaagcagttgaagatgaagacctcaaacgcattcttagtggcctttattcgttgactgatgggattggtgccctacgaactcacgcaagttcagctcacggagccgggagaaaaatctataacttaaagcctcgccacgctagattagctataaatgccgcacataccttgactatgttcattctcgaatcttgggatgaacagaaacaaaaaagcccgtga

SEQ ID NO: 127275 - DNA, 903 bp, Enterobacter cloacae
atggctgaccctttagcaacggttctatcgcacttaacaaatcttgtttcatttagatcgtcactcaggctgctgataatcgctggttcgatcattttctgctgggtttttattgcaccaatgctgcccccatttaagctacccagcgaattatcattaggattaattacagtaattggtttttcatttggtgctttgacatcttccattctattcaactcagtagacttcatttacagtttcaccaaaaacagaatacaactcagaaagaataaattggaccttcaaaaacaagcagcagaaaaagagataagcgagcgcaagaaattagacttatttaaaagtagcttcaatgactattcatttcaagccaaaaatataatgttaaagctcaataaaagtgattgcacaattgctctggaatcatatagtgaatctgagcacaataaggcattcatggggcttcttgaaagtaagattatattgccgctacaccgactagataaaaaaaccactttctgcactattaatcctctatataaaaacgtaatcaaccaattatttgaattcaaacatcgaaaagaagttgatgaattatttgatttcaaccctgatggacttaaaatgttgatgaaattttttcaagataacacctttgatgaagaacatatattcaacattccttttgttagttatcaaaacaggtacaactatcaacctgttattaaaaatgaaatatacgaactaggtgaattcattgataactgcaatatacagttttatatcgacgagcatcattacccgtacgttcatgagaaatttggcgcagagattagaagttacatactctgtaattttaatgaagagagggctttgaaacgacttggccagttacattcctaa

SEQ ID NO: 127276 - DNA, 375 bp, Enterobacter cloacae
atgacttacgaaagttcccacactgccaggacgattttattcgccattatcggcagcaatgataaaacggacatagccgggagccagacagtcacaacgggtaaagtcctggtcgagaaaattggccagatacgtaaaagcgtggcggccgtgcaacagcagattattgccccggtggtgtggattggctcaggcactatcaacgtggcacagctgatgctcgacacgctcgacgtggttaaagagctggcagagcaaacggcaagccacacgcacagcaatacgggagcaccgaccaacgcgggggccatccggaacaccggaacgaaagcggacacgctgaacggcaaatattccccggtgattggcaagtaa

SEQ ID NO: 127277 - DNA, 642 bp, Enterobacter cloacae
gtgccacgcgtcgcggatcccggacaggcgcagctccatggtgtagcgacgcaggcacagcacgttcatcacctcccggtgccccatctcgaacaggtactccgccgcccgctcgccaatcgcgcgatgatccggcgcgacggcgggcaggcgcatgtggcggtcccggcagttaatcagcatgcagggtttccccacgtccaccgccagatcgtggatatgcggatcgtcgataccgaggaggattgccgcctgggtgtccacttcgttcatgcgggccagaaacagctgggcatcgctgtcgttctcctccagcgcacagtaacgcaggcgaacttcgtgcgaggccagccctttgctcacgctctggatgacgcggtagtaaaagatgtcggaccgctcgtcaaacgcccgctgcggggcaaacaccaccaggctgttaagcagcagacgccccgccgccatgccgtccattacccccagctcccgcgcgcacgccagcacctttgcccgtgctttttcgctggtgtttgccttccccgccagcacgcgagaaacggtgctgatggagagctgcgtccgggcggcgatttcggtgattttaagccttttgtccattttgtgatctggctccggatgtga

SEQ ID NO: 127278 - DNA, 2364 bp, Enterobacter cloacae
atgaaaaccctgaaaaactggaccgtcgatacgcagtcggcgaatcatctggaactgctgatcgataaccagcaccgcctgtgcctgtatgtgctggaagagaatctgttccgcgtgctgatcaaacgtaaaggcgagctggcgctgaaccgcacctggagcatcgcgccggaacaagatgtgccgtgggaaggccgccgtcgtgacgatgtcagcggcttcacctgccctgcctggacgctgacgcagcaggacgacacgttaaccgtagcgactgaacagctgcgcgtcaccgtccaccagccgctgtggctggagtggcactaccgcaatgaggcgggcgagtggcagccgctggtcaatgaccgcccgacctgcgcctacctgctgaacgcccacggtgacggcgcggcgcactatcttagccgtcgtaaggatgaacgtttttacggtctgggtgagaaagcgggtgatttacagcgcaacggcaaacgctatgagatgcgtaacctggacgcgatgggctataacgcggccagcaccgacccgctttacaagcacatcccgttcaccctcacccgccgcgatgacgtgagctacggtctgttctacgataacctgagcagttgctggctggatctgggtaacgagatcgacaactatcacactgcctaccgccgctggcaggcggaagcgggcgatattgactactacctcttcaccggcaagcgcgtgctggacgtgaccaaagccttcgtgcgcctgacggggaaaacgctgttcggaccgaaatggagcctgggctacagcggctcgaccatgcactacaccgacgcgccggacgcgcaaaaccagctgatgaacttcatccgcctgtgcgatgagcatgccattccgtgcgactcgttccagctctcctccggctatacctcgattaacggcaagcgctacgtctttaactggaactacgacaaagtgccgcagccgaaggtgatgagccaggcgttccacgacgcggggctgcggcttgcggccaacatcaagccgtgtctgttgcaggatcatccccgctacagcgaagtggcggaacgcggcctgttcattcgtgattcagaaaccgatgcgcctgaacgttccagcttctgggatgacgaaggatcgcatctcgacttcaccaacccgcagacggtgcagtggtggcagaacggcgtgaccacgcagctgctggagatgggcatcgactccacctggaacgacaacaacgagtatgaagtgtgggacggggaagcgcgctgctatggcttcggtcaggagatcgccatcaagcacattcgcccggtgatgccgctgctgatgatgcgcgcctcgctggaagcgcagcagcgctttgcgccggagaaacgtccgtatctgatctcccgctccggctgcgccgggatgcagcgctacgttcagacctggagcggcgacaaccgcaccaactgggacaccctgcgttataacatccgcatggggctgggcatgagcctgtccggactgttcaacgtcggtcacgacgtcggcggtttctccggcgacaagccggatgccgagctgttcgtgcgctgggtacagaacggcgtgatgcacccgcgctttaccatccattcgtggaacgatgatcacacggtgaacgagccgtggatgtacccgggcgtcacgcctgcgattcgcagcgccattgaactgcgctaccgcctgctgccgtatctctacaccctgctctggcaggcgcacgccgacgacgagccgatgctgcgcccgaccttcctcgatcatgagcacgatgcgcagacgtttgaagagtgcgacgacttcctgctgggccgtgacctgctggtggccagcgtcgtcgaagccgggcagcgcgagcgccgcgtctggttgccggataacgaaaccggctggtacgatttttacacccacgcgtggtatgcgggcgggcaagcgatcgtccttgatgcgccgctggaaaagctgccgctgctggtacgcgccggggccggtttgccactcagcgaacgcatccgtcacgtgagcgcagataaagacgatacccgtgagctgaaactgttcccggtgaaaggcgtcggcaccaccgccgggctgctgtttgaggatgacggcgaaagctggggctaccagaacggcaatgcgctgtgggtggaatgggagatggtgtgcgacggcgcaagtatcaacctgaaggtgaatgcgcgcggcgactatcgtccggcatggaaggcgctgaaggtgtcattaccggcgggggaaaaacgtacgctgcgggtgaacggagttgaagggggcgagtgggtggtgtag

SEQ ID NO: 127279 - DNA, 684 bp, Enterobacter cloacae
atgaacagtcagcaactggaatacgtacgtcagcagctcattgtggcgaccgcagacctcagcggggcgacgaaagggcagctggtagctttcgccgaaaatgcgcaattcacagcgacggcgcgcagccggggacggaaaaaggtattcgacaaggataagcagcgcatggtcaatccggatggtccgccgatgagcggtagccagtcccgcgcaaagggctcatccatcgcgctggtgggcccggttgagttcgtgaccgcatcgtggcgccgcgctgtgctatctctggaagatcaccagaaagcatggctgctgtggaactacagcgagaatattcgctttgagtaccaggtggcgataactcagtgggcgtgggcagagttccgggagcagctcggcgcgaagagggtggccggcaagacgatggagcgtctgaaaaagcttatctggctggcggcgcaggacgtcaaagcggagctggcagggcgtgagacgtacgaatatcaggcgctggcgtcgctggttggcgtaacaccaaagaactggtcagagacgtttacggaccgctgggtagagatgcgccgcatcttcctgcgcctggacagtggagctttgttgcaggttacgcgatcacgttcacaacaaaaggcgacaaatttagatttgagaggatataagtaa

SEQ ID NO: 127280 - DNA, 741 bp, Enterobacter cloacae
atggctgaattaaccaaagaatggctcctcaggacaatcgcggagcttgaagaagagcgcgatgctgtgcccggcgttgtaaacgaagatgcggccaatgctctggctgcgatgaggctggcgctggcatcgctcgaagcggagcctgtggcgtggctactgtcaggcggcggcgcaaaaaacaacgtcagcttcgatagtggcaatgcttacgccgacccgctgcgagaagtaacgccgctctacaccgcctcgccagcgccggtatctgtgcctgatgatgtctctggtccgcttgctcatgcctacaaagagcttacgcctacgttcatgcgtaaccacatcgacgtattcgagcgttacgggatttaccctgaaggttcagcagggattcaggctatgcgcattgcattggatggcatgaaccgccgcgccgccatgcttcagtcgttcggtaattccgaacaactcgaacctgtaacgacggctaacaagttgccagagtgttgggtggcttgcagtgaacggatgcctgatgacgaggaagacgttttatgtttcggtcagtatggcgataacgacattgacgaagagcgttaccagttcatggggtggctttcaagcaaaggaattaaaagggtttggcgcgttagtgatggcgatagtcaaaacaggagagccagagtcacccactggatgccactgccagcagcgccgcagcgggagggtgaaaatgtctaa

SEQ ID NO: 127281 - DNA, 204 bp, Enterobacter cloacae
atgacacgcatccgtaactttggctggaatcgtctcaaactggcaaccttgtcttacgaagatataagcgctctcgaagatcaggtgaagcaggagcacgcctgtagcgatggcatccacatgtacgacaaagcaggccgtgacaagctcgatgctctgagctgggccgtatacaacaagcagaagcaggagtccgccaaatga

SEQ ID NO: 127282 - DNA, 300 bp, Enterobacter cloacae
atgaaaggcaaacaggcaattctgcgttatctagaaacgcaccggacctttacggcgaaggatgtggccacagagtgcggcatgactatcaactgcatcacgaagaacgctatcgatctggagcgggcctgcaagattgtccgggtgatcaaggtctggcgaacggtgacttatcgcctggcgactccggaagagcaggacggcaccgcgcgcagctgcaccaacgggatatttcaggagtgccgcaacagcgcggcaatgaagcgagtattgatggtttgggggagggtaggggtatga

SEQ ID NO: 127283 - DNA, 897 bp, Enterobacter cloacae
gtgggtaacgtatccaatttagccgaagccagagaggccagaaggctccagaaaccgcgcacgaatgacggtaaggggtttgccttgctgcaccgtaaaattatggatgtgccgttctacaaggacgctgaggcggctcatttatgggttcacctgctcctgcgcgctaatcacgaacagacactggtatcgactgatgttggcgatgtgatctgcgagcgcggcgagttcatcaccgggcgtaacacgctggcaatggaaacgggtttgaccgctgatcgcgttaaatcactgctccgtaaattccagaatctgggcatgatcaccaccaaatcgaacaaccgttttactgttctaaaagtggtcaaatatgacgaatatcagtcaaatttttgtccagccgatgtccagccagtgtccagcgcaaacgcagtagtaccaatgcctgtggaggatgtgtgtccagccgatgtccagccagtgtccacagataacaatatattaaataactctcttactaacgtaagagagtgtgcatcagcagcagaaaaaccagagcagaaaaaaccttctctcagctgtgagcaggtagtcgaggtttaccatcgcgtactgcctgaagcccagagcatcaggatactgactgacaagcggcgtgctctgatccgcaccttctggcagaaggccgggaaagtaactcagcagctcgacggccataagttcaccttgagcgactgggaatcgtatctgagctacatcgccactaactgccgctggatgctggagaaccgcccagaccagcgcacgggacgcacatggcgccgcaaggctctcgaatacttcctgaacgtggatgtgtatgccaagacgcgcgagggggcctgtgatgacctctga

SEQ ID NO: 127284 - DNA, 153 bp, Enterobacter cloacae; identical to SEQ ID NO: 127262

SEQ ID NO: 127285 - DNA, 243 bp, Enterobacter cloacae
atgagcaacaaaactggcggtccagctttcccagaattaggcaatgttggtcacaacacagactggcaaagtgaatctggcatgacgatccgtgactacttcgcagctaaggctatgcacgggtatatctctacagctggcggcccatgcatcatcggtggtctggatggtgcagaagatgaactggcgaaacagtcttacaaaatggccgacgcaatgctccgcgccagggaggcatcatga

SEQ ID NO: 127286 - DNA, 1911 bp, Enterobacter cloacae
atgaaatacggaagcgtgtgcagcggtatcgaagctgccagtaaagcgtgggaacctctcggctggaaacctgcctggttctctgaaatcgaaccattcccttccgcagtcctcgcccatcactggccggaagtaatcaacctcggcgacatgaccaaaatcgccgatgcggttcgcactggtggtgtcgaagcacctgatattcttgtcggtggtacgccttgccaggcattcagcattgccggcttacgagaaggcctgtctgatgaccgcggccagttaaccctctcttacgtggaattagccaatgcaatcgacgcaaagcgccgcgaacgcggtgagccagaatcaatcatcgtctgggaaaacgtccccggcgtgctcagcagcaaagacaatgccttcgggtgctttctggcaggacttgccggagaaagcagtgaattgcagccagcagggggaaaatggacgcacgcaggttgtgtgtctggaccagaaagggttattgcctggcgcgtccttgatgctcaatttttcggagtggcccaacgacgccgccgtgtgttcgttgtcgcaagtgctcgaaaaggattcgatcccgcagcggtactttttgagctcgacagcgtgcgccgggattctgcgccgcgccgagaaacgcaaaaggctgttgccgcccttactgcacgaggcgttggaacgtgtggcgcagacgacaaccaggcacaagctggacatctgattgcttttggcggtggcaatactgccggccatattgatgtggcgaccgcctgcaccgcgcatgggatcagattggattttgacaccgagactttcgcagtgcacggcacgcaggatccagataccaattgcgaactggcacacacacttgggcgcaacaacgggcaagaaaacgcctgcattgcatttagctacaaagataatggagctgatgtgacgtcagatctgtcaccaacgattcgcgcaggaaaccacgataaaagccatgctaacagcggccaaccccctgccatctgcatccaacatgcttctatcggtcgtcacgatgcagctggccctcagggcaaaggttatcaggaagatgtggctttcactcaggattctcgctcatccgctgacgtcgttcagtacggaatgcaggttcgccgcctaacaccgatagagtgcgagcgccttcagggctttcctgataatcacactctgatcggctggcgcgggaagggtgctgatgaatgcccggacgggccacgctataaagccatcggaaatagcatggcggtacctgtaatgcgctggatcggagagcgcatcgccgcagcactgccagccgagaagctgaacggtgattacggcggaagtaaaacaccgttagaccagcgagacctatggcgcacgccgcctgccctattcgcttcacttgatgctgagttctgcttccagttagacgccgccgcggcaccgcataacgcgctgtgcagaaagttcatcacagccgagaaaaacacactggaaacgccctgggctgattacctgagcattccgggctacgtctggctgaacccgccatacagcgacatcactccgttcgtgaaaaaagcagctgccgagagtgctaatcagatcggcacggtcatgctggtaccggcagacacttcggttggctggtttaaggaggctatccagaccgccagcgaggttcgcttcatcaccgccgggcgactggcatttatcaacccggtcaccggtaagccagtatcgggaaataacaaaggctcaatgctcatcatctggcgaccgtacccgcgtacacactgccacttcgcaactgtggaccgggaagagctgatggctttcggggcgaaacttctcgcccgcctggaggccgcatga

SEQ ID NO: 127287 - DNA, 219 bp, Enterobacter cloacae
atgacaccagcaaatgaaaacgccatccgcgccgcctgccgccgctgcaccgaggaaatccagcaggccatgcgcaaaaagccaaagcctaactggaacgaaacggtgcctcccatcatcaacaagcatcacaagaaaattgaagctctgggagttagcctcctggagttcgtcgtatacacaggcaggcttaatcgccgcttcggagttgattcatga

SEQ ID NO: 127288 - DNA, 219 bp, Enterobacter cloacae
atggccgatatcatcgacacagcagcagagattgaagagcttcagcgtaacgctgccctttccgctcaccgagtgaaccgtaacgacgtatcagctgagcattgcgcggaatgcggtgaggatatcccagcgccgcgtcgcgctgccgttcccggctgcaagacctgtgcggagtgccaatccgtcattgagctgaagaataagcagagggggctgtaa

SEQ ID NO: 127289 - DNA, 270 bp, Enterobacter cloacae
atgaaagatattatgctttttggtgctggacatgaaggcacaaagaaacaggttgaacccgggaaagaatcctactacttcaacagcaaaccagtatcatcgcccacaggcactaatatagttagttatagtgcagagcaggtttcattccgggttagcactgtttatccagaaaaaggaggttttttgattggagtgcatggtgaagaaccttcagataaaacgatagtagatgcgatatttaagtacaaccctaccccgctaaactga

SEQ ID NO: 127290 - DNA, 201 bp, Enterobacter cloacae
atggctgcttttaatgtgggcgcattagtccagaagaagaccggcggtatacatggcgtggtggatagccagctggagccggaaggcgatcacccgaaagcctgggtgcgttgggatgacggcaattattcagtgcacgcggaaaacgaattacgcgcggccacgccagacggcccgcagttttataaaacgatgtcatag

SEQ ID NO: 127291 - DNA, 777 bp, Enterobacter cloacae
ttgttttgccatggaaagacccatcatcaaattctgaataacaatacgcctaatgatgtccattttaactctcttacatggattgcaagcagcccaaataacgaagaagccattattgtccattctcgcacaacgagtacaacttttggtatctctatcgttgatggcagtatcttgtgggcaatcgacacaggtaatttcaaccctcagttcccggcaaaacaagcgactattcatattgataattcgggtattactcattttgaaaatggtgcccatacggtgtgcatcacgaataatagtgctttttctgccagtatcgatcctaccgcaggaaaatttgtcttatcagtgttcgataaccgatcttgcgtagatgaaaatggcaaccccgttattcgtccgataaatgacgcagcgacgtcggacccctatcaaacagatccagcccgcattctgttctatgcggtcgacttagcagcaggcaccgctgttgagattcatgcgcctgttgaactcccaacgacgcctatcctccaatggaccgactttatgggaggcgtgtttgatcatggtgattatttcactatttttacctgccatgcgcgctcattctttatcagtgacgtagacggtaatatggttgcctctatctatgatgtgatttctttatctgatggcgctcctcaataccctggggaggcctaccgtgcaagattatttaatgaaacggagcttactgacgtcatcactgcggcatctatttatgcaaattaa

SEQ ID NO: 127292 - DNA, 1110 bp, Enterobacter cloacae
atgaaaaggaacgcgaagacgttaatcgcggggatggtcgcactgtcgatctcgcatgccgctatggcagacgacattaaagttgcggtagtgggggcgatgtccggccctgttgcccagtggggtgacatggagttcaacggcgcgcgtcaggccatcaaagatatcaacgccaaaggcggcatcaaaggcgacaagctggtaggcgtggagtatgacgacgcctgcgatcctaaacaggccgtcgcggtcgccaacaaaatcgttaacgacggtatccagtacgtcatcgggcacctgtgttcttcctccacgcagcctgcgtctgatatctacgaagacgaaggcattctgatgatcaccccgggtgccaccaacccggaactgacccagcgcggctaccagcacatcatgcgtaccgccggtctggactcctctcaggggccaaccgccgccaaatacatcctcgaaaccgttaagccgcagcgtatcgccatcattcatgataaacagcagtacggcgaaggcctggcgcgttccgtacaggacggcctgaaaaaaggcggcgcaaacatcgtcttcttcgacggcattaccgctggtgagaaagacttctccgcgctgatcgcccgcctgcaaaaagagaatatcgacttcgtttactacggcggctactacccggaaatggggcagatgctgcgccaggcgcgcgccaccggcctgaaaacccagtttatggggccagagggcgtcggtaatgcctccctgtccaacatcgcgggcgattctgccgaaggcatgctggtgacgatgccaaaacgctatgaccaggatccggcgaataaggctatcgtggatgcgctcaaggcgcagaagaaagatccgagcggtccgtacgtctggatcacctacgcggccgtgcagtctctggccaccgcgctggaccgtaccggcagtaaagagccgctggatctggtgaaagatttaaaagcacacggggcgaacaccgtgattgggccgctgaactgggatgagaaaggcgatctgaagggatttgagtttggtgtctttaagtggcacgccgacgggtcttcctcggtcgccaaataa

SEQ ID NO: 127293 - DNA, 1200 bp, Enterobacter cloacae
atggcagcaaatatcaccaccgaggcgcagttagacgcgctcactataccagacggtaagaacagccttaagcgggtcgtattcaatgcggggcgtactggcctcacaataaaactacaacgcaacaaatcagggtcgatcactaaaagctggatcgctgtcgactcacgattaccaggcaaagaaaaaagcctcggcggtacctacccgaagttatcactggaaggtgcgcggaaacgtcacaaagagctaatgctcgatctcgaaaacggtgtcgacatcacaaccccgcgcgtggaagtgccggagacgctcgacgctctgtttgaggtctatatcaacagtgggcacgcgccaaaaagcaaacttaacggcgggtatcgttctatatgggggaaatggtgtcagcgtgaaacccggttcgggcaaacacgatgcgaccaactgacgcgcacggcgatccaccaacacctcaaagcgataactaacaatgggcatgagaacctgaacgccgcccggcgtgtgcgggatatcctttgcgcgctgatcgatcgcttgtctatcgactacggcatcgagactaccccacccgctacgctgcaaaagattttcggcagcacaaaagcattcgagcgcatgaacaagaaacgcgagatatcgcttaatacagaacagctgcgcacgctgtggggcattttaatgtccgatcgcacccgccctgcatatctggcgatgcgctggctgatttgcacctgcacccgcaagagtgaaacggtcgacgcacgcttcgacgagctgttgggcgatgaatgggtgatcccggcagaacgtaccaaaacaaaacagaacgagctgcgcgtgccgatctgtccaatgatgcgcgacgtaattaacgacctggcggcgctggagcgtacgcgcgggtttatgttcggcatcgccgcgaacactttaaaccattgctgtactggctggcgtgaagctataggggtcgatttcaccgtccacgacacgcgccgcactgccacaacattaaccacacaggccggactgctggacgctttcgaggctgacctgatgttaaaccacacgccagccaacacagcgatcttgcgcaattacaaccccgatgcatttgttccgcgagttaccgccgcgatcgccgtgtggcagcgttatctcgaagaggtaatttcatga

SEQ ID NO: 127294 - DNA, 612 bp, Enterobacter cloacae
atgagccgcagaacgtggaaccgcatgaatgagccagacggtttcgacagctggcgcgcaggtgacaagtccactccgctgatcgactcagacggcaacgtcgctatgtactacgccggacgtatacgagtgcgtgacgcgcacggattctgggagacgctgggttatcagcagatctatcagtcgtcgtatttttactggctggtgctctctgaaagtaaccgcgactggaaaagcgacgccgtcctggattgggcgctcggcaatatgctgatgccgcaggacgttatcgaggaggccaaaacacgccctgtcgaggcgcaggcacgtctgcaacatacagcatgggcgcaggcaattaaatcacgtgacggcgcgtgtgtggtcacaggcagcacgtacgcgctggaagcatgccacgttaagcccttcgccgtatgcacagttgccgaagcgcgcgacctcgataacggtgtaacccttacggcgagtgtgcactctttgctggattctggcatcagagatttaaatcccgccgacccgttaacgagcattgtaaaactcgatgcatggacagaattatgtcgcagggttgacgaggcggtggcctga

SEQ ID NO: 127295 - DNA, 186 bp, Enterobacter cloacae
atgactaatcacccgttaatggatcgcaaacagactgccgcactcttgggtatttcccccgccactctcgaccggatgcgccaaaacccgccgcagggtttccctaaatgtgtcgtactgagcgaacgagcaatccggtggcgtcgccgcgaagtacaagagtggatggagggcaccgcacaatga

SEQ ID NO: 127296 - DNA, 183 bp, Enterobacter cloacae
atgatccgcgctctggctctctggctggctctggctggccttgcatacgccgatactgtcgagcgctgtcgcacaagcggcaacggtgacacgatctgcaccgaccaatacgggcaccgcacaaagtggtgccacacctacagcaacgggcacgaggtatgccatttcgataatagaggttag

SEQ ID NO: 127297 - DNA, 267 bp, Enterobacter cloacae
atgccgaagcagaccataagccagccaggggtacgcgctgccctgaaagttatcagcgatcgccgtgaccacgcgctaatcgaaaaggtcgcgttactcgttaccgaacacgggcgatgcagggacatgaccgatcaggcgctggcaatgcaggcgattctcgacaccctccggcctgactggagccgcgagcactttgtcgagacgctgaacgacttagatactacggttattggcgataaactttttataactaaacgatcttaa

SEQ ID NO: 127298 - DNA, 339 bp, Enterobacter cloacae
atgtttcgacacgctgccgtattccgcgcagaccctgcgcttgttttacctcaatgcctgccctacgccgctgccgtcaatggcctgcgcgctgcgctcgactacaccctgacgcatggacacccaccagcacaagcagctgacgtgcgcgggtggctacttgagcaagccgtaggcttgaacgtatgcgatgaagggatcgaagctggtgtgttgctggtggctctgggagagcttcacgcaggcaataaaaaaggccgccctgcaacggcgaccctttcaagttccctcgcgacaaccacgacccgagaaaaccaaattaataaggagtgtaaataa

SEQ ID NO: 127299 - DNA, 2757 bp, Enterobacter cloacae
atgcacggacataataacccagcaacccgcacgcgacaaccacgcacaccgcaacgacctgttaattttgcatggggtaccgacggcaaatcaaacattgcacatgcggcaaaggctgcgtcgtttaaagagttcgctggaatgctcctcgatctctgtcataactacgccgcccccgccctggaaggtatcaaccgcgcggatccagagcaacgtgccaacgcaaaaaaccgcctgccgtggatttgcgcacctatggaatttgctatctctgaacgtggcgacggcgtgcctgacctttacaccccactgcgcaaaaaggcactggcacaaccacgtcgcaccctgcacggcgatattgacgggatcactgatgcgcagctcgatgcactcatgcaacgcattgacgatatcgggttgtcctgcatcgtgcaggcgtccacaagcgacacctacaaaggcgatggcctgcgtgccggacatatcattttcgaactgtccgagcctgtcgagtcattgcacatggcgcatctgtacgaacatttgggcgctgatctcgggctggggctggagtgggacctttcactgagccgtccggcacagatcctgtttttgagcgacgccgatctggtgctggtggagggcaaacctctggacgtgtggcggtacggcgaaccgccaaaacaatcgcaccgccgtacggggatcagcgctcgggtcggtgacgatctgctggaagcattgcacgcggctggcaaatggagcgaggacgacaacggcttttatcttcctgccctcgtacacgaatacagctgcgggcacagctcgccgaccgacctgctgatccggctacctggtggcggctacgacatgatcaccgccgcgtcgttccatcatactgacagggacattgtgaaacacgccggacgtttgctggacgcgcgagggtacccggagatcggcgcgatggtcgccgcagccaacagccaggcgggacgtattcagacagtgaaaggtattaaagtgtgggaaatgaacaaaaccgaacgatccaccgcggataatgcagataatattgagacactgaaagctcgaatgaaaaaggcaacaggggcagaacgtcgggaactgaaagccgcgatcgccgcgatgcagtccggcgaagccccgcaaccgccacgcaccgaattgcacgagctggtcgggcttgagatcggcaaagcgctggtggggttcggtgttactgacgggtacaccccagctgacaaacagggcatttacccggcgaccgctgaatggggcaacctgtcgcgctacgggctgaatgacaccacgctgcggcgcattctggcctcaacgttctacctgctcggtaaaaagatgatcgtgacgatggatgccagaggcgctgtaaagctcctggagcgcacgagcgtgtcgtcgctggcacttgagcatggcgacctgtttaaagcgtctgacaccttgcgcaagctggtgggcgaccacctgaaccgcaaagcgaaagccgataaaaacaaagacgatgccaaagccgccgatgaagcccctgcacgcctggaaaaagcgattggtgatgtaagcaaggcgataaataacgtcctccttaaagtgcttgaggccaaacgccaggctaaccgcatgcgtgtagagttcgatatgttcgccgatcagggctcgtgcgagctggaggtttccggcgacggctgcgcggtgtacacccgtgcggtgccgttgttcaacatgccagccccggacaaggctatcgtggacgactatcgcgatcactggcctgacgtggacaagttcatcgaatggcttttccggtcgcgcatcgcgtcctcgggcaaacaatctttcctgtggaaaaacgcagtaagcaacagcggcaaaaccctgctcatgggcgcgcttaaagacgagctgaacatcgccacagagctgcacctcgacgatatcagccgcaaaggtacactggacggtggacgccctgccgaggagttcgcgggtaaatggctggtggtctttgacgagatcagggagttccctgccgccatgaagcacctcgataactatctgcgcgttacggcgaaatttcagatgacccaggaggtgcgcatgcacggcaaactgatcatgagtgctttcgaactggaggggctcgccgatggggtggagtcacaaatcgctaaccgactgtcacgtcttgagtcatcgaacgttatcaccagccgcccattgtttaaggaacgtcgcggcacggcataccgcatcaatatcgcccgttatatcgcccagcgccttgacgcgatgatcgtcgaagcgcgcgaacaggggcgcgaggaggcagtgcgcgacgctgacaggtggctgggtgagttcctgagtaaccacagcattgcgctcgctgtaggatcacaggatgacgtactggctgaatgggcgggtgatttcgccgagtgggtacgactcgaagcacgcgacggaaacgacacatcgatcaaagccgcgcttaaaggtgacgtattgaaacgcccacaaacgatcttcgcgaagtgggtcgataatgtgttccctaaaaaacagcgtagcgacatcgttcgccagtggcgcgctattctgcatgctggtggctttgaggactaccgcaccacggacaccaaaggcatgaggatgcccacggcggcacgcaaaccaggaaaggatcgccgggatgaaaacatgtggcgtaactaa

SEQ ID NO: 127300 - DNA, 156 bp, Enterobacter cloacae
atgtcccgacttaaaccgactctgatttgtctcgaccctgaccactggaacaggcttaaagtccgtgcagccatacaggggatcaccaccagcgaactggtgcgccgtatgctcgccctcccaccttctcgcaaaccaaaggagcgccacccatga

SEQ ID NO: 127301 - DNA, 495 bp, Enterobacter cloacae
atgaccacagacagcagagacggcaaaggccgattcactaaaggcaaccgaatagccagaggtcgcccaccagcggagcgcctgacgtccattatgcagcgcgctgcccagatcaccagcgagcgcctggcgaaacagaacggtaaaacacccgaggaggtcgagccgctcctcgtggacgaatggttggcgcaactcctggactcctgcaagcccgaggccgctgtgcgcgaactgatgcgcctgaacttctcaaaacctaagccacacctccagcctgtaaaaataaaaatcgacgttaacgatctgcccggtagcctggagcgtgttttaaaggcacaggccaacggcggaaacctcgacagccttgcggcgatcactgactcaatcaacgcgctgttgcaggctcgtgccttgcagagcgagatcgatctggcacgcctcatcgaggccgccgaaaagaacaaagccgcagacgaggacgataacgagtga

SEQ ID NO: 127302 - DNA, 363 bp, Enterobacter cloacae
gtgatcagccctaaaaccttaaaagccgccaggcaaaagctggagcgtataaacgaggcacgcctgcacgccaccatcgcatcacaggggctttccctgatggtagacaggccggaggttaaaaaggtcatagccgaggccgcagcgtggtgtacagcgaaccacgttgatgcggaaagggtgtggggtgtgaataccaaaatgctctgtatgccgatcggctggtgggcacacctcgatccagagttcgccgatcagctttacgccgacggctggacgcacgaccagagcatagtcgccgaaaccattaaacaatctttatgggatagtgctaatggcctctgtatcagtaagtgctcttga

SEQ ID NO: 127303 - DNA, 321 bp, Enterobacter cloacae
atggcctctgtatcagtaagtgctcttgagattcaccctttccctctgcgccccggacgtaaagacaaggctgacggcagcctgatcgagcgcatcgccgccgagctgcggcagatagttgactgccgccggtccggtcgtggcgctacggttatccggtaccacggcgagaagtatcaattcctgaaccgtagggaggctggctatctcgcccgattactccgaacccgcaccagcgtcatactggctgcgtgcacctggctggcctcccagcatgccggagcggtgagtatggacggcgaagatatcgttgacgaataa

SEQ ID NO: 127304 - DNA, 276 bp, Enterobacter cloacae
atggcagaatacaacccaccagtaggcgcagctcgctctgttctgaatccaggcggcagcgtgccgaccgtgaacgccgacgattatttcccacgccacggcgaagcacaggccgcgattatgcgagcggttgagactacgggcgcttgcgttgtgacgggcaccatgacgatcgccctgcataatggcctgcgtgcacaggctaaacgcgagggcaaagcgatcagcatcaaacagtccggcgctggtctcgccatggttacgagccgcgcatga

SEQ ID NO: 127305 - DNA, 1959 bp, Enterobacter cloacae
atgaacctgcgcgaattgcttgtaaaaatcggggtcgatgactccggtacaacggaaaaactggacaagatcgatcacacagccgatcgcgtaaggtcctcaattatggggcttggttcagcgctggctggcctcggaatcggcgcagcagttaaacagctttctgcactcggcgatcagctccagagcctacaggcacgaattgacaacgctgtcggcgggcatatcgaggggctgtttgaaaccatctcagaacacgctagccaggcaggaatggacgtatcggcatacgcggattcgtttagtaaatttggcaacggtatgcgtcgactcggctatgacgtacaggacactctcgcacttactgatacgctttccggcgctttcgccctgaacggtaccgaagcacaacaggcagcaggtgccctcttccagctcacacagtcgatttcttcgggtagtgtgcaaatggaagagttaaacagcttcatggatgcatcacccgatttgtataattcagtcgctgaaagcatcggcggcaacgtgacggcatttaaaaagatggtgagccagggcaaggtcagcagcaaaatgctagccgacgcgatcctgtcgcaaaacaaacgcatcatggaagccgtcaacaagatgccgctgactttcgataaggtatggacgcggatccgcaatgacgcaaaaaccgcatttaagcagctggtagtagataccgggatcctgaaagacgcagccgccgaccttaaagagtggtgggacggggcgcgcgagagctggcagcagttcgttaaaagcatgggcggcacccgtaacgtcgccgagtccattaaaaatattctgacgccgctgaccgcgctgttggggatcctgacgggcttcaaagcgctgtcaatgttggcctcgcctgttacggctatcctcgcactcgccacggcgatcggcgtcctgtacgacgattacatggtctggaaagagggcggcaccagcctgattgattggcgcgagtggcagaccacgctgaccgaagcggggaacctcgttaccagcctgaccaatgacgtggaagggctgatcaaggccactaaagacctgcttggcgtggacgtcagcaagtggacgctgaaaggcgaagtcgagaacctgatccatcaggtgcacgtcctcaccgcatccattcagggcgtagtcgataccattaagaacctgagcaacggcgatcttgagggtgcttggaagtctgcacaacgcgcatggaaagggcagacgtgggaagagcagcagaacgaggaaagcgagcgccgcagccgtgaggccgcaggcctgccgccgaccgagccgtcgcaattccagaagttcgcagacagtcctgtcggtaagatgatcagcttcccagctgacgcggttgtggacgcgttcaattgggggcgcaataagttatccggtccagccgcaccggagtctgtggaagttaacccataccccaacaacgtacagccggatatcccaggagctgagcctaccggatttggtgcaccaccagcgatcccggctccagtggtcaacaccacagtaaacgttccagagccaaccatgccgggctcacagcctgctgtgtctccggtgcaggccgcggtcgctgcggttgctcctgtggcacctgttgcccctgttgctccggtcgctgaggtcgccccagttgctccggttgcaccgatcgatcaataccgcaacccgttgtcgaccggaccgcgtggaacggcgcaggaggtcacaaacaacgataaccgtaattacactgacagcagcacgtttgcgcctgtaatcaatgttaacgtagcgccgggcattgacgggaaagcagcaggtgatcaggcctttgaccggatttctgagttgcatcgtgaatactcgcagggaatgcgcgatatagcaggcgggaaatga

SEQ ID NO: 127306 - DNA, 453 bp, Enterobacter cloacae
atgaaatctatgaataaaacctttattgctatttttgtaatgggcgttgtcttagtgggtacaacgagcctggctgaagccgcgaatacggtttgggacgatcagcaaatcactaatattgtaaatgaccatcaggatcagattgcacaaaacaaagctgatagcattaaccgtgatatcgcaacggataaccgcttaacgcaggttaatgacgaccttcagtccacaaaaccaggtgtgttagtcgtggataaaatggctaacgacgcacatcagaaagcgttgcttgccggtgcgcttgctgatgtgagacggccctacagggtgtggcgactaacggcacagatggagagaaaggtgataaaggcgatgccggcgcgacttacaacagcgagagcgcgcttgctgtcggtgcatccgttaactttaattcccatgtcatcgcgaaagtga

SEQ ID NO: 127307 - DNA, 1314 bp, Enterobacter cloacae
atggataaagttacatatccaacaggcgtcgaaaaccacggtggcacattgcgcatctggtttaatttcaaaggtaagcgtgtcagggagagcctcggtgtccctgacaccgctaagaacaggaagatcgccggagaactgcggacatcggtatgttttgccatcagaacaggcacatttgagtacgcggcacagtttccggactcccctaacctcaagacatttggggtgggtaagaaagaaattacagtttcagagcttaccgaaaagtggctggatctgaagagaatggaaatctgcgcgaacgcactcaaccgttatgagtcagtcgcaaggaatatggtaccaaggatcgggggtaatcggttggtgtcggcggtgactaaagaggaattactgtatatcaggaaagatttactgactggtcaccagatgccaatgaaggggaaggtcccggcaaagggaagaagtgttgtcaccgtaaattattacatgacaactattgccggaatgtttcagtttgccgcagatcacggttacttagaggcgaacccattcgacgggatcaagcctcttaaaaaagccagggcagagccagatccgctaactcgtgacgaatttattcgcctgattgatgcatgccggcatcagcagacgaaaaacctgtggtcactagcagtatacacaggggtccgtcatggggagctgacctccctggcctgggaggatatcgatcttgaagctggaacaataacaatcaggcgcaattatacaaaactgggtgaattcactctaccgaaaactgaggccagtaccaacagagtgatacacctcattcagcctgcgatcagcgtcctgaggaatcaggcggaaatgaccaggtttggaaaaaaacatcagatcgatgttcagctgcgcgaatacggcagaactgagagccacgagtgtacatttgttttcaaccctcaactggtcagaagatgtcagcaggtggggatcatctacaaagtcgactcgataggtgatttatgggacgcagcgatgaagcgagcagggataaggcacaggaaagcatatcagtcgcgtcacacgtatgcatgctggtcactgtcagctggcgctaaccccagcttcattgccagtcagatgggccatgcgagcgcccagatggtcttcaacgtatacggtgcgtggatggcagacagcagtagtgagcagatcgcaatgctgaatcagaggctcgcggattttgccccacagatgccccaaagcatacctagcaccgccagagcattattgaaatcagtaagttag

SEQ ID NO: 127308 - DNA, 426 bp, Enterobacter cloacae
gtgaaaaataatgaaatatggaatccggctggctctgttgagctggcccaccagcaagctctgacatgggtatctgatgcctacttattccatctggtgagtctgcatcgtcgcccggtgtaccgccaccagtacggcgacatttcgcttaatcagccagcattgcaggcattcatcgattcgtatctggaagacaagggctgggatatggaaaaacgccgtgcccattacatcaacattctggacctcatcaaatatatgcatcgcagcaattcggacttcatcgactggggaaccgtgccatcactaacgccccgcgggttgcgctggatgaacgcctgtttctcgaggttgggagacatggtcaacagctgcggtggttgggaaaactgcgtcgagaaaaaaatggagggtactaatgcgtga

SEQ ID NO: 127309 - DNA, 744 bp, Enterobacter cloacae
atgaacacagtaacgatcaataaccaacagcttccggcagtcgaatatcgcggtcagcgcgttgtgacgctggcgatggttgatgaagtccaccagcgaccagaaggcaccgcgcgtgcggcattcaaccgaaaccgtgagcatttcatcaacggtgttgattatgccgaattaggtgcggacgtaatacgtacggacctcccggaagggacattctctaaatttgcaccgtcagggattgtgcttttcgaatcaggctacctgatgttgacgaagccatttaacgatgatcttgcctggcaggttcagcgcgaactggtcaacagctatttccgcactcgcgcaccgctgactgaaatcgagatgatcgctgcaatggccgccgacgccgttcgccagcagaagcgcctgaatcatgttgaagagcagatcgaaacggttaccgaagccgtggaaaacattaaacgcggcaacatgcgcgccgggtatgtgggataccgccaggttgttgcccaaagtggtatgactgacgccaagtgtcgaaatctggtcaacgcctaccgcatccctaccgacacacacgaattcatgactcctgatgggcttttgtctcgtagggctatcgtcgagcttgagccatttatggcagcgttccaccagatgatgtcagaagctgagccgcgcggcacccgctggtatcaccctaaaatgggcttgttccaagcgatcggctgggaggggtaa

SEQ ID NO: 127310 - DNA, 828 bp, Enterobacter cloacae
atgaaaaatgcaattatggcttcaattatcgcgctctctgcaatcggtcttgtaggttgcgatcgagtcgaacccggcaacgtgggtattaaggtgaataagttgggcgacgacaaaggtgttggcgaagtggtaggtgtgggtcgttactggactggctggaacactgaggtttatatcttcccgaccttcaaacagatgaagacctacgaggacgctttcaactttcagatgagcgacggcacaactatcggctatcacatcggcgtcgcctataaagttgatccgaccaaagtgacgacggtcttccagacctatcgcaaaggtgtggacgacatcaccgataccgatttgcgccaaaagattgcagacgcccttaatcgcctcgcaagccgcatgagcactgataagttcattgacggcgggaaagctgaactgcttgaaaacgctctgaaagagattcagtcagacatggggccggtaggaatccaggttatcagtctttcttacgtgggccgtcctgagtacccgccgacagttatcgacagtatcaatgccaaagtcaccgccaaccagaaaaccttacaacgtgagcaggaagtgaaacaacgagaagctgaagccaacatgctgcgcgctgaggctgatggccaggcggatgcaaaactgaagctggcagaagcagaagcaaagtctatccagatccgtggacaggccatgcgtgagaacccggaagttctgcaactggaggccatcaacaaatggaacggcactctgccccagtacatgaccagcggcgccaatactccatttatccaggttaagtga

SEQ ID NO: 127311 - DNA, 195 bp, Enterobacter cloacae
atggttgcttacttacgtgttgttttatcaatggtgattgtcgccagcgtttatgggttgttcgttccaatcctcatttcgatgaaggacacgacggcagttatatccggctttgccctggcggttctgaccccgccgtgcatctacgccatttgtaagggtcttgtagttaccgtaacgaaggaaaaaaaatga

SEQ ID NO: 127312 - DNA, 408 bp, Enterobacter cloacae
atgaaagataaacgcatcagctcaacctcaattgatagtgcctttgctaaagatatgcagccagtttacgtcgtatcacgacacggctactcgcgccgttttctcagcaggagtgcggcgatcagcaatcttgctcactacatggtgaccaaaacttttcagcgcgccggcttgaataccaacgaaccagacgagcctgtgttcagcaacggtgtgctcgtcaatcgaatgggccagcacacccagcaatatctctttgcacataaccgatgcatgaggcgcatccgccaaatcctggaacgtaagcgcaatatgcagaagtggctcgagaagtgggacgccatgcacgaccgctacgtgaaagagcaagcagagctacaggccagcaaaccagaagggatcagctga

SEQ ID NO: 127313 - DNA, 294 bp, Enterobacter cloacae
atgaacacaacctctctaccaaacccagcgaaccaggaatttgatatccacgccaagatcaaatcggcaaattcgcactggagttatttacgagctgctcaacctcatcagaatgattttgattacgaatttaacaccacttttattgatggtttagaattcgctatctatgcgcgtaatggcgattattttgttctggttgatttttttaagtcatacaatgaagcatgtaatgatgctaaaaaaatcattgatgaacatcctgatattaaaaaaatggtctcgaccatttaa

SEQ ID NO: 127314 - DNA, 297 bp, Enterobacter cloacae
atggctgctacaaacggtatgattgatactgatgacgctgtaattttactcatcgaccatcagagtggcttattcaacacggtacgtgatgtgcctgtaccagaccttcgtaattatgtgacagcgatagccaaagttgccacgcttttaaatatcccggtgatcaccacggcctctgttcctgacggtcccaatggcccgctcatcccggaaattcacaaatatgcaccccatgccgtgtatgttccacgcaccgggcagattaatacctgggataatccggcgtttgtgaagtaa

SEQ ID NO: 127315 - DNA, 1194 bp, Enterobacter cloacae
atggctatcaagaacaatcagtatctttttcaaagtcattgcgggatctgggttttccaaatcttcgtaccaaagtacatgcgccacatattcgacaacaaacgagcctggagaaagtccaccgggacgaaggatatcgacaaggcgcgacacttcagaaatcacatgctgattgagttcaacaacctgaaagcgatgttgaaccctgatcgggaagatatccgcattcagaatgctctctccgtcctccactccactgtaaaacaggcaaagagtgtaccaacggcaattggccccgttccaacgctggcaactgtccgtgatgaatacatgactgtttatagtgaacgccgggcattctctaccctaagcaaatcagcgagggccgtagaagtgtttctccagagtattgggaaagttgatattggtttgaataagatcggacgtagggccgtcacagacttcatcgagtgccaacaatcgaaggtagcgcctcagactatccagaactggctaacctctttaggaagcctgtacgagttcgccaaacgtcgatatgacgcaatcccagacagcaacccgtttcacggtcacaacctcgaagcacggcgcacaattgaaagttatcaaccgtttgaagccgatcaactggtaacccttatcagagaagcggatgacgttctacgcgatgtcatattgattgggctgtattcaggaatgcgacttgatgagatcgccagcatcaaacgggatgaaattgtaatgttggagggtgtcagatgtttctttgtcagcaagtccaagactgtagcaggggtgcggtacgttccgatccactctcttctgatcggcattattgataaacatctggcaaatcacagcggagaatatctgctggcacagtcaaacaatatcattcggaaggatggtaaacggggaccgtggtacagccaaaagttcacccgactacgtgacagcacattgcccacagctacagatcggcagtgttttcacagtttgcggggaatgttcattaccagcctggaccgcgcgggagtccccgaacaacggatcggagccatcaccggacacaccgaacagaaagcgaaaaccgaagcattcagaacctacagcaaaggcgcgaggatgaaggaactatcggagtatgttgagttagtgaattacgatatttaa

SEQ ID NO: 127316 - DNA, 279 bp, Enterobacter cloacae
atggctaataatttatttattacttacgacctgatcaagaccaaagactatccggcagtacataaagccatccaatcattaggggcgtgggctaaagttacggaatccaattggtatgtgaactcgacatgcaccgcaacagaagccgccaaaaaagtaagagctgctatggatggcgatgacaagttaattgttgttgatgcaacaaataatacttttgctgcttataatttgagtgatgcagttgttaatcagttaaaaactgaatggtcgaaataa

SEQ ID NO: 127317 - DNA, 180 bp, Enterobacter cloacae
atggctgatgacaagacaaaaatcggtacacctgacaatgatttaataagtatcaaacaggattacgagagacgtgattgggctaaaaagtttggagttagtgaggccaggcttattcaagccgtacaggccgtaggtcattcggctaagaaagtacaggcatggcttaaagaccattga

SEQ ID NO: 127318 - DNA, 249 bp, Enterobacter cloacae
atggcagcgaatagtaagcaatcttcacaaagcgtgtctcatttggcagcagagacccttaacaatccgaacgcctcggcgattcagaaaagtttagcgggttcggtactttcccaggccgggacaaaaaaccagactggtgcaggtatggaagccaaagcatcagcagcattgaaaaacccgcgctcaagcgaagttactaaaaccttagccggttcagtggtttcgcaatcaaataaaaaacgttag

SEQ ID NO: 127319 - DNA, 492 bp, Enterobacter cloacae
atgatcttgtctcgggcaaaactcatcgctgaaggtttcaccctgtccaagtccgcccgattcggcatcctgcgtaagggtaacgccgtgggatctatccaacgcaaacgcccaatttgtagcacctatgtcgggcagtgtacgccgatcgctgacgtcatctatacgttagccgtgggagacatcccggaaggtcataaggtcgtactccttaaccctgaagggccttttacagtcgataacgtcgctctgttgacccctgaagaggccaaagcgcgaattagcaggattcgatccgagggtgccaaaggaaagaggtccccaaagcccgccgagttgccaaaaggcatcatggaacgtaagccggggtattacgtggcgtcattcatgcgtgatgggaagcgacacaacaaggctggaaaagacatctcagaattgactgtgtggctgttacacgagcgtgacggaatatctatcggggggattgtgtaa

SEQ ID NO: 127320 - DNA, 1362 bp, Enterobacter cloacae
atgtttaaaccggaactcctttccccggcgggaacgctgcaaaatatgcgttacgctttcgcctatggtgccgacgccgtttacgcgggccagccgcgctactcgctgcgcgtgcgtaacaacgaattcaaccacgagaatcttcagctcggcatcaatgaagcgcatgccctgggcaaaaaattctacgtggtggtgaacatcgcgccgcacaacgccaagcttaaaacgttcattcgcgacctgaagccggtcgtggagatgggtccggacgcgctgatcatgtcggacccgggtttaatcatgctggttcgggagaacttcccggagatggacattcacctctcggtgcaggctaacgccgtcaactgggcaacggtgaaattctggaaacagatggggctgacccgcgtcattctgtcccgcgagctgtccctcgaagagatcgaagagatccgcacccaggtgccggatatggagatcgaaatcttcgttcacggcgcgctgtgcatggcctactccggccgctgcctgctctctggctacatcaacaagcgtgacccgaaccagggcacctgcaccaacgcctgccgctgggaatataacgttcaggaaggcaaagaagatgacatcggcaatatcgtgcacaaacacgagccgatcccggtcaccaacgttgagccaacgctgggtatcggcgcgcctaccgacagcgtgtttatgatcgaagaagccaaacgtccgggcgaatacatgaccgccttcgaagacgagcatggcacctacatcatgaactccaaagatctgcgcgccatcgcacacgtcgagcgtttaacccagatgggcgtacactccctgaaaatcgaaggccgcaccaagtcttactactactgcgcccgtaccgcacaggtgtatcgcaaagccatcgacgatgccgccgccggcaaaccgttcgacaccagcctgctggaaacgctggaaggtctggcgcatcgcggctataccgaaggtttcctgcgtcgccacacccacgacgactaccagaactacgagcatggctactctatttccgaacgccagcagtttgtaggcgacttcaccggcgaacgtaaaggtccgctggccgccgtcgccgtaaaaaacaaattcactaaaggcgacagcctggagctgatgacgcctcagggcaacatgaacttccgcctcgagcacctggaaaacaaaaaaggtgaggcgatagaggtcgcacctggcgacggccatgtggtctggctgccggttcctgaagaggtagagctggagtttgcgctgctgatgcgtaattttgaaggtgaaaatacccgaaatccacacggcaaatag

SEQ ID NO: 127321 - DNA, 183 bp, Enterobacter cloacae
atgccaaccaaaatcgtcataaaaaagaatacgtatttcgattcggtttccttaatgtcggtttccaccaaagccaataaattgccgggcgtcgagcaggcgctcggcgtacttcacaccgcgcgcgtttgcttccattttggagaggggctcagcaagccgaactccagaagcaaaccctga

SEQ ID NO: 127322 - DNA, 1044 bp, Enterobacter cloacae
atggcacttaagcgcgcatactacggtaacgatagtgaccgagactactttgagcgggtatttcagtcagctaacattaactttctcatcggttctggtgcatccctccctgcgattaaagtactggggacaatcgaaacggaccttcagcagctaattaatgatgagcaagaagaggaatacttcaggatgggcactgactttttgtcagctgtttggcttcctcatgaatgcatgttgcagcgcggccacggcgccccattcgcacctcaggtgatcaccaatttagaatgtacccgtaagaattatgatgcatttatgtcttcactggaaaagatactgactcgacgccggactggcttacttccgaggcgtattaacgtttttacaactaattacgatttgttcattgaagacgctgccactcgtaataataatattctttttaatgatggttttaatagaagatcaaatatctggggagataaggaatttgatgcgggcagctttaaccactcggtaagtgcaactgggaacctgtataattataaagttgaactccctactgttaaccttataaaacttcatggatcaatttcttggaagcattctaaaggaaagattatttatcgtattgcagatattatgccgcttaactttcccacccctgccgaaatgaaagaatgggtacttgctcatacacttgttcttccacgcaaggaaaagtttaaagagactctactacaaaacgtttattatgatttactgagagcctattccaatgagcttgataaagaagcaactctactaattgtctttggattctcgtttgctgatgagcaccttgaaacaataactaaaaaagccttgcgcaacgctaccctgaaactactgatctttgcttacgatgaggccagtgttagtgggtttatggagagatttcgagattactcaaacgttgagattatttatcgtccgggaggaaatgttgatttctcggtaatgaataacattatcacgtgctatctgggaggctcgaaatga

SEQ ID NO: 127323 - DNA, 1830 bp, Enterobacter cloacae
atgagcaggcattttactgaagaggaagcggtgctccgtataggtgaagtctgcgaggtttctggacgtgcagtgaccattttggtagataaaaataaaaatctcagcgatttattttatcatggaaaagttctaagaaatgtatcagtgggtagctttattgaaataaaaaaaggtttcatgagcctgatcggcaaggttgaagcggaacgagtcattgaggaaaaacatctcggtgggagcggcagtgatgcttggcgatatcggcgatacctgacctcgactctgacgggttacattaatcgtactggttgcttcattggtggttcgcgtgaactacctctcatcggcaatgaagcctttgtggtgactgaagagatgatacatacggtgcatcagatagctgatgcagacgaaactgtaatgaggtttactcgtacagatcttgaaaatattgaaatttcattaccaatcaatggacttattaattctcacattgcaattttcggtaatactggtagcggaaaatcaaacaccctagccgcgctatacaaagcaggtacagcccaagttaaacatattctcggcaatcattttagagaaagatgtaaatttattctattcgactttaatggagaatatactgccccatactgtattactaacgagaagacggtttataatctcaatacgcatcatgcaggtggtgacaaacttcctctgcccagagaggttctacttgaacatgatatgctctccgttctaaccgatgcaacagacaaaacacagaaaccatttctgaagcgagtgcttgaatttcgcaagaaggtgatgaccgctgacaatcctcttgagtatatgcgtaatgtcctgaagaaaagagttaggcagaatctctttagtggcgataagcccaaatgcgatgctataaatcagtttttcagtccaatttttaacgatgacccagaacttatatctgatcttgagtatcattcgactgcatataaatggaaattgagaggtggtatcattttcaatgctgaggttgatactgaacgctcctatctattcagtctcgcaagcaattttttatttaaagcagacatgattgaagatttattggattttatgtatttacagttaattcaggaatgtttttccaacaagtctaaccctgaacatatttcaccagttataaatagaatgagtgctaatcgtaaagatatagcaaaaatttttgacacttcaggacgtcttgatttttggggtgaatataacttcacggttttgaatctaaacatggttaatataaccatgaaaaaaacgcttcctcttttaatagccaagtgggcttacaatatgaagaaaatgtctacagagacatctacactacacatcattatagatgaagcccacaatattttgtctaatacttcttttcgagaaacggaaagctggaaagattatcgtctggaaacttttgaggaaatcataaaggaggggaggaaatttggagttttcatcacaatttccagtcaacgccctaatgatatatcgtcgacaatcatatcccaagcacacaattattttatccatcgccttattaatcagaatgatctctacgcaattgaaaaatcggtatcatatatagatagactgactgaagagtcgattcccacgctatctacaggaacatgtatttttagtggtgtcgtctgccccatgccgctcaaattaagagtagctgaacttcccagtgaagagaaacctaagagtaatactatttccttcaacgatttaatacctgagaggcagggagacgatgactag

SEQ ID NO: 127324 - DNA, 435 bp, Enterobacter cloacae
atgaaaaagatccttgtatcatttgttgccattatggctgccgcttcatctgccatggctgcagagacaatgaacatgcatgaccaggtaaataatgcacaggcacctgcccaccagatgcagtcatctgctgaaaaaagtgcaattcagggagacagcatgacaatgatggatatgagcagtcacgatcaggccgcaatgtcccatgacatgatgcaaaacagcaattctgctgcccaccaggacatggctgaaatgcataaaaaaatgatgaaagctaaaccaggagctaccaacgaaacagcaaagtcattttctgaaatgagcgagcatgagaaggccgcagctgtgcatgagaaggcgaataatggtcagtcttccgttgttcaccagcagcaggctgataagcatcgtagtcagatcacccagaattaa

SEQ ID NO: 127325 - DNA, 252 bp, Enterobacter cloacae
gtggcaggactggccatcgccggaacgattctttacgaaagctatgtgtccgcaccggatctggctgatgacattgccaacggccgcagcctgacgaaccggtgtgtggaaacctcccggaccggtcatgtagtgcagctggagtgccaggcgatgagtctgcgtgtgacgacggcggattatgcgcgcgccgtcagagcctgggagctgaccggtgaacgccgggagacagccccgactagcgcaaactga

SEQ ID NO: 127326 - DNA, 309 bp, Enterobacter cloacae
atgggaatgtttgatacggtcagattccggtaccggatgcctgacggagtcaccgggacggactttcagaccgacgacctggactgcgagtgtgaattttacgagatttccgctgaaggccgcctgcttcgctggatgggtgacggtacgcgaaccgatacctgttttgacgggatgctgaccctcagtgccgatgacggttatcacctgtattttgagcacgggacactggcgtggatcgaggtgtactcgcagggcgacaggcgctggccttttgagcctggccgttttatgacagacctggcctga

SEQ ID NO: 127327 - DNA, 357 bp, Enterobacter cloacae
atggccaccgctttcagcaccatgcgcaagtacggcatgaatatcctcaccgccacccagcatatggatattaatgcttacgtgaaatccgatccgcggatgccgagaatgcggctgcgccgctacctgggccagtacggtctgcgcggtgaggcgctgaacagggaggtcaggcgtatagttgccggaccagaacgacgcgacagcacgctgcaggtagggatttactatacgtggccctatggctgggagcctgcggatttcacgccgatgatgaggcgtatttttcgcggcaagcgcacccgtcatgtgatgttgtttgatgaactgcctcagctgtttggcaaatcaggataa

SEQ ID NO: 127328 - DNA, 333 bp, Enterobacter cloacae
atgaaccatgacctgatggctgtttatgcagccagtgagatcgttgagctgctgacgctgtgccaggaactgcagtcggaaaaggacggccgggaacgaccggcgcccggcgcatactcccgcgatgaggatgcgtttgccgaacgtatccgttccgcatgcgggcacgccctgttgttgcgccgcctgctgccggtaactacgaccctgagcgctatcggcgccgagatggaacgccggggagaaatcagtgtgctcccgggcgaggattacgcgcagaaggccctggcacgacttacagtgcaatacctctccaccgggggcaataaataa

SEQ ID NO: 127329 - DNA, 630 bp, Enterobacter cloacae
ttgaaatggattaattttttacaacgtcttttacaacgttttttcccaaaaaaaaatgaaataattgaagtgaaatacattgaaagggatgaaacaagagtattaccagacatccctgaaaacgtcatagctgcctgtcagactcttcaggtgaagctggattctgttaagaataatccatttttggaaattagtttgatttatggatttcttgatacttttggcgagtttgcatcaacctttacagtatgtcagaaaggttgcagcgcctgttgcaaaataggtgtcgaaatgacggcattagaagcaagttttatagaaaaaaacacatcccacagaattgtatctaacaagcaaagaaaattaaaaaccaatacagattgcccatttttaattgatggaatctgctccatatatgaatatcgacctttcaattgtagaacctttttcacagtagataaccctaagtactgcgaaacaccaaacgaacctcataggacatatgggagtttaggtggtcaagacataaatataatttatcagtttcgaaaatatattgaccatctaaatgggaagaggaagaagagtgatatcagattcttctttgggaatcataaaggaataaaatag

SEQ ID NO: 127330 - DNA, 174 bp, Enterobacter cloacae
atggacaaaaagcctcgctattctgtcatgctggatggggatagaaccgtctatagtggaaatagtcggtttgtcgcctggacgttctggctgatgaaccgccatcgtagggctatcgcatatgattgcggagtttgggttgttgaaccagcctactggatccgtgtcgtttaa

SEQ ID NO: 127331 - DNA, 333 bp, Enterobacter cloacae
atgaccgtgaggctttattacaatgcagtagatagacgagcccaagcgagcaatgaatggcatgctgagtggataagtaaacgtggcttgaaagctcgtctttggactgacaaggcgatcagtgaatttctcggtgcgccgctcagtgcaggcccggtaaaagcctggaaacagaaggaagtgaaaaaagtcgaagcgacacccgctttcaaaacatggctggaacaacgtcgcgcatggctggttgcgcggggtaaaatatcctctgatacagagttgccttgccacctggatgctccgataattccaggtaaacaacataaggaatcataa

SEQ ID NO: 127332 - DNA, 975 bp, Enterobacter cloacae
gtgaagaaaaaaatagtagctcgcgggcgaaacattttaggtagtgatagctcagattttatccgtagcctcgaaaccaaagaagcagagaaggtattcacccttaagtccggtaatcaggccaagttcaccctctcaaccattttgaatggtgatattgaagagaagacatttgtggatccagctgttaacggtcgcgaccaaaggtatgtaacccctgagtcagtgagcgacataacgcgaactatcaacctgcagcaatttttcccagcaatcggccgagttattaacggttgtattgaagtgttagatggttcccggcgccgggcggcatgtatcttcagtggcgcgaaattcgaaattctggttacagaagatgagataagtcttgaagatgctcgtcagcttgccaaagacattcagaccgcgcgtgagcatacgcttcgtgagataggtcaaagatatcaatttatgtacgcaaatggcatgtctaaggatgaaattgcgcgcgtagaggacgtctcaccggcaagcgtttcccgagcgtttcaagctgcttctgtgccagctgaaatggtcgagttattcccggttatcaatgaactctcccttgctgattaccagctgctgttaaaaatttcagaggacttagatagcaaaggtgtgcctctgtctgatttgctcggaaaagtgcaggcagacatcagtgcagcaaaagttgaaagcgtaagtaagtcgctaattatggactcttttaaacgccattcgaagcagctgaagccagcgccagtgaaaactgtacaaactgaaaagctacgtgagtttgaagacaaaaagcagtttgcccggaagaaaaccgatccgtctaaacgcttagtgacctatgaatttgcccgtcttcctgcttcagttcaggctgagttagataaggccatcaggctggttatgggcaacatgcagtccttcgaaaaataa

SEQ ID NO: 127333 - DNA, 1206 bp, Enterobacter cloacae
atgaaacgagattacggtggagtaggctcgatagcgcgacgagctggcatattgcttgagtcaatgagccgggacattgaagatcaacgcaaagagtttaaccttacagaatacttccagacatttacccggaacgcagtagccaaattacccaagctaagccgtcgcatcgtggagcaggccattaaagaaatggaagatgcaggctacgatttcaacaagaaacgcgtcggaaatgttgagcaatatgctcttacagtacagaatgttattgatatttacgcccaccgcaagatcccgaagtatcgtgaaatccatcaatcgccttacgttattttcgtcgttaacttgaaaggtggcgtatccaaaaccgtatcaactgtaacgctggcgcacgcgttgcgagtgcatcaggatttattgcgtcacgatctgcgtattctggttattgaccttgatccgcaggcatccagcaccatgttcctcgatcacacgcacagtattggttccattcttgaaaccgccgcgcaagcgatgctaaacgatgtcgatgctgaaaccctgcgtaacgaagtgatacggccaaccatcattccaggtgtagatgttattcctgcttctattgatgatggttttgtagccagcgcatggaaggagctggttagcgagcacctgccgggcgtaaaccagtacgaagtgcttcgcaaaataattatcgatcgtgtggctgatgactacgatttcatcctgattgatacaggtccgcacctcgatccatttttactaaacggtttggcggcaagtgaccttattctcacccctactccgccggcgcaagtcgatttccattccacgttgaaataccttacccgcttgcctgaaatgctggaaacgctggaagaagaaggcattgaaccgcgtctggctgccagtattggttttatgtcgaaaatgactggcaagcccgatcatctggtttcacatagccttgctcgtgaagtctacacaagcagcatactggactcttccctgccccgcctggatggctttgaacgttgcggagaaacgtttgatacgattattagtgccaacccagcatcttatcccggtagcaacgacgcgttaaaaaaagcgcgtacagaagcagagcattttacgaaggctgtgtttgaccgtattgaattcctgaggagccaatcagcgtga

SEQ ID NO: 127334 - DNA, 897 bp, Enterobacter cloacae
atgtataagaaaagtgtagatctatcacttgaatcggttctcgtagaaatcgatgaaaataagaagctcatgccttccagaaacgctactgtccagcctgtagctttgatgcgcttaggtctgtttctaccttccttaaaacgaaaaggaaaggacacagaaaatatcagtattgatgcgagtagcgaacttcaaagcttagagttggcaagagccgaaggttatacagacatccgtattaccggcccacgactttcgatggagactgacttcaaggtgtgggttggcatcattctcgcgttttcgaaatatggcttaaacagcagcaccattgaacttccattcagcgagtttgctacattctgcgggtttagctcaaaggacaaagataaaggactcagaacgcgcttggccgactctcttattcgtcttcgcagcacaactatcaagcttgcctcagaaaaggatcggaatggtgttgtatctggtctgttaagtcgtggtaagtgggacgaaaaagacgacatcatggaacttaccgccgatgagtctctttgggagctttatcaattcgaccgtcaggtgcttctgcagatgtttataatccggcaacttgcgaacaaagggacagcacaggccctatacactttcattgagagccttcctgagcgaccaataccactatcgttcgcgcgtattaaacgtcgcctaatgcttacctcacccaataaccagcagaatcgagtgattaacaaggctatagacgagcttaaagcggtcggttatttagatggcgatgtcgttaaaaaggatggtgaatggcacttaatcataacccgtcgcacgcctaggccagacattaaggctatgtctgaagccttaaaagatggagagtaa

SEQ ID NO: 127335 - DNA, 663 bp, Enterobacter cloacae
gtgccggacggccagtattctttctatctgcacagcgacgatcgcaccgacatcgcggcgatggcgaccatcagcaccatctcacagcccctgcgcggtgacttcatccggaccgccgccaccgccggggcggtgatgtaccagacggatgcccgtttaccggcgctgatcccggtgttctttgacgggcatctgagcgccatccggctttgcgccgtgatggccctggtcgccggcacatggtcttcactctcaggacttcctgatgagcctgatggtggcgtggcggctctggccatgtcaccggatacggaataccagcgccggcgttacaccctgacgcttctggatgaccggagcagtgaacgggttgagcgtgtgctgacgggggtgtcatcgcgcctgcgcggagagctgctgagaaacctgattatcaccggtctggccctgcatacgaccgcgccggagctgccgcgtctgctggccagcatgccggtaccgcccggcacggtcagcgagctgcaggttctggttcagcagatggccggtacggctggcgtgagtaaggctgcagtaccggagaaaccagcacagcctgccgcaccggtaaccggtgaagcgacctggataaagaaaaatatgcgacgggcattcggtgactaa

SEQ ID NO: 127336 - DNA, 231 bp, Enterobacter cloacae
gtggtccctggtatcagaaaggttttgcgatttgccggggcccccgttgacgcatcagaggcagaacgccgtaagtatggccgccgcctgattctgatcgtcaccgcctgtcttcttccgttgttgtttgtcggggctccgttgtgggtatttgtgctttcacaggttgtatggggagccgggatgtacgctggcatttccctgatcggtgacaaaactgatatccagtaa

SEQ ID NO: 127337 - DNA, 306 bp, Enterobacter cloacae
atgacgttcactacgattgaagaggtcagaaaccgaatcgaccagttagacagagaactggttaacatcatcgcccggcgtgccgaatgtgttaaagctgcagcggcattcaagacggatcattccgccgtccgggctcccgatcgcgtgcaacaggtcatcgacagggttcgcaggcaagcagctgaggccgggctttcagaagtgattatcgagaaaatctaccggaccatgataagcgcatttattgagtatgagcttgagcaacatgaccagcttcggcataccgcagcgaagactgactga

SEQ ID NO: 127338 - DNA, 426 bp, Enterobacter cloacae
atgtatcacgtctgtcaaaccgcgctggatgttgaagagtccgatcgcctgtcattcctgcctgaattatttgggacagattttctggccgcagagatgcaggtctatgcgctcgctgagaaacacatcaccgattactgcggaggattctggcatttcatccgtattccggaggggggcggctacatgatgccggacggtgatcgtttccatctgactaatccggataactggtttgatcgttctgtcagtgcggatgcggcagggatcattattacggcgctggcgatcaaccgccgtatctggctgcactatgagcgcggtgatgttgccctgacgcgccacctgatggtgcaggagtcctgtctgtggaatttcatcagctcccatgacgaatgtgccgctatttgtgctgccctggactga

SEQ ID NO: 127339 - DNA, 501 bp, Enterobacter cloacae
atgaacgctacatcaccggcggtgtacgtggggacataccacaaatacaactgcggcagcatttacgggaaatggcttgatctgacggattttgacggcgaagacgaatttctgaaggcgtgtcgtgagcttcatgccggcgaggacgaccccgagtttatgtttcaggaccgggaggggatcccgtctcagtttgcgtctgaatcctccgtgaactgggagtatattgcggccttcaggcaggcacaggaagaagggcgaaccggcgcgtttgtagcctgggcagaatataccggtgaatgcgattatgacgccttcgatacggcgtattacggagaggctgacagtgaggaagattttgcttatggctttgtggaggaacacggtctgctgaatgagatgcctgaatccctgcggtgctatttcgattatgaggcttacgcacgcgatttgttcagcagcggctacgtgtacatcgacgggtttgttttttacaactga

SEQ ID NO: 127340 - DNA, 252 bp, Enterobacter cloacae
gtgtctcagtggaatattgctgcattctcaaaagaagatcaggacaaagtttctgtcgataaagctgccgcagccgtcgcctggcaggaacgaatgaataagccggtggtgcccgaaatggttgagcgtgagcagccggagtctcttcgcgactatttccgggagaggttgcggattcaccggcagaacagcctgcagctaccgcgtgccggatctcctgaatacctgaaagctgacgaagaaaacaactga

SEQ ID NO: 127341 - DNA, 510 bp, Enterobacter cloacae
atggcagcacgtggcgttaataaagtcattctggttggtcatcttggacaggatccagaggtgcgatatctcccttccggtggcgcagttgccaacctgaagctggctacgtctgagacgtggactgacaaatctaccggggagcacaaggaaaatacggaatggcaccgtgtggtgctgttcggcaagctcgccgaaatctccggggagtatctgcgtaaaggcgcacaagtctatatcgaggggcagttgcgtacccgcacctggcaggatgaacagaacatcacccgttatgtcaccgaaattctggtgaataacaacggcaccatgcagatgctgggtggacgccgtgaaaacgcgccagcgccacagccagccgagccgcagtcatctgaacctgctgctcccgctcagtctccggcaccttcttctccggcgaaaaaaccacgtaaaagccggactacaccaccgccgtcgaatctgcctatggatgacgatgccccgtactga

SEQ ID NO: 127342 - DNA, 336 bp, Enterobacter cloacae
atgagcaagtctctgaaagattttttaaaccagccagaacgtcagcgggagccgacagcggaagaactggaactggccactctgcttaacgcgaacgcggtatcacccgtcatcactgccccggtgctaccggacggggaattcacccggcaggacgctgatggtgtggtggcgttctataccaacgtgtttatcgaggacgatcagggtacgcattttcgtctggttgtgcgccgtgacggggaaatgatctggcgtgcctggaatttcgaagccggggccgggtactggctgaaccgctatatctccgactacggcacccgaaaacagcggtaa

SEQ ID NO: 127343 - DNA, 2058 bp, Enterobacter cloacae
atgtctgcaactgagtctaaggtaaaaactgctccaaaaaccagcaaaaaatcccttaaagctgctgaagccgaagcgctgaaagcggctctcgatgccgcaccgattgagtatgtcccggtgacggcacttgtgaaatctcccctgaacgtcaggaccataccttatccggaggagaaagtacgctcaatggcagattccattgatgcgcttggcctgttgcagaatctggtcgttcattctctccctgacgggttgtgtggtgtggcagcaggtggacgtcgcctgaaagccctgcaattgctgcaggatgaaaaccgtatcgatgccggatatctggtaatggtgaaaaaggtacctgatgaactggctgttgccgcatcaatggctgaaaacgaacagcagatggcgatgcatccgtctgaacagatcgccgggttccgcactctggcagagcaggggaaaacccccgcgcagattggcgatttactggggttcggtacccgtcatgttcagcgcatgctgaagctgaccgaactggctcccgaaattctggatgcgctggcaaaggatgaaatcaccaccgaacactgtcaggcgctggcgctggagaacgatcaggcccggcaggtcgaagtgctggctaccgcacgtaaacgtggatggaataacgaaccatcggttaccactatccgtgacctgattactaccgaagaagtctccactactggcaataaatttcgctttgtgggagaggcggctttcagtcctgaagagatccgtgttgacctgttcagtagcgaaacgggagggtttgtaaaaagtgcttctctcgataccgccctgctggaaaaactgcagaacatcgcggagcacctccgcgaagcagaaggctggtcatggtgtgatggtcgtcttgacccgatttctcactacgggaaggactctaaaatctggcgtctgcagtctgttcctcctgttgaatattccgggacagaatcagaacgtcttgcggagctggaagcactggaagcgcagtatgaagacgagaaccccggcgtgaatgatgacgtcgtggcagaggctctggaggccgtctgggaagaacagcaaaccatagtacaccgggcaaaacaccgggcatggacggatgaagataagcagacctccggtgtggtggtttcctggaatggtcatgaagtgacggtacagcgcggagtagtgctgcgcgccgatgaaaaaacaaaggagaaggatgcatccaccgatcaggctcctgaaaaagtcgatccgctggactctgtcagtgtcccgctgctgacgcgcctttcttctgaacgcacactggcggttcaggccgccctgttgcagcagccgcagaaagccgtcgcactgatggtctggaaaatgtgtaactcggttttccataccacgacgtccgtcaaagagcccttctgcattagcgtgaacgtgtcgcattacgcgctgacccgtgaagcacctgacggtgaaaacagcgttgcgtttcaggcaatacaggctgaaaaagaacgccttgaagccctgctgccggaaaactggcgaaaggatatgacaaccttctttacgctcgatggcacaacactgatggcgctgatggctttctgcaccgcctgttccattgatggtgtacagggcaaggatgaatttggccgtaaacatcagagttcgctggatggggtggaaaacgccattcagtttgatcttcgcgactggtggaaaccgacggctgataaccttttctcgcacatgaagcagccacacattgtacaggcactctctcaggccggactgacaggcgcagcactggacgccgcgaaaatgaagaaaaaggatgccgcagaacatgcagcgcacttcctgtcaaaaatccgttgggttccggaatggatgaccagtgccgacaaccagaaacagcttgccgcaaaacctgaactcagtctggcaacgaaccagatcgatacagacgctgattccgatgtcgttaccgaccataacaacccggcttgtgccgcctga

SEQ ID NO: 127344 - DNA, 432 bp, Enterobacter cloacae; identical to SEQ ID NO: 97380

SEQ ID NO: 127345 - DNA, 723 bp, Enterobacter cloacae
atgatccagtcatcccatgctcttgttaccctgaaaccagcgcgtcaggctgcgctgcaggctattatgtccgtggaagacgcgcgtcagcgcggtacccgcctgccatcaatgccccatgtccggacctttctgcgactgttgacgggcagcagtcgtattaacagcacggtggctcagtctattcccggccttcaccgtgatccgaaagaccgcctctccagcctgaaacaggtggaagaagcgctggatacgcttatcgccagccacggcgaacactgcccgttgccgctgtcgcaggatgttcaggctgaactgtttccggaagtccgtcatacccgtactgaacgcaggctacagcgccagaagattgtattcacccgcaagatgcgtcgtgaagcgcggcatgtcgaacaggcctggttacttcgtcagaatctcctggggcaggcggttaccgaactgaacttccagtctccggaaaccgttgtcagctggtatcgccggtgggccgacgagtttgacgcgagtgaacttgaacctgctttctggcgctggcagacgcgattcgcttctctcagggaactggtctggttgcgctgcagtaatgcaccgttgtacgaggtcatgcatgaaatcagttttattgtcagggagtccggagatagcatccttgagcgggaacgctggctggttcccaacaaactgacaggcgggagataa

SEQ ID NO: 127346 - DNA, 258 bp, Enterobacter cloacae
atggctgaagttgaagccgggcaatcagcgccggaatcgataatgtctttatggattgccggggcagggtatgcggtgtgtgtcgattttctcagtgacaaaccaatacggcgctggagcgaggaaaggaaagctgcagcccgtcgtcgtaatctgacagcgagagtgaatcgtatcgccccgttatttgctgacgaactgatcgagagggaactggaggcccgtcctacatattttcgtgggatatcaccgaagtaa

SEQ ID NO: 127347 - DNA, 309 bp, Enterobacter cloacae
atgacagatattcagtacgcttttactcattttttacgaatgttcgttgtaattactgttattgccgttgggtatggatatctgctccttagtatccttacaaccaggaggctggcgtttattctacagttgttgtctcttgttgggctcagtgcgttattttcattcctggcgctcaggagtgacagtatgtggtcaggggctccggaagtgtccctggcgatactcttcggaatgttcacggcgacggttgttttttacatgttcagtctgctgttacgtgcctttgagcgacttatagcccaatga

SEQ ID NO: 127348 - DNA, 1209 bp, Enterobacter cloacae; identical to SEQ ID NO: 99306

SEQ ID NO: 127349 - DNA, 1365 bp, Enterobacter cloacae
atgaaggcaaaagcgatattactcgcctctgtcctgcttgtaggttgccagtcacaaaacggcagcaacgtacaacagcacgcacagagcctttctgcggctggtcaaggggaagcagggaagtttacgagtcaggcgcgatggttggacgatgggacatccttcgcgcaggaacaagacttgtgggcctctattggcgacgagctaaagatgggaattccggaaaacagccggattcgcgaacagaaacagaagtatttgagaaataagagctatctccacgatgtaacattacgggcagagccgtatatgtactggatagccgggcaagttaagaaacgtaacatgcctatggaactggtactactacccatagtggagagcgcttttgacccgcacgcgacgtctggcgccaatgcagcaggcatctggcagatcattccgagcacagggcgaaattatggtttaaagcagacccgcaactacgatgcgcgtcgtgatgttgtcgcttcaacgacagccgctctcgacatgatgcaacgtctgaacaagatgtttgacggcgactggttattgaccgtcgcggcgtataacagtggtgaaggtcgtgtactgaaggcaatgaaagcgaataaagcgcgtggaaaatccacagacttctggtcgctctcactgccacaggaaacaaagatttacgtaccgaaaatgctggcactgggcgatattctcaagaacagcaaacgttacggtgtacaactgccaacaccagacgaaagtcgtgcactggcgcgtgtccgcctcagcagcccggttgatattcaacaggttgccgatatgacgggtatgtcggtaagtaagcttaaaacctttaatgcaggtgttaaaggctccacgctgggcgctagtggccctggctatgtgatggttccgcagaaacatgcggaacagttacgagagtctttggcttcgggtgaaattgcagccgttcagtccacgctgatcgctgatacgtcgcctgtaagtagccgcagctataaggtgcgttcaggtgatacgctttcaggtattgcatcacgtcttggcgtgaatgcgaaagatctccagcagtggaataatctgcgcggatctggtctgaaagtgggtcaaacgctgaccgtaggtgcaggtagcagcgcacagcgtctcgctaagaacagcgatagcattacctatcgcgtacgtaaaggcgactcgctgtccagtattgctaagcgtcacggcgtaaacatcaaagatgtgatgcgctggaacaacgatactgacaacctgcaacctggcgaccagctgacgttgtttgtgaaaaacagcgctacgccagattcctga

SEQ ID NO: 127350 - DNA, 201 bp, Enterobacter cloacae
atgccactggcgcttcttgccctgacgatcagtgccttcgcaattggcacaaccgaatttgttattgtaggacttgttcccactattgctgaacaactcgccatttcgctgccttctgccgggctgctggtatctatttacgttaggcgtcgctgttggggcgcctgtgctgaccgcactgactggacgctttccacgtaa

SEQ ID NO: 127351 - DNA, 2118 bp, Enterobacter cloacae
atggcagatttgaagaaaaaagaggtaagccgtagtcgaatggcggagtttcctgccggaacgccgcttcgttcaggggatgagtttccgactgaggatatcatctgtgaggcactagaaaacaaaagctttgaacgtctgaataactgcctggttatcgccagctcagatgaacatgatatgcgttttatcaatgaggagacgctgaatatttatttcagggatgatgtctggaccaatcgctatgtcagaacccatattggtgaaacgttaagaaccgttaatttttcaggcatacgggatcctgaactgcgtcttgaagccaaaatcatctcagccagcctgctctggattgtcggcaggaccgcgaagacgcagtccctgatccggaaatgtgcaaacattgtggcgggagcccgtattattgagtctatggggtatcgcagtctgtttcagcttcgttttccgcttgtccggaatgctttcattgtaaagatgaaggaggaggatgagcacggcaggaagcgttctgaaagaacattacgtaattactttatggacctggcggatatctcgctgacaggtcatacccgtcttcgaaaatacggttactttcctgatattagcttcgacagttacaacagtgtggatgattcaaaccagacatattgtatgcctttcagtcttatgatgtctgtctgggaagggctgattactgaactggatgctgaaatcagtgatttcgattttgacgggttttcccggctgtgcgctatcataaacggtttttatgattcgccttactatacgtcgatgctggaagcccgtaaaagagggacagcaaaaagcataccggattaccgggccgcgtattactacaatattgttgccggggaaattcgggcgcttttcgcgacacttggccccgggatgcagggctggttctcggtacataaaaataagcgctggagatctgattttattggcgttgatcacataaagctgaacacctggcattttgagctgacgttaaaagtcatgaatgtgatacaggccatgtcggggatgagacacagcgaagtgcttggcgtgatgcacggttcactgatttatgatggtgatatcctgggacttcgttcggtgttgcataagttcgccccggaaggtggaagtcacgaagactgggttgtttgtcgctatgtggaaaagccttttcagcatttacgcagaattaatcaaatcatgacaggcctggacgggaagacgctggacaatgttccattgtctttaaatatcaggtcgtggttctcggagcaaaaactctcttttatggggacgcagcgccagactgagtgggcaaagaaatttgtgaaaagacaccatctgttcatccgacgtgaccatattgatgagttcaggcttttaaatccaaacatacgtgatgatgaacgcgttgcgatggagattcgggagggggctttctggccattgcgaacccatcagtttcgccgttcacttgctgtacacctcaggcgtcttgatctgatttctactaatgatcttatccggcagtttaagcacttaatcagaggcatgacggagtggtatatgtccggtgcactcaacgcttcgcattttagccgggcgatccctcaggcattcgctgccgagattgagagggttgataccgaactctcagcttccagggctgtttcttatcagcatgaaggcctgctttatggcgaaggcgggaagttactgatgtcccagagaggtgggcacttacatcagatgacgtttcctacactgaaaaaagcgatgagcatggctaaacgaggcgggcaaaaactggtatctcttggaaacggtttttattgcatgaatggccatgactgcgagtttaaggcggttgttcagtcagcgtcctgcaatccgggatgtgagaacatgctggccggagctgattctgttcccgtgtggaaacgcaggatggctcattatgacaaccttctggagattgccgtgcgaaataatgctcctcaggctgacagggattttctgatgcttgagagagatttttatgcagatgctgtccgtttttttgaaaaggatgaatag

SEQ ID NO: 127352 - DNA, 1248 bp, Enterobacter cloacae
gtgaggataatcactaacattcatgcgcgttatgggcgtgtcagcaaactggatgcaacagagccgaaactgaaatttgaacccggatttctgtatgctgaaataccttatattagcggcatccagaatcgaaaactgagccgatatgtacacttttatcttatggataaagctatcctgcaggccagggatttaaagcctttagcccgggcatttttacgctggataaggtggctggaggataacggacttgaccctttcaccccgggaacgttgaaataccaaagccctacatatggcttcagggagtatcttctgggggccgtaaggcaggggcgcatcgcctcatccaccgcggcggtgtacatcagcgttatccgacggttttacgtatttctgggcaagtgtggtgagctggctgccagctcattttttacgttggtcgaaaaagtcgttgacgggcgacgcaaggtgataagttcggatcttgccatcaggataaccagcacaacaaaaaggacaatcaacccactgaatgatgcagaggttcatatcctggatgaggcactgaaatctgagtccgggttgttcagtttaatgattgtgctgatgaaaaattgtgggttacggctggatgaaatgctgaccctgccgtcgtcactctttactgaagagtaccttgccagtgtccctgtatctgagttgaccatcagggggcttcatattggtccgagatgcggagttcatacgaagtttgggatgacgcgagaactcttcatcaccagacgattgtacgagcaggttctggattatctggcggatgaggagtatgaaaagaagatccaaaaatggcgtgcacgacagggtggggaagggcggcacgagcctttatttttaatggcaaacgggaaacggatgtctgaaaaagccttttactcccgctggtacagttttcgccatcgcctggcccggtctgctccgggaaatgtgttcagacataaaccccatgatttgcgggcaacgtttgcgacccattttttacgctcggcactgagttgctatcccgatcaggccgcaaatgcgctgggtacagtaaaatactggatgggccataaaagcgaaaatacgacgatgaaatacatcgtctttcttcagcaaaaccagatttctgatgcagtcgccggggtcatggacgcattgattgacggtgctgcaggtcgcgatggagccatatatgagccggagtga

SEQ ID NO: 127353 - DNA, 387 bp, Enterobacter cloacae
gtgattgtcgctctggtaaggcgttactgggtgaaaatagcagtagtggcgctgatcgccgtgatggcattcattgtgcgccactatagacagagcgcattggaatatagggaccagcgcgataaagcgacggtcagggcagaaacatcggaggcgatcaccaacaacgtgatcaccacgatgaacatcatccgtgacatctcacaggctacccagaatgcaaagaacgaactggctcaaaagggcgaaacgcgcattgtctacatcaggcaggcacttgaaggcgatccgtgtgctaaccagcttgttccttctgccgctgctgacagcctgcgggaatacgcagacagtttacgttccggccccggtggtgccgataagcgctga

SEQ ID NO: 127354 - DNA, 639 bp, Enterobacter cloacae
atggctaacgatgacgagcgcaggccatatccgccagttaacttcatcgcctccgacaactggcagccatacacccggctcattcccgccaacgaagtgcgtgagtggataatccggcaaatcatcagcgataccggcagcatccataacccagaccacgagcatctgcttgaggctgatctctgcttcatgtgggcgtctgactctttcgcgaagaaaggacggtatgtcctcggtcaggccgagcaggtaatgctgcgcgccggtggttggcagaaagccagaatggaacagcagatgcatgaatggttcgggcgaatcccgaagttcatcatcacgctggcggctgattactgctcacaatgcagtgacttcgaattctgtgcactggtagagcatgagctttaccacatcgcacaggccaccgatgatttcggcgcgcctaagttcaacaaagagactgggcagccagtgcttacactgcgcggccacgacgtcgaagaattcacaggtgtcgtacgtcgatacggtgccagcaaagaagtacaggagctcgttgatgcggctaattcgccagcagaagtggctcacatagatatagccaggtcatgcgggacgtgcatgctaaagctggcgtaa

SEQ ID NO: 127355 - DNA, 234 bp, Enterobacter cloacae
atgcatagctttgagcacttggttgcagaaataagagaagagttaagacttagagggattgagcattcatcgctaatttttactaagcttgctcagcaatacgccccttactaccaatcattcggacctgaaagaaaagaggcgttactgataaagcttaaggcgcttgagagaagcgtggggctacagaaaccatttgattgggaatcagccctctcaacgaaaaaagaatag

SEQ ID NO: 127356 - DNA, 357 bp, Enterobacter cloacae
gtgccgtgggctaaccgggcctgctcgttcgagaaagtcgactgctggggcttgtgcgtgttgtattaccgccatgtcctcggcattgagttgcatcagacgccggattacgaagccggggctgacttcttcacctgctatcagggcgacgtcgtcttctggcgccaggtcgataaaccgatcgaaggcgggatattcgtcgggtaccgcggcacgcaaccggcacacgttggcctggtactgaaccggcaggcgctgcactcgcgtggagagaacggaagcgtgcgcatggactcgttgctggtcattcagcgggcattcaccaaagtggagtttttcgaatatggcgctggttga

SEQ ID NO: 127357 - DNA, 1503 bp, Enterobacter cloacae; identical to SEQ ID NO: 120968

SEQ ID NO: 127358 - DNA, 1026 bp, Enterobacter cloacae
atgtctgctgctcatctcggtttcccgacggaaaccgttgttgtcttcgtggtgatggccgttggggcgatgtttatcgacctcttcatgcaccgtcacgataaaccgatctcgctgaaaagcgcggtcatgtggtccatcttctgggtcatgatggcgatggccttcgccggattcttatacgtgcaccacggcgcggagatggccagtctgttcctgaccggctatgcgctggaagaggtgctctccgtcgacaacctgtttgtgatgatggcgatcttcgcctggtttggcgtgccggatagatatcgtcaccgcgtgctctactggggcgtactcggggcgattgtgttccgcggtatttttgttgccattggcaccagcctgctgagcctgggaccgtatgttgaggtcatttttgcgctggtcgtcggctggacggcggtgatgatgctgaaacgcaatgaagagagcgatgaagtagaagattactccaaccatctggcgtaccgcctggtgaaacgcttctacccggtgtggccaaaaatcagcagccatgcgtttatcctgacccagaaagaggtggatgccgaactggagaaacctgaaaacaaggatgtgatggtaggccgcgtgaagaaggcgaagcgctacgcgacgccgctgctgctctgcgtcgcggtggtggagctgtccgacgtgatgttcgccttcgattccgtacccgcaatcatcgccgtcagccgtgagccgctgatcatctacagcgccatgatgttcgcgatcctcggcctgcgtaccctctacttcgtgctggaagcgctgaagcagtatctggtgcatctggagaaagcggtggtgttactgctgttcttcgtggcgttcaagctggggctgaatgcgaccgaccacttctggcatcacggttataacatcggcgccacggcaagcctgtttgtggtgctgggggtactggcgctggggattattgcgagcgtgatgttcccgggaaaacgtgaggcctga

SEQ ID NO: 127359 - DNA, 1065 bp, Enterobacter cloacae
atgcgcacgttcacactgaatctactcaccttatcgcttggcctggcgctaatgcccctggcccaggccgccaactccccgcagcagagacagctgctggaacaggtccgtctgggggaatccacccagcgtgaggatttagtgcgccagtcgctctatcgccttgagctgatcgaccccaacaacccggacgtgattgccgcgcgcttccgctacctgttacgacagggtgatatggcgggcgcgcaaaaagagctggatcgcctgaaaggaatggcgcccgattccagtgcctatcagtcctcccgtactaccatgctgctctccacgccggatggtcgccagtccctccagcaggctcgcctgcttgccaccaccgggcacacccaggaagccattgccgcgtatgacaaactgtttgacggtaagccgcccagtggcgacatcgcgacggagtactggaacgtggtggcgaaagagccagcccgccgcaacctggccattaatcagcttaagaaaataaacgccagcagtccgggcaacgtcccgctacagtcctcgctggcacagcttttgttccagagcggacggcgtgatgaagggtttgcggtgttacaggagatggccaaatcgaacaatggccgcagtcaggcgtcggacatgtggtaccagcagatcaaagatcaaccggccagcagcgccagcgttaccgcgctgcaacaatacctgagcgtgttcagcgatggcgataacgtgacggcggcgcgcgcccagcttgaagcgcagcaaaaacagctcgccgatccggcgttccgcgccaaagccgaagggttagccgcagtggatgccgggcagggcagtaaagcggtaacggagttgcaaaaagcagtcagcgccaaccacgccgacagtgaagccgtaggcgcactggggcaggcctattctcagaaaggcgatcgcgtgcgtgcggttgcgcagtttgaaaaggcgatcgccctcgatccgcagagcgataaccggggcaaatgggacagcctgctgaagtcaaccgatactggctgctga

SEQ ID NO: 127360 - DNA, 813 bp, Enterobacter cloacae
atgtcatcagtttcaaaaaggaatggaaaaggttttttctcaggcgcggtaattggggctttaggagggctgattgggctcggtggggctgagtttcgccttcccgtcctgatcggtagtttcaaaatacccaccctggaagccgtcatctttaacaaagcaatgagcctcgctgttgtcgctatcgctctaattttccgcacaaaatcgatagcccccgatcagttggtagagcatcttgatattgtcatgaatttactggcgggaagtcttattggggcatggtgggccgcaggccgcgccattaagatgtccagaatctggctggacagaatcattctgatcctccttgttttactgtcgttcgtcatgttctcagaagcatggctaccactacacagtatttccggcgggttatttcaacccggtattgccaccattattgcaggtgtgatttcagggttctttatcgggatagttgcagcattgctcggtgtggctggcggtgagcttctgatccccacaatcgttatcctgttcggggttgacatcaaactggccggaagcctgtcattgatgattagcctgcccacaatgattgttggtttttcccgttatacaaatgcagatgctttccagattctgaagaaagaaaggccactgtttgtatggatggtcatcggatctgtgattggtgcggcaattggcggacttctggtcggcctgttcccggttaaggtacttatgactttacttggggtgatccttcttatctccgccatcaaaacgttcaaacacacccggcaaaaataa

SEQ ID NO: 127361 - DNA, 372 bp, Enterobacter cloacae
atgaataaaaaagcgcttatatctgattttattttggtcagaccccgaatttacattaatgacaacatctcgctggggccgggtaaaattgatctattgcgcgctatagatgggtttcactccctgtcagccgccgcaaaagatctgggtataccctacaaaagggcttggctcctgattgatacgttaaacaaagggataggtaagcccgtggtcatcacgtcaacaggcggcagcaaaggtggaggctcggttttgacaccacttggtcagaatctacttagctggtacgacaaagcagaagccaaccttaacgaacaatcacagcaggacttgcaggatctcgaaaaaattatcttcggtgagaaataa

SEQ ID NO: 127362 - DNA, 834 bp, Enterobacter cloacae
atggtctgccggaccatgggcgtgtcgcgtgcgcaactgtcactgcggattaaccgttctgccgactggcaggacaggcgctgtaaccggcgtaatgaagaagcagacgcagaaatactgtcggctatcctcaacattatcagcgatatgccgagttatggttatcgacgcgtgtggggcatcctgcgcaagcaacgtcgcacagagggacagccacctgtgaatgccaaacggctttacaggataatgcgtgagcatcacctgttgttgcatgacaaatcagcgcggccaaagcgtgagcataagggcaaaatcgcggtggcagaaagcgatatgcgctggtgttcagacggcttcgagttcaactgcgacaacggtgaaaaactgcgggtcacgttctcgctggactgctgtgacagagaggccatagactgggcagcgagcacgggaggctacgacagttcgacggtgcaggatgtgatgctgaggtcggtggaaaagcgcttcggtgacaggttaccggacacaccggtgcagtggctgacggacaacggttcagcgtatacggcgtatgaaacgcggaggttcgccgtagagctgaatctggagccctgcacaacagcggtgagcagcccacagagcaatggtatggctgaacggttcgtgaaaacgatgaaggaagattacatcgcgttcatgcccaaaccggatgtgagaacagcgctacagagccttgcagcggcgttcaatcactataatgaaaaccacccgcatagtgcgctgggataccactctccgagggaataccggcggcagcgggcatcgttaacttaa

SEQ ID NO: 127363 - DNA, 3072 bp, Enterobacter cloacae
atggcgaaaactgacaccagtgagcgctggttcgaggcgcgcgtggtacgcagcttgaccggtgtgccgcagcccgagtacagccatgagctggctcccacggacttcgccgccacccacaacggctacgtgcagggcaagcccaccgactacaaccgcgacgtggcgctggatgtgacacagctgctcgccttcttgcaatccacccagcccaaggcagtagacacgctggaactggcggcggacggcatcaagcgcactcagttcctgcaccggttgcaaggtgagatcaccaagcgcggtgtggtggatgtgcttcgcaagggggttagccacggccccgtacacgtcgatctctacaagctgctacccacgccgggcaacgcagcagcagcagacgccttcggcaagaacatcttcagcgttacccgacaggtacgctacagcaacgaatccggcaacgagttagacttggccatcttcatcaacggtctgccggtgctgactttcgagttgaagaactcgctgaccaagcagaccctggccgacgccatcgtccagtaccagaccacgcgcagcccgcaggagctgctgttccagttggggcgttgtgtggcgcacattgcagtggatgatgtggaggctgcgttctgtaccgagctgaagggcaaggcctcgtggttcctgccatttaaccagggctggaacagcggcgctggcaacccacccaatccggatggtctgaagactgattacctatggaagcaggtgctgactcgcgagtcgctggccaacatcatcgagagctacgcgcaggtggtagaagaggaagaagtggacgctggcggcaagaaacgcaagaagcgcaagcagatcttcccacgcttccatcagttgcgcacggtgcgagcccttctgcgcctcgcccatgcggatggggtgggtaatcgttacctaatccagcattcggcaggaagcggcaagagcaacaccattgcctggctggcgcaccagttggtggagctgcgccgcaaggacgatccgctgacggtgcagttcgactccatcatcgtcatcaccgaccggcgtgcgttggacacacagatcgcccgcaccatcaagggttatgaccatgtggcggcgatcttcggccactccgacaacgcgcaggagctgcgcgagtatctgcgccggggcaagaagatcatcgtcaccacggtgcagaaattcccgttcatcctcgatgagctgggcgacctctcaggcaagagcttcgcgctgttgatcgacgaggcgcattccagccaaggcggcaagaccacggcgcggatgcacgaagccctcggcggcaaggttgctgcggaggagttcgaggaggacagcacgcaggatgcagtcaacgcggaaatcgagaagcgtattgcctcgcgcaaactgttggccaacgccagctacttcgcgttcactgccacacctaagaacaagacgttggagttgttcggcgagaagaccctggtcggtgacaaggtgcagtcccgctcgcccgaagaactgacctacaccaccaagcaggcgatccaggagaagttcatcctcgacgtggtggagaactacaccacctacgacagcttctatcaagtggctaagacagtggcggacgatccggagttcgataaggtgaaggcgctgaagaagatccgccactacgtcgagtcgcacgacaaggccatccgccgcaaggccgagatcatggtcgatcacttcatcgcacaggttgtgggtaagcagaaaattggcggcaaagcgcgggccatgatcgtgtgcaacggcgttgagcgggccatcgactactggcgcgaggtgtcggattacctcacacagatcaagagcccgtacaaagctatcgtggcatattcgggtgatttcgagattggtggtcagaagaagaccgaggccgatctcaatgggtttccaagtaaggacattccggcaaatctcaagcaagacccgtatcgcttcctcatcgttgctaacaagtttgtcaccggcttcgatgagcccttgctgcacactatgtatgtggacaagccactggcgggcgttctggcggtgcagaccctgtcacgtctgaaccgggctcatccgcaaaagcacgacactttcgtgctcgactttgctgacaacgccgaggcggtgaaggcagcgttccaggactattatcgcgctaccatccagactggagaaaccgacgccaacaaactgcacgacctaaaggctgaactcgacgggcagcaggtgtatagctggcaacaggtggaagaattggtgaccttgtacttgagtggcgaagacagggacaaactcgaccccatcctcgatgtgtgcgtggccgaatacaccgacaagctcggcgaggacgatcaggtcaagtttaagggtaaatccaaggccttcgtgcgcagctacggctttcttgctgcgattctgagctacggccacccgacgtgggagaagctctcgatcttcctgaatttcctcatccccaagctgccagcacccaaagaggaagatctctccaggggggtgctggagactatcgacatggacagctacagggtggaggccaaagcggcgctgaagatggcaatggccgacgccgacgccacggtcgagccagtgccgccgggcggcggtggcggcaagggcgaggcagacatcgacaaactttccgcgatcatcaagaccttcaacgacctgttcggcaacatcgagtggaaggacgaggacaaaatccgcaaggtcatcaccgaggaaatccctgcgcgagtagcgcaggacaaggcttaccagaatgcgcaggcgaactccgacaagcagaacgccaagttggagcacgacaaggcgctcaaccgcgtggtgcttgagctgctttccgaccacaccgagttgttcaagcagttcagcgacaactccaacttcaagcgctggctgacggacacagtgttcgatgcgacctaccagcggggcgcggtgccgccgaaagcaccgccgcagactggggcgtcggcatga

SEQ ID NO: 127364 - DNA, 972 bp, Enterobacter cloacae
atggatatgcgccttcggctgtattttgaccagtttgggcaaattccaattcctgtccctccgcgccctgagcaggaccaaatcgtcgcttacctgcgcgctcaggatgcgcacatggcccgcttcatcaagaccaagcgcgatctgatcaagctgctcaccgaacagaagctgcgaattatcgaccacgctgtcacgcgcggccttgattcatcggtggctctgaagccgtccggcatcgaatggctgggtgaggtaccggagcactgggaagtgcaaaggctgaagaacgtggccaacgtggtcttgggcaagatgctgaccacggaagccaaggctggcgatggggatttcaagccctacctgcgctccacgaatgtgcagtggattaagcccgatgtgcgcgacgtaaaggaaatgtgggtagccaaagctgagatggcgcagctccgcgtccgcaagggtgacttgctggtcagcgaaggcggagaagttggtcgggcctgcatgtggaacgatgaactgccggagtgctacatccagaactctgtgcatcgggttgcggccaagccgatgatgctgccggaattcctgtttcaccagtttttcacctatggcaagcgtggccgtttcaatgccatcgtgaaccgcgtcagcatcgcgcacctgacgcgcgaaaagctcgtgacgattccgttcaccgtccctcccatcgaagaacaaaaagccatctgccggtggatcagcgacgaatgccagccgctggacgacgccatcgcccgtaccgaagaagaaatcaagctgatccgcgaataccgcgaccgcctgattgccgatgtggtcacaggccaagtggacgtgcggggctggcagcccggcccggacgacgtggtggacgacacggcgctggctgcgctcggcgatgacccagatgatgtgaccgaggaggaggatggcgatggcgaaaactga

SEQ ID NO: 127365 - DNA, 2382 bp, Enterobacter cloacae
atgcataagaagcaacaacaagaccaaagccagatcaagtggatttccgatttcatctggaacattgccgatgaccgcttgcgcgacgtctatgtacgcggcaagtaccgcgacgtgatcctgcccttcaccgtactgcgacggcttgatgccgtgctagaggcgacgaaagatgctgtgctagagcgcaagaagctccttgatgcccataaagtggtcgagcaagacggcgctctgcgtatggcagcaggccaagccttctacaacgtatcggaatttactctggccaagctcaaggccagtgccgcaggccagcggctgcgtgatgattttattgcgtatctggatggattttcgcccaacgtccaggaaatcctcgccaagttcagtttccacaaccagatccagaagttggtggattcccacgttctgggctacttgattgaagatttcctcgacccggaggtcaatctctcgccgttgccggtgaaggatgccgacggccgcatcaagctgccgccgctggacaaccatggcataggcactgtgttcgaagagctgatccgccgctttaacgaagataacaatgaagaggcaggcgagcacttcaccccgcgcgacgtggtgcagctcatggccaagctgctgttccttcctgtggccgagcgcatcgagtctagcacctattcgctctacgacggctcctgcggcaccggcggcatgctcaccgtggccgaggaatcgctacacgagcttgccgggcagcatggcaaggaagtctccatccacctgttcgggcaagaaattagcgacgaaacctacgccatctgcaaggccgatctgctcttgaagggcgaaggcgaggaggccgagaacatcgtcggtggcgctgataagtccactctgtccgctgaccagttccgttcgcgcgaatttgatttcatgatctccaacccgccctacggcaagagttggaagaccgatctggagcgcatgggcggcaagaaggaattcaatgaccagcgcttcatcgtcagccacgcgggcaatgctgagttcaagcttatcacccgctccagcgacggacagctcatgttcctggtgaataagctgcaaaagatgaaacaccacacgccgttgggcagccgcatcgcgctggttcataatggctccgcgctgttcaccggcgatgcaggccagggcgagagtaacatccgccgttgggtgctggagaacgactggctggaggccatcatcgccctgccgctcaacattttctacaacaccggcatcgccacctatatctgggtgttggccaacaagaaagccgaagcgcgtcgtgacaaagtgcagttgatcgatgcaagtggctggttccagccgctgcgccgcaatctcggcaagaagaattgtgaactctcggatggagacatccagcgaatcatcgacatctacctcggcgaggcgcaagaaaccgccgagtcgaaatggttcgacactcaggacttcggctactggaagatcactgtcgagcgcccgctgcgcctgaaaagccagctctccgacgagcgaatcgaactcctgcgttttgccaccggcgacgaggcgatacgcgccgagatctacgccacccacggcgaggcgctctataccgatttcgccaagctcaagccgaccatcgaggcatggctgaaaggcgaggacgagaacgaagaggacgagaacgaagacagcggcgatgacagcgagactcccgccgcgcgtaaggccgtgcccgccaagcgccgcaagaagctgctcgacgcatcgacgtggctgcgcgacaaggcgctgatggtggtggcgcaacgggtgcaaaaagctctaggtagcgccgtgttcgatgaccacaatgaattccgtacccgcttcgatactgccctgaaagctcagggtgacaagctcagcgcacccgagaagaaggccatctacaaagctgtgagctggcgtgacgaaacggccccgccagtcattgccaaacgcagcaaactcaaggcgagcgacttctttgagcccggcttcgatggcgcgtacctggagacagtgggcaaggatcggttcatggtcgagtacgaacccgacagtgagctgcgcgataccgagcaggtaccgctgaaggagtcgggtggtatcgatgcgtttttcgagcgggaagtgctgccgcatgtaccggacgcctggatcgctaccgacaagacccagatcggttatgagatatcgtttgcccgctacttctacaagcccacaccactgcgcacgctggccgaaatccgcgccgacatcctcgctctggagcagcaaagcgaggggttgctgcacaagatagtgggggtagaaaaataa

SEQ ID NO: 127366 - DNA, 1731 bp, Enterobacter cloacae
atggccaagacacttgaagcccacgacaaactgatccgcgagatcttcgaaggcagctaccagttcgagattccggactaccagcgtccctatgcctggacaaccgagcaggccacagagctgttcgatgatctgcactcggcgatgctggatgcgcgtgtctccggtgcaaccagccaatacttcctcggcagtatcgttctgatcaagaacgaccgagagcccaaatcgtcggtggtcgatggccagcagcgcctgtcgacgctgacgatgctgtttgcagtgctgcgcgaggccatgccgcacgcagccgacgacatcaccgatttcctctacaagaagggcaaggtcagcctcggcgagaaaaatgaataccgcctgaccgcccgcgaggaggatgccgacttctttcgcaccaacattcaagagccgggcggcatcgcacagttggtcactagcaccgacaagctggaagacagccgacttcgataccgcgaaaacgccacgctgctgcttgccaaagccaaggcgctaccgcccgccgatctgagcgcactgtggcagttcctggccaacgactgctcgctggttgttatctccacgcccgatcttgaagctgcctaccgcatcttttccgtgctcaataatcgggggcttgacctcgcgcctatcgacatcatcaaggcgcaggttctgggcctaatccgcaccacggcaggcgacattaagagtcgggtctatgccaaggagtggagtcgcatcgaaacctcactgggccgtgacgcctttggtgatctgttcggtcacatccgtagcatctatgcgaagaagaagcagaagtacattttggtcaaagaattccaagagcacgtcaccgagtacaataaccctatcgccctgatcgactccgtcatcaaaccttacgcagaagtatgggacttcgtgcgcgacgctgactttgaggcgaccgagcacgccgagacgatcaacgagcacctgttctggctcaaccgcgtggacttcaaggactgggtacccccggcactggtgtatttcaagcgattccggcaaaaaccaaaattgctcgcagaattcttccaatcactagaacgccttacctatttcatgttggttacaaaggtgggtatcaacgaacgcatcgaaacctacgctgcgctcattaaagacatcgagtccacggccttcgacggcgatctagtcaccttgggcactctggcacttacagacaaacagaagcgagatttcgtggctgctctcgacggagatatctaccgcaacctgcccaaagcccgcatggcactggttttacgtctcgaatctctggttcgagcccctggagtgcagctgcaaaacgccgtgtcgctggagcatgtgctgccgcaaaacccgcctgacggttcggactggatcaagtggttcccggatgaagacgagcgagattgctggacgcaccgtttggccaatctagttccgctggataggaacaagaactcatctgccagcaactacgacttttccaagaagaaggatgcctacttcaggggtaagggcaaggcgtcgcccttcgtgctaacgcaggaagtcaggtcagaaaacgagtggacacccaaccttctggctgagcgtcagaaacgcctgatgggcgaactcaaaaatcattggaaactcgccgtcaccacagacaatgccagcgcctcagcggcgaattaa

SEQ ID NO: 127367 - DNA, 909 bp, Enterobacter cloacae
atgattagttcaccctctaaacgggtcgaggatttgagccttgcccagcgcgagcggctggcctacatcgacttccagctctacttcttcggtgatattgggcgcccagacctgattgagcgcttcggtgtggcgccggcaggggcaactcgcgatctggctctttaccgggaaatcgcaccgcagaacattgaattcgatggtagcaacaagatctaccgcataggcaaggcgtttgttccaattttcgagcactcgacgcaacgtgttttgtcgacactcgcgcttgggtttggagatggagtgaacgtcgactcgcggccgctgctgccatgcgagtctccagtggctttgagctgcccacggatggatgtgctggccccaatctgccgggctatccacgccaagcggccagtagccatccgctaccactcaatgagcagcggtgagaccgagcggatcattgtgccctttgcgctggtcgataccggcctgcgctggcacgtccgagcttttgatcgcaagagtggcgagttccgcgacttcgttgtcacccgcattgaagcgcctatcctgcttgatgaagaacccaaggctaacgagcgttcggacaacgacattcagtggactcggatcgtggagttggacttagtgcctcatccgcgctttgcgcgtcccgaggtcatcaagatggactacgggatgaccaacgggtcgatcaagatgcgcgtgcgggctgctgttgtgggctacatgctgctgcactggagcgtggactgctcgcctgaccatcgcctcaaagaagaacagtatcgcctatggcttagcgatccgctggtgctgtacggagtcgagagcgccaagctggctccaggataccaagccctgagcagttccaaggaatcatag

SEQ ID NO: 127368 - DNA, 894 bp, Enterobacter cloacae
gtgcgggaaggtgtgactgacgccaaggccctgttctctcattaccgacaggtaaaaaatcctttcccacaattcgtagtgccgaagaaaaaaggcagcgatgaagagaaagcgacactaccgttctgtcgtaagctgatggcgaaagccgaaggcttcacgtcccgttttgatttttccgttcatgtggcgttcgtgcgttcactcggtaagcgtcatcgcatgccgccactgttgcgccgtcgggccattgatgcccttctccagggactgtgtttccactatgacccgctggccaaccgtgtccagcgttccatcaccaatctggctattgaatgcggactggccaccgagtcgaaaaccggcaatctgtccatcacccgtgccacacgggcgctgaagtttatggcggagctggggctgattacctaccagaccgaatacgacccccagattggctgcaatataccgactgatatcaccttcacaccagcacttttctcggcgctcgatgtctctgacgtggctgttgtggctgcccgccgcagccgcgtggaatgggaaaatcagcagcgcaaaaagcagaacctgaagccgctggagatggacgagctgatagcgaagtcctggcggtttgtgcgcgaacggttccgcagctaccagtccgaacgtaaacagcatggcctgaaacgtgcccgtgcacgtcgtgacgcggaaagaacccgcaagtacattgtgaccctggtgaaacaacagctgacacgggaatacgcctgcggacgctttaccggtggtcttgatgccatgaagcgggagctggagcggcgagtgaaagagcgcatgctaatgtcgcgcggtaacaactacacgcggctggccaccgtccccatataa

SEQ ID NO: 127369 - DNA, 270 bp, Enterobacter cloacae
atgtcacaggtcgttaacgcagttacttcctcatctaaacgtccctacagaaaagggaatccgctttctgctgcagagcgtcagcagaaagctgttgcacgtaaaaaagccacgcataaagaagtgagggtgtttgtgcgtgactcgcttaaaagccagcttcagttaatgtgtgaaaatgaagggatcacccaagcggaaatgattgaaaggcttatcgaaatggaatcagccaagcttggaataggcgtaacgacgtcacattcttga

SEQ ID NO: 127370 - DNA, 2262 bp, Enterobacter cloacae
atgactaataatactttatcagacttttcagcttcattgatagatgaaattaatttcatctatcatgaccgctacatgaaaatcttactgtttattgtgccggtgtttttattaacttttgtcatcgctatcttcagttctggtgtgcctgagaaaatacctgtcgcactggtagattatgatcattcatcattgagtcgggaaataatcaaaaatattgatgcatcgaagagtattgagttaatagaaacaacggacaatatttccctggctcaacgcctgatgaagagtatgaaaatttatgcttttatagagatcccccgaggtgcatctggatcaactatccgtcaggatgataataaggtcgtaattcgttataacgggcagttaagaacaactggtaatgctgcgtttatcggtttgcaggcagcggtgaatgatgcctttaactcaataaataacaggaagtcactgggtgttgagcataaaggtacgggcaactcaatgccaaatatacaagtaatcagtatcagcaatccacaaaatagctatgaaagattcttgaccccaattgcagtgccggtgttgctgagtatagttctaagcagcgctgtaatttgcgctatcggacgtttttttgaagaaggtaatctctgtgacgattggattaagaaaaaaacaatatatttatcagttcagattgcttcccgttgcctaccatatataaccatcatttttctttggggattaatattcaatgtctggcaagtagtggggcggggttggccaattttaggtaattcatggttgttaattctggcgatgtttatgttgtgtcttcttactgcatctatcgccattatgtttatttcaataacgcgaaatgtacttacagctttaagtatctcaacggtatatgctagtgctgcgttaacctactcagatggtacgctttctattttgaatgccaatggttgggctaaattctggagtaattttcagccattcacccactattaccgaatacagttagagcaggtcaatcttggcagttatatcacaacgagtttttcccaatttggtatcttgtcactctatattatcattcctttaactatttcttttattattcttgcaagacgtaattatagtcaacagccggtagtctttcaggagaatgtaaaactcgatggtgttttacagagttttattagtactgttaaatcaataagaaaatgtcaacctatattttcaacggcagttatgtcattgattctttatagtgttttttatccaagcgcctacaaggcacaaattaacctcaaacttcccgttgcggtagttgattttgatcaatcatcattgtcacgtaatctgatcgataatctgcaaaccacacgtgaaattgatgttacccaggttgatagttctctgtctgatgcattaattttattgcgaaacagaaaagtttccgcggtgatagctattgataatgattttaaaaagaatcttatcagaggagagaacgcagggatcgatgtgcacctatcaggcggttatatggctgttgctgccgatttgagaacggcagtgactaatgcaataaacgctacgacggatgttaatagattaacatctaaagctactaataacatcattcctcttcctctatataatccaacattgggatacgaatcttttattatgccgctggtttttattataatacttcagcaaacacttatctttaccagttctatgcttattgcattgcgtaatagtatcggtttaacaaaaattaattcatctcagtttatcgggacgttttttgggttgtttatggttggtttttttggagcggtttttgtgtttggttgggtttattatttgcaagggtatcccaatgaaggaagtatgtttttacaggttttgttgattgttcttttttctgcggcagtaagttcaatggggatgttgattggtagttttctggataacatcaaccgtccaatgcagatcctatcggctacctcgatggttattttttatgcgtcaggagcctcgtttcctacatttaatatgcctgaatgggttgtgaaaacgatggtgattttcccatcaagtacaatgataagtgggtttactatgctgaactctcagggggcaggtatctatgagttggcacccgtaataataaaaatatctttgctagcaattatattatttttacttgctatgtatcgtctagtttggcagaagtaa

SEQ ID NO: 127371 - DNA, 270 bp, Enterobacter cloacae
atggccgcgatagcgtttggcctggatgagatagcgatgttttccgattattacctggccgtcaatgcctccatcgccggtatagcgtttgtttctgatagttctgaagccatgcgactcaaacccttccagcaacagttcttcaaacacaaagggatcaattttccgcaggtagttaattttttgtgggaagcccggcaacgtctttatgcgctccagcacccgccgcgcactttgctgcttccttttgtgtcgccggtgccgtactga

SEQ ID NO: 127372 - DNA, 1026 bp, Enterobacter cloacae
atgaacgttaaaactattggaatcgatttggcaaaaaacgttttccagatccatggggttgacgagcacggaaaacggttgttcaacaaacaactcagacgggcacaaatggcctccttttttgccaacatcccaccctgtttgatcggcatggaggcctgtgcatctgctcatttctgggccaataaactgatatcgatgggccataatgtcaaactgatggcccctcagttcgtcaaaccctatgttaaaaccaataagcatgatgctgcagacgctgaagctatttgtgaagccgtcactcgacctaacatgcggttcgtgccggtcaaaaccgctgagcagcaagccgtattggcacttcaccggagtcgtcagagcttcatcaaacagcgaaccgcacaagccaatcaaatcagggggttattggccgaatttggcattgtcgtcccccgaggtatccagcagctacagcgacgattacctgagctcgtggaagatgcggataacccgttacccgtcctgtttcgtacacagctgagtctactacagcaccacatggcgtacctgttcgatgtcatcgctacactcgacaagcagattgagcagtgctatcggcaaaatgctctctgccagcgtatcggcaagatccctggtattggccctgttaccgccagcgcgctgattgcgaccattggtaaagccaacaatttcgagaaaggccgacaactggctgcctggctcggattggttccacgtcagcactccagtgggggtaaacaagtcctgctcgggataagcaagcgaggtgatacctatttgaggaccttgcttatccatggtgccagggcggtattgcagtcggccaaacataaacaggatgccgtatcgagctgggctaaccagctaatggcgcgccggaataacaacattgcctcggtagcattggctaacaagaatgcgcggactgtgtgggcgctcctggccaaagagcgggagtattgtgcaccaataataagcgcttaa

SEQ ID NO: 127373 - DNA, 609 bp, Enterobacter cloacae
atgaaaaaggttcttctctctgcagcaatggcaactgcgttttttggcatgactgctgcccatgcagctgataccactgttggcggcggccaggttaatttcttcggtaaagttaccgatgtatcctgtactgtttccgttaacggccagggcagcaatgcgaacgtttacctgtctccggtaaccctgactgaagttaaagcggcagcagcggatacttacctgaaaccgaaatctttcaccattgacgtctctaactgccaggctgctgatggcactaaacaggatgacgtaagcaaactgggcgtaaactggaccggcggtaacctgctggctggcgcaaccagcaaacaacagggctacctggcgaacaccgaagcttccggtgctcagaacatccagctggtgctgtctactgacaacgctaccgcgctgaccaacaaaatcatcccgggtgacagcactcagccgaaagcgaaaggcgacgcttccgctgtagctgatggcgcgcgtttcacctactacgtaggctacgccaccagcgcgccgaccacggtaaccaccggtgtggttaacagctacgcgacttacgaaattacttaccagtaa

SEQ ID NO: 127374 - DNA, 702 bp, Enterobacter cloacae
atgaagcgtattgccctttttttctgtttcatttttagttttgcggcccatgccaacaatattattgttaacggtacccgctttatttatccaggaaatgaaaaagaaataacggtacagctttcaaataacgccgaccgtccggcgctggcgcaggcctggctggataacggcgatgccgatgccacaccggataccattaccaccccgtttattatcaccccgccgatttcgcgcgttgacgccaagagcggccagacgctgcgtattaagctcggtagcagcgccggtctggcgaaagataaagagacgctgtggtggctgaatctgctggaaattccgccggtggtggccaatcagaaaaatgaaggccagaacgtgctgcagctggcgatccgttcgcgctttaaatttatttatcgtcctgccggactgggcaaccgcgatgcggcggccgagaagctgaccctgaccgccagcggcagtagtctcgccatcaacaacccgacgccgttctacattaccgtcagccgtatttcccgcgacggcggtaaagccctgaacagtaaaaccgtgatgctggcgccgcagtccagccagacggtggcgctctcctccgccgtcaaccgcggcgaaaccctgaccgttaacaacattaatgactatggcgccgatgtcgcagtgaaagtggccgttaaataa

SEQ ID NO: 127375 - DNA, 2487 bp, Enterobacter cloacae
atgaagcagaggtcattctgcccgggaagattaagcaccgcgatcgccatcgcgctgtgctgctttccgccattttccagcggacaggaaaacccgggaacggtatatcagtttaacgacggctttattgtcggcagtcgcgaaaaggtcgatctgtcgcgcttttcgaccagcgcgattaccgaaggcacttactcccttgacgtctacaccaacgacgagtggaaagggcgctacgatttacgcatcgcgcgcgataaagatggtcggctgggcgtctgctacaccaaagcgatgctggcccaatatggcatcgcggcggaaaagctcaatccgcagctgagcgagcaggagggctactgcggtagcctcaaatcctggcgcaacgaagaaaacgtcaaagacaacctggtccagtcctccctgcggttgaacatttcggtaccgcagatctatgaagatcaacgcctgaaaaactatgtcagcccggagttctgggacaaaggtattaccgcgctcaatcttggctggatggcgaacgcctggaacagccatacctcttcggtaggcgggtcggataacagcagcgcctatctgggcgtcaacgccggtctgtcgtgggacggctggctgctgaagcacatcggcaacctgaactggcagcagcagcagggtaaagcgcactggaacagcaaccagacctatctccagcgccctatcccacagctcaactccatcgtcagcggcgggcagattttcaccaatggtgaatttttcgacactatcggtctgcgcggggttaatctttccaccgatgacaatatgttcccggacggcatgcgctcgtatgctccggaaattcgcggcgtggcgcagagcaacgccctcgtcaccgtgcgccagggcagcaatattatctatcagaccaccgttccgcccggaccgtttaccctgcaggatgtctatccttccggctatggcagcgatcttgaggtctcggtgaaagaagcggatggctcggtagaagtgtttagcgtgccttacgcttccgtcgcccagctgctgcgtccgggaatgacccgctacgcgctctccgccggtaaagtggacgacagcgcgctgcgcaacaagccgatgctctatcaggcgacctggcagcacgggatcaacaatctgttgaccggctacaccggggtcaccggttttgacgactatcaggccttcctggtggggacagggatgaacaccggcatcggcgcgctctcttttgacgtcacccattcgcggttgaagagcgatgcccatgatgactcgggtcagagctatcgcgcgacctttaaccgcatgtttaccgatacccagaccagcatcgtgttggcggcgtatcgctactcgacgaaaggttattacaacctcaacgacgcgctgtacgccgtcgatcaggaaaaaaatagtcgcagcaactacaccctgtggcggcaaaaaaacggcatgaccttcacggtgaaccagaacctgccggacggctggggcgggttttatctcagcggccgtatctccgattactggaaccgctccgggaccgagaagcagtatcaggtcagctacaacaattcatttggtcgtctctcctggtcggcgagcgcgcagcgcgtctatacgccagacagctccggtcatcgtcgcgacgatcgtatttcactcaacttcagctacccgctgtggtttggcgataaccgcaccgccaacctgacgtcgaacacctcgttcaataactcgcgctttgccagctcgcagattggtatcaacggttcgctggacagtgaaaacaaccttaactacggcgtgtcgaccaccaccgccaccggcggtcagcatgatgtggcgctcaacggcagctaccgtacgccatggaccaccctcaacggcagctacagccagggcgaaggctatcgtcagagcggcattggcgccagcgggacgatgatcgcccacagcggcggcgtggtgctctcaccggaaagcggctcgacgatggccctgattgaagccaaagacgcggccggggcgatgcttccgggatcgccgggcacccgtgtggacagcaatggttacgccatcctgccgtatctgcgcccgtaccggattaacgccgtggaaatcgacccgaaaggcagccatgacgacgtggccttcgatcgcaccgtggcgcaggttgtgccgtgggaaggcagcgtggttaaggtcgcgttcggcactaaggtgcagaacaacctcaccctgcaggcgcgccaggcgaaccacgagccgttgccgtttgcggcaagtattttctcccccgacggcaaggagatcggcgttgtcggccagggcagcatgatgtttatcagcgatgcgaacgccaaacgcgcgattgtgaagtggagcggcgggcagtgttcggtggatctgggacagcaaacaacaaaggatagcgtatgtcgctga

SEQ ID NO: 127376 - DNA, 996 bp, Enterobacter cloacae
atgtcgctgaggaaattactaacgctttttatcgtcttaatggcgctgggaaccacctcgtcctgggcctcctgtacgcgtctctcatcgccaacggtgatgctggacatggtggtgggcagggtggtggtgccctcggatctgccggtgggctcggtgatccttacccgcgactggacgatgagcgctcccggcggggcaagctatcgctgtacttccggcaccaaccgctttgcggcgaagatcgtgtcgccaggggccacggaccttggaaataaaatctactccaccaacgtgccgggaatcggcatgcgtttcagccgcggcggcgcaacggtaaatatcgtctatcccgacgtcttttcgtcccaggtatataacaccaccaactattccctcgaagggtcgcgctttacgctggagattatcaaaaccgcggcaaccaccggcagcggcaccctggcggcgggtaagtacacctcctacgactgggagagcggcgataacccgatcctcgaaacctatctgagcgccaacgccatcaccgtggtctcgccctcctgttcagtgctgagcgggaaaaatatgaatgtcgatgtgggttccatccggcgcaccgacctgaaaggggtcggcaccaccgccggcgggaaggattttaatatcgacctgcagtgcagcggcggcctgagtgaaacgggatatgccaacattagcacctcgttctccggtaccctggccaccagcactaccgctaccatgggcgccttgctgaatgaaaaagccggcagcgggatggcgaaaggcattggcatccaggtgctgaaggatggctccccgctgcagtttaataataaatacaccgtcggccgcttgaataatcaggagacccgctacatcaccataccgctgcacgcgcgtttttatcagtatggcccgacgaccagcaccggcgaggtggagtcgcatatgatctttaacctgacgtacgattaa

SEQ ID NO: 127377 - DNA, 636 bp, Enterobacter cloacae; identical to SEQ ID NO: 84879

SEQ ID NO: 127378 - DNA, 978 bp, Enterobacter cloacae; identical to SEQ ID NO: 38771

SEQ ID NO: 127379 - DNA, 1197 bp, Enterobacter cloacae
atgagcgagttaagttatctggaaaaattgctggatggggttgaggttgagtggttgtcactgggagagcttggcgatttcatacgtggcaatggactacagaaaaaagatttcgttgaaagtggttttccagcaatacattacggtcagatttatacaaggtatgggttatcagctgataaaacatttacttacgtgcttccagaactagccaataagctgagaaaggctcaaaaaaatgacttattgctagcaacaacatcagaaaacgatgaagatgtagtaaaacctttagcctggcttggcgataacgttgctatttccggagatatgatgttatttcgccacgagcaaaatgttaaatatctcgcctatttcttccagtccgaaatatttcaaacacaaaaaatgaaatatattactggagctaaagtccgacgggtttccagtggcgatttatctaaaattaaaattccaattcccagttcaaacaatccagaaaagtctctgaccatccagtctgaaatcgtccgaattctggataaatttactgctcttacagctgagcttacagctgagcttaccatgcgtaaaaaacagtacaactactatcgtgataaattgctgagttttgaagagggtggggttgagtggaagacattgggtgagattgtgaagatgcgtgcagggcagcatatttcggcgagaaatatagtagatgggaaagaaggagattttgtatatccttgttttggcggaaacggtattcgtggttacgttaaagaaaaaagtcatgatggggaacatctattaatagggcgacaaggtgctctgtgtggcaatgtccaaagaatgaaaggtcagttctacgctacagaacatgcagttgtagtctcagccatgcaggggattgatattgactgggcatttcatatgttaacaacaatgaatctaaatcaatatgcgtcgaaatctgcacagccgggtcttgctgtggggaaattgcaggaattgaaattattagtgccttccatagagcgtcagaaatatattgctaaaattctggacaaattcgacacattgacaagctccatcaccgaaggcttaccccgtgaaatagaactacgccagaagcagtacgagtactatcgtgatttactgttcagcttcccgaaaccagaaaccgccagcaactga

SEQ ID NO: 127380 - DNA, 1266 bp, Enterobacter cloacae
gtgaaaaataacgaactgaacgaccggcgtttacaggcgacgccgcgcggtatcggcgtcatgtgtaacttctatgccgataaagccgaaaacgccacggtgtgggacgtggaaggtaacgagtatattgattttgccgccgggatcgccgtgctgaataccgggcatcgccatcctaaagttatcgccgccatcgaaaaacagcttcacgcctttacccataccgcttatcaaatcgtcccctatgaaggttatgtggcgcttgccgagcgcatcaatcagcgcgtacccatagaggggccagccaaaaccgccttcttctcaacgggggcggaagcggtcgaaaacgcggtgaaaatcgcccgcgcgtacaccagacgtcccggccttatcaccttcggcggcgcgttccatggccgtacctttatgaccatggcgatgaccggcaaagtggcgccctataagctcggcttcggcccgttccccggctcggtgtaccacgcgcaattccccaacagcctgcacggggttagtaccgccgaagcgctaaaaagcctggagcgcatcttcaaagccgatatcgcgcccgatcaggtggcggcaatcattattgaaccggttcagggcgagggcgggttcaacgtcgcgcccgctgattttatgcaggcgctgcgtgccctgtgcgatacccacgggattttactgattgccgacgaagtgcaaaccggcttcgcccgtaccggcaagctgttctccatggaaaaccactgcgtgaagcccgatctgatcaccatggcgaaaagcctggcgggcgggatgccgctctctgccgtctctggccgggcggaggtgatggatgcgcccgccccgggcgggctgggcggaacctacgcgggtaacccgctggcgattgcggcggcccatgcggtgctggatgtgattgacgaggacgatctctgcacccgcgcggcgcatctcgggcatcatctggtcgaggtgctgaataaagcgaaggatggctgtccgtatatcgccgatatccgtgggcagggctcgatggtggcggtagaatttaccgatccgcaaaccggacagccgtcgcccgaatttacccgtcaggttcaggagcgcgcgttgaacgaagggctgctgcttttgagctgcggcgtttacggcaacgttattcgcttcctctacccgctcaccatccccgaagtgcagttccgtaaagcgctggatattatttccgcctcgctgacacgataa

SEQ ID NO: 127381 - DNA, 867 bp, Enterobacter cloacae; identical to SEQ ID NO: 8957

SEQ ID NO: 127382 - DNA, 300 bp, Enterobacter cloacae
atgacaaaaacagtatcaaccagtaaaaaaccccgtaaacagcattcgcctgaatttcgcagtgaagccctgaagcttgctgaacgcatcggtgttactgccgcagcccgtgaactcagcctgtatgaatcacagctctacaactggcgcagtaaacagcaaaatcagcagacgtcttctgaacgtgaactagagatgtctaccgagattgcacgtctcaaacgccagctggcagaacgggatgaagagctggctatcctccaaaaggccgcgacatacttcgcgaagcgcctgaaatga

SEQ ID NO: 127383 - DNA, 201 bp, Enterobacter cloacae
atggatcatagtcttaattctttaaataatttcgatttcctggcgcgtagttttgccagaatgcacgcagaaggtcgcccggtcgatattctggccgttactggtaacatggatgaagaacatagaacctggttttgcgcacgttatgcctggtattgtcaacagatgatgcaggcaagagagctggagttagagcactga

SEQ ID NO: 127384 - DNA, 1065 bp, Enterobacter cloacae
atgcgctacttattaactgtaattgcatttattatgggttttagtgcgttacctgtatgggcgatgaactgctatgctgaacatgaaggggggaataccgtagtcataggctacgtaccaagaattgctatccccagcgatggtaaaaaaggtgataaaatctggcaaagcagtgaatattttatgaatgtcttctgtaataatgcactacccgccccatcaccaggagaagaatacccatctgcatgggtaaatataatgatgttgttagcatcaggtcaggacttttataatcaaaactcatatactcttggtgtaacctataatggagtcgattatgattcaacctccacacgagctatcgcagcaccagagtgcattgatgttaaaggcgcagggatatatagtaatacctataaaaaccccgctgtctgtagcggtggtcctgaacctcaattgtcagtaacttttccagtacgtgtacagctgtatattaagctggctaaaaatgctaataaagtaaataaaaaacttgtattacctgacgaatatatcgccctggagtttaaaggtatgagtggcacaggaactatagacacagacaaaaatttgaccttcagaattcgtgggttaaataatattcatgtccttgactgctttgttaatgttgatctggaaccagctgatggcgttgtcgactttggtaaaataaattcccgaacaattaaaaataccagcgtgagtgagacgtttagcgtagtcatgaccaaagatccgggtgcggcctgtactgagcagtttaatattttagggagttttttcactacggatattttgagtgattatagccatctggatataggtaatggtctgctattgaagatatttcataacgatggaacagcaacggaatttaaccgcttctcacaatttgcttctttttcatcgtctagtgcgccttcggtcaccgcaccattcagggcagaactgagtgcgaacccggcagaaacggttgttgagggaccgtttagtaaagacgtcatcctcaaaatcacctataactag

SEQ ID NO: 127385 - DNA, 750 bp, Enterobacter cloacae
atgcgctacttaaatacaaagaatatcattgcagcaggagtattactctcctgcatgaacagcattgcctggggtgccatcatcccggatcgtacccgtataataatgaatgagtcagataaaggcgaagcattaaaacttactaatcaaagtaaaaaactgccctatctggcccaaacatggatagaagatacgaaaggcaataaatctcgtgactttattgttacggttcctcctatggtgcgtttaaatcccaatgagcaaattcagattagaatgataactcaggaaaaaattgctcaacttcctaaggacagagaaactctgttctattttaacgtgcgagaaataccgccaaaaacagataaaaaaaatgtgatgcaagtgactatgcagcacgctttgaaattattctggcggccaaaagccattgagttagaagacgatggggtaatgacttacgaaaaagttgaaatcatccgtagaaatgatggttcgatccgctttaacaataaaatgccttatcacgttacgctgggttatatcggaacaaatggggtcacgatgttaccgcaaacgcaaagcttaatggtcctcccttttagccatgcagatacgcagtttaaaaatgttccatcaaattttcaggttggttatatcaatgattttggtggcttaagtttttatgaaataaactgcccaacagtgaataattcttgtaatgtttccgtagccaaacgagataaataa

SEQ ID NO: 127386 - DNA, 1683 bp, Enterobacter cloacae
atgttgccgcctgatctacgtggttacgcaccgcaaatcacgggtgttgcacaaacgaatgcaaaggtcactgtctcacagaacaaccgtattatttatcaagaaaacgttcctccaggcccattttctattaccaatttattcaatacattacaggggcaactggacgtcaaggttgaagaagaggacgggcgcgtcacgcaatggcaagttgcatctaatagcattccttatctgacgcgtaaagggcagattcgctacactactgcaatggggaaaccgaccagcgttggcggcgattccttacaacagcccttcttctggaccggtgaattctcatggggttggctgaacaatgtatccctgtatggtggttcagtattaacaaaccgtgattatcaatccctggctaccggagttggttttaaccttaactcgttgggctcattatcctttgatgtcacgcgatctgatgctcagttacataatcagaataaagaaacgggttatagctaccgtgctaactattcaaaacgttttgaatctaccggtagccagctcactttcgctggctaccgtttctctgataaaaactttgtgtcgatgaatgaatatatcaatgacactaaccattacacgaattatcagaatgaaaaagagagttatattgtcacgtttaaccagtatcttgaatcattgagattaaatacatacgtaagtctggctcgtaatacttactgggacgccagcagtaatgtgaattattcattatcacttagccgcgattttgatatcggcccattaaaaaacgtatccacctcactaacatttagccgaataaactgggaagatgacaaccaggatcaactgtacctaaatatttcaattccctggggaaccagtagaacattgagctatggtatgcaacgaaatcaggataacaacatttcgcatactgcttcgtggtatgactcttccgatcgaaataattcctggagcgtttctgcttcaggcgacaatgacgaatttaaagatatggaggcgtcactgcgcgccagttatcagcataataccgagaacggtcgtctctatctctccggtacatcacagcgggacagctactattctctgaatgccagttggaacggttcattcactgcaactcgccacggcgccgctttccatgactatagtggtagtgctgactcgcgttttatgatcgacgcagacggcgctgaagatattccgttgaataataaacgcgcggtaactaatcggtatggcatcggagttattccatcagtcagcagttacataacaacatcattaagcgttgatacccgaaatcttccagaaaatgtggatatcgaaaactcggttatcaccaccaccttaaccgaaggtgctattggctacgccaaacttgatacccgcaagggctatcaaatcatgggggttattcgcctggcagatggtagtcacccaccactggggattagcgtaaaagatgaaaccagccacaaagaattaggacttgttgctgatggcggctttgtatacctcaacggcattcaggatgacagcaaacttactttacgctggggtgacaaatcttgctttattcaaccacccaagagcagcaacttaaccaccggaacggttattttaccgtgtattagctaa

SEQ ID NO: 127387 - DNA, 1227 bp, Enterobacter cloacae
atgaaaaccagcgttgacgttgaagattgctgcgttgaagtgatggttcgacatcacagcccaaagaatcaaagagaggcattcactaaagctttttttgatgagtgtaaaatccgtgcagtacaaactggccggactatcgaagccagcgatacaaaatgtaccgggcttaaggctatattccactcatccggacgcattaagtttattgtccgcaaaagtattcgcggaaagaatgtttacgttgcagtaggaggttaccctgaattttccattaataacgcaagggaacatgcctttaaaataattcaggagcttaaggcttccgttgagacttatggtgagcgttttcttacgcacagcaaaataacgtttaatgaacttgtggaacagtatgtgaaatgcgtacttaacacgggcgttaagcgttcagctaacaccgacctttctaagatccgtaaatacctgcgccctcttctcggtgacaaaaagctggcaggtatgacggaggcagatgttctgagctatctgcacgatctcgatcttaagcctgccacacgcaaccgccacctggcgctcattaaagcggtctttacctgggctatacgcatgggatacaccagccgctctccggtgctttatatcaaagcgctgcctgaagtgacgtcagatcgccgcgccatggatgactcccagcttcagcgctggatggaagtctgtgagtgctggcgtaatggtaaacccgatcatgaagcccttgctctgctcatgttccttgccctgacggggctgcgtctgggggaaacccgtcaccttcgtcttgaagatgtggactggagccgcaaggttatcacccttcgccataccaaaaacggcaaactccgccgtgtaccggtatgtgataaggctttcgttcttctgacagaacagcgtcagcatctgggtgatgaaggctgggtatttccgggcaaggggaccgacaatccggtttctgagccgcgtcgcctgcaaaaacggctttgtgaggctgcgggtattccaccgttcaccatccatgagatgcgccatacctttgcgacaaaactcattgagagcggggccgacattcacaccgtcaaagacttactgggccacagcactatcaaagtgacggagctttacttgcacgcttccccggcgcgttaccacgaagctgttaaccgggcgatgaatgtttttccggcctaa

SEQ ID NO: 127388 - DNA, 1932 bp, Enterobacter cloacae
atgaataataaatcaacaccatcccccttgactacaacgacccccgctcgttttgcctgcaggaaattaaatgcatttctggctcgtcgtgctcttcatatgaaggtggtaagaaaaaacctgaacaaggctgctgcaatcgacatcgatctcgatgacatttctaagtgcggatgccgtgatggtctgcctgaaggctttgtcaatactgcaaaagggcttttctattatgaaggaaaaaaatggtaccagttaagctcgacccccattctccctgtctacaggcattattctgattgtaaaacgcgcaatatgggcgtcgagttgatgactatcaaccatgctggagagttcgcctgtgctgatgtctcattaagtgatgcaatggtaaaacctgatcacgtcatggcttctctggcgggcaaaggttttggtatctccctgacgataaagtctaaagagcttctggtgcaattcttacaggtgtgtatgaagaaatcgctggaattgcctacttatcttgtcgcagattcgatgggttttgtgcctggcaacaaagcatttcttcacggcagtatacctatcgcgcagcaccttttggaatttgactatttgattccggcttcccgtgttccacgagggcttgtcgagtcgggaacgctggatgactggaaaacgatggtagctgagctggttcatggctggcctcaggtctttgcattatccacagcttttgcttcgatgctgctgtcgttgtgcaaaatggatgtcgcattgtttcatttttacggggggtcaacgaccggaaaaacaattcttcttcagcttcccatgtcagttcacggccatggtggagaacccggcagtgcgccagatgtgaacattttacgctggaatactacagcgaatgcgcttgagaaaaacctgagtcggtattcagggatattagcctgtattgatgagttgggtgcttacaaacagaaggactttgcttccttgctgtacaatattactgcttcgaagggtaaggatagaatgaatcagcatctggagatagatgaggcctttacctggaaaatgtttattctttcgtcaggggaaatgtctatccctgagaagcttgccacgcagaaagagcaaattcagggagggcaggagcatcgtgccatcagtcttaacatccgctccgaagatgcccgtaaagacggtgagacctctgaagacgtacgtaatcgagctgagagactgaaacatgggttgtgtgagacttacggcactgcgggtaaggaatttattgcctgccttctaacgttgaagggtgaaaatgatgaggccttatcttatcaggagatgtgtaaattcatccagggtgcatcaaaagattgctatggcattctgatcggtgagttgcagaaagaaggctattctctcagtaatattcagaagcgtgcattagaacgttttgctctgtgctggtgcgctgggattctcgcaactgaatggaatattcttccctttgatgaggatgttattgcagatgcggtaatgagtgccgctcgacgctggcttgatgataaacctaaccagtataaccccgtattgctggctcttattgatattcagcgtgaccttgtaaagcgagaaggtgcgcattttatcggtcttaaagaaccggacaaccgtaaacccgcaaatcactgggggtatattcatcatgctagtgaagattttttagtcttcgcacctgtatttgaagagtggtgtcagaaacattccttaagcgccagtgacgtcgctaaggaactggtacgtcgaaaactgctgcgggcagaaagtaaagggcattacaaaaagcgtcctcttactggtatggacaggtgttactaccacattaagcgagggtttatcagtgctgatttgaattgtgcttag

SEQ ID NO: 127389 - DNA, 312 bp, Enterobacter cloacae
atgattatcgataaagaatacgcacttatagatgcaacagcaagacttaacactgacctgaggaattatgaatatgaaataaacaacgccgccatcataacatttggcaatgacctcattgaggtaatcgtatatcagttcagctttgtcatcagcatcagggcagagggtgaaaaaataaagcacggcctacttgttaacttcggtaaaaatatagcaagacaggtttcatcactttgtgcatccgcaatgcgagtctacccgaatgaaaaacacaaaccgagccgtcagcttttccattgcataaattag

SEQ ID NO: 127390 - DNA, 714 bp, Enterobacter cloacae
atgacgctgataacacaagaaaacgaacatgacagactggcaacccgcctttccatcatcctgagccgtttgtttcagggtgaaaagctgcatatcggggcgctggcagaagaatttggggtgacgacgcgcacgctgcggcgggattttaacgtccgcctcacctatcttgatattgaacagagcaacggcgtgtatcagctcgcttcgcattactttcgtcgccgcacggaacgggatatgaagatactggcgaggttgctgcatcttgaccgtctgttacccgcgatggacgccaaactgctgagccttctgcttgacggggagcacccttcaccctaccggattatgctcccggagccgcgccagaaacccacgctctttggtgatttcagcagactgacgctcgccatacttaaccagacccaggtgcgtatcagaaccgacgaaaacgtcagccataccgttcatccctatcgtctgctttgcagccatgcggagtggtttcttgccggatgtacgtcatcgggcgtgttcgttatttccctgtcccgaatcaggctggttgaggtattaccggatacaacgtttgagatcgataacacactcatttcgctgattgaacagtctgactttatggaagccttaccccacatgaacattattcatcagataatgcattacgggagtaaacagacgaataatcgtaattaa

SEQ ID NO: 127391 - DNA, 243 bp, Enterobacter cloacae
atgctgccagtcggcatagcagcggtgcataaagagtctgctgctgtccgcttcgataaggcagatatccggacttctgagcacagcagcaagaaaacctgcgttattggtgctgccctgaccaaacagtgggcgaaatacacgggatggaaagctgtctggctgctgttccagaatggcgtgaatcgcatcaagcgctatccattcacgggagaacaggcccccttcgccattggcggttaa

SEQ ID NO: 127392 - DNA, 564 bp, Enterobacter cloacae; identical to SEQ ID NO: 119885

SEQ ID NO: 127393 - DNA, 612 bp, Enterobacter cloacae
atgcaggggcaataccaggaccgtgagacagggctgcactacaatctgttccggtattatgacccggactgcggacgatttacgcagcaggacccgatagggctggcgggagggattaacctttaccagtatgcgccgaatgcgctggggtgggtagatccgtgggggttgactcctgacgatctcattcgttaccggccacatgattctctttctgctcaaggtggagctagaagctctgctatttctagggcatgggtgcaagaaaaagccttattgcaggatggtggggctggcacaagaaattggacagcgcaagagagggatttaattttgaagactcccaacaagagcctaacctctgtgatgtcccgggcaggctataccgggcatcatatcaattcggtagaaggcaatggtacacttggttccaaatggcaaggtgatccgaggaacattgtattcttgaaaaatcataaccatcccgacaagttcaatgagcatgtccatggtgatcaaggacatagagggaatactaagaactcgacgcgtgggcgcttaatcgatagagaaagaacattaaaatctagacaacgatgtaagcaattatag

SEQ ID NO: 127394 - DNA, 1023 bp, Enterobacter cloacae
  misc_feature (998)..(1007): n is a, c, g, or t
atgaagggtatgcggaagattcgcaggggtaagaactttgctggtgtggtccaatacgcattgaaaccgggagcacatcataaatgcgatccagtcgtaatcgggggcaatatgctgggtgacaccgcccatgaaatgattgcagagttcgatagcaccaagcatcttcgccaggatgtcgcaaaaccagtttggcacaactcgcttcgcttacctgatggtgaatcattatcgaatgaccaatgggcaaggatagctgacgactacatgaagagaatgggattcagtgatactcatgttcgttgctatgtgcttcatgacgatccggctggtcagcacatacacattatcgcaagtcgcatagacctcaatggagggaagctctacttgggtaggaatgaaaaccttatcagcacacggatcattagtgaactcgaaatcgctcacggtctgacagtgaccaagccagccccttccattacaccaaagcaacagaagcgaagaaaagtttcccgtaatgaacagatgcttgcagaacggactggccttccttcccctaaagaagctctacaacagatacttgataaaagtttggcagatacacctgatcttttaacttttataaaacgactggaagaagctgaagtcggctggacggctaacattgcttctaccggtaagatgaacggcttctcattcgaataccgcgatatcgctttcaaggcatccaaacttggaaaggcatactcttgggtaaatcttcaaaagcagcttaactacaacccagatcacttagaagctctgcgaacaacaaagggagttatccctgctcctgctcctgctcctgctcctgctcctgctcctgctcctgctcctgcaaaagatgtttcaacaacggatatttcaaaggaaagcataagtgaaaaaattgctgaactcgaactacgactcaaagaagacagaagaaacgaaatcgtagaaaagattcttcaaaaaannnnnnnnnnaatccataaaatttag

SEQ ID NO: 127395 - DNA, 336 bp, Enterobacter cloacae
atggacaaaaacatcatcaattcagagtttactctggaagagcaacttatcattaccaccttccttctaaccgcatgtaacaatgaaccatcgcaagacgatatatacaatgttttcaaaagtgttgtagatagaacaaatacaagtatgaaagctcttgattcaagagttacagaaaaagatcttttaagaatcgattacgtgaagaaagttagttgcacagaagaagcaaacaatgtttataactgcattgtcgatgcctctattagtaatatgaaacaaacaaaaccagtaaaactaatcaaatctgatggtgtctggaaagaagttcagtag

SEQ ID NO: 127396 - DNA, 324 bp, Enterobacter cloacae
atgaatgggtatatcgtcacaatcattatcgcattcattttcggtcccattctggcgttaccggtaatgttcttcggtttgtttaatataatggattttgcgctgtattcattccccatatttttcttttgtattatggggtacaggcaagataagagggttaaggatgcttttaagggattaataccgggcctaattgtatctctgattctgacgacttttgttctgtttgttaaagatcagagcgactgtacgaataaatatgactcaggcagtctgtctgctgctgtgtgtgagagacttgagggaccaggatttagataa

SEQ ID NO: 127397 - DNA, 582 bp, Enterobacter cloacae
atgataaaattctatcaatatagatcagcagaaataacaaagataattttaaaagatagtactttgaaattcacaaaccctatggatttcaatgacccatttgattttcaccccacagttcctgatgtaggctttaacaagttcattaaaagagttaatgggcaatattcaaataaaagaaaaaaatatcgtcttgggcataaagaactaataacccacagaacaaaactacgttccgaggattttagacgggtatatactgaaaacttttcaattgcatgttttagtaagtctccatttatattaccaatgtgggcacactacgcagatgatcatcaaggctgcgtgattgagtttaagtttgaagaaaccgaagggtttattgaggagtttataaacttaaagccagaagaagatactactacacttataccattagatgtaatttattcaaacaatagaccatctctttttgataatgatggactaactaactcagataccacagggactaatgcttgcttggttaaagcaaaggtttgggaatacgaacaagaggttagagttataaaaaagaaataa

SEQ ID NO: 127398 - DNA, 165 bp, Enterobacter cloacae
atgactggcatctactttggtatgaaaataaacaagcaagataaaaaaatcatctctcagttggtagatgactcaaataaatatactaataccaaaattaaaaagcatgatgttcaaattgcgttcaatacgtttgagctttttaaaattccttttagcgtctaa

SEQ ID NO: 127399 - DNA, 588 bp, Enterobacter cloacae
atggatacacatacaccctacaactgcaatgacatagccagaattgcattgactatgcacggtcacagctatttcttctcactccgccgccatctcaacattaactttagccgggacttgaacggaagcggaacacagggtttattcatcaaaaaacaaaacgttgatattgatttaattaaggtaatttttgattataccgacaacaaaaacgatgatttcctctatgaggctgatctcatcaaagatcaacgtaaggactatgaacccacagttaacagaggtaaacaccggttcgttgccaaacaaatcgagctaaatatcgactggaacggtaatgaaatccagcagtggagagcggatatcgaacgactaacgagatcgcacgataatcttgaggactggttaaaaaacggctcggagatgctggtatgttgcgcctctggatttttttgtcgtctccccacaatccttactttgaacgaccttaagcagtatgttgcaatgggagtaactctagaagaccttaaaactcggctcaagtgctcgaaatgtggtaaacgtgggtccaaagtcacagtattttga

SEQ ID NO: 127400 - DNA, 252 bp, Enterobacter cloacae
atgatcgcggtagcgctgaacatcctttccccaactgcgtttagcggattttgcccatggcagataatgctgattaaagagttcatcgaacgtcagctccattctcttgttttcacgctcctgcttagggtcagtgccggtggcaagggaacgtttgtgttctatggcaatctgacgagcaagattgacgtccacttcaggccagtgaccaatggcgatggcgcgttttcgtccatgataaaggtagcgtag

SEQ ID NO: 127401 - DNA, 540 bp, Enterobacter cloacae
atgccagagtattttgctttttataaagagttgatgcaggaagtgttgattcagaatgaaaagggaatacctgtcattgagcactcggctgctattcatctcaagcgaattttcaatccaggcttcagtggttatgcagatctaaaatcgccaagcggagttgtgctgaactgcatcctgttcaattatgacggtaaagtctacggtagtgatgaaagtcgtatgcttcagaaagtaaacccggaagcagatttcagtgcaggagagtttgcctcactctcattcagtagcaacgaatactaccgttccgctctctcatcttcatttaacttcgccatgccaggttgtgacacctgtgcataccagcctttctgtggagcagatccttgccagaacattagtgttcatggcgaacctgttggtgacaagagtcgttctactttctgccagtatcacaaaggcatgttccgcttccttctgaatgaaatctctcaggatggaccgatggcaaagatgcttaaagggtgggcttatgtctga

SEQ ID NO: 127402 - DNA, 219 bp, Enterobacter cloacae; identical to SEQ ID NO: 84209

SEQ ID NO: 127403 - DNA, 363 bp, Enterobacter cloacae
atgttaaagctctttgctaagtacacatcgatcggcgtcataaacacgctcattcactgggttgtgttcgctatttgcatatacgcgtttcacacaggtcaggcgcttggtaacttcgccggattcgtcgtggcagtgtcattcagcttctttgcaaacgccaggttcacgtttaagtcttcgacaaccacgatgcgctacatgctgtatgtagggtttatgggatccttgagcgcagctgttggttgggctgccgataagtccggtatggctccaattgtgactctcattctcttctccgctatcagtctggtgtgcggctttatctattcaaagttcattgtctttagggatgcgaaatga

SEQ ID NO: 127404 - DNA, 633 bp, Enterobacter cloacae
  misc_feature (591)..(607): n is a, c, g, or t
atggagagtcttatccgtaaactatctcctactcatattgatgataaggttctaattgaatatcaaaataagaaattatcaaaagcctcagcatcatttcgcgttttacgaccatttttgattaaatggtttgagttaggatatccgggaatagatgaaagtgcggtagaactgttaaagcatttggacctaaaaataaaaaaatctggtcagtctgtgcttcaagatgatccaacagagggaccattaaataaagaagaacatacttctttgattaaggctatgaatcatgcatatagaaaaggtgaactgtcactgccacattatgcaatatcactattgatcagtcttacaggtagaagacctcagcagttagttatgttgaaatataaagaccttcttcaaaagaacttagataatggcaaagtagaatatgtaatttcagtgccacgagtaaaacaacggggtaaagaactacgatatcgagaacttgcaataatatcagaggttgcatcaattgttcaattgcaagctaatcaatcagtgaaacttgttgagcaagctcttggaaaaactcttgatgattattcnnnnnnnnnnnnnnnnncgagaagttcctattttcttaaatga

SEQ ID NO: 127405 - DNA, 195 bp, Enterobacter cloacae
atggcaaaaataggtgatggcattccgcatcttatagatcgagctatagattttatggcatcaacccaggcgttccgagagtatttgaaaaaactccccccccgtaacacaattccgtccgatattcctgaggaaaacgtgccgttatatctacaacgtctggaatattatcgccagctttacaggccaaagtag

SEQ ID NO: 127406 - DNA, 348 bp, Enterobacter cloacae
atgcatggctcgcccaaactgagtatgcccgtctccgcctgtggcgtgtttattgttaacacgaaaaacaccggctttatcgctgtacagtgccagcggtttaccatgcttatcgatatagcgccgcgtggcttcgaagtaagaaaacgtggactccgatttaacaaacaacagttccatcagtttgctggttgcatcatcaacatagaccagcgcggtgcaggccgggccacggccttcaaaccagtcgtgatcacagccatctatttgtatcagctcaccagtacacggacgccggtaccgtggttgagggatccttgcggcacgttgtttacggggaacccataa

SEQ ID NO: 127407 - DNA, 402 bp, Enterobacter cloacae
atgtctgagaccttcactatcgtaggcgttggtcttacatcgtcatcagtcggtgtaacctttgccacgctgtttccggaggcgactccagcagtgatgctcggatcactcgccggaactgcgctatacgttctgacctcagatccccatcaactctggaagcaggctatctttgcgctgatatcgtttatcagtggcgtgttcttctccgtacccatggcgaaaatcatggccggaatcatcaacacgccgttaagcctgatgaagccaccggccagcattgaggtatcgccagctgtcggtgcaattgtcactgcttccatttccgtggcagtcctgctgcgtattctccgcaaatccaaaagcgggaagatgccgggactgggggaggaagataaatga

SEQ ID NO: 127408 - DNA, 213 bp, Enterobacter cloacae; identical to SEQ ID NO: 82855

SEQ ID NO: 127409 - DNA, 318 bp, Enterobacter cloacae
atgaacactaaaatattcgaagacaacattttatctcgtaatgatatcgctgtacgctacgtctttcagaaaatgttttccccacaaggtactctggtcgcggtggaatgcttaagccgctttgataatctttctatttcccccgaagattttttccgccatgctaccgccgccgttcgtgaacgtatttttctcgaacaactggcactgattgaaaagcataaagcctggtttttacgtaaccatatttccgcaacaattaacgttgatgaccatatcctgaacctgttgcgccagaaggatggctttgttgaataa

SEQ ID NO: 127410 - DNA, 468 bp, Enterobacter cloacae
atgattttgggagaactgcggtcaatggcgtcttccgggttgccttctgtcctggcaaacgccctctcgctggcggttgctgcccgacctcaggagaaggcgccgggccactacgaactgccgggcaacgatatctttatgaatgttatgcagtttgacacgcagacgccggaacagaaaaaggcagaactgcacgcgcaatatatcgatatccagctgttgctagccggagaagagcgcattctgtttggtgttaccggctctgcgcgtgagtgcgaggaaatgcataacgccgaagattatcagctttgcaggcgcattgaaggggagcaattcgtcattctgagaccgggtatgttcgtggtgtttatgccgggggaaccgcataaaccggggtgtattaccgaatcggcgagagaaataaaaaaggtcgtggtgaaagtgcgtgccagcctgttaaccgcataa

SEQ ID NO: 127411 - DNA, 981 bp, Enterobacter cloacae
atgagccgctaccagcctcctttcacgatcacaccatcgattctcaatcaggttgttgagattggtgagctattagggcactgggcggcgcattcaggaagaacctctccgttactgcgtaaagagaaccgaatccgcaccatccaggcttctctggccattgaacataactctctgacgaccggacaagtaacggcaatcatggagggtaaacgcgtgctcgcacctgaaaaagatattcaggaagtgcgtaacgcgattctggcttatgagagattgcctgaatggaagccctggacgctcaaagacttactcagtgcacaccggttattaatgcttggtctggttgataaccctggcaagctcagaatgggggacgtaggcgtatatcgcgggaatcagttggtccatatggctccacccgcttcccaaattaaccggcttattgctgatctgcttgcctggttaaaagaaaccgaactccatccactgattaccagctcagtcttccattacgaatttgaattcatccatccattttctgatgggaatggtcgtatggggcggctgtggcaaacgttgattttgagtcagtggcgctcagagcttgcctggctgccagttgagacactgattcattttcagcaggatcgctattatcagattttgggagaatgtgaccgggcgagtgattgcaccgcatttatagagtttatgctccagaatatggctgaagcgttgagggagggcataggggcaccttctgttatgtcggaaaaaatgtcggaagagatgtcggaaaaggaaacgactattcttgagcttcttaccgttcaaccgcagatgtccgcagcgatgttagcatccatgctaggtgtcacttcccgcactgtggaacgctatctcagcgccttgcaaacaaaagggaaactaaagcgcatgggagccaggaaaggaggaagctggcaggtcatgccttaa

SEQ ID NO: 127412 - DNA, 279 bp, Enterobacter cloacae
atggctatgcggctactcggaagagataagttggaagaacttaagcgctatgagccttccagtaaaaactggattgatgcgtggtcaacagagctaagtttaagcaattggaaatcaaaggaagaagtgaaaaagcactttcccaaagtagaaaatattggtgatcaaatctttgtttttaaggtggattgctgtgcttcttatgttgaaacgatcattgatttcaatcggttgttggtttttgttacctctgtgaagggtaatgataatggatattag

SEQ ID NO: 127413 - DNA, 1209 bp, Enterobacter cloacae
atggatattagagtaattagaacagataggcagcatcaggagtatttggaacgtatacattcgttattagttatgatgccgtctcctggaactgatgaaaatgaggagttagagttacttatcacacttgtagaagcatacgagaactctaaatatcctatagagccaccagatccaatcgatgctattacgttccgtatgcacgagaaagggttaaaacaagttgatcttgtaccctatttgggaacaagaagtagagtttctgaaattttgtcaaggaaaagacctttgactgttccgatgataaaagcactttcaatcggacttggcatttctactgatacgttgataggtataaatgctgatcagagcaaaacaggtgatgataatgttgactggtctaagtttccgattaaagaaatgattgggagaggatggatttctgaagccagtgattcgataaaaaaatccacagaagaactaattaaaggatttattaatcaaattggctggcaaacaggtaatgtcgcatttaagagaaccctttctggggatgcgtattctccttcgacaaaatatgcactttatgcatgggttagtagggttgtgcagcgagcgcgtgaacgtaaaaatctgcttgggaactttgacccagcaattttttctacaagcttcttgagggatttggcacaactaagctggtttgaaacaggtcccttacttgctcttgaatttcttgaaaaacatggaatagccgttgttatcgaaccaagcttaaaaggcactcgcatagacggagcagcattaaaggatattgacggcatgccgattgttggtttgacattgagacatgaccgtctcgataatttttggttcacactactccatgaagttgctcatatatggaaacacgttcattctgaagagacatttttagatgatattgatgctacttctgacgataggcaggaatctgaagcaaatcggcttgctagggaagcatttatacctagggcagtctggaagagaagtgatgcatactcttctccgtctaaagaaaccatcgattgtctttctagggaactgaagattaatccggcgatcattgctggaagaataagacgtgaaagtggtaactaccgcctgtttgctgatctcatagggcaaggcgaagtaagtagaatattaaacgcttcaaacgtgaattga

SEQ ID NO: 127414 - DNA, 1128 bp, Enterobacter cloacae
atgtaccctacatacgtgccgatcctaagagcaaaagctggtgagtttgaagcattgaatagactgaaacctgtttactcgcaaaaaatttggccattttttgaaattccccaattaactgagaacgataagaaatctaaggctttaagcggctcatctcagatgaaaaaggattttcttactaaaattgcggatggaatcaataacgcgaattcatcatcttcaatatttttcgacttttttgattggaaagcagatagctacattgaaacaggtgagcatgttttgagctacatgtacagagcattagcctcaagtggatcacttgtacatccagttataggattcgaccgttgggatatcctagactatcaaaatgccttgaaaggattagttgtacccgaagggacaatgtactgtttacgtattgattctacatctatagatgattcgtacgacgtagattattttacagatacgattcatgagattctggattcgcttgggctttccggtgctgaagtgatggtaatgtttgattttggtgatgttactcataagtctattgtatcaatgcatgccgatatgcagcatctcattaccgccgttgatgagtttggctttgctagtatcatgatagcgggttgctcgttcccaataatcataaatgatgcagtaaaggaagtggattcaacagacctcgttgaacgtaaggaaatgcatgtttggaaggcaatttattctgatatgaaatcaccatttctttttgctgattatggtattcgaaatcccaaaggtgctgatggtgtaaaagcaattcatgctaacgggaaaattaggtataccattgaaaataaatattttgttgcaaggggccactctaagcaaaagggtaataaaggggcgcaaatgtatgacttggcaagagttattgtcaaatctccttactatctaggggctggctttagttggggagatgagagaattgaggcttgcagcagagaagaaattaagggtggcccgacccagtggattagctacgataccaaccatcatatgagttttgttgttgaggaagtctcagagtttcaacgcagtcgtattacgccaagaattgttaccgcataa

SEQ ID NO: 127415 - DNA, 495 bp, Enterobacter cloacae
atgaaacagtacaacaatgatcttaccccggaaattctggcaagcctgaaagagccagcattcccccctgaacaaatcgctgaaatgcccgaagatgcccgtaaaatagtcatggaacaactggcgttacaacaacgtcctgttgctgccatttatcgacctgctgttgcggggagtttgacccggcagggaggtattgctgatgaatttgagcctgatccgaacaaaggtgcaaaggccctgctcagtaatggtcagtatgccagtgtattgtatgaaggctgcaccgttacctacgctgatggcacaaaaagcaagatcgccaccagcgccggtcagtctcacaccgtggcaggtaaaggtatgggactggttggaagccttctggaaaacggggatgtaattgtcagcacgcctgccaactgtggatttattgttaagtatgaagatgaccctgtagcggaggattttttacctgcccatgaggtggcgtaa

SEQ ID NO: 127416 - DNA, 825 bp, Enterobacter cloacae
atgggaaatcgttcagattgctacggacggggaacggcgctggaaggtgataaaacgaccactggcgcggtatgtattgcttctatgtccagtgataccgagcacgggcgcagagtcatgcgagttggtgataaaacgacccgatgccctaaatgcggcaaacctggtgttgtggtttccggagaaccacgcgataccaatatggggaaaatcgcggcggttgatggctcagaggtgcgttgtggctgccagagtgggacgaaccgaattattgcaccagccgggcagtgggtggggccaggagaggatccgtcggttgtcgcaagcgcactgctgttcgcagaacgtaaggccgctcaggaagcggaagagaagcgacggacagtagagcgggaacgtaaccgggtttttgctaaatcctgcctgcgtggtgaaggctgtaacgatgcaggaacgcagcaggagcctcataccaattttgctgatatgggcttgtttaaggcggctccggtcaatgatgcagcaacccacccggatgcaccacagcacgcgcagacagcgaagaaaaaaccaccagctccggaggatatcccagaaccgaagaagcgcagtgccctgtacaaatggcttaacggcaaccatgaagaaatggagtatcaggctgctgttgcagccgcagccagtgcaaccagagcacagacagccaccgctgggcttaacgttctcgaacagattggcgggcgatttgttacctatggcacatgggcggtacgcgggctgaaatcgcatcggctggtgcaggcgcatctgttgccgggtttttaa

SEQ ID NO: 127417 - DNA, 768 bp, Enterobacter cloacae
atgatgcccggacgactgaacgacggtgaacaagatttcatcgaccgtatgcggctttcacagatgagtgaagcacccactcgtgtacgctatacatgggagaatgacagcaacggaaatgctgttccgcatggctggcacaccccaccgggtaaagatatggtgagagtccgtaaaatgcagtgggacagcacccggcaggcgtacaccttcatcaccgaggaagaaagcccggtaacaattatctggaccccggatcattctgatgtacacactccgtcaaacacaggcaatcagaccccgcccggcctaccgggaacaatccttgtgaacccgttacccgatggcactcaaatcaccagtacgacaaccccgccaccggatgagaaaaattttgcggattacattctgattcttcccgtatcagatattccgccgatttatatctaccttagtaaaaatccagatgatcctatttggacaaaaactaaaacagccgaacctgtggaaaatgcttatggtcactgggttaaacacgggcatgaattcgacgataagtctttcaacaattcgaaggagtacattgatgctactcatgattttgttcggacccctccctctgggactctaacgaaggtccgacagaatggtgatgtgatgtactatcaccctgcgacaaacactttctccgtgaagactaaggatggagtaccaaagacaatgtttaagccgaagggtgggatggaatactgggagaagcagaaatga

SEQ ID NO: 127418 - DNA, 198 bp, Enterobacter cloacae
atgatgaattttaaacactcgtgtccttgctgcggtcagtatgaattccccgaagaagggagttatgagatttgccctgtttgcaactgggaagatgatcctgttcaggctgaagaaccagactacagaggcggggctaatgtgatgagtttgaacgaagcgcgcgaagcatttcggcaaggccgaaaagtaagttag

SEQ ID NO: 127419 - DNA, 987 bp, Enterobacter cloacae
atgggacaactcgtagacggcgtctggcaggatgtctggtatgacaccaaatccaccggtggacgcttcaagcgctctgtttcggccttccgtaactggctcaccgccgatggcgcacccggccccagtggcgagggtggctttgcccccgagaaagatcggtatcacctctatgtttccctcgcctgcccgtgggcgcaccgcacgctgattgtgcgcaagctgaaaggcctcgaatccttaattccggtgtcggttgtgaacccgctaatgctggaaaacggctggaccttcgacagtgatttccctgctgcgacgggtgatgacctttaccatcatgacttcctctaccagctttatctgcgtgcggacccgcactacaccgggcgcgtcaccgtaccggttctgtgggacaagaaaaaccagacgattgtcagcaatgagtctgcggagatcatccgcatgttcaacaccgccttcgatgcccatggcgcgcgcgccggggattactatccggttgagctgcgagacaaaatcgatgagttgaacagctggatttacgacaacgttaacaacggcgtttacaaggccggttttgccaccagccaggaagcctacgacgaagcggtcgggaaagtctttgaatctcttgagcgtctggagcagatcctcggccagcaccgctacctgacgggcgatcgtctgacggaagcggatatccgcctgtggacgacgctggttcgctttgatccggtctatgtcacccactttaagtgtgacaaacagcgcatcagcgattatctgaacctgtatggcttcctgcgcgacatctaccagatgccgggaattgccgaaacggtcgattttgaccatattcgtacccactatttccgcagccacaaaaccattaacccgacgggtattatctctatcgggccgtggcaggatctaaatgaaccccacgggcgcgacgttcgttttggataa

SEQ ID NO: 127420 - DNA, 777 bp, Enterobacter cloacae
atggaaatcaccgaaccacgtcgtttatatcaacaacttgctgccgagctgaaagatcgcatcgagcaaggtgtctatcttgtcggtgacaaactccccgctgagcgcttcattgccgatgaaaagagcgtgagccgcaccgtggtgcgtgaagcgatcatcatgctggaagtggaaggttacgttgaggttcgcaaaggctctggcattcatgtgatttcgaatcagccgaaacactctcctgtggcggacgaaagtctggagtttgccagctatggtccgtttgagctgctccaggcccgccagctcattgaaagcaacatcgctgaatttgcggcaacccaggtaaccaagcaggacatcatgaaactgatggagatccaggagaacgcccgcaaggaaaaatgtttccgcgattcagagtgggatctgcagttccacgttcaggttgccctggcgacgcaaaataccgcgctggccgcaattgtagaaaaaatgtggactcagcgcgttcacaacccgtactggaaaaaactgcacgatcatatcgattctcgaacggtggataactggtgtgacgatcacgaccaaatcctcaaggcgctgattcgtaaagatccccatgccgcgaaactggccatgtggcagcacctggagaacaccaagcagatgttgttcaatgagaccagtgacgacttcgaatttaacgctgaccgttatctttttgcagataatccggtcgttcatctcgataccgcctcaagtcaggcaaaatag

SEQ ID NO: 127421 - DNA, 267 bp, Enterobacter cloacae
atgtccggatgtaagtatttgtttgcctggttgagtatcagggaaagcgaggaaaggcggaagcgtaaaatgctggattttacgtgttgcgtcatgttttttaactattgtttaacgaaagtgccggggggcgcagcgccacccggcaaaacgcactatgcctgctgctttttatcgttctggcggttaacccaggtattgataatcagcgtcaccagcagaatgccaaacaccacgccgagcgagatggcgatcgggatatggtag

SEQ ID NO: 127422 - DNA, 222 bp, Enterobacter cloacae
atgaatagtaaagatcgtttaaaaatagtaattgcgagtgatgtcgattatgagaatctaatagctgagatttatctgaatgacgagtttattgctcttttacaacaagaaaatggtgtggatgatctaaaagttgaatttgcatctaatattaattcagtaaactttgactggcttcagaatgcgttaaatgaggctaagagaaaattgttaaatcagtaa

SEQ ID NO: 127423 - DNA, 525 bp, Enterobacter cloacae
atggaaaaactgttgattacattgtttatatttatgaccgttggatgctcatcaccaggaaagcctggtctgttttacgagtggacacaatataaaacaggggtggaagttgaagttgtcagtatgccaaaatggaaaggaggtgtagatgccatcctgcgtttgcaagatgagggtaaatatgcatcgatggttatttataatggtggaaacgtcgaaagccactttggttacgtgacaaaagacaatgttcagacatggattgatttgtatgagggctttttgacgtgggagccaaaagatgtaacgcagaaagtaaagtttactattgaagataatgtttcattatttggtaaaaatatatatgaagttgagtatagtgtaaaaaatagtcggaaattattcttaatgaatcattataatgctcactattttatttttgattacacgaatcaagctgtcgatgaagagaatgttaaaaggttgttggatatttatctcgcattaagaaatactttgaaataa

SEQ ID NO: 127424 - DNA, 267 bp, Enterobacter cloacae
atgaatgaacgttttttatatgaccaagttaaggctgttttattacatgagtgggatcctataggtatcaacgacctcattgaggccgatgatgaatatgatgcatatgtgcagcctatctgtgagatgttatatgcgggaaaagaaatcgaagacatttatcactatctacattgggttgctactgaatatatgtgcctgaatggagatagtgatttagagcgtagagttgccgaaaagttattttatttgccaaaagttcactaa

SEQ ID NO: 127425 - DNA, 678 bp, Enterobacter cloacae
atgaaagtaacaaaattcacagcaactactttacttttcgttgtagcgctaacgggttgtgccagcaaaataaaacctgaaaaagtaacctcttcaaatggtagttcgattgatattatggctgtgtcagcacaggcagaccttaataataatcgtatcgcagataattcactacgcgtagttaccccaactcataacgctgtaggaaaagggctagccgttttgtctgtgttaatcggaaatataaattccagcagttttgataaagaaaattataaaggggaaatcatcgagtcgatcaaaaaccctactgatacctatctcgctcaaggtgcaaagaaaactatcagtaagtggatggactcccaatccagcgggtatgtttataaagagcaactctatattggccatgctacctgggcattgatctttaacgatgctacgacaactactcccgtttatcagctgaaatataaggtgcttttctataagaaacctgagggtgggaatatgttttccgcgtatactgtagctgaatgttcccccgttcctgtggaagcgaatctgtcagagtgggaacgtgataattataagaaggtgactgttgaaacccagaaatatatggatgcgtgtatccttgagttaaataatcaactcccgcgtttgcttaaaaagtag

SEQ ID NO: 127426 - DNA, 393 bp, Enterobacter cloacae
atgaaggtggtggaacacctccataccgctaactacatagcaacttataaggagttgaatatggctgagacgaattttaagccagagtttactgttttcaaaacagaatcagacgcttttaaaagtattaccgaaaaccgcgacctgatacgcaaaaatgatattcgccgtttgcacgggaaccggactgatgctgcccccattcatccccgtgcggaaacgccggaagactgttctgcctgttgcgagctttattcacgggtggactgcaaatatcttccccttagcggcaagtggctcgcaaatgcaggttttattgacgggatgcctgtcaaaattcgggttatgaaggattgtattgtcattacaccgcaacatacacgtgagttatga

SEQ ID NO: 127427 - DNA, 423 bp, Enterobacter cloacae
atgggatatgtttattgtcacgctacgggcgctttttataatgatgctctggaggcagactaccgttccgccggttcgtggccggataattatgtaactgtactggatgacgattatgaatcattgatggcagggcagactgttggaaaaatgattgtttctgataataatggttatcctgttctgacggaaccaccggaaccgacacacgaagaacaagtaaatcaggcatcgtcacaaaaattatttttgatgaaaacggcgaatgaaattattactccgctcgaggatgcagtcgagctcggaattgccaccgatgaagaagcggccacgctgctactctggaagcgttaccgcgtaatgttaaacagactggatctcagcaaagcgccagatattcaatggccagaacgcccggcctga

SEQ ID NO: 127428 - DNA, 501 bp, Enterobacter cloacae
atgaataataaaattaacgaccattttttgcaggcttatcctgtcattttttccggcttaccagcaatgagctcagaaaatgaaaaggaactgattcagttttgtgaacgctatccacattacgttttatccgctatgccctgggcggcggcggagatcgctggggtctgtgggttctcaacgctgtttcatatgatttacgactttggcggcaggaaaatatatctgcccaaaaaacaggaacgttttaaaaaactctactgcattgatatttcagcagaacagtatgaccgtttgttaaagcgcgtggattcagccgggaatattgaactgccttctgcctggggcgtttttatcgccattcgtcgcgcggccatgcaaatggctatgcgggataatctctcctcaacggaattaacacgcacgtttggggtgagtatgcggaatataagaatgattcgttctactactgataaacaaaaagggggtgaagcactttag

SEQ ID NO: 127429 - DNA, 606 bp, Enterobacter cloacae
atgtcacaacaatacacgcttacttttcaaaacaacacgcgtaactacggcaaaatttgtgtctaccagactgcaccggatattgccgacccgcagctgatgtctctggcatggtttaccgaacccgcgcacccaactacccgcgttcagtttacgtggaccattgattatgcgtttatctgggatgagaccggtccgctggtacctggtgtgaaatttgatgcatcacaaacctggcctgccgatcttactaagaataacagcgttacgctgaccacttcccgtaatgcattaaccttccgggatcaggtaaccggcggacgtccgggcacgctttatgtccataacgataatacggtgccctttgatcaggtctccgtgggtatcgccatgtcgggagccggtactttcgccaaagaggcgcagcctaatttgcagttctcctatacgccgcatcccgtttattgggtgaccttcggtgattatgaaacgggtgaagtgctggatacggagagcattactaacgcccagcaaatcagttttaaccctaacgtctataacgtggatgtcgtgctgaacctcgacaacacctggacggttaaataa

SEQ ID NO: 127430 - DNA, 471 bp, Enterobacter cloacae
atgattattgtcgtatgtactgacgatcctgaactggtggagattgccgccgaatccgtcctcaatgagccggaggtttttctcagttactataaaattttccacagtgctattccgccgctgggtttcgaagaagatctgtttattattgcccatggggcgttccagggtgatgaaggcaggccggtgatcggcgaccgggatggtgaccgggacttttatctcaatggcgagcagtgctttatcaatatccggtctctgatcccacctggatataaaggtaaggtttatgtcgacgcctgccagtcggccacagattcgcaaaaaatcgacagctttattaccacgttgcaggtgcagttcctgctgaattcgctgaatactcatgtctatgggattaatggcgacagctcgggactgattccgcttcccgacgatctaaactggcgtccggcgaagattttgcggtaa

SEQ ID NO: 127431 - DNA, 2013 bp, Enterobacter cloacae
atgaaaaaaagtcttctctcactcttaatttgtgcggcagtgacatgttctgcctttgctgaaaccacgccacaggcagagtttgcccaggacggcgaatcctatattgcgattgtggtgaagctgaagccgggcaaaccgttgctcaaatccaccagtacaaccacaaccacggcaaatatgctgacgctgagcgaccccgctctggtgccgaccagtatgttccgtccaaataaactgcgcagtacccaatctgatgagtttgcacagctgaatgcacgctacggttttgatcgttatgtgcggattgatttgccggaaaataaaagcaccgataaaaattatatcaatcgcgtcattacggaactggaacaaaaccagaatgtggaaatggtctacccggaaagcgtcccggtatcattagataaatacagtggtgaagaacatcaaaataagccaccattaaaatcaacggtgcaaagctcggtgggggcatcgtcagtaccagactttcgtagccagcaatattacactaaatcgcccactgacaaacgtcagggctattatatgggcggcgtcaatcgggacagtgttaataaatatcctggcaacgagggggagggtgtcacgattatctccatggagaacgatatctggaacgtcaaccatatcaacctgccgaagccagctctgattcagggcagcaataaatatgttgacgatcatgatacggcttcagtggggattatggcggcaagagacattggcgcaggcgtccgtgggcttagctggaaaagccgcgtgggcttcagcgactggcactataacaacctctataacatgatcccgttgctcaaagcaggcgatgtcgtacagattggcatgcagaccggcggcggtgagatcacagggtgcaccacaacctgctacgtgccgcaggagaatgtgcagagctactacgacatcatcaaggctctcaccgataaaggcgtctatgtcattgaagcggcagggaacggcaacgttaacctcgatcatagtgcgtttaacggtaaatttgacgttaatgtccgcgattccggggccatcattgccggtgcgttttgtgcgaaggagggtaagagagcctactttagtacctacggatcgcgcgtcaccagttcgtcatggggatgctgggatgtagtcagcgcgggctttggcaacctttataatgcgccaaacgcacagtatacgtcgacgttcgccggcacgtcgtccgcgaacccgattattgccggcgtggtcgcgagcctgtcaggtattgcgaaagccaacggtatcaccgtgacgccgcgtcagatgcgtcagattctggcggagaccggtacgccgctggcgaacggggagtcggcgaaagtgggtacacagcctgacatggagcgcgcggtagcccgcattatggcgctgaaagacggtaacacgcctgtcgcgccggccccaacggctgcggcaggggcagattacaccatggtgtctccggctactggcgtgagcacctatccgctggacggcagcaagagcctgaatgccaaatcgtataactggagcgtgacgaaaggggctgaaaccttctcactggaagcgaaactgaacggcacgctggtgaagagcttggatagcgcgcatgcctatgccgtcattcctgccaacagcgagggagaagcgatcttcacgctgaccacaaccggcgcagacggccgtaccgcgacggacagcatgaccattaaggtcactaagcctgcggtacccgcgaaagacgacaccccggcaaaagacgatacgccggtaaaacctgccgcaccggcctataacgccaaaattgcttacccgaccaaatgcaccaaagtctcttacaacggtaaaatttggttcaaccagtggtatgtcaacccgggccaggaaaccccgggaaccggcgggcagtggggcgcatggcgtgaacagggcgcttccaataacagctgtaaataa

SEQ ID NO: 127432 - DNA, 1014 bp, Enterobacter cloacae
atgaaaacaatgaccgccatcctggtttcttccgtcttcgcgtcagccgcggcatccgctcaaaccagcaataccccaaccccgaccgcgggcgtgcaggcatttcttaatgttctgaatgccgggaaagggaaaccgatggaacagatgaccccgcaggaagcacgtcaggtattgattggcgcgcagcagggtgcaaaacttccccccgctgacgtttcagaaaaaacgatccaggtgaatggtcaggcgatcaagctgaaaatagtgaaacctgaaaacgcgagcggcacgctcccggcatttatgttctttcacggcggcggttgggtgctgggtgatttcccaacccacgaacgtttaatccgcgacctcgttcgcgcttccggcgccgctgcggtttatgtcgattacacaccgtcacctgaagcccatttcccggtggcaatcaatcaggcctatgaagcgacaaaatgggtagccgagcacggtcaggaaattggcgtggatggtagccgtctgggtctggtcggtaacagtgtgggcggcaatatggtggcttccgtggcgctgcaggcaaaacagttcaacggccccaaaattcgctacaacgtcatgctctggccagttaccgatgcgaatttcgatactgcctcgtataaccagttcgaaaatggctatttcctgtcgaaaaacatgatgaaatggttctgggataactacaccacccgcgctgacgatcgcaacaatatcctggcctctccgcttcgcgccagcaccgcgcagttgaaaggtttcccggagaccttgattcagacagcagagctggacgttctgcgtgatgaaggtgaagccttcgggcgtaaactggatgcagctggcgtcccggtgaccgtcacacgctataacggcatgatccacgattacggcctgctcaatccactgagcgaagagccgacggtcaaggttgcccttgagcaggccggcgcagcgctgcatgagcacctgaaataa

SEQ ID NO: 127433 - DNA, 423 bp, Enterobacter cloacae
atgaaagaaaacaaaacattagatgatttactttgcttctccctgtactcggttaccaatgcgttcgttcgacagtatcgccccttgctgcaggagctggacctcacttatccgcaatttgttgttttgatggccctttatgagaaagacaacatcccgcttcgcgatctgagcgataagacgttttttgattcgggtacattgactccgctcgtacaaaagcttgaggcaaaaggatttttgaaccgtgttgccgtggctaatgatgagcggatgaaacacgtcgttctgaccgataaggcgaacgaacttaaaaagcaggtgatggcgctgccagaccggattcgctgcagcatgcggatgaatgatgatgagcttgagacgctaaaaaaactctccagaacgctgctggaagatttataa

SEQ ID NO: 127434 - DNA, 558 bp, Enterobacter cloacae
atgaacgatggaaataaaacccttcttgctctgactctcgccactttcctctctgcacctgcttttgccagcgatcaaggctccggaaaaattacctttaaaggtgttgtgattgatgcgccatgtaatatcgctcctgacagcgttgataaagagatcgatcttggtcagataacaaccgcggtcattaatgccaacaaaaaatcaacggcggtgccggttgatatcaatctggaaaactgccagctagacgcagcggatgaaaccgccacccccgtcaccaaagtggacgtgaccttcagcagcaccgctaccgattcaacagacaccagcttgctgagcaatacctatgcgggcggtgcacagaacgttggcgttcgcctgctggatagcgcagagtctccagtcacgcttggctccacagagactgtcgatctgtctgcaggttcagcaattcagacgctgcacttcaaagcgcagatggaagtggccagaggtaaaacagcaacggccggtcaggttgaatctaccgcaaattacgtcctgctgtataaataa

SEQ ID NO: 127435 - DNA, 591 bp, Enterobacter cloacae
atggcaggcagaccgcgccagttcgatcgtgatcaggcgcttatcaaagcgcgcaacctgttctggcgacagggttatgaaggcacctcaatgtcggatctggtggcagagctgggcattgcgtcggcgcgtatttataaggcgttcggttcaaaagagcagctctttcgggaagccattgccgattatgaaaaacaggaaggcggctttgcggaccgggccttagccaccgggagcaacgtgcgggagacaatccagacgctgctgatggatgccatacacctgtactgtcatccggatttaccgcaaggatgcatggtggtcgcctccgcagccagcgtcagtgcggaaaatgagacgatcaaaacctggctggcacagcatcgcctgcagcgcacacagcagatcatcgaccatctgcgtcaggccgtgcataacggtgaactgccggacaccaccgatgcagacagcctgggagacttttttgccatcttcttacacggtttgtcggtacaggcccgggatggcgttccgccatcgcgattgcaggcggcggttaatcaggcccttagcgtgctgccaccttcctga

SEQ ID NO: 127436 - DNA, 1056 bp, Enterobacter cloacae
atgaaaaccctcaaaggtccctctctccatcttgctcagttcagtgatgatgcggccccattcaatagtttgcctgcgatagcccggtgggcggcggaaacggggtttagcgccctgcaaatcccggcatgggatcgccgtctgtttgacgtggcgacggcggcagaaagccagacctactgcgacgatctgaccggcatgctggcggaacatggcctggtggtgagtgaactgaccagccatatcttcggccagctgatggcggtacatcccgcttacgacagcttatgcgacagctttgcgccaccggaagtacacggcaattcgcacgcccgcggcgaatgggcgcggcaacagctgctgatggcggtcaaggcttccgcccggctgggcctcagcgatctgggtaccttctctggctcgctggcgtggccctacctgttcccgttcccgcagcgtccggaagggttaattgaaactgcctttgacgaactggccagacgctggatgccggtgctcaacgcctgtgatgagcacgggattaatctctgctatgagatccaccccagtgaagatctgcacgatggcgtgtcgtttgaaatgttttatcagcgggtaaacgagcatccccgctgccgggtgctttttgaccccagccacatggtgctccagcagcttaactacctggagtttattgatatctataaggacgtgatcaccatgttccacgtgaaagacgctgaatttaatccgaccggtcgtcaggggatttatggtggctaccagtcatggattgaccgggcaggacgctttcgctcacttggtgacgggcaggtggatttcaacgctatcttttcgaaactgacccaatacgattatgccggctgggcaacgcttgaatgggagtgctgcctgaaaaacccgcaggatggtgcccgagaaggggctgcattcatccgcgaccacattatccacatcaccgataaagtcttcgatgatttcgccggtgcgccggttaaccctcagcaaatcaacgccttactcggcattcgctaa

SEQ ID NO: 127437 - DNA, 897 bp, Enterobacter cloacae
atggaacaacaattcagtgagatcctgcctgcggatctcagggcagaacacgtctatacgaaagtaaacggccagcgcatccactgcgtcgtggcggggaaaggtcaaccggtattactgatacccggctggccgcagacctggtatacctggcgctatgtcatgcgcgcgctggcagaggcgggctttaaggcgatagcggttgatcctccgggcatgggtgaatcagacaaaccccgcgacggctatgacaccggacgtgtcggtgccacgctgcatacgatgatggcacaactggggcattcgcattaccgcattgtgggccacgatatcggtatgtgggttggctatgccatggcgagcgattttcctcaggcgatagaacggcttgtgctgacagaagcggttatcccaggactggcaccgccaccaccgatttttgtcgcaccggaagagaacatctttctctggcacttcatgtttaatcaactggcggatttacctgaaaccctgaccagcggacgtgaatcacagtatctcagctatattttcgaccgctggtcgcatcgtcgtgaacgggtcgctgcagaggtgtatatcaacgcctattcgactcccggcggattgcgtgccggcttcgactattatcgcgctatcccggaaactatccggcagaaccagcgccgtgcgcaaacgcctttaaccatgccggtgttaacggtgggggctgaacacgccacgcgtgatgcaccgttgataactctggagggcaatgccctcgatctgcgtggcgagacggtggccgactgcgggcattttattaccgaagagtgtcatgaggcgtttattgagctgatcgtgccgtttctggctgagggcactcactatgccgcttga

SEQ ID NO: 127438 - DNA, 903 bp, Enterobacter cloacae
atgccgcttgatccgcatattgctgattttctggctgcgtcatcgggcgcgccgcaaccagcctcgttagccgaaatgcgagccgcgactgaagcggatttgctgcggctgcagggagaagcagaattacgcgatgacatgcaggattacgtagtcatcgccgatgatggttacgccattgcccttcgtgtttatacccccgccgcctcaaacacggaaatggcgcagcctgcgatgctgtttgctcacggcggtggctggtgcctgggctcgctgacgctgtacgatcggccctgtcaggcactggcgaatgccaccggtcggaaaatactctcggtggattaccggctggcaccagagtatcccttcccgcgaccgttagaagatgtttatcaggcgctctgctgggtccgcgatcatgccgcgcttttagacattgatgccagtcgtctggcggtggggggcgatagcgcaggcgggaaccttgctgcagcggcaactctgctggcccgggatcgcagcggacctcacattgagcatcagttgctgctgtacccggcgttaagccgcggaatgtcgagcgaaagctaccgtgaatttgctgaagggtattatttaacgcgtgatgcgatggtgttttgctgggaaaactatctgggagaacgtcgacatccgtatgccgagccgctgcatatggtctcgctgagagggttaccgccagcaaccatcctgagttgtgaatatgatcccctgcgcgatgaggcggagcaatatgcgctgcggcttgaggaggcgggggtgcctgtacgctgtgaacggttagcgggcatggtgcacgcctgtattcatatgtcagggttaacgcccgcggcacgtcgggtgtttgaacgggcttgtatatag

SEQ ID NO: 127439 - DNA, 1107 bp, Enterobacter cloacae
atgaacactttcacccatgcccgccagcaagcccagctctcttatattgcctcagaagagaacattgttgtcggtgacagccgccattgcccgatggcccctgagaaattaatgcagctttcgtcttccgatccctgcgtcgttgaatgctttgatggcggccttaccgctcaggtcctgcatctgtgtattgagggcagacactacaccctcaagcagaaacgacacgaggcgctggtgcgaaataccgatggccagacctcgttcctcaatgaagtacagagacgggctgatttcacccggctcaaaaacgatccgttgtgggcgggacgattcgatcacatcgtaccgacgatttatgccaactttcgccaggggattattctctcgccctggctgccgggccactcgccagaaaaggtcgatgaagatctgtttgaacaggttttatcaacgctaatggcatgcgaagaggccggtcttatggagtgggatttgtgtcccggcaatcttcttatggataacggacatctctggttattcgatttcgggtatatgtatcctttccagcctctgcagagctacaacagcaatggcctgcaggatcccctctttcacgcctgcgagcgttttgaaacccgctttttcttcggaaggctgctcgaagaaaatcagcctgaagccgtgcaactgtcgcagtatcatgccctgaaaacagtggccctgaagcattatcgccataaaagagaaaaactggcgtcgcaaggcgcggatgcggcggtgctcgtctggctggatgcgattattacccgctggcaacaggcactgcatgataatcaaagcctgcagcgcggtttcaccattgaggcgtttcgctcacacgttctggatgtcgaggatgatttacatgggcaaagctgtacgccactgaccctgaaaaggattgagtacattactcagtcgatccaggcgtgttacgaggtgcttaacgaaggcggcgcgcttttttacgataataaaggtaaaagtcagagagcgttactggcgcaatatcaacgcaaacgtcagctcgcctgtgacgctatgcagccacagtataagcgctga

SEQ ID NO: 127440 - DNA, 915 bp, Enterobacter cloacae
atgcatacattagctaaatccacatctatgggtgttagccacccagcacctcgtgttatccctatggtctcaaccaaagggggcgaaggtaaatctacccaaagtgccaaccttgccggcttccttgccgatgcaggtaaaaagactctcctcatcgatggtgatcattcccaacctactgcaagcagcattttctccctggactatgaggctcccaatggtttgtatgaactgttgatgaagacggtcgacctcaatcaccccgaacaaatcatctcccgttccgctatcccaaacttggacatcattgtttccaacgatccccacgaccgtttatcttccgccatgctgcatgcccctgatggtcgtatgcggctgaagaatgttctgcagcaccctttgttcaacgagtacgacgtcatcatcattgactccaaaggtgcggcctctgtgatgctcgaactgattctggttgccagtacggaattcgctgtcggggttatcaagcctatactgccggacacccgtgagtttctgcgtggcacattggggttgatggaaggattattgccgctgaccagctacggtattgcgttaccgcgtatccgtattctgacgaactgcatggagtacaccaatctggattggcagacactggaaagtttgcgcagcattattacaaacggccaatatctgcgtgcagataccttcgacgtctcccttctcgacaccatcatccccaagctggaaatttacaaaatggggcatgcttccggccaacctgttcatcgtctcgaaagaaccaccacccgtacatcaacgctcgctgcagctgacactatgtatgagctggcctgcgagttgttccctcactgggttgccgactttgatgttctgcgtcaggaggcgaactaa

SEQ ID NO: 127441 - DNA, 666 bp, Enterobacter cloacae
atgaacattgaacaattagtgacctttcttaacgaactgcgcgaattagccgcacctgccccctggcaggttcttgagctctacagcgatgcagtcactgtcgtggatgccaacggctttgagcatctggaaatccctaacgttgcgattattcctgattgggaaaagcttggcctggagcactggtcggaagagggcggaagccgtgatgtgggtcttgaggagcaacgggctagtggttatctggccgccgctgcaccacagctcctggcttacgtcaatgtgcttaaccgtaatttggaaaccacggagaatgcgctgcgccgcatgctgaaaatgcatgagttgatgatggctaaagccaatcacgcagccagtttctatgacgctgaatgcttgcaggaaatggccgaggctccgtatgaggcagccgcagtgcttgagcacatctgcggcgccgatgatgagaaaacgcacctaaaagaggcaacttgtgtagggtgcggttgtacagatagccatgcctgccttgacgaaaatcacacaccctgcagttggcttaaggtcaatcgtgaaactgggctaggtgtgtgttcttcctgcccgacttttcttgagagcccgctgacaacgggcagcgaagagcaggaggttcgccatgactga

SEQ ID NO: 127442 - DNA, 1350 bp, Enterobacter cloacae
atgactgacttgaatatcccttattcctccgatgctgagcaggccgttcttggcggcttgatgctggataacgaacggtgggatgacgttctcccattggttggagagcgtgattttcatcttgcagcacatcgccgcatattccaggcaatggctcgtctgatggctgtccaacagccgattgatctgattacgctccatgaatcactggaacaaaatggtgaactcgagcaggtgggcggttttgcttatctggcggagttgtctaaaaacacgccgagcgcagccaatattgttgcctatgccgaaattgtggctgaacgcagtcgtctgcgcagcctattgcagctcggacgtgaattaagtgctgatgctgctaatccgcgcgctgagtctgctgtcctgaccgaacgcgctgaacagcaactgttccagctctctgagcaaacccagtcacagcagaatgtcagcctgaccgatgggttgaatgccgtcgtgacctatctggagacggtaaatggcggtaatggtatcaccggcaccccgaccggtttttctgagcttgatgtgatgacgtgtggtctgcagcccggagatttggttttgctggctgcacgaccttcgatggggaaaaccgcttttgcgttgagcgcctacaccgccgcgcttcgtggcacggagaaacctgcgttcttcttcagcctggaaatgccgcgcgagcagctgcttcaacggctcattgctgtggatgggcgggtcgaactttcaagactgcgcagtggccagttggatgatgaagattgggcgcgtatttccaaagcgctggagcagttgttgccattggaaaaccgcctgattattgacgatgaatcatatttgacccccgcactgctgcgctccagggcacgccgctacacccggttgtatggtaagcctggtttaatcatggtcgattacctgcaactgatgcgttgccctggccaggaaaatcgcacccaggaaattgcggaaatttcccgcagcctgaaagcgttggccaaagaactcgattgtcccgtcgtggcactctctcagctgaaccgtcagttggagagccgtgcggacaaacgtccgttcaatggcgatctgcgcgactctggcgcactggagcaagatgccgatgtgatcgcgttcatctaccgtgatgaggtttattacgcggattctgatgatgccggcacggctgaaattatcattggtaaacagcggcagggggcaacgggtaccgttcgcgtcaagtttgaagggcaattcaccgcgttcagcgacctccaagacggtcagtatgaccaatattcggggagggcgtaa

SEQ ID NO: 127443 - DNA, 1740 bp, Enterobacter cloacae
atggcgcgcgctaaaaccaagatcctcgatctgaacagtgctttgctccagcagggcaagactgcagcaggcacacagtctttagcccccgtggtggcggagacccccgtcagtgaaatgccattggtgctgacactggatgaggtcaaccctaacccggataacccgcgtaccacccgcaacccaaaatatgatgatattaaagcgtcaattcgggcgcgcgggttggacacagtgccgaaagtaactcgtgatccggagcgccctgagctggggtacttcttcagtgatggggggaatacgcgttatgccatcctttccgagctctggcaggaaacgggagaagatcgtttttatcgcttttcttgcgtgttcaaaccctggccaggacgattatcctgcgtgataggtcacctggctgaaaatgaagtgcgaggagatctgacatttatcgagaaagcgtttgggatcaagcaggcacgccagctttttgaagagcaattgggcaaaactgtctctttacgcgaactttcaacgctgctgggggagtccggctatccagttcataactccaatatcagccgtatggaagatacgatccaatatttatacccttatattcctcgtctactcgagtcaggtttaggacgtccacagatccaactcttgttggccttacgtgggaatgctgacaaaacatggcagcgttttatcattgatgtggaagtaacctgtaccttcgatgcggtcttcggagcagtttgcagtcactttgatgaccccgaaatctactcgctggatatgttccgtgatgagttgattggggccctcatcaacgcattaccacacccgttgctcaattatgaccgctggttactggagctcgatcccaaagagcaaaaccggcgcaagcacctcggtgagccgacgttaacgcccgagttgtcaggcaagggtaatactgtcgagctggcgccagcactgcagcaggataataccggcgggccgacggcaccagaagtgccgagtggcggctcttctttggtgctggacagcgcgttacttgagtcaatgggtgattctgatgagggatcacaggagactcaggaagaggaaacgcctacaactaaaactgaaccacgtgttgaaacgcaacctgatttatacggtgctccttcggtgttatcaggtgacgttgaaacggttttagacggtgagaataccaccgtcaatgaatcccctctgcctggcactcatgagtcgacagcccctcacagcaataccgagacacagacaaagcaaggtgtaactcctgctgcagaggtgtcttttgccgaggtgggacttgagccggtatcctccatttgggctatttctgccctgcaagacgatatcgagcacctgcaggtgaccacctttcggttggcatttgaactggccgaagtggcgggctgcgaggctgaaatcaaagccgataaagccgacttgcaggctgccggctacgcattgactgccgaacgtccctctcgctttaccgcgttactacttacgcttgccggcaacaaccctgacggtgcctcatccagctcgctcaatgaggcccttatcggttcggaaaatgcggctgactggcctttgcttgacgatattcatgctgtgaaattgatgcgccttattcgcgttttgcgtcgtctgcgtgaactgcagcgtgacttacctgcaacagaggagacagcctga

SEQ ID NO: 127444 - DNA, 723 bp, Enterobacter cloacae
atgagccattcacaacgacaggcacgcctggtgaaacaggtgcgcaaactgcttgagctggcccgcagtaacagcaatgcgcatgaggctgggctggcgttagcccgggcgcaaaaactgatggagaaatacggtatcagcgaattggaagcaaatttgtcctcgatccagacagcgccgagtcagggagcaccgtcggaggcgcagaaaataccggaatggatgatcagcctggtttgggccatcagtcgtgcctttggctgtcagccctatttttcctggcgagataccccttccggtcagcgtcggaacgtgacgttctatggcttcagtgagcggccagccgttgctgcttatgcgtttgatgtactgaaccggcaactgaaggatgctacagcagactacctgaaaacccagaataagcgcctgaaactgagcacacgtcgtgcacgcgccgagcagtttcgggccggttgggtacgtggtgtacagcgggtcatctccagtttcccggtgccggacaacgagcagcaattgatgacggcctggattgctaatcaggacatggtggatgccaagacacgtgcgttgaaaggatgtcgtggtggtgatcttgcacgcatccagggatttgaagcagggcagaacgccaggttgcaccagggagttcagggtgacaggccagcggccatcgcacacagaattggggggataggacaatga

SEQ ID NO: 127445 - DNA, 630 bp, Enterobacter cloacae
atgagtaatagcttatcgcaggcaacgaacagcctgctcacacagttggtgatggagttgaaatcaggttatatccgccgttgtgagtccctggggctgactacggaagagatgcagctgctgcatggtttgaccattgaagatctgcattacctgatgaacagctcggtatcggtgctgacctttcaaatccatcacgagaatttctccttgatgttgcaacacgcacgccgtgaacagcagcgcatgcaacggattgaccgggctttggcgttggggggctctatcgaaatgatgcagcattatttcggcctatccactgttgaagttgccgcccgccggcgtatgaccggtatcaacattcgtcaggggcgttgtgctgcgctcagcgacgacgagaacgcggcattgtggcgtcagtggcaaaaagcggacgtcgatgatgcctccagtgctgatggcctggacgtcatgatgctggccgccgagcagatggatgtttctctgacggctgtctggcacgccgttcgcagcttcgatgcacctcagactgcgaccgccagaaaagccattcaggccgtgcgtacaccacgcggtacgccgggaggaaatgcaaggaggctggcatga

SEQ ID NO: 127446 - DNA, 264 bp, Enterobacter cloacae
atgaagccggtgatattaatgccggggttgcaggtcccccgttcggcgccgccgtcctgtcagaaaaaggcgaaggagcaggtcaggcgcttccgcagcggggagcgtaactacaagcatcttcatgtcaaaggcaagcacgcccccggacgtgcctggatgaagattgatattggggccaattggcgactgctcagccgaaacagtggtgatgactgggagctgttgacccacgaacgctacaacaacgaactgtggaagtga

SEQ ID NO: 127447 - DNA, 1239 bp, Enterobacter cloacae
atgagcataaaaacacctgatgacagcctgatcacctttacgctcgaacaaatgaatgcccgcctggtagaacgaataggtgccgaaaagcacgcggggaccagcgatgtcacgaatctgcgcagtggtctcttgttcatgggcaatgtgcatgattccattccccgcaggttgctcctggacccccgtctgtcaccgcttgataaaactgcgtggataatgatccgcctgtacgcgcaacagaaccagggcgccgtattccctacctatgacgaactgcagctgcagctcgcttcgccgtttaacggtaaggcgtcccgcgagaccgtcagtcgcgtgctgctgatgttacgcctgacgggctggctcagtttgtgccggcgtgtgcgtgacgacaaggggcgggtgaagggcaatatctatgcccaacacgatgagccgctctcggcccgtgatgcggagacattggatccgacctggctggatacggtcgccatgggctgtgtgcataaaaaccgcaccgtcagccagacggcctggtcggtactgtccgatattcaacatgaccccacaatgcgtcatcagcattcccagatggcggcaattgctgaacggctggggtcgccacaaaccccgcaacagatggccgccagagtgtctcaacgacaggaagatccccccagttcggatgccgaactcagtaaatatacccccggttcggataccgaactcagtgtaaaacaggggggcaaaccaccgagttcgctttccgaactcattctagaatcagtcacttacggtgcatcaatgaaaccgaactgtaacgtacgttctttcacacagagtgtgaataaaacaacgtacgtacctgagttaccggcagaactgcagaacagcatggcggcggatgatctacagcagatagctgcccagcttcatgcattgcctgcagaggctgcccggcaggtactggagagtctggcgcagacgatggcacgaggcagcctgaataatcctactggctggttgctggcggtcatcaagcgcgcccgaaacggtgagctgtatgcgagtgcaaaatcccaagaacttgccaagcctgtacctccacgccaaagaccttgccctgtggcgccagcaaaaccagcaggcccggtccgccaacacctggcgtcgcgggaccatgtaagcggtgttgtggccaaattgcgccagcaaatgatgcgggcaaaaaaatga

SEQ ID NO: 127448 - DNA, 762 bp, Enterobacter cloacae
atggctgaatcagcaaagaataatgaacaaaaaccggcggctgcacgcgctggtgcattaaaatccactcttaccgtagagcttcataccctctatgccattcgtttatgggaagggcgacgtagccaaaacgctgatcctgaaacgtcggggaagcgacgccctgatatttatagtatgccccgttttattctacgagcagggcagatcaatgaggcttctggtgaagataacccttatgccgatgctgccatggttgccctggaagagaccttaaataaaggtacgatgttacttcaacaggctgttgctgagttggacaaaacactggcaaacatccctgctcaaatttctctttcagatgttgcttctgtgtctcctttaaatattggtgtatttagccgcaccccggtgggttatcgctgcgttttcctcttggtcggctatgaccaactggcgatgaaagcctttcaggcctggcactatgggcttatatcacgttcgcaacgtgacacattattagatcggggtgggcattggatccgtagcgtttacggtgtcgtccaacactatcgccccgtcaatgtgactcgtgatgatattcgtctcgaaacccccgcaggtaaggatgcgatcacccgttttggtatgcctgacgaagacattatgtcaggtgcgacacgttccgctttttcgccgcccctcaataaaacttctgtgttaacgacatccacttcttcaaaaaaaggagctaaagcatga

SEQ ID NO: 127449 - DNA, 576 bp, Enterobacter cloacae
atgagtatgaatcgacaggtaaagtctgttttgatgccgggtgtactctgcaccgcgttgttgttaacggggtgtgcaggcaccgagctgggtgaatggaaccaaaaaatcagtgacgctgcccattcgctggcgagcggtggtagtggtggctccagcgagggcggcatgccctggatgacccgggccggtatttccgggccccgacaggatgtacatcatacgtatacgctcccggtggacgttgataccgcggcggcgcggctgaaaagccattatcagtttatctcttccgaagagctggaaagtctgcgccagcgtgatcagcacggcgactggagcgcgagctccattgatgaagcccgcccggtctggtcagcaaaccagggcagttattacaagatggggcaggaatggaaaggcaatgatcgccttgagctcgaagtggtcaagtccggcgccagcagtcgcctgaaagtgacgtacagctctccggatacgtcgcacctgaccgatgcttacctcggacgtttgatgacgcagctgcagcaggtcgctaaaggtcagctgggctga

SEQ ID NO: 127450 - DNA, 2040 bp, Enterobacter cloacae
atgcaactctacctgtgcgagaaacccagccagggtaaagatatcggcgccattctcggggcgacgcagcgtaagcagggttacctggcgggcgccggcgtgatagtcacctgggccatcgggcatctgctggaacaggcccagccggagacctacggtgagcagttcggcagtccctggcgggagtccgttcttcctatcgtccctgcccagtggaaaatggcggtaaaaaaagacactgccgaccagttcgctgtcatccgcggtttgctcaaacaggttgattctgtggtgattgcgaccgatgcggatcgcgagggggaggtgatcgcgcgggagttactggaacattgccactttaccggcccggtccagcggctctggttgtcagcgctggacgaggccagtattcggcatgccctggcgaacaaactccctggcgagaagaccgcgcccctgtatgaagctggcctggcgcgatcacgggctgactggatgacggggatgaacctgacacggctttacacgctcaaagcccgcgaacagggatacggcgaagtgttgtcgatcgggcgggtgcagacccccacgctggcgttggtcgtgaaccgagaccgcgacattgccaactttatctccaaaccgtactggcaagtcagggcgacgttgcagaaaggtgggatcgccttcccggcaaactgggtgcctgccgccaactactgtgatgaagagaagcgctgtattcaacagaatgtggcgcaggccgtcgtacagctgtgtcagcaaacagctaatgccgttgtgcttgaggtggggaccgagcgcaagaaagagtccgcaccgttggcctttgacctgggcaccctgcagcaggcctgctcacgcaagtgggggatgagcgccaaccaggtcctgagtatcgcacagtcactgtatgagacgcacaaggccaccacgtatccccggacggattgcggctatctgccgacatcgatgcgggaagaggttgccgatgtgctgagcgctgttacccgtacggacccaacgctcaacgaaagcgtggccaggctcgacagggcattcgtttctcgtatctggaacgacaaaaaaatcacggcgcaccatgggattatcccgaccaaacagccgttcgacctgagcaagctgtctgccgacgagctcaaggtctatcagttgatccgtcagcattacctagcacagttcctgcctttacatgaagtggatgtgacggaggccaccttcaatatcggtggccaactgttccgcacgcgcggcaaggttgaagcggtagcaggatggaaagtgctgttccagcatgacgcgagcgaggcgaaagaggaaccggctgacacggatgatgtccgactgccggcgctggtaaaaggtgaagccgtcgcggtagccggtgctgagctcaaaacgctgcagacgaagcccccgggacatttcaccgacgggacactgatcgccgccatgaaaaatgcagcggcgttcgtcagtgacccgcaactgaagaaggtgctgaaagagaacgcagggctgggtactgaggcgacgcgtgccggtatcctggaaacgttgtttaaaaggggctatctggagaagaaaggtaaatttttgttgtcgacgccgattgccggcgagctgattgatgctttgccgacggcactgacgaacccgggcatgacagcgctctgggagcaggcgctggacgagattgcccagggccagatgacactcgatacgttcatgagccgccaggctcagtggacggggcacctggtagaaaaagggaaggcgcaagccgtgaagtttaccgcgccaccttcgccaccgtgcccgacatgcagcgggacgatgcgccggcgcgccgggaagaaaggcggtggagccttctggggctgcagtaattaccccacttgccagggcatcattaacatcgatgcaaaaagtgggcgtaagactaagcgctataaagcaaaatcaccggctaaaaataaagcaaccggatcggagtaa

SEQ ID NO: 127451 - DNA, 468 bp, Enterobacter cloacae
atgtctactcaaactcaacaagcctccaccaaaactgaatacttcaacctgactatcaaaggaatggggtatctcagcaacattcgtcaagttaatggcccgaatggcacctttatcagctgtgtcgtcaatggactctccggtcctaccgataacgccagttatacgcgtttcgatgtgacggtcgccggtaaagaagccagcagcctgatcaaccgctgtcaaaagtcggttgatgaagacaagaaagtcctgcttggttttgtgctcagcaatctcaaaccggacatcttcacgctcaacagcggcgaacatgccggtgaacaacgcgtcagcctcaaagcccgccttatcaaggtcgattggattaagatcggtcaggagaaggtcttccaggctgagaaatccgactctacgccgcctcagcaaggttccgcacagcaacaatacgcggaaaactctttctga

SEQ ID NO: 127452 - DNA, 546 bp, Enterobacter cloacae
atggcgtctcgcggcgtaaacaaagtcatacttgtcggtcatctcggccaggatccggaagtccgttacctgccaaatggtggtgctgttgctaacattaccctggcgacctctgagagctggcgcgataaggcgaccggtgagcagaaagaaaaaaccgaatggcaccgtgtcgtgctgttcggcaagattgccgaaattgccggtgaatatttgcgtaagggctcgcaggtttacattgaaggcgccctgcagacacgcaaatggaccgatcaggccggtgttgaaaaatacaccactgaaatcgtcgtcaacattggtggcactctgcagatgttgggagggcgttcgcagcctgccaacgctggacaaacaggccagggcagttgggggaaacctcagcaaccttcgcacagcggtacgccggctcagcaacctcaaccagctcaatcgggtgggaatgctgcgccgatggattttgacgatgacatacctttccttgggtttgggtatgatatcgcaaaatcagccatttacgctttgtga

SEQ ID NO: 127453 - DNA, 237 bp, Enterobacter cloacae
atgccgacaatacttagagtaggtggttttcgcttttacttttacagtcatgaacctaacgaaccggcgcatgtccatattgataagggcaatgcaaccgctaaaatatggttacatgatgtcaatattgcgcgtagtgtgggatttgcatcacatgaactgcgtatattgcagcgtctggtgactgaacatcggacacttttacaggaggcctgggatgcttactttacgcaatga

SEQ ID NO: 127454 - DNA, 273 bp, Enterobacter cloacae
atgcttactttacgcaatgaaaatgatctgcgtgtaatgaatgtccgcatcgatgatgaccgtctgacggttgatttgatggatggccgaactatttcggcaccgttagcctggtatccccggcttgcggctggtacgccggcgcaacgggaaaactgggaactctgcggggctggaatgggtatacactggccagacctggatgaggacttaagtacggaggggttgttgatgggggcgaaaggcattacgcgtaccccttcattatcctga

SEQ ID NO: 127455 - DNA, 633 bp, Enterobacter cloacae
atgaaaaaaacaattctcgtctcttccctggcagcactcatgctgaccgggtgcgttactcagcagcctctgcagcagcgtgatatttcccctgttacgccgtctgtcaccgtcaaccgcaatgttcagccggtcagccctgatgcctacgggcaggcgccggaggtggtgcgctacgaccgttatttactggtcagcactgacccggcggccgttcagcgtgatccgctctcgcaaatcatcgatatccgtattccggcgtcagtaacaccgacggttgctgatgcgttgcgctatgcgctgcgccagtcgggctattccctgtgtgcgaccggaccggcaaacggcgtgctgtaccgccaggcgttgccggcggtgcagtaccaactggggccgatgcgtttgcgtaccgcgctgcaggtactggcaggccccgcgtggcagctcgaggtagacgacgtgcaacgtgttgtctgccacagcctgcgtgacgggtatcagttgccggcgacacagctgccgccggtgacggtggcgccggccagggtggtttcagcacgtcctgctgcgacggtcattgcacctcaggcatttaacgcggtaccggcaaccggcgggtggttgaaaaaatga

SEQ ID NO: 127456 - DNA, 744 bp, Enterobacter cloacae
atgacagagcataatgacgaaatggtgccaatgacaccggcaaaaaaagggttgctgcgaagcccaaccttctggggggcaacggccggcgtcgttgtcgtcctggtggctggtctcgtcggttcaggggctatcagccatgtcgaccagcgtattgctcagcttgaacaggcacagaaagcactggcgccgcaggatggcatgaactctatggccgatgtggtacagacgcatgccaaacagcttaaaagcctggctgaacgccaggactcgctcacgcggcagatgggggcgctgacgctaaccaatgggttaccagagagacttgatcagcagttgcaggctcaacaggttgagctgaatgcgctgaaagacagcattgagtccgtgaaaaagtcagcggctgagaagccggcaccgactgtggcgccatcaacggctgtacccgcttcaccttcagcgacagtcagaatcaccccaaagcacaaacctgcgccgattaaatcttccccgcgtaatgcggtacgccgtgtggcgcgcaaagcgccattcgtgctgaccggggtggagcagcgtgggacgtcggcttttgccgccgtggcaccgcagggtttcagtgacttgtcgcaggtgcggttaattggggaaggggagtcggtcgccggttggaccttggtcagtgccggctacgggcaggcgacgtttcgagtgaacggccgtttgcagactgtcagcgcccaataa

SEQ ID NO: 127457 - DNA, 711 bp, Enterobacter cloacae
atgaaactgaaatacagcgtgattgccctggtattgctgagtccgttatcacaggcggcgcagcagacggccatcgagaacagccagtctactctgagccagcttcagcagagtcaggccaacaagacggctgaacagggcaaacagtgggggctcagtggggaggaataccagcgttatcagcagttgatggagggtccccgcgggacacagtccccggggcttgatccgttaaccgcccttggtattgaggctcagagcgacgccgaacgtaaaaagtacgccgagcagtgggtgaagcaggagtttgtccgcacagagaaagaactcaagttccagcgtgaggtggatgcggcctggcagcgcctcggcgtactgccggtcaacatggggaatgcggcgggtattgcccatgacaccggggggcgactggcgctgttcgtgaaagcgaaggactgcggtcagtgtgatgcgcggctggctgcggtgctggcagataaccggccggtcgacatttacctggtcgacagcaagggcaatgacagcctgctgcgtgactgggcccgggcgcatcacattcccatcgacaaggtgcgcgcacgtcaaatcacgctcaatcatgacggtggccgctggatgaagttcggcaatggcctgatgccggtagtgctgcaacaaggggaaaacggatggacactcgccgcgttctga

SEQ ID NO: 127458 - DNA, 693 bp, Enterobacter cloacae
atggacactcgccgcgttctgacccgggggctgttgcccctgtttgctcttctcagctttgtgggcgggggagccgttcatgctgccacccagcaagtcccttccggctatcgggaggtggcactgcgtcacggggttccaccggagtccctgtattcggtggcgctggccgagacgtcgatggcaccgaaaagcatcatctcggtgacccgcggggccgggccggccccggatgttgagcgtccctggccctggaccatcaacgttgccggcaaagggtatcgttacgccagccgcctgcaggcctgggaagcgttgcagcgctttttgaaaacacatcctcgcaaacgtattgatgtcgggattgctcaggtcaatctgggctggaatggccatcacttcacgtcgacctgggaggcgtttgatccgtacaccaacctcaacgcggcggcggccatcctacgtgaatgttatgaccgcaaccctggtagctggctggttgctgccgggtgttaccaccacccggcaggcggtgcgcccgctgcccggtataaatccatcgtgagcggcaagctggcacgcctgaacggcagggcacccgccccgatccgggtggccagtacaacccccacgcccaccgcgttaccggcacaaacggcggcgctgacgtgggttgaaccgaggagccaatga

SEQ ID NO: 127459 - DNA, 189 bp, Enterobacter cloacae
atgaccatgacgaatgtgaatgtgacgaagcaactggaagaactgaaagaccaattgccggcggcgctggctacatggcagcagtcgaaaggcgggaaaatcaccgttggatggatgcatgccgctaaccctgaagtcgtcggcgctttgcttaagctgctcgatggccatgagcaggaggatgcatga

SEQ ID NO: 127460 - DNA, 228 bp, Enterobacter cloacae
atgaaaacgcttgagatgattaaaaacctgacagaacgcaacaccgttgttgccagtgctgacgtactcgctgtgtttgcagcgctggaaaaatcgcatcagcgcatcggggagctggagtctcagctgcaatcggggtttacgccggaggcgctggctcaggaagaactagcggaaaatgccgagcagcgcgtagcagagttggaattcatgctgaggaacccataa

SEQ ID NO: 127461 - DNA, 525 bp, Enterobacter cloacae
atgaaaaaagtgaatttcctgctattcggcctgagtctggtgaccaccactgcgttggccaacctgaatgtgatcgccgatgtcggtggcgaagatgcttcgccgtattttgaaggtattaaccgtcaggagggggcgcaatcgtctccggccgtgccgccggcgccagcatcgtccgctgatgtcgaggctgcagtgttgcccgtggcaacgccagagctgacccccggctatgtggctgaccggcctctgcagttacctgggattggcgcgctgtttattgtgggtgatgacgatgacagccgtatctggctgcaggcgaacgctgagcaactcaaatcctggcacgccgcgggtctggtcgttaacgtcagcaacctgccggcactgcaggcgctgcgtgagctggtgccgggtgtgccgatggcgccagcctccggcagtgaactggcgcgtcggctgcagctgtcgaattacccggtcctcatcaccgataccggtttgtctcagcgggtcacgccatga

SEQ ID NO: 127462 - DNA, 627 bp, Enterobacter cloacae
atgatgtctccacagcatttcggtatcgcgctgatggcgaatccggtgctggccgtcctgctgatagggctgtttattgcggtgatgtccgggttgaatttgcgtggcagcgagtcggcctgcgcacggcgccaccgacgttatcgtgcgacgggcgcccgcgttctacagcgactgccgcaactgggcggtgatggtcagcgcttgatgtatctgcgcaaaatcaatccctacgtcttcgaagaactgctgctcctggcgttcgagcgccagggatatgcggttatccgcaatgcttcctacagtggcgatggtggcctggacggccaggtcatcatcggcgacaaaaaatacctcatccaggccaagcgttacggcagggctatcacgccgtcccatatcaagagttttggtgcgctgctgcgacatcaccactgcgaaggattttttattcataccggacgtaccggccagttgagccgggctttgctgcagaaccaccctcacgtgcacctggtcagtggccagaagctgctggcgttgcttgccggcaatgcggagtggctgtcatttctgcctgggagcacggtaatcaaacggagtacctcaaatgtttcatcagtctaa

SEQ ID NO: 127463 - DNA, 531 bp, Enterobacter cloacae
atgtttcatcagtctaattatgttgtagtcgctacccgctttttgtcagcgatactcagagtcctgttggtctggcctggcgtggttctggcgatttttggcttcatgttttttatcgcaacactcggtgatgacggcgggcagcgggcggcatcacaaatggccgccaccgctcagagttaccgtacagcgcccgtgggcatggtgatgattcagccatgcccgcctactaacgtccctgagtcaaaactattctcggtaccgtcggtggcgccggttaaaaaacaggactgtcgaccttatccaaagacgtttactgacgttgcagtgaaggagcgacggaatattctcggtattgggagcaccttgctcgcaggtggtttgttagccgaactgctttctttgctgatccgtcgacgccagatgagtcggagcgctgtttactacggatctatcaatgcaagaggggagcgcaacataaccctccagtctggtgaaacagtgcatgacaaggaaggccgccatgagtaa

SEQ ID NO: 127464 - DNA, 2115 bp, Enterobacter cloacae
atgagtaaccggcatgcgatggaagccttgctgcgccctgcagtggagctcaatacggcgattgtgtcaggggctgccgttgtggtttgtgcggtagcgccctggtcggtagcgctggcgccagaggtgagctatgtcaccgccggcagctttgcggtgttgtctgccgtacgtgcgcgccaggggatgcgggtgatccgctatcgccgtaacctgcgccggttgccgcgctatgtcatgaccagtgcacagatcccggttagccggcagcgactgttcctggggcgaggtttccgctggcagcaaaagcacactcagcgcctgatggacacccgtcgtccagaggttgagaagtatgtccaaccgccgcagctgtatcaaatcgcgcgtaggctggagcttaaaaccgaatacaccctgccgtggctgtcccagctgctgcgcaccgattccccactgaatccggtcaggccgttgccaccggtcgggggaaacccggcgattcatggtattgaacccgatgagctggatgtttcgatggatttgcgtgaacgcgtgggtcacagcctggttctgggcaccacccgtgtgggcaaaacgcgtctcgccgagttgctgatcacccaggatattcgccgcggtgacatcaccatcgtgtttgatccaaaaggcgatgcggacttgctgcggcgtgtctgggctgaagcccaccgtgccggccgcggggatgagctgttcatcttccatctgggttggccagatatctcggcacgctataacgccgttgggcgttttgagcgcgtgtcggaagtggccggccgtatctccgggcagttgagtggggagggcaacagtgcggcattccgcgagtttgcctggcgattcgtcaacatcgtcgcgcgtgccctggtcgcgttggggcagcggccggactacaccctgatcacccgttatgtgaacaacatcagtgaactgtatgagacctacgcgaaaaaggtgattgaaacgcgtatgccggcactgcagcagcagatagataacaacctgcaggtactgacggaggaggacgtgccgcgcaatatgcagggacagccgaacgcggtcaaaatctttgcggttgaaatggccctgagctcggaagccggcaagcagctatatgaccctatcctggatggcttgcgctcggccgtgcgctatgaccgcacctacttcgataaaatagtcgcctccctgttgcctctgctggaaaaactcaccaccggcaaaacggcagagctgctggcaccgaactacatggacatgaacgatccccggccgatatttgactgggagcaggtcatccgtaagcgcggcattgtctatgtgggactggatgcgttgtcagacggtgtggtcgcctctgccgtcggcaacagcatgtttgctgatctggtgtcagtggccggccatatctataaacacggcatgcatggcgggttgccgacccgtgccgacggcaaactgccgatcaacctgcactgcgatgagtttaacgagctgatgggggatgaatttatccccctcatcaataaaggcggtggtgccggcatgcaggtgacagcctacacgcaaaccgagtcggacatcgaggcgcgcatcggtagtaccgcaaaggcggcccaggtgacgggtaacttcaataccctgatcatgctgcgtgtgcgagagaaccggaccgcacagctactgacaacacagctcccggaggtcgatgtctacaccaaaaccctggtatcggggcatgctgatacggccgacgtcgagaaagggcaagactttacctcaagcactcaggatcgcgttggtacggtgaaaacgccgctgctgatgccggcggatgtgatcaacctgccgaaggggcaggcgttcgcgctgttggaaggcgggcagttgtggaaaattcggatgcccttacccagtggggatggcgatgacgcgttgatgccacccaacttgcagaagattgccgaggagatgcagcgcaactaccggaccagtgagtcctggtggtcagccagtacggtaatgcctgatgcggcaataaaagggggactgaatgtcgcaagtggtgaataa

SEQ ID NO: 127465 - DNA, 759 bp, Enterobacter cloacae
atgtcgcaagtggtgaataatcagcctcagcagcccgtacagccccgcaagcatgggttgttttacaacgtactgtggggctggccatggatgctgatcgggatgttcttcgcctcgttgttcgtgagcctggtgattgagtatgtcgggatggcgttcttctggtcagaacttggcgcgtcgcacagtgaaacggtgatgcatactgaaatggggtatctgtcatcggagtttacccgtagtctgatgttgtctgagccgtcagtcaccgtcacgcggtggattggccaggcgtaccagtggaccttcgtggacagcggttttttggactggatccaacgtgcctatgacacgcaggtacacagccagaatgccgtggccagggagctgaacagctggagtggttggctggccgccacgcttaaagagtacctgatggcgacagtgtatgtcaccgtcatcaccctggtgcgggtaaccattctggtgctgtccatcccgctgtttatcctggtggttctggttgcgctgactgaggggctggggcggcgtgatatccgtcgttatggtgccggctatgagtccagttttgtctaccatcatgcaaaacgtatggttcagccagctatctatattccctgcatgctgtatctgtcctggccaaccgcggtatatcccaatctgctactgttacccgcagctattctgctcggtattgcagtgaccgtgaccactgccagctttaaaaaatatttgtag

SEQ ID NO: 127466 - DNA, 630 bp, Enterobacter cloacae
atgaatacagttgatataattacaagggtaatatttcctattttgacattagttctggctggcattggacacaaagcaaaatgggtcatacaagctgatagtatatttgaaagatactcaaaattaagcaaattcacccatgaacttgcgaatcaactaaacgacgaaagattaaaagaaatttccggggagtatggttatgcagcaataataaggaaaaaaggattgagtcgtgatgaaagatacactttactgaacatgcttaaccccgtagaagggattgaagagtatcacacctgctcagactatctgaagatagacgttgtacgtagtggattcagttggaaaagaaaacggtacagcagccatctctatagaagaatagtttctctaataaactctatattttatttcatcggttcaattatgttgttctgccctatattctaccaacctttccaagataccattgtaggtaacacctttaggtctttatcagtaaaaatgcaaattggagccaccacttacatcatgttggcagggttgtttttcgttgtcgtcagcttaaacagaatgtctaagcaacatcgcgctggtaaattaatccaaaactcccgctctatccgttaa

SEQ ID NO: 127467 - DNA, 330 bp, Enterobacter cloacae
atgcctatccccgttgttcgcggtctcggcgccggctgtttgctggggttgaccctgctgaccgcactgcctgcccaggctgctgaaaaagatgaactggcgtctgcccagcgcatgctggtccaggtgcaggcggcgcttgaacgcgcgcgcgttgccgccgttcaggccgacccgtccgagcgtggccgtttcttcttcgactatgcccgtgctacgtccgatctgaacaccatcaatgccggtattgaccgctacctcgagccctcgcgcgcgcaaccgcgtgatggcagcgctgtggccggcaattaccgcagggagcgtccctga

SEQ ID NO: 127468 - DNA, 243 bp, Enterobacter cloacae
atggccatgaccggtgcgcaggaacaggccttcaatgtggccagcggtggggttgaagccaacatcctgtcgctgatctgcatcggcgggttgctggcgacgctgtttgtctgggcggcctgggcgctgaccgatatctggaaagggtggagcaacgaaaagatccgcaacgcggcgatggtgcagtttgccgtcaggctcgtgctgctgctggtcgttgttacctggatgtttgccagctga

SEQ ID NO: 127469 - DNA, 366 bp, Enterobacter cloacae
atgaatgctgtagttcgtcttttccgtcatttctctgcgcgagtcgcggtggcgacttctctggcttatgcagcaagtcaaccggcgcaagctgctctgccaagcgttgaaccaccgtcttccggtggcggcggtggcctgatggatacgctgaaaggctatctgcaggacggcattgtgctggtcggcctggtgttggctgcggtggcctttatcgtggtggcccagtcagcggtctccacatttcatgaagtccgtgaagggaaaaccaactggggtaaattcggcgccattatcgtggtcggtatcgtgctggtcgtggctgttatctggctggtcggcaagtccgctgaaatcctgttctaa

SEQ ID NO: 127470 - DNA, 366 bp, Enterobacter cloacae
atgcagactatccgatttttgcctgaccgcctcaacgctgagtctgtcgtcttccggggctttaccaccccggagatgggactggcggcgttggccggtgtggggctgggtctgctcgtgtcgttgccgttttttccgcttgccggttgggttgtgatacccaccggcatgctggtgacccctctcctcgttatctggtttggtggcagccggctgacgcgcctcaagcgcggtaaaccggagaattatatctggcagcgcctcgaggcgcgtaaacgtcgcatggggtggggtgatcccaccctgattatcgacaaacagggctggtcgttgcgccgcagccgcgttgttaagaggtcaaaatga

SEQ ID NO: 127471 - DNA, 672 bp, Enterobacter cloacae
atgagccattttagacatgcggttaaaaaccgcgaccagcacattctcacattacgggttgcctgcggtgtgctggttgttttcctcctggtggccagcatcggctggatgcgggcgccggacaacctgactattcataacccccccgacctgcgtagcgggtcaacccgcgcctggtgggaggttcctccctccacggtttacagttttggtttctacattttccagcaactcaatgcctggccaaaaaacggagaggtggattacccggcaaaaatcaacggcctgtcgccgtacctgacaccctcgtgtgagcgctttctgaaggcggatgccaaaaagcgcagcgaaagcggcgagctcgccggcaggacgcgcgtggtgtttgaaatccctgagcatggctacaacggccgttataaccaaagcccggtgacggtgaaaggccgtgataactgggtagtgcgccttgacctggtggcggacgagtcctttgccggcgaaccggtgaagcgcgcactgacacgctacccgctgaaagtggtgcgcgcagaaggggatccggaacgcaatgagttcggtctggccctggattgttacgacagcatgccacagcgtctggctgcggcgccggcggaacccgcgcctgataagaaaggagtattccaatga

SEQ ID NO: 127472 - DNA, 912 bp, Enterobacter cloacae
atgatgaaagcacgtgttctggcgctttccctgagtgtgcttcccctggcggcaacgttcaccgtaccggtagcccaggcggaagagctgatgaaatgggagcgtatcccgctgcaaatcccgctggccgtcggcaaggagcgggtgttgtttgccgataaaaatgtccgcgtcgggttcccgcctgcgctgaacggcaaactgcgtgtacagagcagtggcggtgcggtttacctgaaggcagacagcgccttcccgccaacgcgtctgcaactgcaggacgtggagaatggggaagttattctcctcgatgtgacggcatccgataaaggctccgccgagccggtgcgcattgtctacagcggtgatgtgtcgtcagtcagcagcagtaatgatacccggtccccatcaaacgggagcagttcggcagcgcctggggcggatgatggcacccaggcgaagcgtaaaaaaatcaaatacaacgcgccgctgccggtggtgctgacacgctacgcggcacaaagcctgtacggcccggtgcgcacggtggaagcggtgccgggcattcacccggtcaacccccatctgccgaaacgtatcaccacactgtacccgtcagagccggtggccatcaccccgctgggcggctggggtattggcagtcgtaacgttgtggcgctaaaagtgcagaacaccgccagtcgcaaaatcatcctggatccgcgggtgctacaggggcagttcgtgacggcgaccttccagcaccgttacctggggcctgttggcacgccggaggacaccaccacgctgtacctggtcactgccggccgcccggatggggcgtttgttgcagagccgtcgggggttcgcaaagcggtgaaggcagcgaagaagggggcaaaccatggctga

SEQ ID NO: 127473 - DNA, 1497 bp, Enterobacter cloacae
atggctgatgtgaaatctaacatgctgccgaaagtgattgtggtcggcgtgctggctgcggccgtggttgttgggctgaaagcctgcagcagcaataaaacgacggaaaaaactcagcaggcgcataacgtgctggccaatatgtcaccggaggagttgcgggccctgggcgtggaaggggacaccccggaagacacgttgcgcaccctggtcggtaccctgcggaccacccgaacccagcaggccgagctgcaaagcaatatcgacaaggtgttgaaagaaaatgaagcgctgcgcaagcgcaataccaatgtatccggccaggtcaatgaggccgtggccggcttccagaaacaggcccaacagcgtcagcagcagcttcagcaggagcagcaaacgctgatggggaaaatccagacgctgaccgatcaattggccggaaacaaagacaaggcgaagagcgacagtgatatcccactcggcctggggctggatggcatgggcgccggcgagggaagcgcggcacctggccaggacgggttgatgtgggtcggaccgaaggacatgaaagagcccgacccgcgcaaccccaacagcgcgaaagaggggccgcagttcccgacgtcgttcctctctgacaacgccatcacgcgccagaaagccgcctatgagcagcaagtgaaggggcgtaccaatgaaaaaggggcagaggagaacgccgagccggtgtttaccctgcctgagaactccaccctggtgggcagtcgttccatgacggcgctgctgggccgggtaccgatcaacggcacggtgaccgacccctatccgttcaaactgatgattggcaaagacaacctgacggcgaacggcatcgagctgccggacgtggaaggggcgattgtctccgggacggccagtggcgactggacgttgtcgtgcgtgcgcggccaggttaacagcatcacattcgtgtttgctgacggtacggtgcgcaccttgccgcatccagacaccaacatgaaagctaacagcaacaacacgagcggcaacagtggcaaagacgtcagcaccaccgccggtatcggctggatctccgatgacaacggcattccgtgcatcggtggggagcgtaaatccaatgcctcgacttacctgccgaccattgccgcgttatcggccgccagtgctgccggtgaaggggtcagccaggggcaatacaccacgcaaaacaatgtgaatggtatcacctccaccatgaccggtaatgccggtcaggcggtgctgggcaaagccctgtccggcggaatgaaagagaccgctgactgggtacgtgaacgctacggcatgatgttcgacgccgtgtacgttcccccgggccataaactggccgtgcacattacccgccagctggcgatcgattttgagacccaagggcgcaaggtgcgttacgacttcagcctgccaggcgaagacggtagcaccggcggactggattaa

SEQ ID NO: 127474 - DNA, 426 bp, Enterobacter cloacae
atgcggaaaaacttatttaaccgagtcctggctaccgctgttatggtcggcgccatcgcactgaccggctgttcgacgtcgaaagaggaaatgctgccgccaggcgacagctcgatgctggaattgtggcagggtgaagacggcggcggttcggcacgtaatgcggtggcggcccgcgacagtttgcgccggccgctcaccgacaacgaacgccaggcgacagcggcggacgatcgcagctacagccgcacgcaggaaagcgaaatcagccagcagttcccacggctgccgaaccccgacctggtgatgtacgtgttcccgcatctggcggacggtaacgcaccggtgccggggtacagcaccgtgttcccgttttacagccaggtgcagtatgcgatgccgggtgaacggacggaggcctactga

SEQ ID NO: 127475 - DNA, 2856 bp, Enterobacter cloacae
atgcgattttccctgtttgataaaaagcgcctgacgcgcaagaagccggcagcgggtgtccaagacaccctgaccgcgaccgaggacggcgtgccgttgtccgtagtcgggcgtgagccgttacggcgcccgggcaagatgacggtaaaggatgagaaacaggtgtatcacgccaacccgtccatcgttgattacctgccctgggcggagtttctcgaccgcgaacagtgtattttgctcgatgacggggtgtccgtcggggctgtttttgacatcacgccggtagcgaccgaaggacgcacggacgatcgcctggagcaaatgcgcgacacggtggaagacgcactgcaggactcgtttgacgagcatgacgaaaacccctgggtggtgcagttcttttgccaggacgagaacaacgtcgaggcgtatatcgaccgcctgagaaattacgtcaaaccccatgcccagggcagcgcgttcacagaagactggcttaaagaaaccgaacgtcatatgcgcggtatcgcccgtccggaaggtctgttcaaggacacgctgatcactgaccagccgtggcgcgggcaacaacgccgcacccgcatggtggtgtatcgctggattggcaagggcaatcatgatccgatgccgccggttgccatgctgaatcagacctgtgagcgggtgaccggtgcgctcgccggcgccggtgtgatctgcgtccgccagaacggggcacaggtccatgactggttgctgcgtcattttaatccgagcccggaatgggtggaaaaagagacgctgtaccgagacgccgcctattttgacagtcgtgacacgccggaaggcgccatgccggtgcagaatgattttgccgagaccctgctgttcaccccgcccgtgtccgatccagatcagggggtatggtggttcgataaccaggcgcattgcgccattcccgtcgagaagctgcgccgcccgccggagccgggcaccatcaccggtgaaatgaaacgcggcgagaagaaaatcaatgcgctgatggatttgttcccggagggaacgatgctgtgcatgaccatcgtggtacagcctcaggacacgctggagaatgatttcaacaagctgtcgaaaaacgccgtcggcgagaataccgagtccggccgcgtgcgtcaggacgtggcgcaggtgaaagagtacctggggaatcgccacaagctgtaccgtgccggcattacgtttctgctgcgtgccggcgacatgaccacactcaaccacaaacgtgtcgatctgaccaacgtgctgctgggcgccggcctgcagccggtacggccggagtttgatgtggccccgctcaatacctatctgcgggcgctgccgatgtgttttaacccggagacggacaagaaacactggtatacccggttgacctgggtgcagcatctggcagggttgttgccggtgaccggccgtgagaccggaaccggtaatcccggtatgagcttcttcaatcgtggcggggatacgctgacggttgatccgcttaacaagcatgaccgcagccaaaatgcgcacatgctgtattttgggccgaccggcgcggggaaatcggcgacgctgtgtgccaccttatcccagttgatggcaatacaccggccacggttgtttatcgcagaagcgggtaactcgtttggattgctggccgattactttgagagccaggggctcagcgtcaacaaggtgagcatcaagccgggcagtggcgtctcgctgccgccgttctcctacgcgcacaaactggtcgaagatgcattaacgacgctggccctggatgaaaatgatctgccggacattgatgctgatgacgacgatgatgacgacaagcgcgattacctgggtgaaatggagatctcggcgcgcatgatgatcactggcggtgatgcgaaggaagagcacgagttgaagcgtgccgaccgcgcgatgatccgtgaagccctgttgatggcggcgcgtcagacctacgacgaagggcggcagatgttgccggcagacctgcagaaggcgctgtacaccctctccaaagacgaagggagtgatattcgtaatgagcagcgtcgggccagggcggctgaaatggccgagtcgctcgggatgtttacccagtccggcagcttcgaggcggagctgtttaaccgcgaaggtagcctgtggccagaagcggatgtcaccctgattgacctgggacatctggcgcgtgagggatatgaggcgcagatggcgctgacgatggtgagcctgactaacaccatcaacaacattgccgaacgagaccagtactcggagcgggacatcgtgtttacggtggatgaagcgcacatcgtgacggtgaacccgctgctggcaccctatatgaccaaaatcgtcaagatgtggcgtaagctcggtgcctggctgtggctggcgacacagaacttaaaagacttcccggacattgccgagaaaatgctgaacatggcggagtggtgggtctgtctgaccatgcccccggaggaggtcaacgacattgcccgtttcaaagccctgaccgaagagcaaaaggctgtgctgctgtcagccagtaagctgtccggttgctataccgaaggcgtagtgctgtcgaaaaaactcgaggcgctgttccgtgcggtaccgccaagcctgtatctggcactggggatgaccgagaaagaagagaaggccgagcgccgcgcgctgatgcaggagtttggttgcagtgagctcgaggcggcccgcaaggtggcgcaaaagcttgaccgcctgcgcggtctggtggcgaacgaggaggctcgggctgcatga

SEQ ID NO: 127476 - DNA, 405 bp, Enterobacter cloacae
atgatgaccctgaaataccctgaacctgttgttcgacagccggttctgatctgtcgtgaagcgtcgttgtttactctcccgccgcaaggtgtggccactctgagcgaaacggatgcgctggcgcttgagatgttctgtgcggctatccgcgatcggctgtggggaccggtcacactgactgcccacccgcatcgcatcgggagccgtaccagcgtggcgttgcatctggaggggcggctggggcgctgcatcgatgtgctgatcacagtgaccggcagtacgctgtggcccctgccagaggagtatgaccacccgcgctggtatgtcaccgtgccggatgcggcggatgtggtgtatctgttgcttcatctgagtgacttgtgtgggcggtttcgggttaattaa

SEQ ID NO: 127477 - DNA, 2571 bp, Enterobacter cloacae
atggacgttcaagacgaaattcgttcgtggttgttaggacaacaggaatggtttcaagaagcagccgatagactcataaataatggtccattaactacaacggatttgtcagatctcgttgcactattgaaaacacctgaaggtcaaaaggtgactaaacaccgcacctttgcaagtctgatgcaaccctcacttatagttgaagagcttcgtttaacacgtattgaaggtgtttatggtattgaaaacctagggccccggcagcctttagacttcgggacgggaaatctgaccgtaatttatggtcataatggctcaggcaaatccagctatacacgagtattgaaaaaagtttcaggtaagccacgagccgttgacttgaaagcgaatgtgtttctgcaacctccacaggaacgcaaatgccaaatcgcgtatcaattgaatggtgtaactagcactaccgaatggcacgtaggaagcgagccaatcgaggagctaaaggccatagatatatttgatagcgacgaagcaaaccattatctaagcgctgaaagtacagcgacctacatcccttcgatcgtaggattgttcgaaagacttgccgcagaaattgagaaaatcagagtgctgctggatgctgaacaagcaaagcttattagctcattaccaactctcccccccatataccaacagtgtgaaattgccagtacttataaagtgctagctaacgcgagccaagctacgattgctgcaattactaattggactgctgaacaagaacagcaactcaaagacttagatgaacgccttaaagctcaagatcctataacgttggctaggcaaaaacgcgcgactaaagctgaagtacagcaacttattaccaagctcacacaaacctcaagggaatatgggattgataatttagaggcaatccgagtcctcagaaagtcggcaatagaaaaacgaaacattgccattgagagtggtaaagtgcaggcctcagtacttgatggaataggtacgccgacatggcgtgcaatgtgggaagcagcaagagaattctcagctataccttacccaggttcacaatttccagttacagtcgatgcccgttgcattctttgccaacaagagctcacaacagaggcacaacaacggcttacggacttcgagaaatttgttaacaccaagctcgaaggggacgcaaaaactgctgaaactctctatcaatcagcattgaaacagctttcttctcctatcactgaacagcaagttcatactctatgtatcgcaacaggtctgtcagatgattggaaaaattatctctggaaaatttggcagcatgcctcacaatcgcttcttgcgttacagtcccacgaacatactcaacgtgctcaaccagttgaagacctgagggaaaatttagccaaccttgtaacttatcgtgacaacttagaaactcaggctattcagcatgaattggatgcacagaaattcgacagggttaaagcaagtaatgaaaagctcggattagaagcgaaaaaatgggtagcggagcaaaaaggtgctattgcaaccgaggttgagcggttcaaaaaacatgcggcttatgatacatggaaagcacttacaggttcccgacctgtgtcactgaaatctgctgaaataacgcaaaaagtcgtcactgaagcatacgttgcaagatttaatcgcgaactacaatccctcggagctccccggatacaagtcgaactagtaaaaactagaacacaaaatgcccgagtgcttcaccagctacgcctgaaaggtgttcaaaacgacaaacctcagaatatactcagtgaaggtgaaagaagaattatttcccttgcagcttttctggccgatgtttcggacaaaccaggcgctgcgccatttgtattcgacgatccaatttcatctctcgataatgattttgagtggcatgtggcctgcaggctagttgaactagccaaaagtcggcaggttcttgtccttactcaccgactatcgctatatggtgcattggaagatgtggcaaaaaaagctggagaagcatggaaggatgctcattatcaccctatgtgtatcgaggcttatgcaggcatcgcaggtcatccggcagcgcaagacgtctggaatgcgaatactaagaaagccaataatattcttctcacgcgactagatgccgcaaaaaaagccggtgaagctgggggtggggtagcatatagggctttggcccaaggagtttgcagcgattttcgtaaactggtagagcgctctgtagaggaggacttactcaataaggtagttctacgacatcgaaggagtgtgacaactgatggccgtcttagcggagttcgtcaaatatctgtcgaggactgcaagttgatcgatgacctcatgaccaagtacagttgctatgagcacagccagtcaaccgaagtacctgttataattccagaagagccagaacttcgcgctgatatcgagtcgctcaagacgtggcgagataatttgaaagccaaacgagataaaatcatcacagcttag

SEQ ID NO: 127478 - DNA, 405 bp, Enterobacter cloacae
atgaaaatcagcacgttgctgacgttgttccctctgctgatgccggcatcggtgtttgccggcacggtactctataccgattcccaccatcccccgagtaacgttgatgcctcggtctccgttatttatcttgacggccctgaacagctgcaggcgcagacgtttggagagctgtcgtcgaacccggatgaagcagagcgccaggctaaaaccgtgctgcagtcaccgcaatggcaggcccatgaacaggaactggccacggtctatcgtgcagtggtacgagcctgggaactgggcgtgacaaaagtgccggccgtcgtgtttgacgatagggaagtggtgtatggcacggctgacgtagcccaggcaacggcactgcgcgcccagtcacaaggggggcagtga

SEQ ID NO: 127479 - DNA, 1008 bp, Enterobacter cloacae
atgcagcgaacccctttgtatggtgtgcctgcggggcaaccctgccttacccttaaatccttcagtgtggccattatgttgtccgcggccagcgtgccggcggcgaacgccgcgctcaacagcgcgcagattgtcgcgagtgccgtgtcgcaggcctgcatcagctggagcgtcagcggcatttgttattggctgctgtgcacgccgtttggctgcaaggtgcgcacctccgtcaaagtcacccactttatcccggaagccgtggtgtcagcgtacaacacccagggaggtaatccctggagtgacatggcgatggtgagccaggctgccggcgggctggaaagcagtatcaccagcgcgctgagtggcgtgtctgccggcggcggcaacaacgagctgaaaactcccgggcaacgtaaaaccaacctccacttcaagtatgccgatgccataggccatccggcgacgtccctgattggcggcagcattgccggctattcgtgccgctctgcggctaccccctttgtgccgtatttcctcagcactctggacagcctggcgtggcgtaccggattgcccgaatccctgtacccggaggcgttgctccccggtcagcgtgaggtcggcagtcaggcggccgcgaatatgtggggcaacgtctatccccgctcggggtttgtgacccaggttgatgacgacaaggccggcgccctggtggcgcagcgggtggcggacatcatcacccgctctggtcagcctcacgtctaccaggccctgatgggccagcgatcggaggggtactggcctccgggggctgttacggagaacaccggtaccagcaaccacaagtggcagcgcctggctccgcagcttagccagtcctgcgccgtgttcccggacggcgaccatccgccggcagcggatgcgaacgctgcctttgccctgtggcaaccctacagctgctgccagcgccgcgggcagcgtttcctctccagcacggatttttga

SEQ ID NO: 127480 - DNA, 1482 bp, Enterobacter cloacae
atgaataacacgatgaataaatctctttggggacggcgcagcctgctgtctctgctgattgccggcagcctggcactggccggcatgaacgcgcacgctgacgacaatgatgataacggtaccttgtttggcatttcgttgccccaggtgaatgacagcaatgtgggatatgggaagagcgccagcggcgcggtctcggacaagctgttttactccctgggtggcggttcagtcatctcacagccggcaacacgcggcaacatgcaacgccagggcatgaacctgggttggagctcggatttgatgtgcggcaacttcgacctgaaaaccaccattggcaaccagctcaacggggtgacggacggcttcaagaacctgatgggcagcgttatccagggcgccaccggcgcggtggccagcctgccggcgatggctattcagcgcgccaacccggggttgtatgaaatgctgaccaacggggtgctgcagggcggtgtcgcgttcgacaaggcacaactgaactgtcagaacctctcgaagcgcatgatggacatggcggataccggcggctggagccaggcggcagcgatggaggaagccaagagtctggtcaataacggggatgcggatgcggtgcgttcaatgaacgcgacggagaaggtgaccgggcaatcggggcagacctggatcggcggtcagaagcgaggtggctccggtcagccggccatcaaaccgacgcacgacctggcagctgccggctacaacatgatgaatgcgctgcccgtcaccagtacctccagcgtgtctggcagcaactgcactggcggcgcctgtgccaaatatgccagtagcgaagaagcagcagcagcagtggtgaaggtgctgggcgatacctcactacgtacctgtaaggatgcggcgcaatgcaccagtggtgaaggcagcgaacagcccggcagtaccgtggccggcaccggttttgccccgatgctggaagaggcgacgaaagagaataatgagcagttggccaaactggtcaacggggcagagaaacccacgacggccaacctggccaagctcaaaacgggcagtctggcggtgaccgccggggttatcaaggcgctgcagcgtgacccggataatgctgccctggtcggccgtctggccagtgaactggcgatggcggataccattgaaacggcctttattatgcgtcgcatgatcaccactgggatgtccgagcccaatgcctccgcacagaaagtggcgatggaagagggggatcgtcgtatcgaggcgctagaccgcgaaatcacggcgctgaaaaacgagatggagatgaagcgcgagatttcccgtaacgcggtgctgaccatcatcgatcgcgagaacaaccgtgcggaaaccaacccgcagcgtcaatcggttgacagcccggataccaagttcaaccaactggccgtaccggaaagcgaccagtaa

SEQ ID NO: 127481 - DNA, 372 bp, Enterobacter cloacae
atgagtggaacagagaaacaaggtgtgtcgccccgcaggggcggccggctcggtcaccgggcaaagcgtgtcctgcagatgctgggtatgcttgtgattgcgatgatagtggcgctgggcatggcccactggggtgtcaatcacccaggagagagtatcgcgttacgtgactgggtgcacagcactcgttatggctggctgagctggcgcctggcgctatacgccgtgctggcctggggattctggaaaatttggcatgcgccgggttgcaaaccggaataccggcaacccctcaagcgcatggccaccgtgtgcgcggtatttgccctggcatgtgaatacagcctctttggcggagggctgaccttatga

SEQ ID NO: 127482 - DNA, 1527 bp, Enterobacter cloacae
atgatgaccaacagctatctggagtatttcctgacgctgctcggctggctgattaacaacggcctgtgggagctgctggtcagtacggggctgtttgtgctgccgctgctgttcaaggtagcggccatctggctgaaggtccgggaggaaggtgaggatgagggcaacaaagggatgctgtccctgccgcgcatcgagaacctgctctacggcgcgtttttcgtgatgcttgcctgctgcctgccgctgatgaatgtcagcctggataccatcaaatatgacagcagtcgggcggcaacctgcggtacctggacacccaaaaagccggatgaaaccgggtacgccaatatcatgtcgagcatgaacggccaaacggcgaaggtgccggtgtggtggttggtagtacataagctgtcgaaggggatcacgtcggcggccgtggccaccattccgtgccggccggatctgcgacaggtccgttttgaggtccagcacagtcgggtcaacaacccgggtctggcgaaggagctgcaggacttcaccaatgactgctacgcgctggcactgtatacctggcagaaccgcgaccagggacaaacgaccgacaaggccacgctgcgtgatatcgagtggctggggtcgaaaaccttcctgaacggcggctactacaacaacctgcagtcgaaaacgccgcgtgccagcttcccgtggaatgaggcgcgggacagcggccggccaaacaccgggcggggtgggtacccgacctgcagcgagtggtggtcagccggcgaaacaggcctggaggcgagggtagtgaaacaggttgacccgggcgtgatgctgcggatgtccgctgcgttgaagatgatgggccaaccggatgcggactataaagaggcggtggtgcgtcgcctggtcagcccggataacctgacggtctcccagggcggacgcgcttatgccggttacggcggcaatgcagactttaccctggacaactcggttaaccggctcgcgtcgctgggcggaaccgcgctggggagcctggcggcatatccggcatttgatgcgatgcgtcaggcactgccgatggtgcaggcggtgctgctgatggccgtctacatcatggtgccgcttatcctggcgttcgctgcctacgagtacaagacggtgattaccgtgacgttcgtggtgtttgcgctgaacttcctgaccttctggtgggaactggcacgttggctggacagctggctgctggaggcgctttacggttccgatacgcacagccggtggaacgtggccggttttcagaacagctctgatgacttgatcatgaacatcgttatgggggctatgttcctggtattaccagcagtctgggtaggagctctttcttgggctggtattcggaccggtggcgtaattgaaggagctatgaataatggtaccaaacaagcacagagcagtggaggtaaagcggttgataccttaagtaacgctgctttatcgggggcaaaaaaaggttaa

SEQ ID NO: 127483 - DNA, 381 bp, Enterobacter cloacae
atgaacgaaacaaagcagcaccacgcctatcaacgtggagtacgcatggcaagcctgtggaagcgtatcaaaggtaccattatgaagtgggatgctttctgtgtagctgaagcacacagccataagctaccaggctggattgggcatgcgcctattgctatcgtactttttggttcagccgcagcaatacttttcggtggtattgtcatcgcaggttgcatgctttttatatgggcaatagcttttatcctgcaaaatgctgatttcagcaacatgcaagtgtccgatagtactaatgaaagtgttgatgatgatggttataaaaccggtcctgagggatttggtaactatgttgccgggacacggatagacaacaaatag

SEQ ID NO: 127484 - DNA, 192 bp, Enterobacter cloacae
atggcgaggggcaaagaggaaggaatggcccgtctatcaacactgacgcacgggcaaattaacattcagggacgttatatattcattctaccgagtttacttaagtttgaaaaaaacggtatgggcatggtaaccgcaatatcaataaggggaagtgtagggttctctaagcatattttaaaacttctctaa

SEQ ID NO: 127485 - DNA, 231 bp, Enterobacter cloacae
atggtgagttctgttgaacaggacaaaatgagtctttttttatacgatagtgaaatcaccgtgataaatatgatgaaagatagaattagtaataacggttttttcctaatatttaacatgattcaccacgccatctcttttatagtttcacatttattaatattgggggggttggtgcaaatccctaatgatatctctttttctttattcaatcggctaagctcaaaatga

SEQ ID NO: 127486 - DNA, 741 bp, Enterobacter cloacae
atgtactacatattgaacaaaaccttaaagttcgtccctgcaacctctgagctcgctataatcaatgaggagcaaagcagtatagtattgtcgaaacccgcaactaggttgctgcttgttttgatcggtggcgtcgatttagtgcatccacgagaagagttattgaagagtgtttgggaggattacggccttacaccttcaaacaataatttatacatggcgattagtgagctgagaaaatcattaacttccatcggtgggagtgagaagatgatagtaacaatcccgcgtgttggactaaaactagaggccagcattgacgtcaatgataaggagacagtcattacaccatcattgaaagatacggtgaaattaaaacacaaaagtaacatatcaatagctgtatccttgctattaatcgtttccgcccccctcttttatatacataatacaaagcctgtagtaaggattcagtccttcgaagaatccctatttttgcagcatggcacatgcgacatatttttagaaaaaaacatgcacatcaacaacccagatgaattgaaaaaggatattattgacaagttaaacaaataccgaataaactgcaatagcgtgaaaaaagatgtatactatcattttgagcttagccgattgaataaagaaaaagagatatcattagggatttgcaccaacccccccaatattaataaatgtgaaactataaaagagatggcgtggtga

SEQ ID NO: 127487 - DNA, 537 bp, Enterobacter cloacae
atgaaactgaacaaaatcatgattgccgctgttattgcttttggtgcatcttccgcagcgtatgcagatcaaggtcacggtaccgtaactttcactggatcaattattgatgcgccatgctctattacgccagagactgttgatcagactgttgatctgggccaagtctctaatgtggcactgaaagacggcggtaagtccacaccacgtcaattcagcattgatctggaaaactgtgaattaaacagtagcggggtaggtaagaataacactgtttcagtgactttcactggtatggaatcagcggctgataatggtcggctgggtattactggaacagcacagggggcgagcatcgctattaccgatggtgcagggcaggtgatcgaattgggtaagcctactaaggctcaggaattgcaaaacggtaataacaccctaagtttcgcagcttacttgcagggcgacaacgcttctgctggcgttgttcccggtgatttccagtccgtggctgacttcactttagcttaccagtaa

SEQ ID NO: 127488 - DNA, 549 bp, Enterobacter cloacae
atgaaacgaagcgctgcgtatattgtgtcgcctttcatattgttcgtgctattaaataccctgatacaggcgcaggccgctcatcataatcaggggtgggggcgcgtcaatatgcaaggagccattattgataccgcatgtgccatttccacaggtagccgtgaacagaccattgatatggaccgggttccggtgggtgatattattcgtgacggtcagggtgccacccgtaatttcagtattgagctgattcattgcgagctttcccgaccaatttccagtttgcctgattggaagcaatttcaggtgacatttgacggtgatgttgatggggaattatttggtgtgcagggggaggctaaaggtgtggggttggaaattaccgactctcagggaaataaagccatgccgggtaaaccgatgccgctgggtgaattaatgccaggtgccatgcggctggattatttcatgagactggtcagtaacaatcaggtattaaaagcaggtgggtatacttctgccataagattcaaacttgactattactga

SEQ ID NO: 127489 - DNA, 2652 bp, Enterobacter cloacae
atggtgttttcttcaacaggcaagctgtttcgccttcaggcactagggttgagcatttcgctggcattaggtagcacgtctatttatgccgccgaggatattcaattcaatatggatgtgctggacgttaatgaccggaaaaatatcgatctgagtcagttctcgcgtagtggctatattatgcctggcatgtacaccatgacggtgcatatcaataacaatgaactgcctgagcagacaatacatttttatccgccggaggatgatcctaagggcagtatggcctgtttatcggcggagctggtcgggcagttgggcctaaaaccggaggtggtaaaaacgctgacctggtggcaccaagatgcttgtctgaatatcgatagcctgaagggcatggaaatgcgcccagatctggcaacgtctgcgctgtatctgagcatacctcaggcgtacttggagtatgcatcggcggactgggatccgccatcgcgctgggatgaaggtatcccggggttattgtttgactataacgtgaatgcccagacccagcatcagcaacgtgatggcagccgtgggtacagcgtgagcggtagcggaactgcgggggtaaacatgggggcctggcgcctgcgggctgactggcagggcaacctggaccacacgaccggcagtgggcagcccaccggtaaaaagctggactggagccgctattacgcctaccgagccattccgtcgctaggatcgcgcctgacgttgggggaggattatctcaactccagcatgtttgacagtttccgctttactggggcaagcctggtctcagacgacaatatgttgccgcctaacctgcgcggttacgcaccggaagtggtggggatggcgaagaccaacgctaaggtcattatcagtcagcaggggcgcgtgttgtacgaaacgcaggttgccgctgggccgttccgtattcaggatctgaatgatgcggtgtccggcgaactgaatgtgagagttgaggagcaagacggcagtgtgcaggagttcaccatgaacaccgccagcatcccgtacctgacgcgcccgggttcggtacggtttaagttcgccgctggcaagccatccgactgggagcaccattcgcgtgggccgctgtttggtaccggtgagttttcctggggggtgagcaacggctggtcgctgtatggcggtgctctgatgggcggggattacaatgcgttgtcgttgggcatcggtcgcgacctgatggcttttggtgccctgtcgtttgacgccacccagtcccgggcgcgtattccgtcagaggacggtgcgcttagtggcggctcttatcgtttgagttattcgaagactttcgatgagctggacagccaggtgacctttgccggttaccgcttctcggaagagaactttatgagcatgggtgagtacctggatgcacgctattacggcaaccgggtgggcggcagtaaggagatgtacacaatcaccttcaacaagcagttccgggacctggggttgagttcctatctgaactatagccaccagacttattgggaccgtccggccaatgaccgttacaacctgacgatgtcgcgttatttcgatattggtcgtttcaagaacctgagcgtgtcgttgtcggcatatcgcaaccgctataacgataccaatgacgacgggatgtacttgtcactgtcgatgccgtggggcaacggggcgaacgtcagttacaacgctacggtgaatcgcaacgacaccacccaccgggtggggtattacgaccggcttgacgaaaacaacaactaccagctggctatggggacctcacgaagtggcgccaacgccagtggttattacaaccacgagggtgacatggcccgggtgagtgccaacgccagttaccaggaagggcgttacagcgcggtcgggttctctgcacaaggtggggcgacgctcacgcctgaaggaggcgccttgcaccgcgtcggcatgatgggcggcacgcgcatgctattggacactgaaggggtggcgggtgtgccagtgcgtggttatggtgcgaccaccaaaaccaacgcttggggtaaggcggtcgtggcggatgtgaatagctattaccgcaacaaggccagcatcgatctgaacaagctgggcgagaaggctgaagccaccaaatcggtagtgcaggccacgttgactgagggggcgattggttaccgcaagtttggcgttattgccggcgagaaagcgatggcaatcatcaagctggctgatggtagtacgccgccgttcggcgctacggtggtgaacggtcgcaagcaggagacggggattgtcaatgatggcggcagtgtctacctgagtggtatcaatgctggtgacagcatgacggtgcactggaatggcgcggcgcaatgcgaggtgcgtctgccgacgccgctaccggcggacatgatgaatagcctgttgctgccgtgtctgccagtctccgggcctatcgacaatcctgcagcagcaccggttgctttgggtaccgaaaagataccagtcgccatcccggccagtggcagggtgacgaaaaacaagatgctgttagagccgttggcggcagaagcagaatatgaggcgacgttgtaa

SEQ ID NO: 127490 - DNA, 780 bp, Enterobacter cloacae
atgatgaattttggagtaatgaataacatgcgtaataacaccttgaagacgacggcaatggctgtcgccctgttgggggcaacggtggcacaacaggcccaggcggctatagccctggaccgtacccgagtgattttcgacggcagccagagttcggtgagtctgaacatcagcaaccagaacaaacaactgccgtacctggctcagggctggctggaagatgagcagggcaacaaaatccagagcccgttgacggtgttgccaccggtacagcgcatcgaaccgggtaagccgagccaggtgaaaatccaggcgctgccggcggccaaacagctgtcacaggatcgtgagacggtgtactacttcaatttgcgcgaaattccgccgaagagtgataaaccgaataccctgcagattgcgctgcaaacgcgtatcaagctgttctatcgcccggcggcgattgccatgcagaaaaatgccgacccggtgcaggaacaactgacgctgagcaaacagggcgacaagtacgtggtgaacaacccgacgccgtattacgtgaccatcgtggatgccggcaataaaaagggcgctgtcggagttaaaggctttgagccgttcatggtgccgccgaagggcactgccccgctgacggtgaatgcgggcagcgtgggtaatagtccggtgctgacttacatcaacgattacggtggccgcccgcaactgacattcagctgcaacggcagtgtttgcactgtggtgccggagaaaaaggcgtcataa

SEQ ID NO: 127491 - DNA, 624 bp, Enterobacter cloacae
atgtaccgacgccatgaactgcgttattacggcacgcttggggggctggcgatgatggctccggtgagtctgacgacgctgatgctgctgttgccgacgtcgcatgcggcagacaactgggaggttgaaggggccaatggcgtgttgtatgtggaaggggctctgaccgaaagcgcttgccgcctggaaatgtccagtgcctatcaggatgtttggttgggtgaaaccggcacggctcggctggaagctctgggcgcacagggtacgccggtggcagtggagctgcggctgaaggactgtttacgtaccccagccagtcagctcgatgcgcgtagcggttcgctgacttgggcagataaccagcccgccgtaacggtgcgttttagggcggtttcagatatggataatccgcaattggtcaaggcacagggcgtttccgggctggggctgcggttggctgatccgcaggggcgggatgtgcgcctgggtagccgcggcgaaccgctatttttgacgccgggtcagagtagtctggtgtataccgtaacgccggagcgcaccagagcgccgctggttgccggtgcctaccgcgcggcggtggattttcagctgagttatgactga

SEQ ID NO: 127492 - DNA, 501 bp, Enterobacter cloacae
gtgaaaggtaagaatagctggctttttttggggggaatatgcctgattattttgtcgctctatgctttgaaggctgtcgccgacactgccttggtgacgattaaggtctctgtgatcgcgcccttaccgtgtgtgataaacggtgaccaaaccattgacgtggatttcggcagtgagctgctgaccaccaaaattgacggcgtcaactacctcaagacggtggactacagcctggagtgcaaagacaacaccagcaacgcgatgaaattgcaggtgcagggcagcgccacgccatttaatcgcagcgcgctgcaaaccaacatggccgacctgggcgttgcgctgacggccaacggcagtgcactgaccattaacgactgggtgaacttcacctatccggacaagcctgtgttgcaggcggtgccggtcaagcgggccggcagcacgttatccggcggggattttagtgcgggagcgacgctgatggtggcgtatcaatga

SEQ ID NO: 127493 - DNA, 207 bp, Enterobacter cloacae
atgatttacaccgtctacctcccgaatctgaatatcaccaaattctatctgcatgtcttcattattattgacctcgcacggagccagctcaatcaaccgaccatgaaagctcatattgtcggcctgagcaggcaggccggcgcagatgcccccaagagcaactgctgccaggcaggcacgtcgcaacgctgtgttatttttcattga

SEQ ID NO: 127494 - DNA, 267 bp, Enterobacter cloacae
atgttgacacacaatggtgctgccactgattttaataaagcagcagtacaaactaatgtggcaaattttggcattcagttatcggaatatcatactcaggggggaatgggggtacctcttaaaataggtgttccggtgaaaatatttgatgagtctgggggagcgaaaaatatcgtattggaagcggtccccgttaaaaaaacgggtgctgaattggttgccggtgtttttcagggcgtgtctacagtgcagctggactacccataa

SEQ ID NO: 127495 - DNA, 516 bp, Enterobacter cloacae
atgctattaaaacctaaagccccaaggcggtgctctatattgggagtattgctatttatcacaggggcggcatacgcatctccgcaaaccaatactgatatcacgtacagcggcacgctgcttgacgcaccaccttgtaccatcaatggtgatgaaccggtagagattgattttggcgaggtgggtgtcaacaaggtggatggtcaaaactacgcccagaccttcacgttaatctacgactgcgagggcgtcagcaccgacaaggtgttgcgttatctgggggcggccaccgcgttcgacactgcggcggtgcaaagcactatcccggagtttggcattcggcttcagcatcaaaaggatggtgcgattacgccgtttgccgtgggcagtacgctggcgataccgtcttacctgggggcatcgcagtttattgccacgccggtgaaaaacgccggggcggaactgcaggaaggggcgtttacggcagcggcgaccttgcagctggaatacccgtag

SEQ ID NO: 127496 - DNA, 549 bp, Enterobacter cloacae
atgagcatgaacaaagtgattttcaccctgttagtcggcctcggtgcgggcggtgtgctgaatatggcgcaggccgccacaaccccggaggtcagtgtgttgtaccgcggcagcctggtggcagagccctgcaccctgttgccggagaatgtgaacatcctgctggactttggcacggtaatagacaaatacctgtacctgaacggcaggacgaacagcaaaccgtttcagctgcacctgattgactgtgacaccagcctgggcaagatggtgaagatgacgttcagcggaacggagagcctcccgctcccggggctgctggcgctggacgccggcagcgaggccaaagggattgcgattggtctggaaacccaggatgggcaggcgctgccgctcaaccagcaaagccgtgggcaggaaattaccaatggcaataatgtgattaccctgaaggtgtacgttaagggggagccggacgctatcaccaacaaaaccattgaacggggcatatttaccgcggtggcgacctttgcgctggagtatgagtga

SEQ ID NO: 127497 - DNA, 822 bp, Enterobacter cloacae
atgcgtgtttttctatatgctggcgtcgtgttggctgctgctatcacaaccgatacccaagctatcccgttcccgacaatgacccatgttgagatctcagactgcaagaatacctctgccggtgaatgcacccaatctgtgtattatgcggggacttccgaaatcttcgaaatgggcacgccggttaccctacccacgtcgctgtccgttcgtgctgttggggtacactgcgcaaaaggtgataaatctaaggggatcccatatagccagtgcgtctgggcgattagtgggcatgcgccgtcgacgacgaattgcactctaaaaagtttatcgtcctgggaactgacacccacaagcgcctgctcgacagcaccgacctgggggccccactccggtgcagctccaggtggtgaatgcgttatgtttgggaactggtcgatcggtgatgcgatgcttttaactccctatgggtaccatacagctgaatcagtagcaaatgggggtaatagattctgcatcaagcctctgcctccaggtacggcttgtgacgtggtccttccgccgattatcgaccatgggtctatggtaacgggaacacgcgacaccaaatacatcgacggtaaagtggattgtggccagtcaacggtcgtcaccgttgtgggatcaccgaacgtaaccttggctccgggggtctcgaccaaaatctctacatcgatgagtaccgcgaccgacttgcgcatccaatccgatatgaacgttgaggcgtccgcagtacccggagattattcagcctccgtcattgtagctgtgtctccgtactga

SEQ ID NO: 127498 - DNA, 1728 bp, Enterobacter cloacae
atgaaaaatataacctatgtcatgttggctggtttaatggctttttgcgtaaatctttatgtcgttaataatgggggcgctatgctaaccctgccgataaacgcggtggtctggatagtgatttctctggtggttttattttcagcctttttccggagaggccgtaaacacgtatttacgacgaaggtgtttctgctccagggagttgggcttgcggtattggctattcctttattctatacctctgctgttaatttctctcaggcaggttggcgaattgcgggcttgatttttggtggagtattttacttcgcttggttgcaattgcggttctcccgcatgcagcagcatggggtgttctgcgtcctgctgctggtcgtgactatgcaggcggtattggctctgttgcaactgtttgcgcccacctgggcatgggttcctttacgtggcagtcgggtttatggcgtctttcaacaacccaatgtgttggcgagctttcttgccaccggcctggcgctggcgctgatgctgtttctgttgccgggttttgccctggcgcgggcgcggtatgagcactgtcgccagatatttttgagtgtattgctgttggtgctgccggcgttgctggtatgggttaattcccgcgtcggctggttgggcggggcgctggttgccttgttgtttctctggcgctttggcttggcgtaccccgctcgctgcaaaacggctgccggtctgctgattgtgggagtagcggtagggctggctggctttatgttgaacggtgaagaggggggagtgcactacctcagccacgacggttctaatcaggcacggctcagcatgctgcgtgacaccctgggcatgattgcggctaaaccgctactggggtgggggtatggcggctttgagtacagctttatgcactttcgcatcatgcagtcacccccaaccattgtgaccgaaatcgctaaccatccccacaacgagatactgctgtggtgggtggaaggcggcatcgtggcgttgctggggatggggctgattatcgccggtattattcgtctggtgatacgtgcctggctctgggatcggcaggcattggctgaaggccgccgccgagccggcgaaccgacagcgttgtgctttgtgttgctgcccatcaccctgcacacccagttggagtacccgttttacctgtcggtactgcactttatggtgttcttattactgctggcgatgctggaccggcaggtcagtggtgtgatgggacgcaaggcgcttccctccccgatcgggtgggcattgcggggtgtcctgccagtgatatctgtcggcgtgatggtggtgatggtctttgctttgcagggcgggctaacgctcacccgggcagagcgtgctggattggtggatgtgcgagaggtgaaagctatgccggcattggcggcatgggtacaccgggaacgcaaaatcttcgacgaacaggtgaatgtgctgctgcgctacaacgccacgcgggatgaggcgctgctggagagctatgcacagtgggcgcaagcttatctgagccgcaagatagacgccaacgtctacgccagtctgatcgctattttgcgtcaccagtcccaggactttgtggctgaacagtacttatgggaggcggggttgctgtttccgacagatgcccgttttcggcacacactacatatttcagtcggggcggagtga

SEQ ID NO: 127499 - DNA, 615 bp, Enterobacter cloacae
gtgataacgagcatgactgtggccattcttgaccccaatcggtttctggcgcaaggcatcaagcaactcttattggcgtacttgcacggccggggcattacggtgcgttttgtcggtaagcatgacgtggggcgggccgatttggtgtttctgcccgtgagtaaaagccaaccggctttgttatgcctacagtcgtccgagccctcgcccccggcaccgatgtacatcgcgctacagtcggttccacaggtcgaggcattctcgcccgggggcacctgcgtgcgggtgctgggttgtctgggtagccgtgcccagtcaacggcactgctgggactggttgcccaggggttgcagcacttggaggatagggaggcggcattaccgcagtactgtccgcaatgtgtgaatacgaccctgacagaacgggaaatggaagtgatgtgctgcatggcgaggggaattgcccagaagcaactcacgcaacgcttgcatatcagccacaaaaccgttagctcgcacaagcgggcggtgatgcgaaaactggggttccgacgtaatgtcgaattataccactggctgcggctgggtggattggagcagataaagagaccttaa

SEQ ID NO: 127500 - DNA, 414 bp, Enterobacter cloacae
gtgacaaaaacacacatcgtatttcgccgttccgtattgctgtgcctgctgggcagtagcctcttgctgagtggctgtcaggccaccaaaggcacggccgtggccgttaagccggcgcctgaaccgacgccggagcaatcgctcgccgcgcgcgaggccgaggcgcttgcgctgtgccaaaaagagctggaggcactcaaaccggtggatgccaggcaataccaaatatatcagcaggaattcagtcgcctgatgagcggcgccgcgcagtatgccaacgtgcgcacccaggccaacagcggtacgcaggagaccgtggatgcgctgtaccgttacagggtcaagcgcctatgcgcgaacatcggtcaggcgttgctcaccggcttggccgacatgggggaatgggttaaatga

SEQ ID NO: 127501 - DNA, 1551 bp, Enterobacter cloacae
atgatgttgtcgaggatgaacgcccggctgcagcaactggccgtattgctgccgttgctgtggggggccgagcgtgcacgggcggatgagggcgttccggccctgctgcagtttgccgagcagtatcgtgccccgcaggtgcctgatgcgccggcaaaagcaccgggtgtcaccgcgcagccgaataccgcttggccgacgacgcctgtcaccctctcggacagcctggccctgcgccggaccctgaaggcgagagagacgcagctagctaaacaacaggcgttgctgcagcgtcaggaaaacgaactggccacgctgcgtcagtcgctggcgacagaaaccgcccgtcatcaacagacgttaaaggtggtgcaagcgcaggtgacatcaccgcgcaaggaagttgactgggcgccgctgcaaaagctggttagcggactgcgccaggcggcatccggtctgccggatgaacagcgggctactgcgttgattactgaggcgcgcgctgccgccgagcgcgagcggctcgccgtgcagcaagctcaggaccaggtaaaagccctgaaaacgcagctcaaggcgttgcgggcagagcggaaaaacaaacgcacggcgcttacggcccgtcaggaaaaagaaaaaacagccttgaccgcacagttggccgccagtgagacgcaactgacggcgctgaagacaaagacgcaggatatgcaggtggtgagcgagcagaaagaagccacgttatcggcgctccgtcaggagaacgccaggttgcaacagcagcaaatggctctgaccgaacaggctggcaaggctgaaaccgatttagccaaacagacgcaagcgctgcatcagttgcaaaccgatgtggatatcttgcgaacccgggcgaagtggctggttaaaccggagactttgagtaagcctgcagggcagcaagcctatgctgcaggcgtgtcactgggccgggacgtcttgtcgatgcttcacgaacgcaagggttggggggtcaataccgaccagcaaacgctgctggcgggcattgttgacacgttcgctgggcaataccagctcaccaccgacgtgctggcccgggcgctggaggattcggaagcggcagtcaataccgcccgcagcaaaacggccgctgcccagcataaaaagggggaagcctttgttgcagacttcaaaaagcaaaaaggagtgaaacagtctcccgccgggttctggtaccgggtggattatgccggcgacgggccgctgcgagacaccgacatcgtggatgtagtggtcaaagagaccctgacggatgggaccgtcattcaggacatggcgctcagtggcaacgtgctgtcacagccgctcaaggcctacccgccactgttccgtgaagccatcggctacctgaaaaaccacggttcgctgaccttggtggtgccaccggagctggcctacggcgaggagggttatccgccgaaggtgccaccgaacgccaccatggtgtatgagctcaggatagacaacagcaaaggggcaccggagatttaa

SEQ ID NO: 127502 - DNA, 444 bp, Enterobacter cloacae
atgagtgtggtcgtaagtaacgtgacattgccgtttttgaacgatgtgctggcgctgcgagtgtatacctgcgcggaggaagaggtataccgttggccggcaccggtgattgtcttgtgccacggctttgccggagttcaggaaatgctgctgccagcggtggcgcgcgcccttgccctggaagggtttgtggtggtgacgtttgattaccggggatttggggacagcggtggcgaaccggggcggcaaaccgaaaatagcgggagaaatgaagacaatgacgatgataacaacaggctggtcgatggcctggatactgggcggagctttgctggtcgtggggcttgcacagccagcgcaggcatcattccagttggaaagcatgggagtggtgttagaggaaagcgccgggcgggtgaacttcagcatcaagaacacctctag

SEQ ID NO: 127503 - DNA, 195 bp, Enterobacter cloacae
atgggagtggtgttagaggaaagcgccgggcgggtgaacttcagcatcaagaacacctctagcgaaccgattttactggctaccaaagtggtagatctggacggaaaaaacttcagtaaatcgatactggtttcaccgccgatttcgtggattggggctgggcaaagccagcaggtgaactttgtgctcaagtaa

SEQ ID NO: 127504 - DNA, 186 bp, Enterobacter cloacae
gtgatacgcctggcgccgcaactggtgttgctgcctgcgcggaaaagcgtaccgctggataactattacctgatgtccggtgaagagaagaaggtgaaggtcgaaggcaaacccacggcagtagaaatcatgccgcttagccgttatggatttaagcaagataacgtgacgctgccggtcaaataa

SEQ ID NO: 127505 - DNA, 507 bp, Enterobacter cloacae
atgatgacatcattcattgataaccctattgaaattagattacttaatactgccgatgtgaatgacctaatgtcactgtcgtatcgaatggacaacatcaatgggaatacattagttttagaaaacggccaagatatcgactattggcaccttgaagagtatagaaatacgtgcacctattaccttcttgccgaaggtgatattgacgccgagtattgccttaccgcatatgaaagccattcacactggcaacctgttgtattagagcctcgtcttgacggagagagaagacagttgtggcgtatcattaatcaccctaatgggcattatgtaataaataacttaaaatatctggataagtatttatcgcatctccccatagacagtttaagcgatgaccaaaaaagagtcatgattagcccgccgcaagaagttattgggatgggtgaggttatgatgcactggtattttgtccctaaagaggggccggacagcgtcagtgagtaa

SEQ ID NO: 127506 - DNA, 1404 bp, Enterobacter cloacae
atgaagaaaccacaattattgcatgatgcacgtttcgggagttcaaatctctacaggactcatgattggagttggttatctggtaatagtgataccgctaacgaaccagccaactattatgaagcatcactatccccgtgggaaaaactgggttcgctggaaaatgacgatgtttgtgacgttgttgtggtcggcggcggattattgggtacgtccagtgcattgcatctttctgaagcgggattagaaacggtattactcgaaaagagcagtataggttcatccgcctcagggcgaaatggtggccaattgacaccaggtttagcgcgctgggaggcggaaaccatgattgacaatctggtctatgaggaagccaaacgattatggaacttcacttcctgtgaagcgatagatcttattaaagagattagcgccagatatgaatttgatactgagtattcctcaggacatttaacggcagcgatccatccaggccacctttcctctttgactgaaagcgttgatgctcgtcactatctgggtgaccgaagtgccaacattcttggtcgacatatgatccgttctttagtcaacagtccgctttatcatggtggtgtactagatacgttaggtgggcaaatacatcctctggccttaaatcgggggatgtgttttggaatttatactcaaggagggagagtgtatgaaaacagtgaggttataggcttaacagagacatcaaaaggcacactggtagagacaaaaaaaggcaatgttttggcaagaaaggccgttgtcattgcagtgcataatcacaccttccgtttatttccggaagcaggaaaaaccaccatccccttctattcttatattggcgtaaccaagccattaagcagtgatattgccacaatattgccgggcggatgcgcagtatatgatacccaactgcaaattgattattatcgtgcggtaagaaaaaacagagtgctttttggcggtcagggaacagggcatcgctggcagccagaagaggccattaactatcttggcaagcgcttacataatgtgtttcctcaatgtaaggggctggaatttgaaagtgtatggagcggcagcaccgatttcacactgaatggcgctacggattgccgtaagtttgggaataaatattcacattatctggtgcacgggtggagtggtcatggcgtagctcaaacagtgaggattgggaaagcgattagcgatgacattacagggagcaataaagactttgagatgttaatggctattgaacatgctgggatcctccttgggcgtcagttatcgccgatggtgatacccatggcaaaaactatgttggagatgggtagtgccatcgtaccaggaaaactcatttcgttttaa

SEQ ID NO: 127507 - DNA, 321 bp, Enterobacter cloacae
atgacgactctggctatttttttcgtaacgacttcagcgttcattgacattattgccaatatgatgattgccaaatctcagggtttccgcaagattggatggggcatcggcgctattattttggtctggattgctttcgccttgctgggacaagcggtgaaaaccatggatctggcagtggcttacgccatgtggggggcgattggcgtcaccggtactgccgcatttggtcgcattttgtttggtcatcgactacgcccaattggctggtttggtattgccgcgataacggtggcggttattgttttatcaacagcataa

SEQ ID NO: 127508 - DNA, 357 bp, Enterobacter cloacae
atgagtaatttaatagctggttctaatacgcgagtgctggcatggctttgtttaatggccgcgatactttttgaagtgataggaacctcatttatggcgtcggcagcccgtgatggcgggtatgttggttatatcatcatggctgccgccttagctttttcttattattttctcgcgctgtccatccgaaaaattggtgtcggcgtggcctacgcgatatgggaaggcctgggtttggcgttattaaccctggtcggcgtttttgttttcaaggataacctgtccatgagagaactcattggtcttggcattgctgtcgtaggcattgtctgcgttgctttgggtgaggaacattaa

SEQ ID NO: 127509 - DNA, 768 bp, Enterobacter cloacae
atggcgattgctaatcttgaagaagattttgatgtaattttattcgaccgtacatcacgttatccggtattgacgcctgccggacataaagttctaggacaggtaaaagaggtgctggccgcagcaggtcggcttgaagaattaacgctgcggcttgcggcggaaaaagtcattgaagataagctgactatcgttatttctgatgtttatcagctcaacccaaatcataagctgatgcataggtttgagaagtgctatccgcttattgaacttgaatgtctggatgctgaaggtgacgatgtgttgagtctgttgcaaagtgggcgggctcatcttggattattgacgacacagatgaattatccacaagatattattgtggaacgtttgcctgtgcgcgttgaaatggctttgtatgtcggtcgaaaacatccgttaactctgctggaaaacgttgaagaggcccatctgctacgctaccgcaatctgtatctgaatacgcatgtgggagctgaaaacaaaccgcatggcaatgtatggtctgcgtcagattattttatgctcctcgaaatggctgaagaaggatttggatgggccgagttaccgcgcagcctggtgaagcaatatggcagggggagactggtcgaattgaaagtgaaaccttggccaaggtatatctattcggatgctgtctggtcaaaacgccatccacctggacctgctggattctggttgctggatgagctgttaaaaacaggttctttatag

SEQ ID NO: 127510 - DNA, 369 bp, Enterobacter cloacae
atgagagcggaaatcgaggcccgcgtgaaggccttccgccgggcgctggagctcgccgccagtgagtctgtgccttccctctggcgtgacgatttgaaggcatttccgatcggctgctgtgagctggccagtcagacgctggcacagtacctgcgagatcacgacaaaaaactgtttccttatgtaatcgccatgcagtggaatgacggtcctgatatccacggccacattattgtcgccctcgacggggactacaccgacctgacgctcgatcagtatgacaattacatcgtggctgagtcgatagagtccggcgggcagcctgcttgccgcgacagggcagggctcagggcagcgtgcctctgctag

SEQ ID NO: 127511 - DNA, 306 bp, Enterobacter cloacae
atgtttagaggaataattcagaggtttggtaagggtgtgaattatgagacggagttcatctctgctgtaaaacgttccaggaaatggaatcttgaagtgcctgggatcatgctgagtaaaacaccatttctgactggagaaaaaagtgaaactgggctaaaagtaattcggcaaattgcttcaaagcatactccaaaggaagttttacagcagtgctttggatatatgtatttcgttcaggatgctttagaggatgttttgcaaactccgctttattatactttaggttatgttgactatgaataa

SEQ ID NO: 127512 - DNA, 900 bp, Enterobacter cloacae
atgtccaaattcggtaaacagttaggtaaacaacttgtcacgcttgctcgtcagggacgagggagttttaaaaccgttgctgaccgttccagaattgcagatcgtttttcagaacgtttggcaaagttaaatattcaaattcgggatgtaaaacacatcaaaacgactcatatcgaaaaatacatccatagccggcaggctgaaaatctatcgcttcgtacactgcaaaacgagatggcagccgtgcgttcaatcatggccgctgcgggtcggaataaactggctgatccccatcatgataaactgagtaaccaggctttaggaatttcaggcgctaaccgtgatgggacgaaagcacctatttcggatgagaagttaaatgctgtcataaattataccttcaaaaaagatgcgggggtagcattgggggttcagttatcgcgctatttaggtttgcgaactgaggaaacagttcagtcagcaaaatcactaaaaacatggcggcagactttaatcaatggcgacgagcgtgttcgggtcgtttttggcacgaaaggtggtcgccctcgtgatacgactatttttaatcgagagaaagttttatctattttagaggcggcaataaagcattgtgatgttcataatggtaaattgattgataagccttcattgcatacagcaatagaacggtacagaaatattgttcgtgaggcaggaatgacagggaaagatgctccccatagtttgcgatacgcgtattcacgcgatgcggtgactcatcatgttaaaaatggaatgagtcgtgtagaagcagaggcattggtatcgatggatttgggccatggtgatggccgaggtcgttatattaagcaagtctatttcaaaggtgatgtggagtaa

SEQ ID NO: 127513 - DNA, 339 bp, Enterobacter cloacae
atgtctgtttttacttcttcagttgttcctgatttcttctcaaccctgcaccgtgtcaaatcggctgtccagcgaataccttttcgcatggcgccgccgcgttttactgactggtacgtcaatgcagcaggtaattttgccgttcgcgcgcatgttatctgcagtgatgatggttcggtcagcgcgttactgacgctgcgcaaaggttggtacaaaggcgaatatacctacgcaagcacccatgttgtgctgtcttgcaaacataccgagcgcagaaaagcttaccgactcgctagccaacatgctgagcatttggccagactgcgttaccgcttttaa

SEQ ID NO: 127514 - DNA, 375 bp, Enterobacter cloacae
atgcatacccagttacccaacgtacttgacgtgaaaaccgcgtttgatgcgtttcatttcctttgcctggttgaaggtaagctcatgagtatacgggcttgccagcgtctgggattgggtcttgaacgtgaagaccccactgagctgaatgatgtggaaaatgccgttatcaatgcgggagaggcctttggtggtttcctgctggtcatgcagtacggctatatatcgacactttccgctaacgggcaagcgcttatgactcgcctggatacactgagtaaagatattcacgcgtcttattgggcgcaggccgtggagcaaggcaatcgctatgtcgaagccgacatagcgattggcgagctcgaggtttggtga

SEQ ID NO: 127515 - DNA, 573 bp, Enterobacter cloacae
atgaacgtgtattttgtcgcaccaccgtcccaggacgcgtggattgattttaccctggcggtgaccgaggtgttctggttgttgccggatgaggcccggccagaaggtatcacagaagccggccagctgtttgatggcatgatcttcgaaacggtcggtttacgcttatcaccggaatcagaggaaaatagcccgatgcaaccggtgccttacgtcgaagaacgtgtggggttctttcagcgccccgacttttttcaccgactggttctgacactgattcataacctgtgccctggctctgtacggatagagcggaacgactccagactcgccaaatatccaggatgggagttgccactactctggttgcgccatcacctcaaacgcccagaacttattgctccgggtgaagtggatgaggcggcactgactgatgactccattctttaccatttggaagggtatagcagtcataacgatgatcccgatgaactgctttgtcgctggtgcgttattgtcggcatggatgacgtgctggcggcgcgtctgaatcaggcgcattcggcggcatag

SEQ ID NO: 127516 - DNA, 486 bp, Enterobacter cloacae
atggggcttgatatcaactttttccgtcagcgtaaggctgactatccgatgttgccggttaacggcgactggacacccgttggcgactgggtgccgtgttcaccagcgtggctggaggacggcggtgattgtgtgcaggcgccgcgaatatacaaccacaaaacgtgtaaccactaccatccgccgctgctggttcactcctgtcattttcgcgggtttactgcgttgatgcattgggtggccaacagtgtcggggacgtcaaaagcggtgagctgatggcgttcgaccgcaatgacatccagatgctgcagatgctgttgtcacgattgaatgaagcgaactgccatgaggagttccctgatgactctcgcgactactgcgatgtgtactggatgcaggtcgacttactgaaaacgtacgttaacagcgtacttacctgtttcgattttagccggcatcacctttacttccgggcatcgtggtaa

SEQ ID NO: 127517 - DNA, 603 bp, Enterobacter cloacae
atgttgcattttaaccctgcagaactgcgcgccgtggtggctgaagtccgcgccaatcagtgtgcgttggtgttggccaaagacggcggcgtctatctgatgcctgctgtgggcgaacgaaacgccaccggccgtatcaagcacctagcgtatgccgacggttgccatcccgaaaaggatgatgcctggtatgaaacgtcccggcggctcgccggcggcgacgactttggcgaggagctgatgctgaacgacagttgtatcgagcgaatactgtcgcaaggccatgagctctggatccacctgttacccgaaacggtctatatgcacgttgccacggttaactgggtgtgtgtcgccgacttccgtcgtataaccgcccgcatgctgcagctggccgaggtccattactcggtttgtgtcagccaggatgagtttaaacactggcgtgagcggtccatcaacttgctggccacggcctgtcataccgattgcaagcgggcaaagcccgccgatcgggaagactatgtggtcatgttcgaacggctgaaacagtgtgttgacacggtaaacccgaaaggggcactgcgttaccccgctctctaa

SEQ ID NO: 127518 - DNA, 1011 bp, Enterobacter cloacae
atgaagaaagcatcatcatcacgtcggccggcaaaagcccgtcgcgaacgtactgacctgtaccaacaggttacggacaaaatcattgccgccatcgagacgggaaccttgccctggcgcaagccctggcggaccgacaagggccgcggcgcgtcgacggccatcatgccgcagaacggcgcgaccggttaccactacagcggcgtgaatgtgctgctgttatggatggccgcggacgaaaggggctttcgctccaatcgctggctcacctacaagcaggcggaagccgttggtgggcatgtgcgtgccggcgaaaccgcgaccctggccgtggtattcaaaccctgggacaagcaagtggaggatgctgacggccggcagctgtttgacgaagaggggaacccgctgaaaatgcgaatacccatgctgaagccgttgtacctgtttaacgttgcccaatgcgccgccctcccggaaaccgttgtcggcattacgccggcagaggtgccggaagaggaggggtcgttggtcgatgcgaaaacacaggctcaggtcagcaccctcgttgaggcctgcggcgttcgagttgaacaggtttaccaggacagagcctattacgcgccgggtcgcgaccagattgtcctgccacaggttcagcaatttcgaaccgaggaggattactggtcgacgttattgcatgaactggtgcacagcaccggtcatgcaacacggctcaaccgggaggggatcacgtcttcttcccgcgcgttcggagacccggtatacgcgttcgaggaactggtggcggagctgggcagtgcttttatgtgcgcacagcttggcgtctttggcgacatccagcacgacagttaccttgaacattggctcagggtattgcgtgaagataagcgcacgctgtttcgtgcggcaaaacaggcccgtgaggcgtcagagtttttactgaaacccctggcggaaccggtgacaaccgatcctgccgttgcggcatga

SEQ ID NO: 127519 - DNA, 279 bp, Enterobacter cloacae
atgacgattgaacaacgttactggcagaccattgccggcaggttactggccaaatactttggcctgaccttaaacgataccgatctgtgtgaagcggagtgcgtgatggctttacaggaagcgggagtgcggccgtttgaggcgatcaacaacctggtggataaataccacctggtacgcttgggcgccagtccctttaccccatcatcaccgtatctgcgccaggcggaagagctgggtgtgatcggtgaaacagaacaagagataaccgatgactaa

SEQ ID NO: 127520 - DNA, 273 bp, Enterobacter cloacae
atgactaaaaccaccaacaaggggctgcaggtcaccgttgaccctgcgattgccggcgagctggcgtacatgctgaagcttcagcagacctgtggcgcggccgttcagcttgagaatgtcgagggcctgatccattacattctggcgagtatcgctgatggtagccgacgtccgggctcgtgggagcgcggattattggtacagctgggattggtcgctgatggtgacgaacaccaggtctaccgggctcactacggcgagcaaggccactaa

SEQ ID NO: 127521 - DNA, 924 bp, Enterobacter cloacae
atgtcgaactggtgcaaaaaccgtttagtgatcacgggccaatccgtttttgtggatgaactgcagcaatgggtcaatggccatgttgtgcctgactaccggcacgccattcagcagagctgccggctattcctggccggctgcgccggcatactgaagccggctacgacaaaacccggcgtttacgtgccttacccgggtttattaatgcacccggggatcgcatcgcctcagaatctggcctttgaacactggttcgggttgctgaaggcggatgtcacgttaacgaccgagaacatccgtctgattgaacgtctctaccgccagtcgggtcttgacgccgtgaaatgggagaatatccccaacgtcgcgaaggagcgtatggcggatgtcctgtctcgccagtatgcggactggttcggcctggtgggggtgagtcctgacatcgatgccggcatatgctgggaacgtttgggcatgatgcctgagtataccgcaccgtgcgatatgctgatgctgatcccgacgcgtctggcgaccgaactgaatggttcaggcgctttgttacgtgatgtgccgaccacgaccgatctctatggtcgacagtacggcgtcgaatggccatcaggccataatgccggttgtgtgcgggacggcatcaacacgctgacggtgcactttgattccccgtggtacccgccagccggcgaggttatcgggacagtgtcggagcggttcagttgccaggtggaacatacctggtacatgcctgatgcggaacgcagtggttacgatcgctacgaccgcggcgagcatgtcgacggcggacgaatagcggctgaagttgaggccggtgaagtgatccacctgacctacgccgacaaggattcggtaccgttgtcaccgaatgcagtagccggctaa

SEQ ID NO: 127522 - DNA, 681 bp, Enterobacter cloacae
atgttgacgtttactgaagcacaaaaacaattcatcggcctctttggtcaaactgcacgctaccatcatcgatataaggtcttctccgactttgttcagtgtggcgcaatagcgatgcataatcgcttctgtccagacgaaggactggagaaacagtacctgaacatcatcaaagggtatgaacgtgaagacgtcgagcgcctggcgcacttacttggcctagtacgaattgcgctgaatgctcaggcatgtgattttctggggatgacgtttatgcagctcgagctcggggataaacaccgtggacagtttttcactccctggagcgtggcatctatgatggccaagctgcagttcaccgggctggagcaaaaattgcaaactcagtcgtttgtcaccatcagtgaacctggctgtggtgccggcggcatgatgattgcagctgcagtggagatgcgggcgttggggtatgaaccttcagagcatatgtgggtttcctgcgttgatatcgatacagtggctgtgtcgatggcatatatccagctatcatcacttggcatacccggtgaaattgtacttgggaatgtattggcaaatgaacgtcggttggtgatgtatacaccaatgcattggttgggaaaatggtcacttagaattcagcagtataattcagagagctga

SEQ ID NO: 127523 - DNA, 1728 bp, Enterobacter cloacae
atgaaactaaagcggatcctgatccagtatttcgtcggttttctgattctaaccggtggttttgtgtggatgtatgaacagtatttctccacaagtcataatatgaactctgcaggtcctcaagaaaattacgcatgggcgattgctaaatttacaatcaggctggcaggatttaatgcaaaaattgagcgtcaactgcgattgggtaacaatgataaagaggagttacaaaccgaacttgaccttctgttctcgagttctaatgtgctgttacataaaagtgtgtcgaccagatacttatatgaagaagcgggttatgctaaaactgtagagcaaataaatgctaacctggaaaagatcgacgttgaattaaataaaacaaaacctgattactcgatcatacttaaaagcatagaattaattgggcaagataataaaaatctagtggttatttctgaccatgcagaagtcagacaaagaaacattattcagcaggactacatcgacaaaggtaactcgatgaagtttcctattgcgacactgtattttttgtttttattgatgcttttcatttcataccggcaagtaaagtccattaataatcaactggaatcagaaaagaaatcattcaataacaaaaacgctttccttggtgtgttggggcatgaattgagaacctcactccaggcaataatttcctcggtagaggttattatccagaagtttagcttgcaagcaaaagacggagcagcattcaatcactttgaacgattggaaaatgccgccatgaaaatggaacgtcaaatgaaagatcttgcggaatttgccaaggttgacaatggcaatgtcgaaattaagacagcgacattcaacttgcgtaaaattgttcatgatactgttgagcaaagcatttcactattaaacaaaagtaccgtcactgttaacgtaggggacacctctgacacgtacataaaaagcgacccgtccagggttatgcaaattattgaaaacatcgttaccaatgccataaaatatacagagcatggtagcgtgcaggtaaatgcggttgtacaggaaaagtctaaactggtcatcagggtcgaagatacggggcaaggaattcctaaagataaaattgacgccatattctcaccgtttatccgagttggaaacgacaacaaagtacccggttttggaatgggattggctatcgttcatggtgttgttaaggccatgaacgggactattaatgtgaaaagtgacattggtaaaggaactgtatttaccgtttcattaccaatagatctgtccacacctgctgagattgatgttattaccgatatcgatgacaagccattctcagctaaaggtatcagcatcttaattattgatgataatgagatggcatgcgagtccttagtatcaattcttcagcatgatttttcagttgagtatacaacgtctccagagagagcattagaaaagttatatcgaaaatcatttgaccttgttttgagtgatcttcagatgcccatcattactggtgatgatctatatagacaggtaaaagagaatgacggcccaaacaaaaacacaccgtttatattcattagtgcatacaccagtgaaagtccaatcaaagacgtggatattttaacgaaaccagtacggctaaatgacattaaaaaatccatagagtccgtattttctaacgattccattatataa

SEQ ID NO: 127524 - DNA, 504 bp, Enterobacter cloacae
atgcataaattaaaatcgctatcgatattattcattattgccgtgctttattcagcatcgtcctttgcaaagataggcgatctctatatagatggtgacattgcaaataaaaatcataatgacggttatctgttaactgctgataattttaataaacttaaaaagtcccatataaaaactacaacatcctggactgagcctggacacgtggtggattttgaaggggtaaaattcaaggagttaataacacttgtcggtgcccgtggaaaaacgttgagaatgagggcgctgaatgactattgggtcgacatccccttttctgacgtagagaaatacgatatcttattggcaaataaaatggacggaaatccactgagactgagaaactttggtccgtacttcgtcatttaccctttagatcaattttatgatcagctcaatagcccaacatatcaggcccgtcacatttggcaagtggccagcataacggtaatagataaatga

SEQ ID NO: 127525 - DNA, 987 bp, Enterobacter cloacae
atgaataatagtttattaacatatacaggcagtctcttacttgatgggagatacattgtttcaccctatggggtaagtaaaagttcacctggtggtaacatatctccattgagtaacgctatagttcataataacgcgatcaataaaatatcggtagactattcaaatgtaaaaagcctgactatcatcaacggattgggggtgacgctgggtgattctgtagtcggtatatctgcactacatgcaataaaaaaaataaatccaaacatagtcatcaaagtcattcgaccagagaactgtccaaattacgttaatgaaatctacacactcacagaaaatataataactgaaatccatttcatgccatttgatatttccaaagcagcggaggcagaactaataatagacataggaaatcaactgtattgggaagattttaataagtgggaaatgcacgatttctttttaaggaaccttggtctcgaacgtaatttcactccgattgagataaaaagcaactcatggttaaaaaattcccctcttaatgacatcaacctaggtgactatgtactcttctgccctcacgcaagtacaaaaataagaagcataccgcaacagtatcataaaaaaataatatctgaattaagcgataagtttaaagttaaagtctttgggtttagtgatgttcaccatgaaaattatactaacatttctgagctatcaacgagcacctctcgattcgcatccataataaagcatgccaggcatctctatacatgtgactccgcagccttacatattggtgctggttttgacataccaaccacgtgtatatttaccacagtgaagcccgaatttcgtagtctatactatactcattgtgagtctgtttatatcggaaatgataaaacagtagggatccataatagtgaagatgtcaatttaattaattcaatatgtaaagaatttgaggtttattatgcataa

SEQ ID NO: 127526 - DNA, 834 bp, Enterobacter cloacae
atggaagacaacaataagactgccctgggggaagtcatagccaaagcaatggcgataaagggtattccaaagcagaagcatatcagccatacaagccgtgtactggatatcacaacagccgcagcacagaagaagatgacaggggcctctaactgggaggtatctcaactgatcagagtgattgactctatcgacatgaagatgagtgaattcttcgacatatatagttattcagtaaatgaagtacataacgcgatctggaacaatggaaagacaaatgttatatgcaaaatctatttaacagaaattaattccaatttcccaacggagtactccgctttaaaaataaacgacgagtgggttgtgttccacactgacgatatcaaagatgatgtattattcgagtccaagcgtaatattgaaatgattcagttttatccacaaaagcaaaatataaaaaaacatcgcattgcaattcttgatgacgaaaagaatattgtggatagtcttctggaaattataggtaatgatgaatacattgtcgatccttactatgacattgaatccctggaagatagcctgaagcgtagtccttatgacgcttatattctggactgggttgttgggacgaaaactgtttttaacacaatcaaagaaatcagaaagtcagaaaataaaaatgccatgattctggttcttaccggacagctatccggaatcgttgacagagaaatagcaagtgcaataaatgattatgacatcactggaccctatgaaaagccgatcaaagccagtgtaatcaaatcactagtagataaacacttccccaagtga

SEQ ID NO: 127527 - DNA, 270 bp, Enterobacter cloacae
atgtcgcattatgacttatgttatcatgaaagtatcatttgtgttgactttgtctcgctgaagttgctaaatatgcccctgagtgtggaggcctgcgatgccgaactgaagcttctaagcgttatgcttatctcctttcggaatgagcataacgctcaggtgatgctacagcgcacaacaccagagaaagcgccaactcaatgttggggggttactccatacattgaggatggatgcgcaataacagtgagggtgggttttcacacgtga

SEQ ID NO: 127528 - DNA, 1455 bp, Enterobacter cloacae
atgtcttattgtgatacacctgaacaggccgccatcatcggttggtctggaaccaaactggtggtcagggctttttccggtacgggaaaaacatcaaccctggtgcgctttgctctggccaatcctgacatcaagatgctttatctcgcctatagccgtgccgtcagggatgaagcggttcagaaattcccgtttaatgttgtgtgcatgacctcacatcagttggcctggccaaatttcggccggcattacgagaagcggttaacggggaatctgcggatcactgacgtcgcccgtcaactcaatacccgtcactggccgctggccagaacggcgatcaccaccttcagtgcctttctgtgtagtgccgacaacgaatttggggtgcaacatctgcctgatgaagaggctcgcagcggactctctgcagagaaaatcctgaccgcagcgaaacagctctggcgcgaatctgtgcgccaggacggcacgtttcctgtcacgcacgatgcctatctcaagctgtaccaactctctcaaccagacctctcgaagcgctggcagatgctgctgtttgatgaggctcaggatgcaaatccggtcacacagagcctggtgctgtcgcagcgctgtagcgtggtgttggtcggtgaccgtcatcagcaaatttatcggttccgtggcgccgagaatgcacttgatgcaccggccctggttgatgcggaacggttgaacctgacccacagcttccggtttggacctgcggtggccagagtggccaacatgctgctggcccgccagggcgaaactctgcctgttatcggtgatggtggggaggactgtgtggtgtcatgtcttactgaggaaacgcaagcccagcatgtcacggtgttaagccgtaccgttgccggcgtgattggcacagcacttgacgccagtctggccggcaaaaaggtgttctggatcggtgacattaccggctacaagaccgaggagctggaggacctgtactggttttctgcagatatgtctgaacgtatgcgctcgccgactttgtcgcgagcctaccgtgattttgatgaatacgagtcggtagcaaaagccagcaaagacccggagatgaaccagggactacggcttcttgatcagtatttcccgttaccgcagaagctgcaggtgatgcgtgagcatgcggtcaccgacgaggccaaggctcaggttactgtctctacagcacaccgcagtaaaggtctggagtggccggtagtcgtcctgaatgaagactttattgatatcaccgatccgctgttgcctgaggatgaacgcaccgatgagaccaatttgctgtacgtggctgtcacccgcgcgcggaaaaccctggtcacgaacgcgttgctgcaggcgcttctcgacgacgaagctgtggatggcagagaagggggcacggcagcatgctga

SEQ ID NO: 127529 - DNA, 1686 bp, Enterobacter cloacae
atgctgaaggcaatcaaggcgctgctggtcggcaccccagaagtgccggccaggagcaaagcctcatcacctgcggggccggcggggtattttatgccgcagtccgccacgcagctgctgaacatgccagcccgtaaacagtgccttcagcagctgtgggagaacagtgcactgccaaaggatttgtacgagcagttctacctgcaaccacttcacaagctggtcacgctgatgcaggtgttgccggcagcgccgcagggtgagtatgccagggaaggggggttagttgatgttaccctgcagacgacgacctatgcggtgcgtctggccaaagggcacatgctgccaccaggcgcaccgcccgaagagcaatcagcccagaatgtgcagtggaatgtcgtggtgttttacgctgcgctttggcattacctgccactgttgagccagctgcagggcgagttccaaagtggccgtgcctggttacctggtctgacggtgccgagcgaaccctaccgttttcgcctcagggcgactccgtcagcccctgcattggcatcaagtcaaagtgcaatgattgctgcacggctgttgcctgcagaggtcatcgattggctatcaacattgccggcggctacacattcgttgatggcgatcgcttcccgacaacccagcgcattatctgtgatagacgacattatcctggacgcggccaagctggcgcggggcgatggtttgttcgtatcgtcttcgccggtatctatctccgacacattgaccgtagccttaccgtcggtggcgccgcctactgaaaatatcacctcttcagtacccgcagttaatttgcaaagtgcagtcagcagcaccaatacaccgctcgttgaggagccgttgcaggcggagacattaaatcagcccgaagagacagcgacggcggaattactgagctctgctctggatgcaccggttaacgataagcctttagctgagatggtcctagcgtctgaagcggtggttggcgttgaggaggatatgcaggctctgttgtcattaatggcggttgaggtgtcagcaccgacttgccaggttagccaggaagagggagacgcccctcagaaagagagccctatccctgaaaataaccaggagccggtacatgacatacctactgtaattgaagataactgtgattcgccagacgtaatcgaaccttttttatcggagagtatcgatacaagggctatttcagagcctcagcattcatcaaagaagccacagttagaagagaataacgcggaaggtaatttgattgcaggaaataatattggggattctttcctgcagtggttgagcctcggagtcaagaaagggggtatatcaattaatactatagattccagagcacatattgtcagtggcttcgtatttctctgtgtgccagatatttttcatctgtatatcaaagaaaattatttggagcgtactgaccgaaactctatccaaaaggcgtttgaaaaactgggaagacatcggatccgtaaggggcagcgattctttattggccatctttatgaaaagccagaagggatgggttcataccgtcgcatcaatggttacctgattaaggcaaatagtttatatggcggaacaagagtacccgaggacagccagttactcgtgatcccgtag

SEQ ID NO: 127530 - DNA, 1032 bp, Enterobacter cloacae
atgaaaagcgaagaaaagatgcacgatgagtgggagtttctgctcgaggagtatttttttaccaagcaacttcgttcagcaacggaatggagttataggaaagtagtcctaacgtttacgcgttttattggcggaactataacacccgccatggtgacgcaaagggatgtgttgctttggcgccggcatctgttaaaggagaaaaacctttcggtgcatacctggaacaataaggtggcccacttgcgggcaatatttaatctgggtattaaaaaaaatttgattcagcacactgagaatccttttaatggaacggttgtacggtctgacactaagaaaaaacgaatattgacgaagtctcaattgacccgtctttatctcgtgatgcaacagtatgaacaaagggagaaagagagaaaaccagtcaagggtggaaggtgcgcactttatccaacctggttctggatgacggtattagacacatttcgatataccggtatgcgtaacaatcagatgatccacatcagactgagagatgtgaaccttgagcaaggctggatcgagctccgccttgaaggtagcaaaacccatcgggagtggaaagtgccggtagttcgtcaactaagagaacgaataaagctactcattatgcgtgcaacagagcgaggcgctggccagcatgacctgctctttgacgtcaaacgattcaccagcccacgtcatgctcattacatctatgacgagaaaaatgttctgcagtcgttccgtagtttttatcgtcggttgtccagggaaagtggcttcgatatttcctcacaccgtttccgtcacacgcttgctacggaactgatgaaatccccggacagaaatctaaaactggtgaaagatctgctgggtcaccgtaacgtcagcacaacaatggaatacatcgaattggatatggaagtggcagggaaagcacttgaacaggagcttgttttacatacggatatcactgcgacgagaagcttacaaagcttgacacaggcatga

SEQ ID NO: 127531 - DNA, 201 bp, Enterobacter cloacae
atggacgaagcaaccagccatctggatgaagaaaatgaaaaacttatcaaccgcgccatatccggccttgatatgacccgcattatcattgcacaccgtccgtcgaccatcgcttctgctgacagagttatctgcctgggaacacatcacagcccggaacacagtaacgaagggcatgaatcaaaggggatccatctatga

SEQ ID NO: 127532 - DNA, 534 bp, Enterobacter cloacae
atgaaaactggctttatgagttctctgcttgctttgctggttctgggggctgctaacagttcgtttgccctgacaccggaggaatcagtaaaagaaatcgccgatcaccttgaagaacttaaacccataacctgggttgctccggcagaaaaatatcatctggtggtatttattgataatcaatgcagctactgctctgatgtggtcaaacatgttcagcactatacagacgccgggctgaccatgtcatttctgactgtcgccccggcatctatcagagactcggtgatcgaggatatggccagagtctggtgctctggcttaccccgggaaagcctgcgtatggccatggaaggttttttacctgacaatgacagtactccggcctgtcaacacacgatcgtgcaacaatcagaactcgcacaccgtgtgggaatagaggtgacgccggtaatggtggtaatgcaacctacacctgttgtattcaccgggaatgttaaaccggaatatatacttaatacgctcggtaagtag

SEQ ID NO: 127533 - DNA, 243 bp, Enterobacter cloacae
atgcctaagtttgtcttttttaaaagtagtgcggatattgttactgccgtaagtcagtcggtttacgccgaccagttatccacatcgtcagaatacgaaaaaatcgattttgaaacagaggcgacagacaagcaggcagcagtgctgaaactgaaagcatatctggaaaccaataccaatgccctgaaggactttagtggagatattactttcagtagcgttattgaatctttgctgaggtaa

SEQ ID NO: 127534 - DNA, 270 bp, Enterobacter cloacae
atgaaagaaatccattcttcacaatacagtacggtagcaggagccgggctgggcgatacctgtggtcgttcaggcggcagtaattgtggtggctcatccggttctgcaggctcaaaggggggaaactccggcaaacagaaccgtgattaccagacttcaaatcgcgggagtggcagtcaggcgaatcatttcggacaaggcggtggttcgtttggtggaggcggtggatgcaccggaggcggacgtgaccatgttggtaccaaccgttaa

SEQ ID NO: 127535 - DNA, 468 bp, Enterobacter cloacae
gtggtcttactatcagagaccagggcgcatggggatgtacaggggcgtagatttgttgcaggatgtcccttcgctttaccagaaaatcgtaacagggaaggggcgttaaacatgaaaaacaaaatgttgctgggtgttgtattcctcttaacgggatgccctgggccaggtgatcgaatggtagatcgtgaatctacaacggcattgatcaaagataatcaagtttgtgtgttgtcaccactggagccgcaggaacggatcactgctattcaaatcaaaagcgataatagcgactctcttcacaagattttcgatgacaagcctgtttatgtaccgaagggggagtgtcttcctgtatttggatttaagtttacgtctggggagcggtataacttcgcgtatgacgtccaatctgatacgtcagaatcacatttagtcaccgctgaactttcttaccctaaagaatag

SEQ ID NO: 127536 - DNA, 399 bp, Enterobacter cloacae
atgaagaaacggtcattattgctgactctgctcagcctcacgttattaaccgcctgcaacacctcccatccggataaggttgaacaaatccaccatctgcaggtcccgttagttttaccgggagaaaaatcccctgtcattccggcatcgcatattgctgcactatatcaggagaataaagcgcagattgacaaattaacaacgcaactaaaatcagactatttacagcatgcgaccgcaaaggatgtttttactgaagatagcgctgttcagcccgtctacgcctcgctgacaaaactggaacagctggacatgattaatcagcaatacctgaaagataaaaatgtcacaggcctgcaaaaaattaaatctgtccttcaacctttagtcaccggttaa

SEQ ID NO: 127537 - DNA, 693 bp, Enterobacter cloacae
atgaaaacaatcggcctgctgggtggcatgagctgggaatcgacgattccctactatcgtttgattaatgaaggggtgaagcaacgcctggggggactgcattcggcctgcctgctgctgcacagcgtcgattttcatgagatcgaagcgtgtcagtcgagcggtgaatgggataaagccggggaaatactggcgcaggcggcacttgggctccagcgtgccggtgccgaagggattttgctctgcaccaacaccatgcataaggtggcttcgcacatagaaacacgctgttcgctgccgtttttgcatattgcggatgcgaccggacgcgcgatcggcgcggcagggatgcgacgagtggcgctactgggaacgcgttacaccatggagcaggatttttatcgtggtcggttaagcagtgagtttggtatcgaaagcctgatcccggatgaggccgaccgggcgcgcattaatcagattatttttgatgagctttgcctcggcaccttcagcgagtcttcccgggcctgttacgtcagcgtaattgaaaagctcgcccggcagggggctgaaggggtgatcttcggttgtaccgagataggcctgctggtgccggttgagcgaagcccgatcccggtattcgacactgccgccattcacgctgccgatgcggtagagtttatgctgtcataa

SEQ ID NO: 127538 - DNA, 408 bp, Enterobacter cloacae
atgtgcctgtatgatggttacaactctaacagcgacagcatgaagctctccttcgccgatgagaataaaggcggggcatcgcgtaaaaatggttactattccatctacaacacgggtaccgctgggacaggcgaaaatgagcgcatcgactatcgtcttgaaatgtttaatcctcatactaaaagctggatgagggtcgataatggccaggggtatgacatctctgctggcgttaacggccaggatcaggttcgcccggtgcacctgccctcgatcagttatcctgttctgtgcgcgccagccccactacgactgattgtggataaattcagggttaccgacaaaacagcgggttactacaaagggactctacaggtctatttctcccccagcctgaacagtatttaa

SEQ ID NO: 127539 - DNA, 756 bp, Enterobacter cloacae
atgagattaaaagcagggttaatagtatgcgggttattggcggctatcaatgtacaagcaaagatgtactatggtccaacgcctaatgtctctactcaacaagaatatgaactcccttctggagcacccgctgacgtatatttatggaaagaggattatcccggtacttcagggtattacgatgctgttggcacctataaatgcgcctattcagatgtgcagcaaacctgcagccatcaaagcgggcgttcaacgatcactatcgttttaaaagaaaagcgaagtggcatgacacattcgcttaaactacaagcctacatgaccggaataaaatataacaacgctgaccccagccagtctgaaagttgcaacgcacgatacgcactcaataaccaaacctatttaagttgctcgacaagttcatggagtattgttgacaacgccagggttcttacagcctggataccacagagcgaaatgaataatcttccagtcggtggtgtgtgggagggtgctcttaagttgcaatataatgcggccgggagaacccccgtgaattttgtcgccaatatcaccctgaaaggcaaagccactggcaagcaggatatttttttccggagtttaataacgccaatccgctggtccaactcgatcttcatcctacaggcgcgatcaccggaaacagctttgctgaagatgttaccacgctggatatgtgcctgtatgatggttacaactctaacagcgacagcatga

SEQ ID NO: 127540 - DNA, 2694 bp, Enterobacter cloacae
atgactatgaaaaagacgattctgggcctcttgatttttagcctgcttaatagcgcaaatgcgcgcaatgagaagatcccgccaggatttgaactcatcgttctgggtcagaaagagtatgtcgatgtctggttagccggacgtaatcttggaaagttttacgccactgttaacctcgataccgtgaaatttgagcgccccgatcaaattattgacgcgatggcgttggatgccgacaccggtatcaaaaagaaaattacggcaaaactgagccagcctctggaacggcacggagaattagcctgtaccgcgattaataccagcgcgggctgcgattacctgaaaaccgacgatgtggcgctgatttataacgacgaaaaaaatgccgttaacctttttcttaacgatcggtggtacccggacgatcgccacaacgccttatacctcaagccaaacagtgatgatgatgtggtgaacgcatttattcatcagcaggatattaatgtcgcggcgcaggaagactttaaatccgtttatctccagggaacgggcgcgctgggtgtaactgaaaacagctacctcggcgcttactggaactttaacggtaatgaaaacgacggtgaaactgaaaccagcgctgacgtcagcgaactcttttatcgttacgactatctgagccgcttttatattcagggtggtcgcatggatagccgaagcctgtttagcctggacggcggaaactttaacttttccttcctgcccctgaacacattcgatggcgtgcgggcgggtacgaccttaagctatctcaaccgggagcagatgaatcaaggtacaccggtcaacgtgctgctttcgcgcagctcacgcgtggatgtgtatcgtgataaccagcttctcggttccttctacctggcaggcggaaaccagtcgctggatacctcgtcgtttccggcaggtagctatacccttcaactgaaaatctacgaaagcaaccagctttcccgaacagaagtggtgccgtttacgaagaccggtagcattggggatggtcacattcagtggtttattcagatgggacaactggtggatgacagctcatcttatgccgacaataaaaatgcctctaccgctcaggcagggatcagagtaccagtaaccgcacaaagcgaggctacgcttggtgtcgccagtgtggataacgacttttcagctgaattgggtggacacctgactcccgcacttggcgcattcggcaatgctgatctgcagggcggagtctactataacgaccagggcgggcgcggcaatatgcagcagctgagctggcacgctgatggatggccttcattgagcgtctaccgcaaagacaccagcggcgggcaatgctcaggtgacacagacgcgaacgactacgatctgagctgttttgaaagtatcagcacgagcgcatctcaaaacgtgttgaactggaatattgcgttgaactggaacagaacccgtaatcatgcggattatcatacccgctggaacaacagcgacagctttactgataatttctttaaccagaccgacgctaacaccaccaccgacagtgttcagttgagtgccacccgcgcgtttagcctgaataactggatggtgaataccaacctggggctgttcactcgcgacgacagcaacagcaataacgatcgtggtgcctacatcatgttgacgttcagcgaaacgccgcacatggatgctaacgcacgcagtcgcaccacgacgattagcgctgattaccgtaccagcaaggaatcacaggatcagacctcctggaatctgtcccgcacctggtatgatgacaacgttaaccaccgtgaagtgggcatcaatcttggcggaatcaacaccgacacgctggactccgggattaatggccgtattgatggtctgtatggcaatctgagcgccaacctgacggacagttacgatcgtcagaatcaagaacatttcaccgctttcacggggagctacagttcaacgctggcaatcagccgccacggcgttcagcttggtcgtgcaggatatggtgaaccgtctgcggcggtgctcgtagcagtcaataatattgatgacgaatcagctgaacagctctccgttgatgcctctgctaacggcagcaaagccagcctcacgggaaatggctcggtactcttcccgtatacgggctatgaaatgggctatatagaggtcagcgacagcgcgcgtaaacaccagagcgggaccaccaacctgattgccggttcaggcaagcaaaacctgatgcttctgccgggcaagctgcgctatcgcgaagtgtccgcatcatttagctataactatattggccgcctgatcctgccggagacggtcaagcgcttcccggtaattggcctgaacagttcaatgttactgctggcgaaagatggcggcttcacgcttgaaatgcctggggcttcgcgcgatttatacgtgctggccggacagtcattcctgaaatgcccccttaacgtattgaaaaaacgcgccagtattcgttacgccggggaagtcaactgcgccaccataacctacaaccagcttccgccccagattcaggtgcaggcacagctgaagcagtccctgcgtaagcaggcgctggaaacggcacaaagggagaatgtgcaatga

SEQ ID NO: 127541 - DNA, 495 bp, Enterobacter cloacae
atgaaacgtattatgaccaaatccttgctcgcactggccatggtttctgtaatgggttctgcgattgctgttcagaaagatattactgttaccgcaaccgttgatgctgccctggacatgacccaggctgacggttctgcactgccgaagaatatcgacatgcaatatttcccaggcaccggtctgtctccggcttctctccagactaaaatctgggcgaacgatgtcacgaaagacgtgaaaatgaagctggctagcgatttctccctggtgaataacctgggtggcgcaaccgtacccatgaccgtgaaatggggtactcaggcgctgaccacgaccgatgcgaccctgaaagcaaccgacctgttccctaacaccaccactgccctgaaaaccggctccgtcgcaaaaacgctgctgatctcccaggccacacaagaagcactggaaaccggtacttaccagggtgtgctgagcatctatctgtatcagtaa

SEQ ID NO: 127542 - DNA, 708 bp, Enterobacter cloacae
atgaaaatcacaccatttttgtggagtgctctgtttatcagcatcactcctgtttgtcaggccaatatgtctgtttacccaatggccgttgatatgaacgatcagggagaaggcagcgtccgtgttatctcccgcactaacgatgttcagtatatcaaaacgactgtcctcagcgtttccggacgtaacaccccacaggaaaaagagaccgaagtgtctgtcggtggcgacagtggcctcgttgtcatgcctcccaaattcgcgctgcctgcgggttccagcaaaatggttcgcctggtttcgatggcgcccgtgcaggaagaaacaacctggcgcgtgaagtttgaagccgtgccgcaacttgatgacgaatcgattgccaataaaggcgtcaaaacgcaactgacacttaatctgatttggggcgttctggtcagcgtccctcctgaacatccgcggttgaatatgagtttgcaaaccggcggtaaaattaaaaacgacggtaatcagcgttttaaaatacttaaagtcggtctgtgtaaaaaagcacagagcgaaaaagcgtgtacatggcatgaggtaaacgaaaacatctaccctcgagccagctacacgccaaagaatatattgaattacgatcgcatcgttgttcagtattgggattggattagcaagtcgacaaataaaaaagactttgcaattcattaa

SEQ ID NO: 127543 - DNA, 927 bp, Enterobacter cloacae
atgcccgccgtcaacttacgccatatcgagatttttcacgccgtgatgaccgccggcaacctcaccgaagccgcgcagatgctgcatacctcacagcccacggtcagccgcgagctggcgcgcttcgaaaaagtgctgggactgaagctgttcgaacgcacccggggccggctgcacccgacggtgcaagggctgcgtctgttcgaggaagttcagcgctcgtggtatgggctggacagaattgtcagtgcggcggaaagtctgcgcgagtttcgtcagggcgagctgtcaattgtctgcctgcccgtcttttcacagtcctttttgccgacgctgctccagccctttcttgcccgttatccggaggtcagccttactatcgtgccgcaggaatctccgctgctggaagagtggctttcagcacagcgtcacgatctggggctgaccgaaacactcgccacccccgcaggcacggagcgcacagagctattttctttagatgaagtttgcgttttgcccgccggacaccggcttgccagtaaagcggtgctcacccctgccgatttccatggggaaaactacatcagtttgtcgcagaccgacagctatcgccagctgctggatacgctgttttccgagcatcaggtgaaacgcagaatggtggtcgagacccacagcgccgcatcgatttgcgcgatggtacgggcgggcgtcggcgttgccgtggtcaacccgctgacggcactggactatgctgaaaacgggattgtcatccgtccatttagcgtgtccgttccgtttaccgtgagcctgatccgtcccctgcaccgcccggcatcagcgctggtagacgcgttttctcaacaccttatcgaaggaatacctgcactgaaaatccagttatcaacattcaaattacgcaattaa

SEQ ID NO: 127544 - DNA, 186 bp, Enterobacter cloacae
gtgattctcacatccctgtatgacagagctcgccaggcaggctccttttccatcctgctgaagcataatcacgtggtcacggttgtaacgattggcatcgtttcgcagaaacacgaggtaatcgcggacctgacaggcggcctgccacaacctctgacgctgctgccagttgtcccagccgtatag

SEQ ID NO: 127545 - DNA, 561 bp, Enterobacter cloacae
atgccgatgaagcagcacggtttctcactcacggaggtgctgattgcgatggcgatcagcagcattttgttactgagcacgtcgcgttttttaccggggctgcaacgggctgttttgttgcaatcccgggcgctggaacgtgaagaagagatctggcaacggctgttcgccattggcaagcagttacagcgcgcggggtattgcgcgggagactgccaggggcagagcctgaccatcggcagggagggaagctgcgtgattgtcagatgggatgccaacagtaacggcgtctgggatacctcggcttccgaaaatgaaagtatggggtttcgtctggagtctggcgcgctggaaaccctgcgtggggctgcgacatgtgaaggaaaaggatgggagaagctgacagacccggacaggctggtgatccacacctttgtggtgcgtaaacatgaacatccggggtttgcgcctgcgttatatatagatctgaccgctacggataacgataagctggccgtcccttatcaggcacaccatgccgttatgggatttaacttgtga

SEQ ID NO: 127546 - DNA, 402 bp, Enterobacter cloacae
gtgaaccgcgagagtggggtcgcatcgctggcgctggttctgctgttactggtgctaggcacgctaatcctcaccggtctcaaccagcagctgacaacgtttagcatactggtgggcggtgagagccattcgatccagcagcaggcagcggtgcagtcggcgctggagtgggggcgcgttcagcgctggtcgttgcagccagatgtgcagtgcaaacagagacaaacgcaacgtgtatgtttgcgtgttctgaatgagacccgggtgttacttatcgccggggaaggcgaacagttgctctggcgtggcggggagattaccgacgggcgcatacgttttttacctcatggctggagtgatttttgtcctctcaaggagagcgcgttatgccaactgccatga

SEQ ID NO: 127547 - DNA, 324 bp, Enterobacter cloacae
atgccaactgccatgaagaaagaaaaagggttcagcatggttgaagtgctgctgtcgataatgttactggtggtgatggtgacagcgttgtctggctatcaccgggcgctggcctcccggtttaaactgtttagtcagtatcgccagctctggcatatcgcctggacgcagtcgcagcgggacgccagtgcgctgcccgcaggctggcagataaaccgggtgcagacaacacagtccggatgtgtcagcatcacggttacacttatttctcctctggggcggcgcggtgagatgacgcgtttgcattgcccggttagccagtag

SEQ ID NO: 127548 - DNA, 237 bp, Enterobacter cloacae
atgagcgcaaaaaaaagagcattcacctggatagtcgaaaccatgatgttgtttgtcatatattccgcgttgtgctatttccttccagacattgaactttaccatctctacacaagtcatttcggttttgttaccgaactgacgtggaatgaaaactatacgctaacactgtttatcctctcgtttttctttaacgccctgttgatatatctgtgggctttaaaaaagggaatataa

SEQ ID NO: 127549 - DNA, 480 bp, Enterobacter cloacae
atgattcgatgtacttttcatttaaatggaggacaattgtcaacattaagttgtccaggtctgggattttttcctgcatattccggaaatgctggaccgaatagaaataatcccgacgcagttgcgattccgaaagtcggtccattaccaccggggttgtattacatcgttacccggccgcgagggggattaaaagcacgctggaaagacaccatcaaagagcttgaaagtggctccaaccgtgacttttggtttgctctttatcgtgccgatgaacatattgatgacattacatttattgataacgtagagcgtggttctttccgcttgcaccccgctgggcagtctgggatcagtaacggatgcatcacactgccaaaccatgcgcactacacaatcttaatgcatgctttgttagcctcgggagcgatgatgatcacctctgaattaaaagcccttggtacaatacaggtatattaa

SEQ ID NO: 127550 - DNA, 483 bp, Enterobacter cloacae
atggcaattcctgcatacctttggctaaaggacgatggcggagcagatattaagggcgctgttgatgtacaggatcgtgaaggaagtatcgaaattttaggcttcggacatggtctgcatctacccaccgacagcttaacgggaaagataacaggcacgcgcgtgcatagcgctctggtttttgagaaggaattcgacagctcaagcccttacctctataaagccgtagcaaagggtcagacgtttaaaagtgcggagttcaaatggtacaagattaacgacgctggccaggaagtcgaatacttcaacatgttactggaaaacgtcagagttgtcgcaatatgccctcttatgcatgacataaaaaacccggctactgaaaagcataatcatctcgaaagcatctcattgcgttatgaaaaaataacatggagacactgtgacggtaacattattttctcagatgagtggaaagacagatga

SEQ ID NO: 127551 - DNA, 804 bp, Enterobacter cloacae
atgaagaaaattattggtgtgttattactttcttgcttactcgtcgggtgcgataaacccaaaattgattcttcaactgatgctgcaatgaaatcctcgatagccaaagtcagagattcacttccggaaaataaacgggaggaattcgatagcgccttaaaggttgtggcattcagtaacatcgatatggctgacctgatgcgttccacttcaaataatgataacgaagagataagcaaaaagatgcgcgaaagcctgtctggtaagacgggtgaagaaataatctcttacgcacagcaagtcactgctgagagagagatgaagttaaaagaaaagatgactcaggaaatcaaagcgctggaacagaaaaaagctgacgccgacgtggctaaaaaagagttgatgaaaatccaggttttatcatccagatttaccatggagcctgagcaagacggtaagccacaacccgtaattagactggttgttaaaaataatactgataccgttatctccagagcgtacctgcacggagtgatggcaagcgagggatactcagtaccatggctggtaagtaattttttctatgatattcctgaggggcttaagccaaatgaagaagccacatgggctattgccccccctaagaattctgaatggggtgtactttatgccccaaaagacgctgttttaactgtgacactcgtaagagtggacggtactgataatcaggcgttgtatgatgcaacaatgttcactgaggaagataacagcaggcttgaagagttgaagaaaaaaaatctctga

SEQ ID NO: 127552 - DNA, 2583 bp, Enterobacter cloacae
atgaccatacctcagaagacccctggctttacggatagcgagcattctaaaggactgataaataaaacatttacctatattgttacgctgttgatatgtattttcatcgcagcgatagtttcgttgctaatcataaaaaacaatgtgaataaaatcggcgacaagcatgatgaattcttgttaagaaaggcgttagacagccgtcaggaaaacgtgcgtagtcatttgaaagattatgctgagtggggtgatgcctacaatcaccttcatcaaaaaatcgacataaactgggcatgggataaacagaacctgggtaagtccctgtacgataactttggctacgaaggcgtgttcgtgttgtccccggatggcgcctccctttacagcgtacttgacggaaaactgaagcgtgaagatctgcaacgctggatagatcacgccacaaaagagcagttactcagtgaaatgcgtatgaataatgggttgccggtgtccacgctaacgcttatcgactccgtacccgccattgtttctgcggcctggatcacgacgggtgatgatgcgagtgttcaacccttgcccggtaagccttcaaccatgctgtttatagacaagttaacggctaagaaacttctcgcgattggacgcgatgcgggtatcgaaaatgttcgcgctttgcccttcaacaccgtttcccaggcaaataatccgactgaattaacattaaatacccaaaagggtgctgtacatattatctgggaaagtgaaaatcccggtcaggcattgatcatttattttttacccttgctcattctttccgttctcctgacgcttgcgctgacggctattttgatgcgccatattatgcacaaggcgaaaatccatgacgaaaatatctttctccttgagcaggcacggctgaatctgattattagcgaaaaacgattcagggatgtcagtgaaacaaccagcgattggttctgggaaaccgatttagcgttaacgatcacctggttatcagggcgtttttcgactgtaacgggatatgatgagagtcaatggatagggcgcagcctggatgaactttttccttcgaccaaagatgtattaaatccgtgtgtcaggcgccgggaattatcaggacgcttcgaatttaagcattgcccttataccaactatcaaaatgccacttcttattgcacgcttctggcaaaattttcttctcagcctgatggcacggtggttttacggggcgctgcatccgatgtctctctggaagttgaagccaccaaacgtgttgaattcctgtcacgccatgacgagttaacgggccttcccaaccgatatcatattaaggaattccttacggggcagctggcgaaagaagatcttcaccattccccctttgccatgatttgcatggatttagataagtttaaacccgtgaatgatatttttggccattccacaggtgatgccctgcttggtgaggttgctttacgtcttaaagcctgtattcgtagcggtgattttgtcgcccggcagggcggggatgaatttatgctgcttctcgacaacacccggcatctggaccacatagaagaggtgtgtcatcgcatcgtgcaagaactcaaccgtccgttcaccattgatggtaatgatgtgaccatcggcgtcagcatgggcattgctctggctccccaggacagtaccagtgcaaacgaccttttacgctatgctgatattgcgctttatcaggctaaacaatccggtcggaaccgatgggtctattatcgtcaggatatgtcggaaaagctgaccgagcgcagaaagctggaattagcgctgaagaccgcaattcgggaagaccagctctatctggtttatcagccgcgttataacctcagacattcacgcatcgacgccgtagaagccctggttcgctggcagcatcctgaacgcggaaacatgatgcccgatcagtttattccactcgctgaagaaacggggctcatcatcaacctcagcaactgggtcattcgtaaggcctgtacagagacgcatgaaaaactgccggggctttcggtttcagtcaatatttcagccattgaattccaggcaagcgatctcgccgaaagaataaaagctattcttgatgaaaccgggcttgagcctacccggctggaaatagaggtgactgaaaatgtcacgctctctaatccagagaaaacgttgcagaccatgaaggcgctcaaaaaaatgggggtacgcattctgattgatgatttcggtaccggctatgcctctctgagctatctgcgtaagtttcagtttgacgggttaaaactcgataaaagctttattttttccttaggggattcgacacagaaccagtcggtggtcgagaagatcatcgatctgggtaaagcctattctatggaggtcaccgcagaaggtgtcgaaaccgtagaacaattgtcgttcctgaagaaaaataagtgtgacgaagtccagggatatttactcggcaaaccggcggccattgcagatttaaatctaaaaaccaaccacgtaatttattaa

SEQ ID NO: 127553 - DNA, 396 bp, Enterobacter cloacae
atgcgcgacggtcgggtttttaactggcgagtcggggtgatggttgtcattctcctgggcttcatattgtacccttttcgcgattttttcaccgtgtatgaaaacctgcagggaaaaatgaggattaatgagcaattaaatttgtacatcacccgggtagaaaccagttcactctccaaagatacgtttcacttttatctctatgatgcgagaaaaagccccgaagcgtttatgtctcatattaaggacattaagcctgttatggtcaccaatgatgataaagccaccgcgaccgtaaaaaacggtgaaatttatctccacgttcgtggcaatgtttactcgttcaacacggttgggtacgacgtacgtatacatctcgatagatcaccttactga

SEQ ID NO: 127554 - DNA, 456 bp, Enterobacter cloacae
atggatggcgatcccggcgtgatgcggtatatcaaccaggggatcgctaaaacgccggaagagacctgggaagggatccgacgcgttcaggcccgttgggcaaaatacgggttttcgtggtgggcgattaaagagaaggcgtctggtgaggtcgttggcgcagcatgtctccagcatctggctaacgtggagggcgccccgctggagattggttggcgacttatcccggcacataatggcaaaggttacgcaacggaagccgcaaaagcgattattgcgttcgcagcagaacaggtgggtgccacttatctggttgcggttgccgatccggacaatgtcccctcgcagcgtgtgatgcaacggttaggtatgacgttcaaggcgatagaagagcattatgatgtgccttgtgtggtgtatgaactaacgattcctggcgctcgtgacactcgctga

SEQ ID NO: 127555 - DNA, 486 bp, Enterobacter cloacae
atgttggccacactctcattacaggatatgtccatgatcacagtagagaaatcagatccattttctgcagaatcccgtcgcttaatcgaaatgctgtcagcagaacttgccgctattactggtgatagtggcaaaagtcatttcacccttgaagcaatgaatgatgacaaagccttatgggtcttggcaaagaatacccatggcgaagcgataggatgtggtgctatacgccccttgacgccagaaatagccgagcttaaaagaatgttttcagacagaagtgtgccagggattggagatgctttactcacttttcttgaaacatcggcaaaagagatggggtatagcgagctcagacttgaaacccgacacatcaatcatcgggctgtaaatttctatgagaaaaatgcttatcaccgcattgagaattacggcccttacataggtaggccagaagccgcctgtttctcaaaagcattgcgctga

SEQ ID NO: 127556 - DNA, 471 bp, Enterobacter cloacae
atgcgtactcgtccagcctctcgattgatagtcctttcacctgaaaatcacgttctgctctttaggttctgccataaagatgatgctctggaaggaaaaacatactgggcaacgccaggaggaggacttgagcacaacgagtcttttgagcaggcggcgttacgtgaattatttgaagaaacgggcctgacaagaagaactacgggaccacaaatagcctccagaaccttccctatgatgctgccaagtggtgagaacgttcttgcagaagaacgtttctttattattactgcagataaatcagatattgaccgctcaggttggagtaataacgaaaaaaaagtcattcgcgatcactactggtggagcttagaacagctcagacagaccaatgaaatcatcttcccactcgatttgataattcaaatacttgaaggcttccccggcactcaactctctgaaacagcttag

SEQ ID NO: 127557 - DNA, 468 bp, Enterobacter cloacae
atgatctattacctcatcgcgtttgccgccggtcttgggatcaccctgcaaacgacgctgaatagccaactcgcacgaggactcggcggtgatccggtgacggccgcgctgttttcttttgctgccggtgcattcagtcttggaatttactcgctgctgcgcgggggattattcaccacacttgcggccattccgtctcaaccactgtggagtctggcgggcggcctgattggggcatgtgccctcttcagctacgtagtgcttgcaccgaagatcggcttttcagccctgctcgggctggcgattgtcgggcaattactctcatcgcaggtgattgaccattttggtctgctgggcgcaatgaggcggccagtctcgatactgaagctaagcggaatgctggttatgctgatcgggctcgccattatgctgttcggggatcggctttcggagcggtttatgcactga

SEQ ID NO: 127558 - DNA, 1398 bp, Enterobacter cloacae
atgaccgattacatgagaaatattgttagtaatgcaacgttcacaccgccagcaacactgatccgtggtgcaacaatcctcagcatggacgagaccgtggggaatattgaacacggggacattcttattacagattcaaccattaccgctgtcgggaagaacctggacgcacggggcgcccgtatcatagatgccacaaacatgattgcgataccggggatggtggattctcaccgtcacgcgtgggaaggacagctgcgtcgcatcaaccctaatgccacttgtctggacgactacagcaacgccacacacttctcttttgccagatattatcgcccttcagatatctacacaggtaacctgttgacagccctgggcgcgattgacgcgggcatcacgacaatcattgataactcgcataacagccgcaccgctgcgcattccgacgccgccgttgaggcgctgcttgattcaggtattcgtgccatccatgcctccggtgcgccagtatcaggcgactgggacagagcccactggccgggtaactggcagcgcctgcaggagaagtattttcagaacaacccagacagtcttgtatctctgggggttatggcccaactggagcccgccctgtgggccgaagcccgcaggctgggactgcctatcgtcacggaattctttggtgcagagatggcctcacagcttgcgtcgctgcatcaacagggcctgcttggcccggacaatatttttaatcactgcacggcgctgcctgacgagggatggaagatcctgcgtgaagccggtgtgcgggtgaacgtctgcccacgctctgatgcgcactatggtatcgaagacgggatgtttgccatccagtcagccctgcgccatggtatcaaccctggccttagtgttgataacgaaacgtcctacagtacggacatgtttatggaaatgcgtgtggccttttacctgcaacgggtgatagggatgcatcagcagcagtgctgcgatacccctcattcgctgacaacgctcccggcagcgcaactccttaaagcggcgacggtcgatggtgcagcctgcgcagggttgcaggacaaaattggcagcctgacgcctggcaaacaggccgacctgatcctgattaacaccagcgacatcaatctctacccatccgggaatgcctttggcacggtggtacatgcgacagagcgcagcaatatcgataccgtcctgatcggtgggcgtatcgtcaagcagaacggcaaagtcctgggcgtagacagcgcgcgcctgcgtgcagtggttgatgaatcgcgagagtacctgtttgccgccgccggatatgaacctgacatgtttgccgaaacctttctgccgctggtgcaggcacactga

SEQ ID NO: 127559 - DNA, 885 bp, Enterobacter cloacae
atggatcgtcttcaggcaatgcagatttttacgcgggtggcggaagccgggagctttgtgcgcgcggcagaaacgctttcgttgccttcatccacggtaaccagcaccattaaaaaccttgagaagtatctgcaggtgcgcctgcttaaccgcacgacaaggcgggtgagtctcacccctgaaggggtgcattatcttgcgcagtgccgggacatactgtcgttgatcgagcatgcggaatccagcctgacggattccgtgagacggccacagggccgattgcgggtagatatgcctgccgggattgcccacttcatcgtcatgcccaatctgcaagacttttatcggcgttacccggatatctatctgatgactggcgtgagtgaccggcaggttgacctcgttcaggagggtgtcgattgcgtgatcaggacaggggagttgaccaactccacgctggttgcgcgtccgctgggcaggtttcgttgggtcacctgcgcctctccggactatctcagggagtatggtgtgccacagtcaccagacgagttatcccggcatcgggcgatccactatttttcgggtcaaacccggcgtgcagacgaactgcgtttccagcagggttctgagttgcggtatgtctctgttaacagccagacggccgttaacgaaacggggctctatatcaaaatgtgccttgagggttacgggctggcgcagcttgccgagaatgttatagctgagcaccttgcgcagggcacgctggtggagatcatggccgactggcagccaccgccagtcccggtcacgttactgtatcctcaccagcgctttctttctcccgccgtacgcgcctttgctgactggatagatgaactcatctga

SEQ ID NO: 127560 - DNA, 927 bp, Enterobacter cloacae
atgactacttctcaatcaatctccaacatggcacttgccgactctgcgtatgatggcactgtcgccagtccggtttattaccgccatgaacaggtggataacgtcaaaatcttctaccgcgaggcgggacatccagaggcgccgacgatcttgctgcttcacggctttgcagcctcatcattcatgttccgcgacctgatacctgcccttgccgggagctaccacgtcattgcgcccgatctgccagcgttcggttttactgaagcaccagcaagaggtgagtattcctattcgttcaatcagctggcgaaaaccattgagcagttcaccgaacagctcaagctcagcacttatgcgcttatggtgcacgactacggtgccccggtaggctggcgtctcgctgtctcgcatccggagcgtgtgaccgcaattatttcccagaacggtaacgcttatgaggaaggtctgggggaaggctgggcgcctattcaacgatactggcacgaacccacagagcagaaccggcttgccctgcatgacttcccgacaccagcttcaattaaatggcaataccttgaaggcgttgccgacacgagttcagtttcacccgatgggtacaccctggaagggctacacatctcgcggccgggcaatgcggatattcaactcgatttggtgctggattacgcctcaaatgtggccatgtatcctgtgttccaggaatacttccgtgagtatcagccacctctgctggcggtttggggtaagaacgatccgtttttccttccagcaggcgcgctggcatggaaacgcgaccttcctgatgcggacattcgcttctatgacactgggcacttcgcgctggaaacccatggcagggaaatcgttcctgttatccgtgagtttctgaaaaaaaatattgtgtaa

SEQ ID NO: 127561 - DNA, 582 bp, Enterobacter cloacae
atgagttctgaaaacacaaattctgctgccccgttactgggtgataacctggccctcgatttcatcaacactgagtatgtcgtggatggaaaacgtcatgactgttttatcgatgatcaacgtgttgctggctggctgataagagtcgggttattgcctgacattaaggatcagcagatccctgatggactgcttattgaggctcgtgaacttcgcgatactgcaaggaatgttgtgaactcagccatgaacagcgttccggtcgatctggctgtaatcaaccgggtactggaagttggtcgcccaatcagcaagcttgaatgggatggcaacatgcaacaataccgggttgcggtttatcaaaacactgaaagcccatcaggcctgctctggccgattgccgatgccctggtcaatctggttagcagcgataagtttgaatacgtgcgtcagtgtgaggctcatgactgcattctgctgttccacgatctgagtaaatcgcatcgccgacgctggtgcaacatggcaacctgcggcaaccgcatgaaagtcgccgcattccgctccagaaaaaaaacatag

SEQ ID NO: 127562 - DNA, 831 bp, Enterobacter cloacae
atgggttatgtaacaactcgcgatggcgtcaatatctactacaaggactggggcccaaaagacggaaaggtgatctttttccatcacggctggccgctaagcagtgatgactgggacgcccagatgctgtttttcgtcaataaaggattccgcgttgtggcccatgaccgtcgcggtcatggtcgttcagatcaggtgtgggacggccatgatatggatcactacgctaacgatgtggccgccgtcgtagaacatcttggcgtaaaggatgcgatgcatgtcgggcattcaaccggcggtggtgaggtggtgcgttatatcgcccggcacggtgaagacaaggtttccaaagccgtgctgatcagtgccgtaccgcctttaatggtgaagacggagagtaatcctcagggtacgccaaagtcagtgtttgatgattttcaggcccagctggcggcgaatcgccctcagttctattatgacgtgcctgcgggaccgttctatggatttaatcgtcagggggcgaagccttccgaagcggtcatctataactggtaccgtcaggggatgatgggaagcgccaaggcgcattacgatgggattgtggccttctcgcagacggacttcacggaagatctcaaagggatatccatccctgttctggtcatccacggggatgacgatcaggtggtgccgtatgcggattccggcgcgatgtcagtcaagctggtccaaaacggaaccctgcatacctataaaggcgcgcctcacggtatcccaacgacacatgccgatcaggtcaatgccgatcttctcgcctttataaacagttaa

SEQ ID NO: 127563 - DNA, 774 bp, Enterobacter cloacae
atgaccgaccatactctgaccggtaaaactgtgctgattgccggcggtgcgaaaaatctggggggattgattgcccgggatttcgcccggcatggcgcgcgggccatcgccattcattacaacagtgccgccacgcaacaggacgctgaggcgaccgtacaggccatccgggcggcgggcgcacaagcgcatgcctttcaggctgatctgacctcagccgccgcgatggaaaaactcttcagcgatgtggtggccgctgtcgggaggccagatatcgccattaataccgtcggcaaggtactgaaaaaacccatggccgaggtcactgaggaagagtttgatgaaatgagcaacgtgaatgcgaaagcggcatttttcttcctgaaagaagccggcaggcacgttaacgataacggcaagatttgcaccctggtcacctccctgctgggcgcctacacgccgttttacgccgcctatgctggcatgaaggcacccgtggaacatttcactcgcgctgcgtcaaaggaacttggcgaaagagggatctccgtgactgcaatcgggccgggcccgatggatacccccttcttttatcctgccgagggtgaagatgcagtggcgtatcacaaaaccgccgctgcgctctcccccttcagcaaaaccggcctgactgatattgacgatatcgtgccatgggttcgctttctggtgagcgaaggatggtggatgacaggccagacgattctggttaacgggggttacaccacaaaataa

SEQ ID NO: 127564 - DNA, 927 bp, Enterobacter cloacae
atggactctgtcgatttgttcagaatttttctcagggtggcggatagcggcagctttgtccgtgcggcggaatcactcaatcgtcctgcctccaccgtttctgccgccattcaggcgctggaatcgcggttaggtgcgcgcttgtttcaccgcacgacccgcagcgtatccctgaccattgacggtcatgcgttttacccgcgctgtcaggctgctgttcagaacatggatgagacagagaatctgttcagggaaaacggccgcgacgtcacggggtctatccgggttgacgttcccggacgcgtcggtagccatcttattattcccgctatgcccgccttttatcagcagtatcccggcatcagaattgaacttggcgtaaccgatcgcaacgttaaccttgctgaagaaggggtggactgtgccctgcgggtggggccgctggacaactccggcatggtggcgaagtgtctgggatatctcagcatcattaatgtcgcgtcagcagcttaccttgccacttacggacagccgcaatcccctgaaaaaatgaaccaacattatttgattggctatgcatcaccgacatctggccggaaagcgctgatggaatgggtggacaagggggaggtgaaacgaacagaagtgaacagcatgcttaccgtcaacagcgcagaagccagcatagctgcctgtgttgccggattgggtatcctgcagatccctgcctatgatgttcatacttatctggccaatgacgttctgtacgaagtgatgccggagtgtcgacctcaggcgttgccggtgaatattttgtatcctcaccggcgacatctttcccgctcagtacgggcgtttacggagtggctgacgccgctgctgcaggaaaaaatgcagcttagccagaagggaggattaccccgataa

SEQ ID NO: 127565 - DNA, 330 bp, Enterobacter cloacae
gtggaaaaaacagtcgagatactgcaatacaccttacgcaaaggcactggcgtcgcctttcacaccctcatgcaggacattagcgtaccccttcatcaacgccacgggatcgatgttgtttcgtctggaaactccctgcatgaccctgattgctactatctgattcgcgcctttgacagcgctgaaagcatggtgacggttcttgatgctttttatgccagcgctgactggcgaagcggcccacgcgaagagatagtgcgttgtatcgaaaccagcattaaaacagtgatgaatctgccatcggttaccgtcgatgggctacggaggtaa

SEQ ID NO: 127566 - DNA, 840 bp, Enterobacter cloacae
atgattcagtccaccttcccggtacgccagattggcaattttgagattaccgcgctcagtgacggcgttctgtcagctcgtctcgatttgctctcaggaattgaaaacgcggcggcaaacgaaatccaggagcatgcaggtgtcgcggaacccggtgatattcacatcaatggctacctgatccggggccgggggagaattattctggttgacgctggtgcaggtggggtgaataacgtggggggtgaccttatcacccatctcgccgcggttggcgtggaccctgacgaggtggataccgttttattaacgcactgtcatccggaccatattggtggtctgctggatgctgaacagcgtcctgtctatcaacatgcagatatttttcttcaccctctggaagcggaacactggtgggacgataacacgctaaacagtgccgatgcgcgtacagcgcgtaatttcaggctcgtgcgccagacgttacaggcgtgtggtcaacaggtgcgttttttcgatgagaacagtgttgccgaagggatcctgccggtctggttacccggccacacgcccggacataccgggtttctcattcactcgcatgacaaggacttactgatatggggagatattgtccactacccgcatatacagtctgccctgccggaggtttgcatcgcctttgacgcggatcctgcactggccgaagcaacgcgtaaagaggtgctggaacgcgcggtcagggagaatctgctcgttgcgggaatgcatatcgggccacaagggtttgcgcgcgttctccgtgtgggaggtggatatcgactctcttactctggttaa

SEQ ID NO: 127567 - DNA, 543 bp, Enterobacter cloacae
atgttctatatcgtggaatgttcgtataacgatccgccaagcgaagctgagtggaacgcgttttatagtcaggagaaattgccctctcttctctccgtgaccggatttatgacgtctcagcgttttcgggccatcacgcctggctgcccggtttatcttgccctgcataccgttaccaacgcggatgttttgcacagcgaagagtaccgtctgaaaggcggcggtaatttttctcgctggcagagctgcataactgactggcaccgtaatctctatgcctgtgaagatccggcgcccgctctctcctgcgatcaaattttgctgttaagcactcagcttgttagtcctgccggacaccgggccatcgacatgcaggccgtggggctggattgttcaccggaacgtcgcgttgcgtgggtgttgcctcgtgaaactgccgtccatgctttgactcttcctgaggtctatctctacgaaccactgacaccccagttgcagcgttcaggcatcaatacgcaatcagaacagcggagtacgcgatga

SEQ ID NO: 127568 - DNA, 903 bp, Enterobacter cloacae
atgcgcaaaaagatacccagtagcgcctctttgcaggcttttgatgccgctgccaggcacggtaattttgcccgggctgcagaggagctctttctgacggaaggggcgattagccgccagattgcacgtctggaatcgctgttaaactgcaaactgtttgaccgtaccgggagccgcgtaaagctgaatcctgctggcgcgcgctatgcccatcatgtacgtgaaactcttgagcggctcgaaagggagactcaggacatcatgggcatgcaggaggggattcagagtctggatattgccgtgctgccgacgttttgcagccgctggctcattccccgcctgagccgctttacctcgcagttccctgagatctcagtcaatcttgcggccagaacggatccgtttattttgcccgggagcggctttgatgccgtcgttcattttcaacatcccgcctgggccgggatgcgactgcagccgttgtttgaggaaaaactggtgccggtgtgtcatcctgcactgttaatggataaggaacccggtgagcaactcaatgcacttgcgcggatccaccgccggcagaatccggatgcgtggcatcgctatgcgctggaaagcgggatcaggcttgataacccgtctcagggcgtacggtacgatcttcatgaaatggcgatcgctgctgtgctggcaggtcacggcgtcgcattgataccacgcatgtatatcgaaaacgaactacgcagcggcatgctggtttcgccatggcctgcctcagaaaggttaattaagacattctgtttcattaaaccggcggaaacgggaatcaatgacgcggcgttagtgacgtttgaacgctggctgctggctgaaatcactacgcctgccagtcactcaaggtga

SEQ ID NO: 127569 - DNA, 546 bp, Enterobacter cloacae
atggttttatctgagaatgcacttttaattatcgatatgcagcagggtcttttcaggggcccggcctcaccctgttccgcagacaccgttctgaacaatatttgtttgttgatagcacgtgctcggcaggctcaggtgcccatcttttttgctcgccatatcggccctgacaacacccccttctcagagcagagcccgttaacgcagctgatacctgaactcgacgtcaataacgaagtggataccgttttcaccaaaagatatcccagctgttttcgcgatacagggctgcaggttttgctcaatcagcgaggcgttaagcagctggtgattgccggaatgaaaacagagttttgtgtagatacgacctgccgggcagcgccggagtcaggattcgcaacggtgctaatttcggatgcacataccaccatggataacgacgttttatccgtaactgacattattgcccatcacaacaaaaccctggctggcccgtttgttacgctctcagccgccagtgactattatttttcatcgggtcagtaa

SEQ ID NO: 127570 - DNA, 234 bp, Enterobacter cloacae
atgcctcgcgactggcgccggtttgaatatccggcttatccgtcgcgcctgcagccagtattcattcagctcataacttatgttgacggtcaggttgggccggtgttattaaagatgagtcgtttcttacgaatacgcataggtcaaaatatgtttatgtcagcccagcctacaaccaccctcaccaccaccggcatctgcggcggcgtgagcgtatctgtaaccggcatctga

SEQ ID NO: 127571 - DNA, 600 bp, Enterobacter cloacae
atgtctgcatcaaacgtcatcaatactgccctgatcgtgacggctcacccgatcgaaacgtcgttatcccatacccttacacagcgaattgccgggaagttacaggaacagggtacacaggttgaaatagccgaccttcatgctgaaggcttctctcccgcgatgatccgagccgatcttgatctgtaccacggtgatgccagcgcgttgcccgacgatgttctgcgcgagcagcagcgcgtcgaacgggctgatatgctgatattcgttttcccgttctactggtggtctgtgcccgccctcctgaaaggctggtttgatcgggtactgacggtgaactgggcctataaagtgggagaagagggccgcattgtgggtaatttacgtgatgtgcccgtgcgcctggtcgcaacggccggcagcgatatcgccgggtttgataaacacggttattcagctgccattcagagccagattgttgaaggggtgtttggcttctgtggtctgaagaacgtgacgctcgatatcctctatgaggccgattctgcctcccctcagcaggtggacgattttctgcaaagcctcaataagcttgtctga

SEQ ID NO: 127572 - DNA, 795 bp, Enterobacter cloacae
atggttaagccccattttactgttctgccggacgcaaccctggcggccatcaataccgttggcaaatggctggcgcaggacgacctgagcgcagcccgtcaggctccggacgtggatgtggtgattctggctggcaacgcggtgatccccaccatcgatgcggcctgccgtattgccgccgcgcagaacgtgccgcttctgattagcggcggcatcggccattcgaccccgtttttgtatgaagccgttcgtcatcacccgcaatatcacagcgtaccggtcgccagccgggcggaagcgagcattcttgccgacgttgcgcgggagttctggcagatccccgaggcgcacctttggattgaagatcgctcaaccaactgcggtgaaaacgcgcgttttagctggaacatgctgaaacagcgtcagcggacaagcgggcagatgctggtggtgcaggacccgacgatgcagcgccgcacgatggcgacttttacccgcgtgtgccgggacgagcccgcgtcaccgcagtgggtcagctttccgggggttacgccgacgctgcaaaacggcacagagggcgtggagtttaggggggataatgcagggctgtggtccgttgagcgctacctttcgctggttctgggggagctgccgcggctgtatgatgacgttaacggctatggcccggccgggcgggattttatcgctcacgtgccctttccggaggcggtgaccgccgcatggaaacagttacagcaggatcctgtcctcaagggggcacgtacaataatctaa

SEQ ID NO: 127573 - DNA, 306 bp, Enterobacter cloacae
atgaaatcagattttcatgttttactcaataaaatcattgagttgcttgtttcaagtaatgaaagtgtttggtcaaagaaactcatctattttcgcgagcagctggactctgattatgatcaggccttgttaggtatcaggtctattttcgcagcggcagggtcttttaacgacttaatactgcaaaataacggcaaaatgctgcgagaagagaacaatgcgcttaataggttacaagatgagctatacagcttaactcgcgcctgccgcaagtcatcgacaggcgcgcgcgggggccgtaactga

SEQ ID NO: 127574 - DNA, 504 bp, Enterobacter cloacae
atgaatgataaaaatgaaaagttacccgggataaatgagagttatcgcttgctgaggtttgaatatgcatttcggcaggtgggatttattgtgttgctgagtattatcatcgcggcgattgccggtctgttttcaagcgggatgatgagtgatacggagaaagcaaattcagcgaaatcgctcaaccttaactatgagcgctttggacggcggcaaaccgaatcgcgactggaacttacctttccggtaacgactgagggcaaatacacggtcagtctgaccagcgagtccggcgacgcttacgagcctggcagcatctggccacagccagacagcatgtatagccgcgggaacaccctctacttcgtctataatcaccttgaaatttcagaacatttttcggtctggttatttataaccccctcaaaagccggcaaatggaacaacgtcatccgcgtaaacaccctgccggaaattcatttctggcaatttatttacccctag

SEQ ID NO: 127575 - DNA, 1506 bp, Enterobacter cloacae
atgcaatattcctccgcccctgtggttgaaacgcgctacggcgcactggctggttttactgatgataatgttcatgcgtggtacggcattccctacgccgcaccacccgtcggcaatgggcgctggcgctctccgcgtccgcccgagcgctgggacggcgttcgccaggcgtcggcgttctcttcctcaagctggcaaagcagcgaatattgtcaggagctgggtgggggcgatcccggccagttttctgaagattgcctgtatctgaacgtctggtcgccggttcaccgtgctgagccgctcccggtgatggtgtggctgcacgggggtgggttcaccatcggcgcgggtggattgccaccctacaatggcaaagcgctggcaggacgcggcgtggttattgtcaccatcaattaccgtctcggccatctcggctttttcgcccatcctgcgctggagggggaagaagatcgcgtggtgcataattttgccctgctggaccagatcgccgccctcgaatgggtgcgggataatatcgcggccttcgggggcgatcctgagaacgtcacgctgtttggcgaatccgctggcgcacgcagcgtgctgtctctgctggcatcgccgctggcgaaggggttattccataaggcgattgtgcaaagtggctataccttgccggatactccgcgcgagcaggccctgaaaaaaggggaagcggtggccgcgcatctggggctggagaacgcctcagcagcgcaactgcgtgctattccaccggaggcattctggccactgaccgcgccgctgaatatcgccccggcgcctgtcgtcggggattgtgttctgccggaggcgatgctggatgtcttcttcgctgcccgccagcatcctgttccggtcatgattggctcgaacagcgacgaggccagcgtgatggcggtgtttggcatcgatctcgccgggcagattcagaagcttcgccgggagcgacgttttggtctggggctgattaagctgctctatccgggcgtgaaaggcgacgaagagctgggacggcaggtgtgccgggacatggcgtttaccacgatggggtacgtggtcatgcaggcccagcagcgcgttggcgcgccgtgctggcgctactggtttgactatgtggccgaagcggaacacgccacctatatcaacggtgcctggcacggcaatgaggtgccgtatgtgttcgatacccttgcagaggtggaaccttcccgccactacgtgaacgatcgggatctacagttcgcggcccaggtggccgactactgggtgagctttgcccgggatgccggccatcgtgacagcctgcccgggccgacacactggccagcctgtcgcaaaggacgggacgtgttgttacgcataggtgtgaataaacatgcaggttttaagcttgaaaaccgctttatgcgcgcccgcatgagtctctttaaacgggtgatgaagcaccacgtcagcctcgattaa

SEQ ID NO: 127576 - DNA, 588 bp, Enterobacter cloacae
atgggctttttgtctcttttcagcggacgtgttttccaggatcttctgcaacatggcaaagagacagaggaggcgattgctcgtcgtgatacccgtcttttgaatcattccacccccgagctggaacggtatttttctcgccccctcagcgagctgccgcgtcaaaacccttacccggtggcggcgctgttacctctgtttttagtggcgtttgcgttaaaccttctgccttttctcagcgcgttgccgggtttgtcacctttacagcatgcactgagctttttcgtaccatcattaataatgacaggtgcgctcattgttatcagcgtgcttctggcccgagggatgacgtcaggattgttgggggttatgacggtgttaatcattctgctggtcgtgacactcgctcaggggctgcatctgctgttttctcatgacggaagcctttggccactggtcatcgcatcctccgcgctgatactttgtcggagggtgatgaacagcagcggctttgtgctgtttaccctctattgtcgcactcagcgtcttgccagcgtggctcgtgaaatccggttaaaaagccgttaa

SEQ ID NO: 127577 - DNA, 621 bp, Enterobacter cloacae
atgcccgtcactgattcacttcttgcttatatcctcgctgcaactcttctgaccttaacgccgggtattgataccgcgctaatcttacgtaccgcaaccgttgaaggtggtcgcaaagctttccacgcagcgttaggtatcgatatgggatgttttatctggggggcattggtcgcctttgggttaggtgcgttgttggcggtgtctgagtttgcttatacattgctgaaatggtgtggagcggcgtatctttgttggttaggcattcaactgttaatgcgcccaagacagcaattcagtatgcatccggaaggtgctaagcctacgaacaactggttcctgcgaggaatgttggggaatgtgcttaatccaaaaatgggcatcttttatgtttcattcttaccgcaattcattctaggtggacattcgccagttgtctggacatttcttctggtcgcgatccacgtagtcattggtacgctgtggtcactgacactcattattgcgacacgttatgccgcagcggttttgaaaaagcctgcagtagtgaagtggatggaccgttccactggatgcttgtttcttctttttgctgcaaagttggcgatgagtcgaagatga

SEQ ID NO: 127578 - DNA, 453 bp, Enterobacter cloacae
atgagcaagatgatgcatgaccagcattctgcttccgtacccgcttcccgggatcgtcgcaattttctgatcgccggcgccggtctggcgttggccgccaccccccttggcaggagcggagccgtgatggctaaaccggctggtcaggacacgtcgagcgccccttcgggtgctgttcccgtccagaaggagaccttaaccacgcgtaaactcggctcgctggaggtttcaagcatgggactcgggtgtctgcctatggtggggtattacggcggtggtccgcgcgatcgtaaagccatggtttcgctcatccgggccgccttcgaacaaggcatcacgttctttgatactgccgaggtgtatggcccccatcttacgcgaaatcgatgcagcgcttgccaggatcccattgcagggcggtcgcgcagatccgtttaccgaaagtcagtttga

SEQ ID NO: 127579 - DNA, 987 bp, Enterobacter cloacae
atgaactatacgcatcttggccgcaccggcctgaaagtcagccgcctttgtctcggaaccatgaattttggtgacgtcaccgacgagaaaaccagcgcccgcattctggatgaagcgcttgaggcgggtatcaatttcattgatacagcagacgtgtatggcaccgagcaatcacccgatatccagcaaggttcggggctgtctgaagagattattggtcgctggctccagcaggggggccgccgtgaccgtatcgttctggcgacgaaagcctatcagcctatgggatcaggcccgaacgatcgccgtctttctgcttaccatattcgcaaggcctgcgaggacagtttgcgacggcttaagaccgaccatattgacatctatcagatgcatcacatagatcgttatacaccatgggaagaggtctggcaggccatggagctccttgttcagcagggaaaagtgctttatatcggtagcagcaatttcgcaggctgggacattgcgactgcgcagtcagtggccacggctcgtcattccctgggcctggttgctgagcaaagtctctacaatctgactgcccgaactgttgagctggaggtcattcccgcatgccgtcattttggcctgggactgattccctggagcccacttgccggagggttgcttggcggcgtactgaaaaagatggcaagcgggcgccgtgcgaggcccgcgtttgcccgtctaatcgaacagtatcgtccgcagctggaagcctacgaaggattatgtgaggacctcggcgaaaccccttccgatgtggcgcttgcgtggctcctgcagaatcctgtcgttactgcgccacttatcgggcctcgtacggtcgagcaactccgggaggcgcttcacgcaacgacaatcacgctatcagacgacaccatgagctgtctcgacgaaatctggcccggacccgggggagaagcgccccaggcttatgcctggtaa

SEQ ID NO: 127580 - DNA, 900 bp, Enterobacter cloacae
atgaataacgccctgtataatcagatacgcatttttcagagcattgcacgtgagggcaatatttcggcagccgcaagaaaactggaaattacgcctccctccgtcagcaatgcgcttaaattgctggaagagcatattggccatccgctttttgtgcgtacgacccgccgtattgagctgacggaaaccgggcagctgttgctggaacagaccgccgcggcggtggagtcgctggaaaattcgcttgaaagcattcgcgaccagaatcaggagccctctggtgtggtgagaattacgctatcgcgttttgcctatctgttaattcttaagcctgcaatggcggaattctgtcagcaatacccgggtatacagctggaaatttcggtttacgacggtaccgtgaatatcatcgaagagcgttttgatcttgggatccgttttggcgatatcctcgagggtggggtggtggcgcgaccgttaatgaaaccctttcgtgaagggttatatgcatcctcagcttatattagcgagcatggaacgcctgaggtgccgtcagacctcagtcaacacaagctgattggctaccgttttattactaacaaccgcatccttccattgatcctgaatgaccgcggagagcagttgacggttgagatgcccgggcagttaatcagtaacgatatcgacgttatggctgacgggatccgtaacgggctgggaattggacgcctgtttgaacccatctggcagttacagcccgacagggagcactttatccccgtgatggagagttactggaaaacctacccgccagtctatctctattaccctaaaaatgcgggtaaaacgaaaagagtgaaggccctgattgattttctgatatccgctacggggcgataa

SEQ ID NO: 127581 - DNA, 405 bp, Enterobacter cloacae
atgtcgctacatggtatgtctgattcttcgccggttgaaacattcagttatttagcgactcaactcgacgctattggcatcgcctaccttcacgtaaccgaaggtattgccgggcccgatgctccggtcgcaggttcacagcggattgcaccttatcttcgtcagtgtttctcgcgaacttttattctgaatggtggatatgatgctcagaccggtgaggatgcaattaacaagggtgaggccgatctcatcgcctatggtgttccatttattgccaatcccgatttacccgcaagatttgcgtgcggcagcgatctcaacgttccggatcctgcaaccttctatgcgccgggacagaacgatgcggtgggctacactgactatcccgcactaaacaaaagttaa

SEQ ID NO: 127582 - DNA, 690 bp, Enterobacter cloacae
atgaaacctgcagataaacccgtgctgtgtgtcgtttccagccatccgattaaaggcgcatccggtgtaccaaccggttttttcctggctgagttgacgcatccgctgaaagtactggaagatgccggactaaaaacgacgatagccagcattcgcgggggacagccgccggtggatggatttgacctcagtgaccctgtcaacgcctggttctggaacgaaaccgattttcagcagcgcctggccacaacgcctgcgttatctgagctgaacggttccgattacagcgccgttttctttgcgggcgggcatggaaccatgtgggatttccgcgacagccaggatgcccagcgtattatccgcgaagtgtatgaaagtgatgggattgtcgcagccgtctgccacgggcctgcggcactggttgacgcaaagctcagcagcggcgaatacctggtgaaaggcaaaaacgtggcggcctttaccaacaaggaagaggaagaagttcacaccaccgatgtggttccctacctgcttgagactgcactccgcgagcatggcgcgcttcatcatgaagccccgaactggtctgaaaacgtggttaccgacggacgccttatcacggggcagaatcccgcttcagcgcacggtgtcggtgtggcgctgttaaatgccctccgccagccaacttaa

SEQ ID NO: 127583 - DNA, 948 bp, Enterobacter cloacae
atgaaatctcttccttcagtcgcgctcggcacatggtcctggggcacaggctttgccggtggcgacaccgtcttcggcaatcatctttctgatactcagatggcagacgtgttcaccacggccatgagtaagggtctgaatctctgggataccgcagcagtatatggcatggggagttccgaggcagcgctgggagcattagtccgtcagttcccccgcgaggatatgattttatccaccaaattcacgccgcagattgcgaacgaacagtcagcacagcctgtcagcgatatgcttgaggccagcctcggacgcctgggcgtggacgcgattgatatctactggatccacaatcccctcgacgttgagaaatggacgccaggactgatcccacttttacaaagcggtaaggtcaaacgcgtcggggtttccaaccacaatctggcacaaatcagacgcgccaacgaaatccttaacgcttccggttattccctcagtgcagtacagaatcattacagcctgctctatcgcgcctctgaagaggccgggatccttgattactgccgacaaaataacatcacgttctttgcttacatggtcctggagcaaggcgcgctcagtggtcgttatgattcaaatcatcccatgcctgccgggagtggccgggccgaaagttataacgcagtactgccgcagatagaaagattaaccgccgccatgaaaaaaatgggagccgaaaggaatgccagcgtggcacagatagccatcgcatgggctattgcaaaaggtacccttcccctcgttggtgcgactaaagtccatcacgttctggacgccgcctgcgcttcagacatccagttacgcgatgaggaaatcatcctgctggaacaactcgccacagagaccagagtggatacacgaggcgcctgggaaaaaccgatggtgtaa

SEQ ID NO: 127584 - DNA, 1035 bp, Enterobacter cloacae
atgaaaatcatttgcctcgaagaacattatctcgacagcgagttagggcgagcgtgtatgcctgttgcgcttgagcaggcacctttccttggcgactgggggaaaaccgtcgctgatggtcataatcctgaccgaagccggccgcagatagaaaagaatgcgctgataaacgcgaaaggcgctgatttgggaagccgccgcctcagggatatggatgaggctggaattaccctgcagatcctctctgtgggcggattcccccagctggctcccggtgataaagcggtaacattaaatacggcggcaaacgaccgccttgccggggcggtaagaaatcacccggatcgcttcgcggcatttgccacacttccctgggcacagccggaagaggctgaaaaagagcttgtccgcgcagttgaaaaactggggtttaagggggcacttctgaatggccgaccctcttcatgctttctcgatcatcctgactatgactccctgctttcccgctttcataaactgaatgtgccactctatcttcatcccggattaccggttaaaagcgtgcaacaggcctacttcacgggcttcagcgcagaggtcaacgcccggctctctatgtttggctggggctggcatcacgaagccgggatccatttgttacggctgatgttatcgggcgtatttgataaatatccccacctgcaggtaatcagtggccactggggggagatgctgcccttctggctgcagcgtcttgatgacagccttccgctggctgcaacgggtctgtcacgcacgctaacgagaaccttccaggagcacgtttacgttaccccgtcaggtatgctgacactgccgcacttccagtttatctacgcgttaatgggggcagacaggatcctgttctccgttgattacccctatcagaccctggacggtgtaaaaacatttatcgacagtctgcccgtcaacaaggctgaaaaagaggccatcgcgtttcgcaatgcagaacgtttactgggcatcacggcgtag

SEQ ID NO: 127585 - DNA, 573 bp, Enterobacter cloacae
atgaaaaatatccttgttatttcaggtcatcctgagctgaaccattccgtcgccaacgccactatccttgatgaagtggcaaccgcccttcccgatgctgaaattcgtcgtctggactggctctatccggacggcaaattcaatatcgctgcggagcaggaaagcctgctcagggccgatgtgattgtctggcagtttcctttttcctggtatgggctgcccgggttaatgaaacaatggctggacgaggtctttgtccacggcttcgcgcatggctcaacggcgaaactgggcggtaaaaagctgatcctctccttcactacaggggcgccacaggcgctctataccgctgacggtttctttggccatgccattgaagagtatcttattccgttcgagaccacggcaaaactgtgcaatcttgagctgctggcgccggtttatacctgcggtatcagctatgccgaccgggatgccgacaaaatcgcgcagcataaaacgcttgcccgggaacatgcttcaaggcttgtcgatctgcttaattccgtcgtgaataatccagagggagaataa

SEQ ID NO: 127586 - DNA, 1020 bp, Enterobacter cloacae
atgcagtatacccggctcggtaaaagtgacttactggtctcccgcatctgtatgggatgtatggggtttggcgacccgttaacgggccagcatcgctggacgctggacgaaacagcaagccgggacatcatccgctacggtctcgaaaagggtatcaatttttacgataccgccatcgcctatcagaacggttccagtgagcgatacgttggccgggcgctgcgggagatggcaaaacgcgaggatgtggtgctggccaccaagtttctgccgcgaaccgccgcgcaaattgccgcggggatcggcggaaaagaggcaatagcccgatcgctcgaccagagcctgcaaaatctggggatggactacatcgacctctacatctaccacatctgggattacaacacgcccgttattgaggtgcttgaagcgcttcatgccgccgttactgcgggcaaagtgcgcgctattggtatttccaattgctatgcctggcagcttgcgaaagcgaacgcccttgccgaacgcgaagggctgacgccctttgtttccgtgcaaagccactacaacctgattatgcgtgaagatgaacgagagctcttcggtctgtgcgctgaagatgatatcgccatgaccccctatagcgcgctggccagcggtcgtctctcccggaaagaaggccacacgcggcgagccacggaggatgattatgcgcgcgggaaatatgacagcacggctgaacaggatcggctcattattgagcgtgtcgccgaacttgccgaacggcatcaggtgtccatgacggaaatctcactcgcctggctgctgacaaaagtcacgtcacctgtcgtaggggccacaaaaaaagatcacgtcgatggcgcggtaaacgccgtaaatcttcaactgagcccggaggaaatccggtttctggaagaaacctaccagccgcacgttctgacggggatcatggcgcaaaacacgccgcaaacgaaagacgccaggcaggtctggacgcggtag

SEQ ID NO: 127587 - DNA, 378 bp, Enterobacter cloacae
atgatttttaaaacagtggtagccactcttttcaccctctccgggcacgcgtcagccctggcagcaacgcctgcttattacatcgcagagtttcaggcgaccgatcttgacgctatcaaaccgtacagcgctcaggttgaatctaccttcagaccttttggtggacgcttcatcgtcagaggaggtgaacccgatgttaaagaagggtttggagcacagggcagactggttgtaatcaagtttgagagtctcaaaaatgcccaggactggtatagctcggccgcataccagaagatcattcctatccgacaccgtgccggcaattcgcgaacctatatcgtagaaggattgccagaactggctcctgttacaccatag

SEQ ID NO: 127588 - DNA, 606 bp, Enterobacter cloacae
atggtgttacttcagcgcagagcagcagcattgtttttgtttgcctttatcttcctcatgcccgctagtcatgctcatagccgtgaaaagaccgacattaaaacgctcgttatcgtctctcacccttatccggaacgctcagttctgacaaaagggctgcaggaagccgctgagagtctggaaggcgtgacggttcgcaaccttgagacgctgtatggctatgacacacgtcggattaatggcgacgcggagcgaaaaatgatgcgtgagcacaggcgtgttgtttttatcttccctacacactggttcaacattacaccaatgatgaaggcctggctgaatgaaacctggggaagtgtcggacccggtctttggcagggaaaggagatgtttattgtcagtacggctgcggggggaagctccacttacgggccggacggcaggatcggggtatcgcttgcggatgtgtttttaccgatgaaggcaagcgccctgcatgcaggtatgacgtggcttcctcccctggtctttgagagcgccagcagcgatcggttaccttcttaccaacaccaacttatagaacgtcttaaacagccatttcagtaa

SEQ ID NO: 127589 - DNA, 726 bp, Enterobacter cloacae
gtgaaaaagactcttatgcttttaatttgcatgctgataagcagccctgtctttgcaacaaaactggacgcgccggataagcgagtgatgaatctctttgagctcggcgtcaggcccgatcgggacaaagattttacagacgtagccagacagacgatttccgcttcggttgatcatgaagcaggtacgctggcgatgtacgccctgcaccgcagcgacaatccacgtcaggcattcatggtcgaactctatgaaaaccagagtgcttaccgcaaacatctgaatgccgaaccatacaaggcattcgctgcccgggcacctgacattatcgatcggaaaaataaaatcactcttgagccccaatttctgggggacaaacacatcataccggatgagcgaaccattaataatctggtgatcgtcgaggtaaagcctgaatttcagaccgaatttaaaaacatcgtccttcctgaaatggccgagtcgctcaaagtagagaaaggcgtgttagccatgtatgccggtacagattcagagactccaaaccgctggtatttctatgagatttacgccagtgaggaggattatcaactgcaccgacaaacgccgcacttcctggattacctcaggcaaacggcgcatatgagcgccaggaaagacgctatcccggtaacaccggtatttcttcgaaacaaaggcggaatcaaacaggatccgcaccgttga

SEQ ID NO: 127590 - DNA, 804 bp, Enterobacter cloacae
atgaaaagcgtacttgcagcggcggctatgtcgcttgttatttctgattttgccaatgctgaggaaacaagaggtaaagcgatgatgaaaattgaaccttcagcgatttcggaagctgatattcggtccgtctcaccggctcttgcgcgctttggtcgagaagcgattactgaagatctgtggacacgcgacgccctctcacccagggatcgtagtgtggtgaccgtcgccatgctgattgcccgcaaccagcctgccgagcttaagcactatatcgacgtcgctctcgatagcggcgtaacgccagcggaattatcagaaatcattacccatctggcgttctactcaggttggccaaatgccatgtcagccgtcagcgtgaccaaagcagtatttgaaactcgtggcgtcacggcagatgcacttcctgacgcttctccgaacctgcttcctctcaatcagcaagcagaaaagcagcgttcagagacagtggaaaaaaatgttggcccaatatctccaggcctggttaaatttactgctgaccctctgttcctggatctctggcaaagacccgcgctgaaaccccgcgacagaagcctgattacggtcagcgcgttaatcgcatccggacagagtgcgcagattggctatcacctcaacagagcgatggataatggactttctgctgaggaagctggggagatcgttacccaagccgcgttttacgctggctggccaaacgcatttacctctgctcctgttgtcggagaggtattaagcaatcgctcatcaagtaaaaggtaa

SEQ ID NO: 127591 - DNA, 375 bp, Enterobacter cloacae
atgctctggaatcctgaattattagcaagaatagatgcggctgacgacctgaaaatcgctccgtatcatcccgacatgaatacgaccggtacgccgacatggatttgggaagtgaaggtggataatcgactcttcgtccgagcctatagtggtacccgtccaaaatggtatcaggctgcattgtctcagcaggcgggtaagatactggctaacggacaggaattcgacgtactgttcgcaaaaccatcagaccctgagcttgaaagtaaaattgatcaggcttaccagaaaaagtactccggcagcagctatgtttccgcaatgatagggacacgcgcgaaagcggcaacgattgagattttacctttaagttaa

SEQ ID NO: 127592 - DNA, 1080 bp, Enterobacter cloacae
atgacgctaaattcttcaactcgtttttttaatggtgcactccttgccggtgcgatggctctgatttcaacagaatctgcggttgcccagcctgcaccaggcacagcagactcttcggcgcgtctggttcagacgtgggataaaaccttcccaaggagcgacaaagtggatcatcaaaaagtaacgtttaaaaaccgttacggcattacgcttgcggcagatgtgtatcttcctaaagatcgcgggaataagaagcttgctgcgcttgtgatttccgggccttttggcgcggtaaaagagcaggcctcaggtctctatgctcagaccttagcagagcgtggattcgtgacgctggcatttgatccgtcttataccggtgaaagcagtggtgaaccccgcaatattgcttcacctgatatcaataccgaagactttatggccgcagtcgattttattggactgcaaccttatgtggatcgtgaacgtatcggtgtcatcggtatctgcggtatgggggggattgccctgaacgctgttgccgtggataaacgcgtaaaagcggtcgttgccagcaccatgtatgatatgagtcgcgtgatgtcgaaaggctacaatgacagcgtaacaccggcacaacgcgagcaggcactcgagaagatgagccttcagcgctgggaagatgcggcaaaagggaaaccggcctaccagccagcttacaataaactgaagggtggggaagcacagttcctcgtggactatgcggactactacatgaccaaacgcggatatcatccacgagcagttaactctggcaattcatggtcagtgacaacgccgatggcctttatgaatttcccgctaatgacctatattaaggaaatttctccgcgcccaatcctgttcatccatggcgaaaaagcgcattcgctttacttctccaaaacggcttatgaagcggcaaatcagccaaaagagcttctgattgttaaagatgccacacatgtcgatttatatgatcgtatggacaagatcccgttcgataacatcactgcatttttcaacaaaaatcttaataagtaa

SEQ ID NO: 127593 - DNA, 915 bp, Enterobacter cloacae
atgatttcaaacaagtcggttgagaaacgactcgacgaactctcgcggaatattgctcagcgcacgcccgataccggtgattttcccaccgctgtcgaagggctggaattattccggcgaaacgaacctgctcctccggtgagctgcctggtgccaccgagtatcgttctggtggctgacggcgagaagataatgtgggttggaggcgaaccttatacctataatgcgaaaaaattcctgatcacttctctcgacttaccagccagttcggaagtgttacacgcatcagcatctcggccgtgcgtcggcatagcctataaacttgaccaacgcgtgctgatggaattaattacgcagggcggcctgccgccagtgaaaaaacgtgatgcgggaacaggtgtcggtataggaaccatgacagatgttttgcttgagcctttctgccgcctgctttcattgcttgacgagcctgaagccattcctgttctcagcccgctgattcaacgggagatacattaccggcttttaatgagcgatcggtccgatcatctcagacagattgcagcagtagacggccatggctaccgtatcggtaaagctatcgactggttaaagacccatattgcttcgcctttacgcatcgaggaactggcgagtcgggttcagatgagcacgccctctttccaccgacatttcaggcagcttgcgggaatgagtccgctccagtatcagaaatggctgcgcctcaatgaagccagacgactcatgctgaatgagcattacgatgtcaccacagcggcctatgctgtcggttacgaaagcttatcccattttagccgggaatatacgcggatgtttggtgagtcgcctaagagggatattaccgtgctgagaaagtctgccggtgaaatttaa

SEQ ID NO: 127594 - DNA, 246 bp, Enterobacter cloacae
atgaggagcaaaaatattgctaaaaattttcaaaaacatcgtaatcaatgtggtttacgcttttcgcggctgacgaatggaaacagcataaaaatgagaacctgtcataatgccgatctgttcgcgcttttaaatcaggttgtttattcatcaggttttatattgatgctttttaaatgccctatttcagttgttgagattattcctataatcacccaaaaaaccttctatttaacaataatctaa

SEQ ID NO: 127595 - DNA, 957 bp, Enterobacter cloacae
atgagaagaatcaggatcgccgtcgcggtaacaacccttgctatgtcgctgtctctgctggcaaaaaccccggaaaactttatctataccagttctggcgatctcgatgcggcattccctcttatcgcgcgaagcgacatcggcggcgtgcagatcgtatacaactggcgagcgctggagccagcgaaagacagctatgacttctcgcagatagaacaggatctggcgcgccttaaggccgccgataaaaaactttttattcaaattcaggatcgctttttcgacaaagacgcccgctatgttcctgactatctgatgaaggataagcaatacggcggcggcattgcaccgcagtttgataacccgggtgaaggcaaaccggtcgggtcgggctgggtggctcgtcagtgggatcctgccgtgcgccagcgatatcaggcactattggctgctattgctaaacagtttgacggccgggtgtatggcgtgaacctgcccgaaacggcgattgatcctgacgagaaaaatccaccaaaggggttttcatgtgatacctattttgccggcgaaatggaaaacctggcctatgcgcgaaaagcattcaggcactcctatgtcgtacagtatgtgaatttctggccgtgcgagtggaataatgaccacgattacatgggacgtctgtttgcgttcgccagtgccaataacattgggcttggcggtccggatattgttcccaaccgcaaggcgcatatgaagaatgcctacccgttcttcaatcagtacaaagacaagctctcgctcgttgccatggccgttcaggaaccgaccctgacttatcgtaacccggagacaggaaaaccgttcaccaaagatgagtttgttcagtttgcggagcgttatctcggcgcggatatcatcttctggagcacggcctccccgtggctgaaggcaaaataa

SEQ ID NO: 127596 - DNA, 819 bp, Enterobacter cloacae
atggtaagcaaaaagaaaaccagtgtcgctgttgatgtcgttaagaatgctcctctgaaaacaaaagagtatgaaaaagagctacgccgccttcacgttgagctggttaagctccagcaatgggtggtcgctaaaggattgaaagtctgcatcgtgttcgaggggcgcgacggcgccggtaaaggcggcaccatcaaagcgatcaccgagcgcgtcagcccgcgcgtattccgcgttgtcgcgctgcctgcgcccactgagaaagagaaaacgcagctttatttccagcgctacgtcccgcacctgcccgctgccggtgaaatcgtcatatttgaccgcagctggtacaaccgcgcaggcgttgaacgggtgatggggttctgcacgccggagcaggtcgacaagtttcttgatggcgcaccggtgatggaaaaagcgatggtggatgccgggatcattttactgaaatactggcttgaagtgacgccgaaagagcaggaacgcaggctacgcgatcgcatcaacgatggccgcaagatctggaaattatcgcctatggatatcaaatcgttcaatttatgggatgaatacaccgtagcgcgggatgccatgtttgcttcaacggataccgcctgggcaccgtggtttgtggcgcgctcggaagataaaaaacgcgtgcggttgaatattatctcccatctgctttcgcagatcccatataaagaacttcacgttgaaaaagtggatttgccgaagcgaaaaattggcaaagtcaaaccgacaaaatatcctttcaggtatattgaagagaaattctga

SEQ ID NO: 127597 - DNA, 324 bp, Enterobacter cloacae
atgtgctttcagttcgatgtttatcgtaacccatcagacaagacgcgcgagtatcagccttattttatgataattcagcatgactattatgatgatttatcaacgagactgattgttcctttgagctatcaaaataatttacatgggcattacaacgccgccgcaccattagtgaatattgaatttgagagatattttctcaataccgctggtataacacacgtggaggaaaagagattaaataataaaaactatgtatgcaatcttcgcagcgcaagaagtaccgtgattgcggcgatagatgcgttagtgacaaatacataa

SEQ ID NO: 127598 - DNA, 1146 bp, Enterobacter cloacae
atgaacctgacgccggggggcaatgccctcgttccagctcaagagctgcggatccggatcacctctggtgagctggtggatgcttctgcgtttcgcctgtttgcaaacggaaaggtgcacggtgatgcggatatggtgttttatggccagccacgcaacgatgatgataccgttagtctggtcagtgaaggccagtattcaacttttactgttgcgctcaaccagctaaaacctgatgttcaaaaaattgcattcaccgtgacctgtgacggcgggcaaacggtatctggtcttcgtcatctttctatcgatgtggagctggggactacctgcctggttagcggcgttgtcgaactgagcggccgccaggaagcagccttaattctgggtgaattttatcgtcttaataatgactggaaattccgcttcgttgcacagggttttaacggcggacttaaaccgttggcagaacatttcggcgtaaatattgccgacgaaccagctccgactcctccggttgcaacccctccaccagctgagacaaaaatcagcctgagtaaggtatctctgactaaagagaagcctgaaatcagcctgacaaaacaggataacttcggtgaaatccggattaacctgaactggcaccggggcagtaaatccgggtttgcaggtatgtttggatccaaaggtatcgacctggacctgggtgcatttgttgagcttcaggacggttataagtcggtcattcagtccttgggtaatgctttcggtgattaccacgatgagccttacgttcagctcaaaggtgatgaccggactggtgatgtatcagacggcgagtggttatatatcaatggccgtgaatggaagcatattcgtgaagtgctgatatacgcctttatttatgaaggcgttcccagttgggataagacagatggtgtggtcaccattcacgttccggatcaacccccgattgaaacccggctgacagagggtgaaaaccgtcgcacattgtgcgccattgccagactcataaatcaaaacggcgcgattaaagttgagcgtatcaaccagtacttcaaaggccagcagcagatggaccaggcgtttggttggggatttcgctggcgcgctggttctaaataa

SEQ ID NO: 127599 - DNA, 372 bp, Enterobacter cloacae
atgctcgcacctgcggccgatctcggtcaagaggtctccgtccgcaagggggagcgagttttgattctggggacaggggagttcgtctgggagccgttcctgcttgctgaacggctcgaagctgccggggcaaaggcattttacggttcgaccacccgctcccctatcgccgttggttatgccattaagtccgcaatttcctttacggataactacgggctgggcatccccaattttgtctataacgtcgcccaccagcagtttgaccgcattcttgtgtgtactgagacacccgcagaaagtattgacaggcagcttctgaaagctctggctaaggttgcgcccatcgtggagattgttacctatgactaa

SEQ ID NO: 127600 - DNA, 195 bp, Enterobacter cloacae
atgagtgaccatgagggcattttgaatgacctctatttgacgtgggtgaatggctgttttaccaacgagcccatgcgccatatcaagagccagttctctggtcatgactgcatgatcatcaatatgctcacatacgggcgcggtcagggcaaaatcacgcgggccgaagaccgaacgagcattttgatgacgtaa

SEQ ID NO: 127601 - DNA, 231 bp, Enterobacter cloacae
atgccacatgtagatatcaaaagttttccccgggatatgaacgacgaacaaaaaaacgcactggcggcagatattgctgaggtgataattcgtcatttcaacagcaaagacagttcagtatcgatcgcgttgagccaggttaatcctgaggactggaaagcgcaggtctgggataccgaaattggcccgcagatggatacgctgattaaaaagccgggttattcaatgtaa

SEQ ID NO: 127602 - DNA, 186 bp, Enterobacter cloacae
atgccggtcttgattgaaaacaacaatgggtgggtaatgtctgcaatgggaagaacagaaataatcctcaccataattattttaatgcttattattttcggattgtggtttatctttagcggcgagatctggttagtggcggaatatattgaaaacagcatttatcccactttcgacgcgctgtaa

SEQ ID NO: 127603 - DNA, 387 bp, Enterobacter cloacae
atgaaaattctgaatatactgacccgtcaatacatcatgattagtcgttttgacgaaacggttgccttttatgaaaccttgattgcacaggaggcaagactgcgcttcgactatcccgaatacgacctcaaactggcccaggtgggttcggtgcttttaatcggcggcaccgataagagcctggcaccttttcgcgccacccaggctacttttctggtcaacgacattgccgcctgggagaaacatctgccctctaccggcgcgacaattatcaatccggtgaagcgcgttcccactggctggaacatgctggttcgccatccggacggcatgattgccgaatacgttgagcatcaaagcaaaaatccagtggatgagatcttctga

SEQ ID NO: 127604 - DNA, 204 bp, Enterobacter cloacae
ttgatcttcccgcgccagggctgtgtcgccgtcgtcgccgataccggtgccggacgtgatgataaagggccgatcgctgcctttcagcggcaggctgatggcgtgaataacccgttggtctttttcacaactatcgacaaaatggtgaaaatcatggtcaaacttgcggcgacgcgctatgtgaatgtgccgcctggagagtaa

SEQ ID NO: 127605 - DNA, 915 bp, Enterobacter cloacae
atgatgaataaccgttctttcatattagtttttggcgcgacgggtcagcagggaggttcggtggcaagagcactgataaacaaaggctggccggtgcgtgttatggtgcgcaatccatcctctccggcatcactcgcccttcgggatgccggggctgaaatagtcgccgggaactttgacgatatcgaggcgatgaggggcgcaatgacaggggcatacggcgtcttcagcgtccagcccagctcgccgggagggacagtgaccgacgacgatgaagttcgctatggcaagacgatcgccagccttgcctccgaatgcggcgtgcagcatctggtttattcttcaggtggtgcggtgagcgatcggccaacgggcgttgcgcatttcgacacaaaagcggaaattgaacggcatatccatacgctgccaattgtgtcgaccatcgtacgacctgcgacttttatggatctgttggtcatgccaggtttcgggcttgatgaggggcaattccacttctttatgcagcctgatggtgcgatgcaggttctcgcggtagaagacatcggcaaaattgtcgccgcgatttacgctcaaccggagcgattcaagggcaaaacatttgaaattgccagcgatgttgtcactggcctgcagcttcaggagctgttctcagcagcggcaggacggctgattccttattctcgtttttccgatgatgtgctaaccgcgaatcccttcctgcaaaagttgactgcgctggcggatgatggacggctggtagggcatgcctccctggaggagatgcggcaactgaatccgcaactgcaatcctttgagtcctggctggcgggaaatgggcgtggtgctttcgaacgggcgctggcaatctctgccaactgggagtttaaccggtaa

SEQ ID NO: 127606 - DNA, 843 bp, Enterobacter cloacae
atgaaacagtatcgaacaggcgacagcgtgatttttaaagtactggaacgtgaaattcacattccggcagcggatttatatccagactctctcctgtcagcagattcagatgaggctaaccaacctgttgcgctatcaatacatagttgggtcgtccgcacccccgacgatattattgtgattgataccgggaccggtaacgaccgcgatcgcgggaataatccgctttatcatcagttagacaccccctatctggagaactttctggcaacaggtatcaagccggaagaggtgacgttggtattactgacgcacctgcatactgaccatgtcggctggaataccatcttgcgtgaaaatcgatgggtgccgctgttccctaatgcgcgatatatctgctctgagaaagagctgatgcgggtaaaagacagcgagcgctaccggaatttatggctcgacagcctgctgccgattattgaggcgggcttgctggaaacggttgacgttgccgcgcagccgctgttcggcggcagaatacactatacgccgacgccagggcacagccccgatcatgcggcattgatattgtcctgtggcggtgaatatgccttttttgccggggatatcgtgcattcgccgttacagtttgcccatccggaatggaattcggtgttttgcgtcgatcgcgaacaggcggaaacgtcgcgacgccgggcgatggcgtggtgcgcagaacatcatgccctgtggtttagcgcgcatttcgccggacagtcgtgcggctggctgaacgtcgataagcatgggaactatggctggacggaggcgagtgacagtaaatga

SEQ ID NO: 127607 - DNA, 927 bp, Enterobacter cloacae
atgatgaagaaaatcattgaaaatgatttcagccgtatagatttgaatctgctgaccgtgtttctggtgttataccgagaagccagcgtcacccgtaccgccgaggttttgcatcttgggcagcccgccatcagcggggcgctgaaacggctgcgcgagatgttcaacgacccgctatttgtgcgcagcgctaaagggatgctgccgacgccacgcgccgaagcgctgatatcccatatgcagccgctgatggaaaacctgcatacggtaatgtttggcgtacaggacttttctcccgctaaggcaaaacacacctttcgactgggcatgagcgactggagcgagcactggctgatgccggatttattgcccgccattgctcatgaagcaccgggcgtggagctgcatattgtcaccgccgatcccttccaggtccgtcggttactggaagaagatgtcattgatatcgcggtttcgctgaataaaacgaacattggtgaagtcatcagtgaacccgttatgacgatgggggtttccacgctctggtcgccacagaagatcccctgcgatgggccattgttgataaacgactttgtcgcttatgagcacgtcatggtgtcgtatcgcgaatcaaaccacagcgaaattgaccgacaactcgccagccagggattacaacgccgtgtgcgttacgttacggcgaatttttctacctttcctctgctgctaaccagcatgcccgttttcgccacggttcccgacgggctggcccgacggtggcagcaacattttactttacggtccagcacaacgcccgtgaattaccccacgtttacgctgtgtattttgcgtcacaagcggcgggcgcaggatgccgcacttaactggctaatggcgcaattaaaaacagccatgctgcggttttaa

SEQ ID NO: 127608 - DNA, 900 bp, Enterobacter cloacae
atggataagctggcgtcaatgcaggtctatgtttgtgtggtcgatacccatagcttcgccagggcggcagaagtccttggactgccgcgttcaacggtatcgcgggtcattaaggagctggagtcctggcttgggattcagcttttacagcgcaccactcgcaaactcagcgtaaccgcagatggacgacgttattacgacgagagcaaaaggcttctggcggatatcgcaacgatggaatcttcattccccggccgatccgcacagcccaaaggccgctttaaagtgggaatgccgcagtcacttgcccggcattgtattatccccaggcttccggcgtttctgcatcagtatcctgaactggagttgcgactttgctcaagcgataacgtcgaagacatcattcaggaagggtatgactgcgttattcgtaccggcaggatcgaagattcaacgacgctggtcgcgcgccctcttgcgaattttcggtgggtgattctggcctcgccagactatattgccacccatggtaagccggataacgtcgacagcctggaaagacatcacgccgttggctacctgaaccaccgcaccggacgtaccaccgactggctttttacgcttgatgatggcgactgcgcgatccgtatgaaagagacgctgatcgttgatgatactgacgcttatatccaggccggaattcaaggggtcgggttgattcgtgtcgccagctatctggttgcgccctatctgcaaaacggagcgctcgttctctgtatggagaacctctcttttgatttaccgctttcgctggtctatccgcaaaaccgctatcttcctccttcggtacgcgccttttatgactggagcagagcggtgctacaccaacacggcgactga

SEQ ID NO: 127609 - DNA, 930 bp, Enterobacter cloacae
atgaaagaacgtgatgttaacacgggtgaaaaagtattagtgcttggcgcaggacaactgggggctgccgtgttgaagtgtctgattccagcggtcacccaacacaatggcgccgtttcggttatcgtgtcgcccgactcccgggataagcaaggcaacctgcagtctgaaattcatcaaaaactggctgatacaggggccaaatttatctctgtcgatgtcgctgccagcacgattgacgcgttaaaaaaccacttcgcgaattttgataccgttatcaactgcatggggtttatcgctggcgcgggaacacagataaagattactcgcgcggtgctggaggctggcgttagacgctattttccctggcagtttggcgtgaattacgatgtggtaggcaaaggtagcggtcagcccgtttgggacgagcagtatgatgtcaggacgctcctgcgggaacagaacgcgacggaatgggtcattgtttcaaccggtatgtttaccagttttctcttcgaaccggcatttgatgtggtgaatttatccgaaaaaaccatccatgcgctcgggggatgggaaacacaggtcaccgtgacatcacctgcggatattggtcgccttaccaccgaaatttatttgcatcaaccgcgaatcgtaaatgaagtgatatttatcgcgggtgaaacgacatcatacgaaaaactggcagaaaccgtagaacgcgtgacaaatcaaacctttaccaaagatgtattgaccctacccgcgctactggatgcactgcatttaaatccggatgaccagatgcttcgctatcgcgcggccttcgcccgaggagacggcatgtggtggccgatgagtaacacctggaatgtacagaataatatgccgactcaagatattgaatcctggcttaaaaccgttatttaa

SEQ ID NO: 127610 - DNA, 210 bp, Enterobacter cloacae
atgaaaaccctcataccacttttattggtttattttctccagccattttccgtatatgtgcaaaccgtcaccacaaccggcgatacgcttgataacgcggaaagcaaaattcgccagttagtacaaaaagaaggcggtcaatcttataaaataattgaagcgcggatgcgaaataaagttcatattacggcagagatcatagcgaaataa

SEQ ID NO: 127611 - DNA, 879 bp, Enterobacter cloacae
atgcgtgatatcctgctcgatctctgccgccggtatgccgatgctcacgtcgaccatagtggggttgccataacgccggttccagggttgacgattatccgggctttgcatcctggcgaattgcaggcggcgatcaacagaccgctgatggcgatgctgctgcagggtcgcaaacacgtcgctacgggggcggaaagttttgaatatggccccggagaggcgatggtgattgccgccgatgtgccgaccctcagccagattacccaggccagccttcgccatccttactattccctggtgttggaactggataccgccatcctgcgtgagctgcaggaagctgtgccagtggcgcgaggggatgcgccttgcgttggggttgagccaatgaatgctgacgtgacggatgcggcttaccggctggcaaggttgtttgaacaaccggaggcgatggctgttcttggggatgggctacggcgagagctgcattactggttgcttcgcagtgtccatggtcctgctattcgcgccctgggcgcggcggatagccattctgggcgaattagccgtgtggtcgcaatgttgcgtaaggagtttacacgtacgataagcgtggaggagcttgctgacgtggcgggcatgagcgtgtccgtattccatcagcattttcgcgctatcaccacgatttcgcctttgcaatttcagaaacaactacgccttatccatgcccgtcgcctgatgctggtcgatggcgtagggatcgcgcaggcggcgtatacggtcggttatgccagtgtttcgcagtttacgcgcgaatatgcccgcatgtttggcgcgccaccggggcgggataaacgcatggcgacagtgcgagcctga

SEQ ID NO: 127612 - DNA, 756 bp, Enterobacter cloacae
atgagcaaaattgcacttatcactggcgccaatcgtggtcttggccgtaacactgccctctccatcgcgcgtcagggtggcgatattatcgtcgcttacagaggaaataccacccaggctgaagcggttgtcacggaaatccgcactcttggtcgtaaggcaatcgcgcttcaactggatatggcgcagactacaagttttccagcttttgccaaaacgctacgtcaacaacttgccgaggtctggggacgaaataccttcgaccacctgataaataacgctggtcacggtgagtttgccggggtggccgagaccaccgaagcgcagttcgacgggctgttcaatgtccatgtcaaaggggtatttttcctggtccagacccttttaccactgctagcgaacagcgggcgcatcatcaacttctcgtccggcctgacccggatatcgtacccaggattctccgcttacgctgcggcaaaagcggctgtggaaatgctcagcgtttatctggcacgcgagttgggcccgcgcggcatcacggtcaataccatcgcaccaggcgccattgaaaccgattttggtggcggcctggttcgcgacaacgtcgatgtcaacgcgcagtttgccgccatgaccgcactcgggcgggtcggcgttcccgacgatatcgggccggtggtcgccaatttgctgcgtgatgataaccgatgggtaaccgcacaacgtattgaagtgtcgggcgggcaaaccatctga

SEQ ID NO: 127613 - DNA, 1698 bp, Enterobacter cloacae
atggaaaataaagtgaacgcgaaaataaaaagtttaattagtcttgtttacggtgattcgttttctgagatgcaactggaaagtttgtcagagaaaatctccagtgctgctaacgttattagtgaaaagcgtaaatccggctgggatgaaaaagatgtcgtcctgattacctatgccgatcagttttacaatgaaggggagaacgcgctgcctgtttttacccgtttttataacagatggctttctcgttcattttctcatgtgcatcttttacctttttacccgtggtcttctgatgacggcttttccgttattgattatcatgacgtcgcgccagaaaccggtacatggcgagacgttgccgaattaaagcaattcaccagtttaatgtttgactttgtttgcaaccatatgtcagcgaaaagccaatggtttgctcattatcttgcgcaaaagccgggttatgaagatttttttatttccgtcgatccgcaaactgatttatctgctgtgactcgcccccgcgcattacccctcctgacacctttcacccttgatgatggcagcgtccggtatctgtggacaaccttcagcgatgaccaggttgacctcaattttgcctctcctcaggtgttgatcgcgatggtagatgtacttctccattacctggtagaaggggcgcgctatatccgccttgatgcagttggttttatgtggaagatccccggaacacgctgcatccatcttgaacaaacgcaccgattgattcagctcttccgcgccattacggacgctgtggcactgggtactgtgatcatcactgagaccaatgtcccgcataacgacaacgtttcttactttggtgacggtgaaaatgaagcgcagatggtgtatcagttctcgttaccaccgctggttctgcatgccgttcatcgtcaggatgtccgggcactttgtcagtgggcttcatcgctggaactgccgtcaaagcaaaccacctggtttaactttttggcttcgcacgacgggatcggacttaatccgttacgcggaattttacctgaatcggaaattctgtcgctggtagaaacactccagcaggaaggcgcgctggttaactggaaaaataaccctgacggaacgcgcagcccgtatgaaatcaatgtgacttacctcgatgcattaagttatcaggactgtgaggatactctgcgcatagcccgttttattctggctcatgccgtactgttgagttttccgggtgtgcctgcaatctatattcagagcatcattggctcccgcaatgattacaatggggtggaacggttagggtataacagggcaataaaccgtaagaaatactgtgcgggagaaattgacggcgagcttgaagataaaaacggcctgcgtaataaggtttattgccagttaagcgcattaatagcattacgacgacaagagaaagcattccatccagacagtgaggcattcttcgaaacctcaggtgaacatgtttttaaaatagttcgcattgcggatgatggcgagagaattaccgcactgtttaatttcagtaatgatattcaatgcgtcttttttaatcgtcagtcaggaaaggatttaataacaggaatcaatattagtaatatgactctgacccttaatccatggcaggtgatgtggattaaagaaatctaa

SEQ ID NO: 127614 - DNA, 219 bp, Enterobacter cloacae
atgtcatctaaaataatcggtcttgttaagtggtttaacgacgataagggatttggctttatctccccactcgatggaagtaaagacgttcttgttcacacttcttctctgcagggagaaaaatttaatactctctttgaaggacaaaaagtcaaattcgctatcatagctggcactaaagggccaacagctgccaatgtaacgctctgcgatagatga

SEQ ID NO: 127615 - DNA, 465 bp, Enterobacter cloacae
atgagcggaacagtggctaacaggccagcgctgaaaaagcttcttaagacgctgaaagagggagatacgctggttgtgtggaagcttgatcgccttggacgaagcatgaggaacctggtattgctggtcgacgagcttcgacagcgcggtattcacttcaagagcctcactgacagcatcgatacctcaagcccgatggggcgtttcattttccacatcatgtctgccctggccgagatggagagggagttgatagtggagcgcacgcgcgctgggttagccgcagctcgtgagaaagggcgaatcggcggcaggcgtccgaagctgacagaagagcaatgggcacaggcagggcgactgattgagaaaggcgtcgacagaaagaaggtggcgatcatttatgatgtagcattatgcactctttataagaaattcccagtgaataaggctgttactgagacttga

SEQ ID NO: 127616 - DNA, 639 bp, Enterobacter cloacae
atgagctcagggaacgtcttacaggtaggggcttttggattgccaactggtgatgccagagcctttaaaacagacacggctgttgcccctgatggaacaaacttcgacagtctgacagagccaggaacctttcgtttgctcatagacatggctaaatctacctctgggccgatatcaagttggtatggttatgtccaaaattacgtccgtattgctggtgttgccatgacacaattttgcttgccatacgccagcaaaaccgatgcgggtagattttttttcagggggtataacaccgatgtatggagtccctggaaggagatcacgacttcagcgatatctgacagagctatgaaaaacatcggcgatgacctcgatctggaagaggcgctgctgaacatctgccggatggagttcaagcacttcacttttaaggatgatgaaacgcagaccccacgacgcggggtgatatcccagcagattgaaacgattgatcccgaatacgttaaagaaataggcggcatactgcatcttgatcagacgccaatgttgctcgatgcgctggctgcaatcaaggccctgacaatccgtgtcagggtattggaagaacagggcgccactaaggtttcagttcagtaa

SEQ ID NO: 127617 - DNA, 324 bp, Enterobacter cloacae
gtgaagttcgacaaagagcccgtcagtaacgctctggagaagatttgttccctgacgggttatacattcggcatccaactgactgaatcggaatcggtgcacagcgcaggcatcatagctcaggatttggaaaaagtgttgcccgttgctgtaagttctggcgggaccggcactacaccgaccggagaagagattaacgatctaaaaaccgtggactacagtgcgatgagcgccttgtatgttgaggccatgaaggagctggccaaccgggtaaaaagtatagagagtgagtttgccgaactcaaagcccgatccgcgatatag

SEQ ID NO: 127618 - DNA, 903 bp, Enterobacter cloacae
gtgctggtggtcctgcgcgaatgcgttgaagagccggatggttacgcttacaaggatgaaatccagtatcgcgagctggcgcttgaagaagggcggttcatatgccgcgtatggcgccgggctggtggcacagcaagcggaacctacaccgttgacagtgagtaccaccctaagccgaaaggaaaggacttctgggacgaaatccctttcacctttgtcggtgctcagaacaacgatcccactatcgatgattcaccgttggctgcgctggtggagataaaccacggtcattaccgaaacagcgctgactatgaggatagcgtgtggttctgtggccaggtgcagccttatatgactgggcttgataccaactggcgcgatcaccttgagaagaccggggtgaaaattggttcccgttcaccactgatgcttcccagagatgggtcgtttggttatgcccaggcacagccgaacatgctggctaaagaggccatggacagcaagcgcgattacatggtgcagctgggcgcccgactgattgagcagaacgccacggcgaagacggcaacccaggcgagtggtgagcagacatcatcaacatcggtgctcggtatctgcgtttcaaacgtttctgaggcctatacgctggcgctgggatggtgtgcgaaatacctcggcatcaagggagaatcgacgagctacaccatcaatcaggaattcatcgcgaaggttgctgagtcgggcatggtgacggcaatcgtcaacgcctggcagtccggtgcgctgcgcgacagcgatatgattcgagcactgcagaagcttgaccttatcgacccggcagacagcccggacgaagtgattgatgcacttcgcaaccaagcccccacattgaccggtggctga

SEQ ID NO: 127619 - DNA, 204 bp, Enterobacter cloacae
atgtttgttgcagaaggattgaaagctgatattgataatgacggctgggttaaaggctggggggtaattcgtaatgctccatggcaccttgcaggtgtttatgcgacgaaagatgttgcagagacaaaagcagggatgttgggtgatggttatgaggctcgctacggctcccacaggcttgggagcgacgactttatctcctag

SEQ ID NO: 127620 - DNA, 246 bp, Enterobacter cloacae
atggcaaagctaactgttacgttgacgcgtctcgaagagtggaaagacaggatggtttacgggacggatgtaacttttaaggctattcaatcaggggttgtgctgattgaagacaacgtatcgggtaggtgtgctgctccttactgccgcagctatgatgttgaagctggggctggtgatattgttattgagcacaaccgaccagaccttcaccatctgagtattactgcaagtcttgacggctaa

SEQ ID NO: 127621 - DNA, 324 bp, Enterobacter cloacae
atggcactcaccgacaagcaagaaatgttctgtcgcgagtacctcatcgatttaaacgccacgcaagcggctattcgggcggggtacagcgcaaaaacagccaaccgtactgcgtccgaaaacctatcaaaacctgacatccagtccagaattgccgaacttaaagctcaacgcaatgatctggttggcataaatgcgatatacgtcctagatcgtctcgttgagatagaccaaaaacgtggcaggcgaactgccagaaggggaagtcaatttgaagtagtaaagcggttgggccgccgccgaaaggcagtgcagcagtcatga

SEQ ID NO: 127622 - DNA, 195 bp, Enterobacter cloacae
atgagtaaatataaagttggagataaagttaagcttaggtctggtggcccagtcatgaccgttcaacaaattagcgttccccaaccaacaatgtatcggggcactaatcggtgccagtggtttgcagggaagaaactagaagaaggttatttcccagacgactcactggaggaagttggggatgacgagcaataa

SEQ ID NO: 127623 - DNA, 273 bp, Enterobacter cloacae
atgacgagcaataaggaacaagccgtctactggatgcttgaacttctcaaaagagacggatgtctatatcaagatgatgtcgtagatcacttggttaaaactaaaaatgaagaccttttagttgaaaatgccgacggtaatttagccttaagtcgtcagatccttaccttgtttatgaaacatacagctgaagaagtggtttgggtgaggcctcatcgttattggcgctatcgtgtcgctgaggacgaacctggccgtgaggctcgcggttaa

SEQ ID NO: 127624 - DNA, 681 bp, Enterobacter cloacae
atgagactgttttggtatggactaatagttagtgttctttacttcgtcgtgctgggtgccgtaatttactttatggatttaggtgtcatgacgtcttggaatgagtttggcgactttttagctggggcattctcacctgtcgcttttctctggttagtattaggctatcttcaacagcaaaaagagttgcagcaaaatacaaaagcacttgagcttcaggcacttgagctgaaaaactctgtagaccagtacagggaaatggtttcagttgcgagggagcaattactttcagatcgcgaaaatcttgaaacatctaagcgggaaaaagagaggcaatataaaccaattataaaggcaccatcgattagaccagcagtcattataggtggaacaaaatataaatacagaggtagcctgtccattggtggggaagatgctttaatgttgtcgataaacactgaaccaccattcagcccgtatagtgagtactctgctcatcacgcgaaagtgggagatgtagtgatcggagagtcttgggaagtaaatgaagaagagctaccgtcaacaattgttatgaccatttcttatcaaagtaaactaggaaattcatacaaagacaaatacatatatagccttggagataggggtatgtactcaattgttgatgaagaaaatatatag

SEQ ID NO: 127625 - DNA, 531 bp, Enterobacter cloacae
atggcgaccaccaaaaaaactggccgcccttctgtttatctaccagaggtggctgctgacatctgttcactgcttgccgatggggaaagtctgcgcaaagtttgtgagcgccccggaattcctaacaaggcgacagtgttccgctggctggtgcaccatgaagagtttcgcgaccaatacgcgaaagccactgagaaactcatcctggcgaacgccaccatcaaatacattctgccctcccagcgtgatgtcaatgcactggataccaaatacaccggagaactggctgatgccaaagaaaccattgagcgtctgcatagcgatgtcattgctggccgtaagcggctgcagctcaacgcacactgtcccgcgaacggagcgtccagcaccggcggcctgggcgatgcttcccgcacccgacttacttactccgctgaacgggattatttcaccctcagagagcgaatcgccacagtgacgaagcaggttggctaccttcaggaatacatcaaagggcagtgcttgaattga

SEQ ID NO: 127626 - DNA, 465 bp, Enterobacter cloacae
atgaacaattatgcaaactcctctttcgaggaaatagcactgactatcggaaaattcattcttgtctgtggcgagattgaatttgaaatcactgccacttatcctatttttacggggaagaaattatcttccaaatggatgagtgattcatttttcaacaaaatcaaccacctacagaacgcattagacctttccggtccaaaacacaaggcttatcatgatcttctgaatgagctatcaacttatcgtgatttacgaaatcatctttcacatggttttgttgcgattgatgcatcgtctttagtatctggttcttatacatccatcaaaattggcactagcgatacaacatataaagttgatgatcttaaaaacaaactccatgagttgatatctctgcgtcaagctttgaacactgctaatgctgaggccgctttagaaaaaaaccttgggcatttattgtag

SEQ ID NO: 127627 - DNA, 543 bp, Enterobacter cloacae
atggaacagcacatgaaaatagtagatattgagaaatgggcaccacatgtaggcatgtttatgctcgaatttggtgcagttgaatcttttactcgtagccttcttgaagagttaaccccccctttaatatataaacatatcaaagagatggcgcttagtaataaaataaagatcataactgatatccttaagtgctccgaagaacacccagaccttcatcaggaacttattcaggcttacaaacatattgatgagctaacagaaatcagaaatattatcgctcacaatactgttaagctagttttttgggaaaatcacgaatctgaggaatctccatgtgatgaggccctttatagcgataaaaattcaaaaactattactcttgatgagatgcaagaacataatgccaatctaagtgcactagtagaaacactgtatcgtatagacggaactaagcgcggaaggagaattgctaaagacttggaatatttcaagatatcagggctaacattatctgacttgagcaatctgagtaaagaatga

SEQ ID NO: 127628 - DNA, 519 bp, Enterobacter cloacae
gtgaaatttaatcttttaccaatcgcggttgtggttattgctggtctgtcagtcgcactcgttaaaagttgctcagacaccaacggcctacagagtgataacgaggttctgcgcagtgacaatgctctgcaggagcaggtaatcgctactcaggcattcaacttcaatcgattcaatcaggttgcagaacatgccaacaggcttaactccctgatcgacaccagcaccgaagaaaccgtaatcgaataccgggagattctccgccgtgaaaaaacctgtgatctgcctgttcctgctgacattgctggtgggctgctcgaatacgcgcaccgtttacgtgccagcgccatgcacaccgattccaatggacctgacacagccgatgatcgtgccattgccaccagctccatgacgtactgccaggcagtcttgtggattaagccgctactggccgtaattgagaagggcaacaataatttcgctggcataaggcagatagagttggaaagaaagaattag

SEQ ID NO: 127629 - DNA, 915 bp, Enterobacter cloacae
atgaacaaaatcacatattatttaaaaagcctggagtatctgctcaggaagtgtcggtcttatttaatatctgacattaactttcacctgtcccgtctcaaagaaattcacggtgacacatttgatataaaatcacctgctaccctgaacgaaaaaatttgtcatcgactggtctatgaccataattcacactatacgctgctggctgataaactggcggtgagggaatatgtgctatcgagaacgcaacgactaaacgtagtgccattgattggcgtataccgtcgtgttgagcacattgacctgacgaaactgccgaataaatttgtattaaaatgcaaccatgacagtggaagtgcggtcatatgcacaaacaaagcagagtttgacctcaaaaaaacgcaaaacaaactccggctggcattaaagagaaatttatattacaccacaagggaatggcaatataaaaacatccttcctgttattctgtgcgagcagtacatcgacctgtttaataacaccgacaaaagcacaacctcagagatgttaaggatccattgttttcatggcatcgcgcagttcgtggaagcggattttaccgatgaaagcggcaatggatttatcaacgtttacgatcggcactggcaattgcagcttttccagatggaatatcctaacaccccgcaggtcatccccagacctgcgtcttatcaggaggcagtgctggcggcgcaagacctggcccaggggattgattattgccgtgtcgatctcatgctcacgcaggatgaaatctattttagtgaaataacgttaagcccgaaacgaggcaaacttgccatcacgcccccggaatgggacgccaggttgggcgaaatgtggcaaatgacgcctgttacaaacaggctcatttga

SEQ ID NO: 127630 - DNA, 1068 bp, Enterobacter cloacae
atgagtaaagaatctgttctgagccgccaaatcttaacctatatggttacgctggcattgattattattgccatcgctattctgggctcctggctgttttacagcttcgtactggattacctcccgggaggcaccgccgctggcagcgaagagaatatgacgatgtgggactggttgtggctcgtaacggtctcgacaatcagtttgatgatctctctctttttgaccgtaaaactgtcatcacgaattctgacgcctttgaacgcggtagcctccagcctgaaacgcatttctcagggcgatctggatgcccgggcctggtgcgcgagttcacagcttggcgagataaatcatctcgtcaacgacttcaacgaaatggctgaaaaattgcaaacgctggatattcagcgcaaatcctggaatgcggcgattgcgcatgagctgagaacacccgtcacgattttacgtgggcggcttcagggtctcgtcgacggtgtgtttgcaccagatccagctttattcaataacctgctaaagcaaaccgaaggtctggctcgcctgatagaggatctccgtgttgtcagctcggacggcggtgcgggttatacgttatgcaagagcgaaatcgatcttaaggacaccctggaaacagcacttgagaccttcaggcctgagtttaagcgtaagcaatatgatattcataccgaacttaaaacacagcggtgtatctgcgatccgctacgtattaatcaatgtctgaccgtgttatttgacaatgcgctgcattactcgacatcacgtaaactcatcataaaaaacggggtgtatggtaaagaaaattacatcctgattcaggatgaggggccaggcataccccgggaatttcatgattttctcttccagccctttcagcgcgacaaaggggccagacaactgaatcctgaaggctgtggtttagggttgtcggtggtaaaagccatcatgcttgcgcacggtggcgatgttacctatgttctgacgaagcgaaaccactcgctattcaaattaacctggccggttgcggcatga

SEQ ID NO: 127631 - DNA, 705 bp, Enterobacter cloacae
atgtaccaaaataatttaattcttgtcgccgaagatgaagatgaaatcgccgatatactgatgagctacctgcagcgggcaggaatgaaaaccttaagggcaacagatggtgcgcaggcgattaacatgacgcgtctgcataaaccggatctcattttgctggacatccagttgccggtatttgatggctggagcgtccttaccacgctgcgccgggagagtacggtgcccgtcattatggtcaccgccctcgatcaggatgtggataagctgatggggttgcggctgggcgctgacgattacgtcataaagccattcaatccctctgaagttgtcgcgagagtggaagccgtactgcgcagaacgaaggcctacgttcaacaggttgcagcaatgccgctccggacatcctttattacggtctacccggatgatttctatattgaagtcacggttggggaggaggtggtatgtcctgtattgaccaccacagaatttaaactgctgacctatctggtcagaaacccgagaaaggtctgctcccgcgaagagttacttaacgcctgtctgccggagggcgataccttagacagaacggtggacagccacatgagtaagctgcgcaaaaaactggaacttgccggtcttcacggtgtgcctgaaagcataagagggatgggttaccggctgggtgacaagaaatga

SEQ ID NO: 127632 - DNA, 162 bp, Enterobacter cloacae
atggccctgtgcctggcattgatttttatctacctgatcatcattttcagtattttgttaaacatcgcacctgatatcgccgatctggtgttttactgcgaatgttttctcattatattttttgttggctcacccatttatctcatgttaaggatgatttaa

SEQ ID NO: 127633 - DNA, 903 bp, Enterobacter cloacae
atgatccttaaaaatactcatcgtcctccggtcgtttccggggttgttggctcgctcaaggcacttgccgtgcggcaccgcaagaagctgtttattaccttctttctggttattgccgaaaatgtgacctttttactctatcccgtacttgcggggattgcgataaatgccattctcgccggggataccgtgagcgctgcactgtatgggctaatggtcctgtttatctggtgcattggtgccgccaggcgcagcgtggacacgcgcaccttcgcacggatttacgccgggcttgcggtctctgttgtgctggctcagcgaaaataccagcttaatcattcgacaatcgcggcgagagttaccttgtcgcgtgagttcgtggatttctttgaaatgcatctgcccatgctcattacctcaatgagttcgctttttggtgcagccattatgctgctgatcattgaattctgggctggcatcgtctgcgccatcgtcgtcttgatcctgatgggatttgtttccggtttcacccataagaatgaattgctgttcagacgcctcaataaccgcctcgagaaagaggtcgattatgtacataaagcgggctctgcaaccctgacccgtcattactctacgcttgcgcgtttgcggattgcgttatcagaccgcgaagcgtggggatatttactgattggctcgctgatcgccctgctttttacgctgaccattatcctgatgacccacacaacggggattaccgccggtcacatttattccgtgatgacgtacatgtggatgttcgcgacaagcctggatgacgccccgcaactgctggagaaattttcacaactcagagacatcggcaagcgggtatcgaccagtgatgagacatcgcacacctga

SEQ ID NO: 127634 - DNA, 3096 bp, Enterobacter cloacae
atgccgcaattttttattgatcgtcctgttttcgcctgggtcgtggcgctttttattgtgttgacaggggtattgtcgattccccggctaccggtggcgcagtatccggctgttgcgccgccaggcattattattactgtctcgtatcccggcgccagccctgatgtgatgaatacgtcggtcgtttcccttatcgagcgtgaaatatccggcgtggataatttgctctattttgaatcatcgagtgacaccaccggctcagcctcgattacggtgacctttaaaccaggcaccgatatcaaactggcgcagatggatctccagaatcagataaagattgtcgagccgcgcctacctcagtcggtccggcaaaacggcattaacgtcgaggcggcgaacgccggttttctgatgatggtggggttaaagtccacctccgggacatttcaggaagcggatttgagcgattattttgccagaaatatcagcgatgaacttcgccgcgtaccgggggttggcaaagtccagctttttggtggtgagaaagcgctacgtatctggctcgatccgatgaagcttcatagctatgggctgtcggtaagcgatgtgcttaccgcggtcagccagcagaacaccattgtttcccccggcagaacgggcgatgaaccggcaacagaaggcctgggagtgacttatccgattacggttaaaggacaactttcttcggtcgaggcatttcgccatattacccttaaatccgataccacaggggcccgcctgcagttgtcggacgttgcccgcattgagtccggcctacaaagctatgcgtacggtattcgcgaaaacggcgttccggcgacggcagccgcaatccagctgtcgccgggcgcgaatgccatcagtaccgcctcaggggtgcgggcacgcattgatgaactgtctcacgtgcttccggagggaatgaccttcacggtgccttttgatacggcgcccttcgtaaagctttcaattatgaaagtggttcagacatttgttgaagcgatggtactggtgttcctggtcatgctgctttttctgcacaagattcgctgcacgcttattccggcaattgtcgcccccgtggcgctgctgggcacctttacgataatgctgctcagcggctattccatcaatattctgaccatgttcgggatggtgctggctatcggtattatcgttgatgatgccatcgttgttgtcgaaaacgtcgaaaggctgatggaagaaaaaaagctttccccacgcgaagcaacgcggcaggccatgcatgaaatcactcctgccatagcgggtatcacgctggtgcttacggcggtgtttatcccgatgggctttgcgcagggttcggtggggatcatctatcgacaattctgtatttcaatggccatttccattttgttatcggcattcctcgcgctgacgctgacccccgcgctttgtgccacgttactcaagccccacgcggcgaacaagagaggtgccggaagatttgcaacctggtttaacacccatttccatgccctcacggcagtgtatgcgtccagcctgggcgcggtgctaaaaaaaaccgggcgcatgctgctgctgtatgttgccctttgcgctgccctgtttatggggttgtcttctttgccatcctcatttttgccggatgaagatcagggctacttcatgtcatccctgcaactgccttctgacgcgaccatgcggcgtacccttaaagtggttgaaaaatttgaagaggaaattgcatcgcgacaggcgattgaaagcaacatcatgatcctgggctttggcttttcgggttccggccctaactcggccatggcctttaccacgcttaaggactggaaaaatcgacaagggatcaccgcccagggggaagcagacgctatccagtcccgcatggctggcgtttctgatgccgtcacaatgagcttacttcctccggctatttcggatatggggacctcatccggattcacttactacttgcaggacagagcgggtctgggatatcaggccttaaaaaatgccgccgatgagtttgttcagcatgcaaatcagcgccctgaactgaatgatgtctacatcgatggcctgcctgagggaaccagccttgcactgcagattgaccgggaaaaagcagaggccatgggcgtctcgtttgatgaaattaatcaaactctgtctgtcaccatgggctccagttacgttaatgactacacccataacggtcgcgttcaacaggtcattgtacaggccgatgcgccataccgtatgcaacctgaacaattgttaaccttatcggtaaaaaaccggacaggtcagatggtgccggtatctacgtttgcaacactgtcatggaacgttgcgcctcagcagttgaaccgataccagggatatcctgcgatacggattacgggaagtgccgcctcgggtgagtccagcggtacggcaatgaaaatcgtggaaacgctggcaaaggagctgcctgcgggtatcgcaggcgactgggccgggagttcactgcaggagaaagcgtctgagtcacagcttcctggcctgattgtgctgtcaatcctggtggtatttatggttctcgccgccctttacgagagctggtcgattcccttcgcggtcatgctggtcgttccactgggtcttattggcgcggttgcagccgtatccattgcaggtatgactaatgatgttttcttcaaggttggtctgatcaccctgattgggctttccgccaagaacgccattctgattgtcgagtttgccaggcagcttcagcgggaggggcaaacaaccgtcgcggcaacatgccaggccgccagtcagcgcttgcgccccattttaatgacctcgttagcctttacgctaggcgttgtcccgctaatgctggccactggggcgagtgacagcacgcagcatgccatcggcaccggcgtattcggcggcatgattagcggtacgcttctcgccctcttcttcgtaccggttttctttattgtcgtcgcgcgtttcattgagcgcgccaggaaaaggtga

SEQ ID NO: 127635 - DNA, 870 bp, Enterobacter cloacae
atgacagttatcaatcagactacctgcacactgtttaccgatactgaacgtttcactcagttgtcagggtattacgaagaggagcgccgcacagtctggatgatgttgcgggcgcagccacgaccctgtttcaaccatgcgttaattgaggagatcatgaacctctcatggctggttcgccagtccgggtttgcggtcgatttttgggtaaccggttcgctggtgcccgagatgtacaatacgggaggtgatttacagttcttcgtagaatgcatccagaatggacgtcgcgaagcgttacgggcctatgctcgtgcctgcgttgattgtgtccatgcggcgtcacggggttttgatacgggggctatcacgctggcgatggttgaaggcagtgcgttagggggcggatttgaggccgcgctggcgcaccacttcgtgctgtcccagcgcgatgcccgtttaggcttccctgagatcgccttcaatcttttccccggcatgggggggtactcgctggtcgcacgccgttcaggcatgaaactggcagaggaactcatctataaaggggagtctcatacggcagagtggtatgaacagcacggtttagtggatgtgctgttcgaacctggacaaagctacgtctctgtcagaacgttcatcgacacgctgcggccgaagttgaacggcgtaagggcgatgttacgcgcccgtacacgcgtgctgcagttgccccgcagtgagctgatggacatcacggaagattgggtcgatgcggcattctgccttgagccaaaagatatcgcctatatggagcgtctggtgatgctgcaaaaccgtcaccatgcggcgggattacgcaaagccagttaa

SEQ ID NO: 127636 - DNA, 954 bp, Enterobacter cloacae
atgcacagcgaaacccccgtagtcagcgtcatccgtcgttcctcgcgtcttatggtgcgagagttaggttttatggcttcaaccctggcctcaacaaattactcaccctcggcagtccacactctcgtcgaaatcgcattacgcaaagagatgacggcgggtcaactggtgcagttactggggctggagaaatcgagcgtcagccgtatgctggctcgcctgattgctgcaggcgaacttgaagaggtggtgtcaacggaagatgccagaacgaagagcctcaggctaaccgggaagggccgtgatacggtcaataaaatcaatgcctatagcaacgagcgagttgtctcagcaatacagtccctgcagcctgcccagcagcagatcatctctcaggggctatccctgtatgccaatgcgctgctggcgtgtcgcgagacaggtgtcgacactcgcccggatgagctaaaaattgtgcagggttatcttcccggcatgattggccgcatcgcagagatgcacgggagttactacgcgcgcgagcataattttggtcgcttctttgaggccaaagtggcctccggtctggctgaatttagtggtcgactggacaaaccctgcaatcagatatggctggcggtgttgaacgacaggatcgtggggtcggtagccattgatggcgaggatttagagcagggtgaagcccatctgcgctggtttattatcgacgacggctgtcgggggcatggtgcggggaaaaaattactgaacgaagccatacttttttgcgacagtgtcggcttttctgctgtgcatctctggacgttcaataagctgactactgcccgacgtctgtatgagtcatttggtttcacgctggcaaaagagtgggaaggcgaccagtggggaagccttatcacggaacagcaatttacccggcgcagagatgcataa

SEQ ID NO: 127637 - DNA, 1197 bp, Enterobacter cloacae
atgtatgaatatgaaaatttcatttacaaccctagaaaaatggcagaaatccaaaataagattacaagtgataaccacagaataaacaatgtttgggatataacttttgaccctaaaatcgacatagacgattttaacggcattagtgtgtacgacattaatgaaatagcaaaaaagcataaacaattccaatgttacatcattgatttaagttatgttgattcaaatgagaatgagcaaacacttgataatgttaaaaagaaatccgaacgaatttacatcaaagatattcaatttaacacttgtgatttcattggttccaacaatggaaaaaaaatcacattccgcaattgtacatttgaaaaatcatacttcggatattcaaccttaactgatgttaattttgagaattgcacctttaattcatcatcatttgcattaacgaaatttattagatgcagatttgatcataattgcaattttaaccttatatcaatttcaggtggaaaaactgtttttactgaaagtgtaatttctgctgataagtttattaactcaatctttcaatatgccacgaaagattactgtctaaataacccatccaaaaatattgacgcagaaaaatcgatgatgtttacctcaatggttaaactttcgagaaacattcttgagtctgtatcccaaaatggcgatgacgcatactattataatgctgcgaaacaagtccacaaacttaaaattaaagaaagacattataaaaaaatatgggacattaaaaaagacaaacccactaattgggtggaatggattctaactaaatgtcgttgtttccttatatattttgcaatgcctatagaaagttttattttaaatgctttaggttttcttaatggttggggtgcaagcatatcaagatgcgcactttttggaacttcactactgacgttattttcaatcatttatttcttctctggaatggaaccatcgcaaccgcatgaggggtttttaccacacataatcaagagcataattcagagttttgatattacattccttgcaggttatactaaatatgtgagtgcaaaggatgactatgcaactcaattagtatgtcttttgaatatgcttttaggattaacatggtatgcgataagcattccaaccgtcattaataaaataagcatcaaccgtatatga

SEQ ID NO: 127638 - DNA, 690 bp, Enterobacter cloacae
atgattgaattaattaaagataacaacataaactgccttgtattatttggtagccatgcaaccaacgaagcgagtgatgattccgacattgatttgttgggcgtcaacaattcgacactaagaacggtcagggagaatgggaaggtaaatctttctctctactcgttcagtgagttaatgaaaatggctaagtcaggaaatatatttctccttcatgttcttatggagggagtttgtgtattcaaccaacaagttttcaatgagatcaaagataactttatttataagaaaaactatgacattgatatcgccaccgcctattatttagccagaacgatacttagtgaggtagacaatatttcaaattggccaattgcaaacaaaagaatttcttggtgtgtcaggaccattctgatttcaatatccgtagagcaacgaaaacccatattttcaaagagcaaactcgcttcatcttgttttaataccgggctgtgttatgaagatgctttctctttagtagatgccaaatcgaataaaaataagaacaataaagttcttaattcgctatcgaaatttttaaaccactacagcaattataatgaagatataattaaaaaatctttttctagtagcatcgtagtatcaactttagatagcattctccagaacggaagtttctacgacggataa

SEQ ID NO: 127639 - DNA, 189 bp, Enterobacter cloacae
atggctgtgggttgggtttcactgttttggggagcgggtttggggggtgtgcactgcggtggggcgttttgggggatagctaaaaatagtggcatggtttctggtctttatttccttcgcagagtgcatgaccaggagcagaagcagactttttgccataacgcgggtattgtcatgagtgtgaaataa

SEQ ID NO: 127640 - DNA, 360 bp, Enterobacter cloacae
atgaaactcctggaaaagctcaaatcgctcgaatgttcccttcatggcacaaggcgaagtgatcgtgcatggctcgagcatattctacaccccgacttcaaagaaatcacccgttctggcgtggtgattgaacgcgctgaaactattgagtctctcaccagcgaattaaatgtcaccgttattttgagttgcgacttcgagatattccgtcaaagcgagcgatttgcactcttgtattacaggacatttaatcccgatggcagtcgaatcgctcttcgctcctcgtgctgggagtgtaatgatgatggtgaatggaaactggtctttcatcagggtactccggcatcaggtacagtataa

SEQ ID NO: 127641 - DNA, 315 bp, Enterobacter cloacae
atggatgttactgaagaggctttgttgagcgctggctttacgcgatctgacttgcagaagattaagaacaacatcgaaagctatggtggaacattaggggaagtgatccaggatctggctaatcgattcagggttgttttatggataacatcatcttgcctgatggtttttatccttcttatgttgtttactgcgaaagaaaccgttgtgggtggtggaatatcaattctcatcgctatcatcatcgttgtatttattcagccgccagtcctgtcttacaaatcctggcggttctggagaaaatacaggggttaa

SEQ ID NO: 127642 - DNA, 234 bp, Enterobacter cloacae
atggattcagctctgctgaatagggactggaacagaacatggtcagatacgatggtgaatctggaagcccgcaagctggtcgaaacagcaaatcggttgcctgcattttatttgcaagatggtctgacgcgtatcaagtttgacgaggagataaaacaggtcgcagaaaaagaacaaaacggatacgatgagccgtccaaaactaaccatgaaaattgtaggttatggacttaa

SEQ ID NO: 127643 - DNA, 1008 bp, Enterobacter cloacae
atgactaatttaccaacccccccaaaaataagagacttaagagtcaaggggctttacggctataaagatgtttttttagaatttaaagatgtaactgtgatcgttggtaaaaatggcatgggtaagaccactttgctgaaattgatttattcattgcttattaataaaagagatgaatacttagtgtcaatatgtaattttgcagaattatccttcactgatggtgaatcgatatctttcggaggcattactgatgggttcaaaagagatctgttagaattgacggttaatgagcgaattgaaacaataaaaaaaacaaaaaagaacaaaataaaaataacagaagaaatcacaaaagcaatagcagatatggtttttaatgatgtaaatataagcaataaaataaacgaaacattaaaaatgcacaaggatgctattttttataaagagaaaacagaaaagtacattagggatatcctaaagataaggtatatatcaacagtaaatatatcttttaatgctgataataatattgatgttggtaatagcgtatcaaccaatttacttgaccttgcaacagataaagaaatgagggatctattaaaaagcggcaatcaactatataaagatgcttttttggaacaagttaatataatgttgagtgatacaaacaagaaattttgtatttcagataatgagtattgggtttttgatgaaaacacaagtaaaaaacttagattaagccagttatcatctggggagcgacaattaatttacatattagtaactgctgcaaatattggtaactcaccagctgtttttctcatggatgagccagaaatttcattgcatttaagctggcaagaaaaaatactagatgcgctacgtaaaataaataataatatgcaaatcatcatagtaactcacagcccggcaattgttatgaatggatatatggactcttatatagatattaaaaatattatcacggtgaataatcatggatga

SEQ ID NO: 127644 - DNA, 828 bp, Enterobacter cloacae
atgccctattcacaggggggagcagaagcgaaacgaagccttgaacgcgagtatattaaccttcatcaggattttatcgttggggttgatagtgactatgattatttatgtagcaatagaaatgaatttgcgagacagttaagcactaatcaattcgtacttcatacattttattactctcgtgaaagttatatcaactcaaaggaagccattagtaatatccttgaatgctttcatttacataaatatccagagaaccagttattagcttctctagagaaatattcagaaaccatccaccctgctctttgtcttttttcatggttgcataatgttgaatggcggttgcacccagaaaatttatttaatatggcaattcgtttacctgaaggttccagacttctcaatgaaaatcttacagtaaatgaaaatactataaatgcagttaaacaacaagttgatgaatatattcatacatatagtagccaagtaaatgaccctcaggattatagttcgcatcttgagcagttaaagcagcgtggaataaatgaagcaaatgctcatttatttacagatggtcattacctcttagacggaatattactcccaattttaaaaatggttgtcatggcgggccaaaaccaagataaagcttgggttgaacaaaattatgtaggtgaggcaattggacaaagaaaacgtcaggtagttaatcattacaaagataattgtaatacaagcactttagttttccagtgcacagcctaccattcaggtgatttttggctgcgaatagctgaaaaaatgcgcacaattataggtttgtaa

SEQ ID NO: 127645 - DNA, 468 bp, Enterobacter cloacae
atgactataaacgttaatgcgctgattgagaatttagggaaaagctacaaagaactgattggttctgaattaatcttgtacaagtcgcctccaaaaggtgcgtccgggtctcctgttttaagtttggatatggccaaagaaggcgtgtttttatctttttggcgagaagggaggattctaaaggcacttactttaaccattcaggaagatggcaacgccgattgggtgtttccaaacgctttgcctaagcctttaactaaaaagatgaaccggaaatgggtacataaaaatataggtgagccattaagaagcactccccctaaagtgattatgaaacgttcttttggatggacggatctttatgaggcaaaagggtacgtaaatcctacgagcatgcagattaactatgacgtagcggatagggtgaggtctgtaaccttcatgccaacgtcagagcttcgctggtaa

SEQ ID NO: 127646 - DNA, 1698 bp, Enterobacter cloacae
gtgggttaccgtaccgataattttggccggggacaggcgcttgagaatgataaaacgaccaccggtgccaggtgtattgcgtctattacggacagcaccgaatttggacgcagaattctcagggtaggtgataaaaccactccctgtcctaaatgtggcaggaatggcgtgattgtatcaggtgaggaacgggtgacatttcacggcgtaccggtcgccgttcacggttcaaaagtacattgtgattgcccaccaggttcaaatcgggtaattgctcccgcaggtcagtggctgggacgtggccgagacccggttgatgttgccagggaagaacacgccgccaggctggcagcagaaaagcaggctgaagaaaaccgcagagagaaggaaagggagcgcaaccgtgtatttgcaaaatcctgcctgcggggggatggctgcaatgatgccggtgaccagcgcgaaccccacactaattttgccgatatggcatttttcctggccatgccgaccagcgacccggcaaccgattcagacaccccgcagcacgcacagaccgccagaaagaaaaagccagaggatatccccagaccgaaaaatcgcagcgccctttatcgctggtggaacggcaaccatgaggagatggaatatcaggcggccgttgcagctgctgcagctgctgcgcgggtgcagacggccaccgcaggcgcaagcgtgctggaactcataagcggcagggcgctgacctacggcacatgggcagtgcgtggtgccgtcgggctgggtgagatagccaccgcgggagcgggggctcctgtggccgggctcctggtgggaatgatgcccggcaggctgaacgacggcgaacaggattttatcgaccgtatgcgcctcgcgcagatgcgtgaagccccaagccgtgttcgctatacgtgggagaacgacagcagggggaacccggtgccgcatggctggcacacgccgcctggccgggacagtgtgcgcgtcagaaaaatggagtacgacagcagggtgcaggcgtataccttcactacggaagaagaaccgcgcatcaccatcgtgtggacgcctgaccggacagacgataaaaagccgtggaataccggcaaccaggcgcggccagtgctgccgaacccggtcgttgttgacccgctgcccgttaacactggcataacggcgaccactagcccggcacagggagaaaagcgtttcgcggattacattctgatcctgccgttccctgacctgccgccgatttatatctacctgagcaaaccgccggtggagtttctggaagtcgagctatacagtgactttaaacgccgttcgcggcagggaatttacgaggcggatcacatgccgtcaagggcggcagttgaagcatatttaacggcgctctatcctgatgttgatccaagagatatctgcaaattagctgatgatgttgcagcaatagtgattcccaaagaagtgcatcaaaaaataagtgaaacgtatgggggccgtaatactctggcacaaatcgaacttgattcaagaaatctgcgcgcggcacttgatcgcaatttggatgctatcaaaccagcgctaaaagcacatggtgcaacagaaagccagattgaggtggcgagggcgaaaatgcacagacttaacagtgagcagggattatacaaatga

SEQ ID NO: 127647 - DNA, 1254 bp, Enterobacter cloacae
gtgagtcgtacatctaccgttgatatcgaaccggcacgcgatatcgatgatttacccgcagcctctcagccggcgcagtttattaaacgtggtacctcccaatttatgcgcgtcacgctggcgctgttctcagccggtctggcgacctttgccctgctctactgcgttcagcctatccttcccgtgctgtcacacgagtttggcgtctcaccggccagcagcagtatttcactctctatttcaaccgggatgctggctgtcggcctgctttttaccggccccctctccgatgccattgggcgtaaacaggtgatggtgaccgcgctgatgctggcgtcggtttgtacgctgctctccaccatgatgaccagctggcacgggatcctgatgatgcgcgcgctcatcgggttatccctgagcggcgtggcggcggtcgggatgacctatctcagcgaagagatccacccgagctttgtcgcgttctccatggggctgtacatcagcgggaactccatcggcggcatgagcggacgcctgctgagcggcgtgtttacagacttctttaactggcgcatcgcgctggcggtgattggctgctttgcgctggcctctgcgctgatgttctggaaaattctgccggaatcacgccatttccgccccacctccctgcgtcccaaaacgctgtttatcaacttccgcctgcactggcgggataaagggctgccgcgactgttcctgaccggtttcctgctgatggggtcattcgtcacgctgtttaactacattggctatcggctgatgctctcaccgtggcatctgagccaggcggtagtcggcctgctctccgtggcgtatctgaccgggacctggagttcgccaaaagccggggcgatgaccgcccgctatggccgtgggccggtgatgctggtctcaaccgccgtgatgttgctcggcctgttgctgacgctcttctcgtccctgtggctgattttcaccggcatgctgctcttctctgccggtttcttcgccgcgcattccgtcgccagcagctggattggcccgcgcgcccgtcgtgccaaaggccaggcatcctctttgtatctgtttagctattatcttggctccagcttcgccgggacactgggcggtgtgttctggcacaactacggctggaacggcgtgggcgggtttatcgcgctgatgctgtgtggggcgctgctggtgggcgccagtcttcataaacgtctgagataa

SEQ ID NO: 127648 - DNA, 2163 bp, Enterobacter cloacae
atgtatcgcacattaagctggcgcaatattcccaccgcgagaacgttgtttgccatgatcttcatggcggggatcggcttaatcatctccatcgtcgcgctgctctacctttccctgcatcttatcagcaccaaaaccaatgaaattgatgaacaccgctcggcactttccgtaaagggggcgattcagacctcagtcaaccgggtctcctcgctggtcattgataacgcggtctgggacgacgcggttcgcgaggcctaccgcccaacgctcaataccgaatggttgtataacacctggggcgccggctttaagatcgacaacctttatgatggcaccttcgtgctggatgaacacttcaacgttatctggggctcgtttcagagtcagcccttcaccgagacgacgctcgacttttttggccagggcctgaaagcgctgattgaccagcaccggcgtgcgttatccagcgataaaaatatctacgccgggatcactcagacacgccacggtgtggcgtttatcggcattgggctgattcgcccgatggtcgggcgattacaggttcacgatggcacgcgccgctatctggtgattactcgccaccttaacggcaaaatattatccgatctgggaacgacctttcagattgataacctcaactatagccctgacaaaattagcgctctgagcctgccgctgcgcagttcagcaggagagttactggggtatatcaactggcaggcacgcctgccgggcgcggaggctgcccgggcggcctcatccgatatcacgcagattgtggtgttagcgtcggggttgatcctgctgttcattctggtgagcagcatcggcctgtacaaactggcacggggcgagagccaggcgcgactggtggcgagaacggactggttaagccatttgccgaaccgacgcgcgttaatcgaggcgctggaacaggtgagtttacgcggtgatattgatgtaaaaagcgtggtgtttgtcgatctggatggttttaaggatgtgaacgatatctacggtcacgacgtgggggacgatttgatcgtggcgattgcgaaggcgctgagagcccgcgttccgccagggggaatgctggcgcgaatgggtggtgatgaatttgccatgaccgtggggggcgaccatgcggaaacccttgccaccgcgtttgccaatgccgtgctggacttcctcaacgcccccatacggctgggcgatcgcaccattcatattggtgcgagcatcggtattgccagcggcaccctgattgaatgcagcagttctgaactgtttcgccgtgcggatatcgccatgtatcacgccaaagtgaccggaaaagggcgtattacccattacgacgcggagctgaacagtgcccgtgaacgtcagctggcgattgaaaatgagatccgtaacgggctggagcaggacgagtttgaggtctggtatcagccgatcatcgacgcgcgtagtcagaaaatgagcggtgttgaagcgctggtgcgctggccgcgtcgtccgggcggcgagattggcccggacacttttatctccatcgccgagaccagcggcctgatttacaaactgggtcagtttgttttgcatcgggcctgtcgggacatggcacctttcagcgagttaaaactctccgttaacatctcgcccgcgcagtttcgcgatcctgaattcgaagacaaggtcgcccaggtgctggagaccacccgtttcccggccaatcgactgcagcttgaggtcacggaaacctatgtgctggaaaatccggagcgcgcccgcatggccatcgccaacctgaaagcactgggaacggcggtagcgctggatgactttggcacaggctattcgagcattggctatttgcggcgttttaattttgacaccatcaagatcgacaaatctcttgccgggctagtggatgacgatgaacaggccgccgcactggtgagtggaacagtgcgcatcgccaatgccctgggcatggcagtggtcgcggaaggggtggaaaacgaaaaacagatgaaattgctgcggctggctggctgcgatcagttgcagggcttctggtttagccagccaatgccgattgaatcaattgtggcgttacgtcaggtcaaacagtgctga

SEQ ID NO: 127649 - DNA, 768 bp, Enterobacter cloacae
atgcacagcaacaactttgatatttctacctatttcaaacgcataaactataccgggccagcggcggccgataccgccaccctgcatgcgctgatgcgccatcagctctttgcggtcccttttgaaaatctggacgtacaggcaggcaaaatggtctcgctgatacccgaagagattgtcgataagatcctgcatcaggggcgcggcggctattgctacgaggtcaacgggctgtttgccatggcgctggaggcgttaggcatttcctggcgttttgtggcggcgcgccccatgttctacccggcacgtcgcccaaaaacccatatggcggtggtggcggaggtggagggccgtcagtggctctgcgacctcgggtttggcagctatggcatccgtgcgccgatggccctcgacatgcttgatgtcgatatcggacaagatttcgacaccttccgccttacccgtcacgcaaggggcgagtacctgctccaggcgcaggtggagggggcgtgggctaatcaatacggttttgatctctctgttcaggaatgggttgatttcattccggccaactacctgaattcaacccatcctgacgccatctttgtgcagaagcgagtgatcgtgcagcatcaccccgaaggacgccagatcctgctgggcaatatgctgaagaccatcaccgcaaatggcacaaagacacagcaactggcggaagaggatattgctgaggtcctgagaacccattttgcgctgacggtcgcgtaa

SEQ ID NO: 127650 - DNA, 1404 bp, Enterobacter cloacae
atgctgcgccttaccctggcttcaggtgcattgcgacccggtgaccggatgatctccgcgcgtaaactggcagagcgcgagcacgttagcctcccgacggccctcgaagcccttcgttgcctcgaggccgaaggcctgattgttgcccgtccgcgttcgggctattacgtccaccagacctgcgcgccgcagaaggtgccatcatcccacacgcctcccggcccggtaccggtgaccatgtcagccatcgcccgctcgcttttcagtcgcgcagaagcgcgcctggtgccgctgggggccgcactgcccgaccccacctggctaccgggagatacgttgcatcgcgcgcttcatgcggccagccgtcgtctggaagcacacggtcagagctacagcctgccgccggggcgagtggatctgcgcaacagggtcgccgcacgcgcggcacagtggggagcccattttggtgcagacgatctggtcatcaccgcgggcgcaacgcaggcgctgcgtctggctttgcgggccgtgtgccagccgggtgatgtggtggcgattgagtcccccgcttacttcggcacgctactgctgctggaggatttaggtctgaaggcgttgcagatcccaaccgatcccgtcgaaggcctgttactggcaccgctggctgaggccattcgctgtcaccgtcccgcggctgtgctggcctcgcccacggtgcaaaatccgctcggcgccagcatgtccgtcgctggtaaacaggagctggttgccctgcttgaagaggcgggcatccctcttattgaggacgatgtttacggggacctggtgggtgaaggtcaacgacctccggcctgcaaggccttcgaccagagcgggaatgtgctctactgtagctcattgtccaaaacccttgcgccaggctggcgtatcgggtggattgccgccggacgttaccacacgcaggtcttacaggcccgcatggccggggagtgggcaggcgcaccgttaattgaagccgcgacgagcgaaatactcgccagtggtgactacgatcgccatcttcgacggttgaaagttcgcatcgccgaagggatacaggccgttaccgcgcgggtggaggcgtgcttcccgccgggtacgcgtattaccgcccccgccgccggtttcttgctgtgggttgaacttccacaccaggtcaatgcgctggaggtgcatcgtcgcgcgctggcgctgggcattggcgtcagccctggcccgctgttttccccgggggcggagctgatgaacttcctgcgcttaaattgcgcgaatgaacccacgccccagttgctcaacgctgtggaacagatcggcgcgatttgtcacgagctggcgggtaccgcgttcagagcgtcgatgcgttaa

SEQ ID NO: 127651 - DNA, 855 bp, Enterobacter cloacae
atgaaaagttacaccgtaacggcaaacggtatccgtcagtttgtggtcgaagagggtgaaggcgcgccggttattcttctgcatggttttccagaaacaaactacgcctggcgccaccagataccggttttatcacgccactatcgcgtgattgcgcccgatctccgcgggtatggggaaacggataaacccgcatccggttatgataaacggaacatggcgcgtgacatccgtgaactgatgcgcgtgctgggtctggagaaagtggtgctggtggggcacgatcgcggggcgcgggtggcgacccgctttgcgaaagattatcccgagttactcgaccgcctggtggtgatggataacgtgcccacgcgcattgtggcgcgcgatctgaatgcttcgattgcgcgtgcatactggttcttcctgtttcatctggtgcccgacctgccggaagccctgattgcggggcgagaaggcatatggctgcgccactttttctcggactggacctacgacccgtctaccatcagcggcgaggcgtttgacacctatgtacgcgcgtatcaggcgccgggtgccgtacggggcgctatggctgactatcgcgccaacgcagaggatgtggcacaggatctggcagacgctgacgtgaaaattacctgcccggtgatgtcgctgtggggcaatgattttcacgcagtgggtaagctcttcgatatgcaaagcgtctgggccgaaatggcggataacctgcgggcatatggtattgatgagtgcggccatctgccgcaggaggagcagccagagaaagtgaacgcgctgctgctggatttcctggcggggtggaaaggttaa

SEQ ID NO: 127652 - DNA, 981 bp, Enterobacter cloacae
atgaaaaagttgaaagcggtgctggcgttaagcagcctgttctttgcaggcacaacgtgggccgatgtacccgcgcagataaaacagcaggttcccggctattatcgcgtggccgtaggggagtacgaggtgacggcgctgttcgacggctataacgacctttcgcctacgctgttacaaggcctttcacccgacgcggttcgcaagctgctggcacaacaaaaaatcgatgccgaacgcatgcctaccgccttcaacgcctttctggtgaataccggtaaacacctggtcatgattgacagcgggggtggccactgcgtggcggaaacggccggccagctcatcggcaatatgaacgcatctggatatcgccctgagcaggtcgatacgattttcctgactcaccttcatctggatcatgtgtgtggcctcagcgatgcagacgggaacgcgttgttccccaatgccaccgtttatgtgccgcagggggaggccgattactggctcgatccggctaaagaagcgagcgcgccagcgaatgcgaaagcgtatttcgctatcgccaggcgtgcgctggcatcgtataaagccagaggacatctcaaaacctttgttccgcccgcttcgcccattcctgaagtccagacggcctatgccattggccatacgcccggcagcaccgtttaccgttttgcttcacagggaacggccattaacttcattggggacctgatccatgcgcctgccgtccagttcccgcatcctgacgtgtcgattcgtttcgacgtcgattcgaaaaaagccatctcatcccgcgcgaaggaatttaacgcgctggcaaaagacggcgagtggatggctgcggcgcatctgcctttccccggtattgggcatatcaccgcctggcagcagagctatcgctggaacccggtcaattacggtccttatcaacgtgcggctaacgtgcctctgctaaaataa

SEQ ID NO: 127653 - DNA, 897 bp, Enterobacter cloacae
atgaaactggaagatattgaagtgtttgttgaagccgtcaaggcgggtagcctcgccggcgccgcgcgtcggctctcgatgagcgcgatggcagcttcacgcgccctgacgcatctcgaagcggagctgggggttcggctggtacatcggaccacgcgttctctctcgcccaccagcgacggggagatttttctccctcacgcgcaggcgctactggaagataaaagcaacgcgcttgccgacctgtttcccgacgggacgcacctttcaggacgcctgcgcattaccgcctcagcgggatttggccgaaagatcgtggctcccatgctgacccggttcatgcagcaacatcccgccctgcaggtcgatttactcgcgaccgacgaacaggttgatattgtcggcaaaggcattgacgtggcgttacgcattgcgccgctgcgcgataaccggctggttgcccatcgcctgtgccataaccctcgcgacctctgcgccagcgcggagtatctggctataaacggttatcccaaatcgtttaacgatctggcggcacacagttgtctgaccacatctgacacggttcactggtcattcgaacagggtgaacagcgatacaaacagaaggtaacgggccgattctccgcgaactctgttgaggccattttcgaagcctgcctcggcgggatgggcatcgctaatttgtctcgctggtacgtcgaaccggcgttcagagagggtaaacttgtacgcatcgtcctggaggatgcccagccggaatcgctggcagtctgggcggtttacccaacctcgcgcctgatcccggcaaaagtacgaaagtttgtggaagccctggaggccgagctgctgcgtaatccgcttacgcaacagacctga

SEQ ID NO: 127654 - DNA, 777 bp, Enterobacter cloacae
atgcccgcgctcgactggcagggggtgctgaccggacagcccctgcaatggattatttccggttatctcaccaccctgtgggtgacgctcgccggggcgatactggcaagcctgcttgcgctgctttttctgctcctgcgtctttccggtgggcgccccggcaacgcggtggtcaatggctgggtgtcgctttttcgcaataccccgctgctggtacagctgctgttctggtattttgccgcctggaacggtctgccgcaggcattccgggatacagtgaatgcggatcaccgctggtccattcttcccggtgatgtctggtggttcacacccgagtttttatgctcggcctgggggctgggcgtgtttacctcggcttttctcattgaagaagtggcgtccggattacgttcagttccgggcgggcaacgggaggcggcgctctcccagggattctccgcgtggcgtctgtttcgttacatcctgctgccgcaggggctggcgaacgcctggcagcccgttgtggggcagtaccttaatttgatgaaactctcctcgcttgccagcggtattggttttgccgaactgacctgccagatccggcagattgagagctttaacgcgcacgcgctggaggcgtttaccgtaggcaccctgctctatctgttcaccggtgtggtgatgggcgtggtgctggtgcggctcggtcccgccgcaaaacgtcaacgccagcagacaatactcacagggagtgaaaaacatgattgccggacttaa

SEQ ID NO: 127655 - DNA, 288 bp, Enterobacter cloacae
atgcaaattcataaaaccatcaaaccgattttcgtctgtaagtttcagtgtgttgggccagagtgcttaatgacatgctgtggccgtaattggtcgataactattgataagaaaacccatcagaaatatgttctgtcctcacgcgcagacattgcatccatcgccaaagagaatcttatccttctgcgaaagggtaaaaataactattccagagtgaagctcaacgaaaaaggggactgtccttttgtcgatgaaaacaagctctgcatgacaccgcgatttaggtga

SEQ ID NO: 127656 - DNA, 1050 bp, Enterobacter cloacae
ttgtgcctgaatttaagagaatacgtccaccaaatcggtgtctgcaccgacataatgaggaaaatcatgtcacatctcgcagagctggttgccagtgcaacagccgccattaatcaggcctcagatgttgccgcgttagacaatgtccgcgtcgaatatctgggtaagaaagggcacctgacccttcaaatgactaccctgcgtgagttgccgccggaagagcgtccggcagcgggtgcggtgataaacgaagccaaagagcaggtgcaacaggctctgaacgcgcgtaaagcggcgctggaaagtgccgtgctgaatgcgcgtctggcggcagagacgatcgacgtgtctttgccggggcgccgtatcgaaaacggtggtctgcatccggtgacccgcaccatcgatcgcattgaaagtttcttcggtgagctcggctttaccgtggcgactggcccggaaatcgaagatgattaccataacttcgacgctctgaacattccaggccatcatccggcacgtgctgaccacgacactttctggttcgacgccacccgtctgctgcgtactcagacctccggcgtacagatccgtactatgaaggaacaggaacccccgatccgtatcatcgcaccgggccgcgtgtaccgtaacgattacgatcagacccacacccctatgttccaccagatggaagggctgatcgtggataaaaacatcagcttcaccaacctgaagggcacgctgcacgacttcctgaacaacttctttgaggaagatctgcaagtgcgtttccgtccgtcctatttcccgttcaccgaaccgtctgcagaagtggatgtgatgggcaaaaacggcaaatggctggaagtgctgggctgtggcatggtgcatcctaacgtactgcgcaacgtgggtatcgacccagaagtctactccggctttgcgttcggtatgggcatggagcgtctgaccatgctgcgttatggcgtgaccgatttgcgtgcattcttcgaaaacgatctgcgtttcctcaaacagtttaaataa

SEQ ID NO: 127657 - DNA, 210 bp, Enterobacter cloacae
atgaaaaaaatccaaaatgctgctgcagcaatggtgctttccgcactctcctttggtgtgtttgctgcggatgacgtcagccaggccgggataactcgcgcctctgacgtcgaagccggttcaaacatcgcgccaggagcacagtctaccggccaatcgatgaatgacgcgtttgacgtgcataaactggttgcaggtgaatggtcctga

SEQ ID NO: 127658 - DNA, 1071 bp, Enterobacter cloacae
atgcagatgcagacgtcttctgtatgggagtccacctacgtcatgtcggatattatccttgcccgagtttcagaaactctctccactgagcaaacccttgaaagtctcgttcgacagctgctggagatgctggaactggtgaccgaaatggagtcgacctacctgacgaaggtcgatctcaatgcgcgcctgcagcatattttatatgcccggaacagtaagcagatgcagatcccggagggactgagcgttccctggggcgacacgctgtgcaaacgtgcgctggacagtgacacgcttttcagtaacgcggtgcccgagcgctgggcagattgcgacgccgcgaaagcactcggcattaccacttacgtgagcgtaccagtgcagcttgctgatggttccctttacggtacgctctgcgcaaccagcacgcaaaagaagcagcttagcgaacgcggtgaacaggttctgaaactgtttgccggattgattgcccagtccattcagaaagagtcgctggtttcccagcttcgtgaagcgaatgcggcactcatcgcctattcctacaccgatgccctcaccggtttacccaaccgccgcgccatctttaaagatctcaacaccctgttctccctgggccgccaccttaagcgcaacgtgattatcgcctttatcgatctggatgattttaaactgattaacgaccgatacgggcatgaaacaggcgatcaattcctgattgaagtgggcaagcgcctgtcagaagaaaaaaccgatgacgaaattatcggccggctgggcggcgatgagtttttggtagcctgcctgagtcagacagaaaatcaggctgatcacacccagattaaccagcttaaaacgcgccttcgggcccgcatcgccggctactacgggctggacagtgtgaacgttgtttaccccggtgcaagtctgggaattatcgacatcgatcctgccgggacggatgaggacagcgcgttacgcgccgcggatgtcgcgatgtatcaggataaaaagggaaaaagcaaaacccgctttctcgatctggattaa

SEQ ID NO: 127659 - DNA, 696 bp, Enterobacter cloacae
atggaaaaccccgatctggaaagactttaccctgaaaccaacgccaaaacgctggcgatgtggaaaacgcaggacggtatcggttcgcgaagggctccctgttacgcgtcgggcaggttcgcactggcgacggggttccagccggaaatcgcagagtctgttgatgttttattccgggaactgcagtcgcttacctgtcaggatccgctggccgatctccagccgcgcccgggtttccattttacctttgttccgttgacgttgcctctttatgagaagaacgcacgtttgccggtgaaaacgcatcagctcctcgacgcgtggtcaccgtttgcggggcaggtcatcaccatcagagcgctccggctggtggcgttgccgggccagcttcttcttgccggactacccgattctcccgccccggcacaacgaaaggcattttgcgaaacgctgttaacaacgccctggcaagatgaactgtggttacgtcatgataagacaccgctacccgcgcctttctggcataccacactgctacgctatcaggctgattatatgccagagcccctgagggcatttttccgggcacggcaatcgctgcgctttggcgacgtctgcggctcgcttgatctccggctggtcaattataactggacgtactccacaccggtcacgccgggtatgattgcatcctaa

SEQ ID NO: 127660 - DNA, 978 bp, Enterobacter cloacae
gtggtaaaacgcttatacgttaaacgtatgacagataaaaacatgaagcgagttgaacgtatagacagggtggagttgatgcggacgtttgtccgcattgtggaagccgggtcgttatccggggcagcaaggcagctggcaaccacccaggccacggtgagtcgccgtcttcagtctctggagacgctcctgggggcgcggctgttgttgcgtaccactcatgcgaccaaacttaccgacgacggcgaacgctgctatcagcatgcccgccgggtcattgacagctggctggcgctggaagatgaaatcggccagacagaagatgaaccggttggtgttctgcgggtgcgcgcgccgcacgcctttgggcaggatcagcttctgaaaccgttaacggagtttttgcagcgttatcctcagctctccgtcgagtggatgttgaatgacaagtcggtggatttcctgagcgataacctggattgcgccattcgcgtgggagccgatgttgatccggcgaccgtttccgtgctgctggcagaggtgccgcgctgcgtggtggcctcgccagcattactggcccggtttccaccggttaaaacgccggaggatctgcaggtgcttccgtggattgccatcaatacgttttaccaacgtcatgtggatttgcaggaggagagctcgggccagtcagcacgtatcagcattacgccgcgactgagcaccgatagcctctatgtggcccgcaatacggtcctgacaggtcttggcgttgccgtcgtatcaagctggacggtacaagaggatattcaggaagggcgcttgatccatttactgccggagtggcaacctgcggcgctgccggttcatctggtttatccatggtcgcgctactatccggcacgattacgccgttttctggagttgatgaaacaggtgatgccgggcattgccgggatgagaaagccggtaaacgggtaa

SEQ ID NO: 127661 - DNA, 321 bp, Enterobacter cloacae
gtgaccaaatataccgctcaactcgtttctggttttagtctgctcgtctctctttttattaccccggtttttgcggcgacggttgtggagggtggggtgattcattttcgcggcgcgattgtcgcagacccctgtgaagtgactgcacaacagcggcaatttgcgctgtcatgcccggaaaataaccagatgcaaacgcgcatggtcagttatgaagaggcacttaatgggcatgtgaccgattccagccttgcctccctcagcatgaaatacctcaatcctgaaaaaacgctcgcggtggtggaaattcaataccgttga

SEQ ID NO: 127662 - DNA, 1584 bp, Enterobacter cloacae
atgcaaagtaatgtctccgtacacggaatggcggttgccccccatcatcttgccagccagagcgcactgtcggtgctgcgcgacggcggtagcgcgattgaagcgatggtcgcggcggcggccaccattgccgtggtctatccccatatgaatggcctgggcggcgatggcttctggcttatcgtaccccccggcggcgaaccgattgccatcgatgccagcggcgcggcgggatcgctggcgacgcttgccgcctatggcgatctgacacacattccccaccgcgggccccgtgcggcgctgaccgtggcgggtaccgtcagtggctgggaggaggcgcttaaggtctcacgcgcgctgacgggcaaggccctgccgctgacgcgtctgctggcagatgccattgactatgcccgcaacggcacgccggtcacggcctcgcaggccagcgccaccgtcagtaaattcgacgaactgaaagacctgcccggcttcgcggaaacctggctggttgacggcaaaccaccggaggtcggtagccggttttatcaaccggcgctggcctccacgctgatacaacttgccgaagagggtctggagagcttttatcgcggcccgctggcggcgcgtctggcccgtgggatggagacactcggcctgccgattacgctggccgatttgaacgcgcatgtcgcccggcgcaccacgccgctgaaattagcgcatcagcagggtgaggtctggaacctcgccccgccgacgcaggggctggtatcgctggcgatcctcggcattaccgaccgtctggcaatggccgatgccgacgacgccgggacggtgcaccgcattgtggaagccaccaaactggcctttggcctgcgcgatgcccacatcaccgacccgcgcgagctgaaaaccgacatccagagcctgctggatcctgcggcgcttcaggcgctcgccgaccgggttgacgataaccatgccgcgccgtggggcaccggcaaaggccccggcgatacggtgtggatgggggtgatggataacagcggcctggccgtgtcgtttatccagagcatttatcacgagttcggcagcggcgtggtgctcccggataccggtatcgtctggcagaaccggggggcgtcgttcagcctcgattccgcacatcttctggccctcgcgccgggcaaacagccgttccataccctgaatccggccgcggcgcgtctgaacgacggacgggtaatggtctacggctccatgggcggtgacggccagccgcaaacccaggccacgctctttacccgctatgtggtgcagggtctgccgctgcaggagagcatctcccgcccgcgctggctgctggggcgcacctggggacaaacctcagacaccttaaaagtggaaggccgcttttcccctgaaacgatcgcacgcctgcaggcgctcggccacgaggtggagatcttcccggactttagcgaagccatgggccacgcgggcgcgattgtccgccacccgaacgggctgtttgaaggcgcgttcgacccgcgcagcaacggtgccgccgccggatactga

SEQ ID NO: 127663 - DNA, 207 bp, Enterobacter cloacae
atgagaagagaagagtttgaagtggttgtgttagcggaagatttgccggatgaagggttaactaaaggcatgataggtgccatcgtattcatacatgaaaaaccacatctggcttacatggttgaatttgttgatgatgaaggccgcactgttgcaatgccttctcttttacctgagcaaataacggattatattccgcaagaatga

SEQ ID NO: 127664 - DNA, 1131 bp, Enterobacter cloacae
atgttcacactctacatgcaatgggaagccaggcggaaactggctccggctgatattcagttcatcctcacgccacgtgaatcacttgagatggcgagcatattttacgaactggattaccaggaatacgaccagcgttacccttttcaccgtcatagtgttccgagaaggcgggaagggggtcatcaccgtcatgcagctcagccctacagacgcaagcacagaccggagtacgacggactctatgatgaggtggaatggaatcttgagcacggctggatggtcggcgtggacacgggggaaaagtgggataagttccgcaatccgttctcctttgatggcgaaggtaatctggtttatgactgcttcatggatacctacggcgagagcttcccgcaggttgtgcgtcaaatctacgagtacgccctcaacgaacaccagggcaggaagccgcctccgaccgttaaggagcactattccgatgccccgatacaacacgctcaggccgcaaaaactatcaacaacaaagcagcgggaaggcttcttgctgcgggcggcatctacaacggcaacatagaggggtttcataagaccgtacagcagctaggcggcgaagctccagcaggttacgatcaggttatggacaacaaagggctcatcattgctggcgcttctgttgctgccggactaagaatgggaaaaattaacatcaccggagaactggaaaagttatcgtcattaagcaaaatcccagagtttgaatcaccagctttaaaggggtttacctcggagtcaggcacattgcttaatgccgaacacgccgttgtagattacagaaagctatcaacttactctttagatgttaaccacccagtcggcgggcataaggccagagtattccaatcggcactgggttataacccgacaaattctgacgtgttagcagatcgagtccgagagggcatactaactgccccagctaaaattttgaacgcggaccagtacgggcagcgaatggctgtagagatgccgatattaggcctaaacggtgagacagtgatagtgcgcagcggttggatatatgaaactgatgctgttgttccacgcatgacgacgattttggttaagtga

SEQ ID NO: 127665 - DNA, 558 bp, Enterobacter cloacae
atgaaaaagcgcaatgtaatcacaacagccgctctggcggcgataagttttcaggttttagccgcgacgcctttcagtatgaccagccaggatatttcgggtgagcgccatttaacgcaacagcaggtattcgagggattcggctgccacgggggtaatcagtctccgcaactggcatggaaaaatccgccagtgggtacgaaaagttttgcgatcacggtgtatgacccggatgcccccaccggcagcggctggtggcactggacggtagccaatatccctgcggataccacgacgctgcctgctgatgccggtaacccaaatggtgaaaaattacctgctggcgctgtgcaggggcgtaatgatttcggttattctggattcggcggcgcatgtccacctgcgggagacaaaccccaccgttatcagattaccgtctgggcgttgaacgtagaaaaattgcccctcgacatgaacgccagtggcgcactggtcggttttatgatcaacagtcacgttctggaaaaagcccagttaactgcaacctacagcagataa

SEQ ID NO: 127666 - DNA, 723 bp, Enterobacter cloacae
atgcacatccattttatcattcatgaacatttcgaagcgccaggcgcctatgaaatctgggggaaaaagcgcggctgtacgctgagctactccagggtttatcaggacgatcctttaccccaggatccgggaagcatagatttgctcatcatcatgggggggccacagtcacccgccaccacgcttatggaatgtccctggtttgatgcgcaggcggaaattgcactcattcgccgggcgatagaagcgggtaaaacggtaattggcgtttgtctgggatcacagcttatcggtgaagcactgggtgccacgttttgccacagtccggaaaaagagatcggcaaatttcccatcaaactcacagatgccggcaaggtgaacccgctgtttgaggactttggccgcgagctgaacgtcggccactggcataacgacatgccagggttgacgtcgcaggcaaagattctcgcttacagcgagggttgtccccggcagatcgtgcagtacagcgaacgggtttatggttttcagtgccatatggagctgacgccggaggtcgttgaactgctgattgagcattcgcagcacgatctccggcgtgcaggggcattccgttttgtcgaaacggctgaacaactccgctcgcatgattatcgtgaaatgaaccaggcactgttttcttttctcgataaacttaccgcccaacacaatgttggactctaa

SEQ ID NO: 127667 - DNA, 435 bp, Enterobacter cloacae
atgaaaacgcgattaactttaattgctctgttgttcactgtcgcggcgacgccggctcatgcgataaacgcacactatcgtgctcaattagcgcgttcgggatgtactgaaataaacgccaacgatggcacttgcgatatccacaaaaacaaagcccaaaacgcggcacagccgtcatccgcagcgatccacgatccgatgcgtgaagcgtcattctcatcggatgcgcttaatgccacgatttcaaacggtttttttagcgccaccgttaatggtaagaaagcaaccgttaagcgtgtgaacgcaaacttctatgaaatccatggcggcgggttcgttatctctttaagccttgatgagaacggtattaccggtgcatcctggaataaaacgaagggtcgcgaccacggcattttgcaggttacgcagaaataa

SEQ ID NO: 127668 - DNA, 1278 bp, Enterobacter cloacae
atgaaaacgaaagtccaactgtcattcatgatgtttgttgaatggtttatctggggagcgtggtttgtgccgctgtggctatggctgagcaaaagcggctttaccgccggggagattggctggtcctacgcctgtacggccattgcggcgatcctgtcgcctattctcgtcggctcgctaaccgaccgcttctttgccgcccagaaagtgctggcggtgctgatgtttgccggtgccattctgatgtacttcgccgcacagcaaacccagttcagcaccttcttcccgctgctgctggcctactccctcacctatatgcccaccattgcgctgaccaacagtattgccttcgctaacgtcgatgacgtggaagccgatttcccgcgtattcgcgtgatgggcactatcggttggatcgcctccggtctggcatgtgggttcctgccgcagatgctgggctatagcgatatctctgataccaatattccgctgctgatgaccgcagccagttccgccctgctgggcgtgtttgccctgttcctgccgaatacgccgccgaaaagtaccggcaaactggatttcaaggtgatgctcggtctggacgcgctgatcctgctgcgcgacaaaaacttcctggtgttcttcttctgctctttcctgttcgcgatgccgctggccttctactacatcttcgccaacggttatctcaccgaggtggggatgaaaaacgccaccggctggatgacgctcggccagttctcggaaatcttctttatgctggcgctgccgttcttcactaaacgctttggtattaagaaggtcttactgctgggtctgctcacggccgccatccgctacggcttctttgtttacggcggcgcggaacagtacttcacctatgcactgctgttcctcggcattctgctgcacggggtgagctacgacttctactatgtaaccgcgtatatctacgtggataaaaaagcgccggtgcatatgcgcaccgccgcacaaggcctgattacgctgtgctgtcagggttttggtagcctgctgggttaccgcctgggcggcgtgatgatggaaaaaatgttcgcttataaagagccggtgaatgggctgaccttcaactgggccggaatgtggacattcggggcgatcatgattgccgtgattgccgtgctgtttatgctgtttttccgcgaatcggacaaagagatcaccgccattgaggtggttgatggcgatgctgcgctgacacaaggggaagttaaatga

SEQ ID NO: 127669 - DNA, 603 bp, Enterobacter cloacae
atgatgaaatacattaaaaatagcctcgcattaagtgctgtggttaaaagtaaaatggcgaccgttgatctccatcagcttgagccattaaaagaggagttaaaagcgcagtttggcgttcctgtgggtgtacatatgacaggaattcctttggcattgagtaccttacttgctattttttgctacgccatgctgcaggtttccctctggttgctgctgtttcgctggctcgaactgccagagtttaaagtcatgatgggagtattcagtgcagcaagtgtgtattgtctggcagtgatgagcacgatgtttatgacgatacggggttctttgtctggatataaactgcatatttttgtcattacgctgacaggcttgatgagcatcgtttatttcctctcgacatggattttgcttttattcggccccgttgacaattacacgccgcaaataacctctttattgggtctgggatttttctgtctgaatatcatgtggatgaatacatcgattttttaccgttccattgcgttaacgctacataaccgtgtctggcgtaagcagttgaaaattgaggcaaagcaaatgtcagggctcaaatga

SEQ ID NO: 127670 - DNA, 429 bp, Enterobacter cloacae
atgatagatatcacaagcggtgacagacaccttaaattaacgccttatgaaaggctgactgagcccgaggagccagcttatagccgtattatggtatgggttgaattctcaatccctgccttaaaaacggcgtttgctgcagagttttttgtcggtcagttagagcagttcaggcatgatatccatggcttccatcaggccttaaaaacaggggcgaaatttaaggatattaatttaacctcggcattcgagcaggttgtgcttaagtttcatcaggcacattttgccggagatgttggcgtcagcatggtactgaagcctgaaaaccatgctgacagtattacgcttgaggattccttcgatattgatgaaagctatttgccagacctgctctcaggtctggacgacatcatttcatggcagaactga

SEQ ID NO: 127671 - DNA, 1191 bp, Enterobacter cloacae
atggataatattcttcaactcattggacgtaataaaaaattgttcggtgaagatgtcttaaacaatgaaaaaaaattaaagaaaatagtttctgaatctcgatttttagttttggggggggctggttccattggtcaggcggtaactaaagaaatattcaagcgcaaccctaaaaaattacatgttgttgatatcagtgaaaataatatggttgaattggttagagatatacgcagttcatatggctatattgacggagatttccagacatttgcacttgatattggctctgtagagtatgatgcttttataaaggcagacggtaaatttgattatgttctgaatttgtctgccctgaaacatgtacgtagcgagaaagatccatttactttgatgcgtatgattgaagtaaacatcctcaatacaaacaaaaccattgaacagtctattgccggaggagtaaaaaaatacttctgtgtatcgactgacaaggctgcaaatcctgtaaatatgatgggcgcttctaaacgtattatggaaatgttcctgatgcgtaaaagcgagcaaattgctatttcgactgcgcgttttgctaatgttgccttctcagatggttcgcttttgcatggatttaatcaacgcctgcagaagcagcaaccacttgtagcgccaaatgatatcaagcgttactttgttaccccccaggaatcaggtgagctctgtctcatgtcatgcatttttggtgataaccgtgacatcttcttccccaaactaagcgaagcgcttcatcttatctcttttgccgatattgctgtcctgtatcttaaacaacgtggttatgaacctcatctgtgtgcaactgaagatgaggcaagaaaacttgctaagtccttaccagcagaaggtaaatggccatgcttgttcacttcaagcgatacaactggtgagaaggattttgaggaatttttcactgaggatgagacgcttgatatgcagtgttttaataatttggggatcatcaaaaatgaacctttatatgatcctgcgttactttcttactttgaagaacgcatcgaaaaaatgaaagcatctttagaatggaataaagacgatattgtgaaactgttttttgaaatgattcctgacttcggacataaagaaacaggaaaatatctagatggcaaaatgtaa

SEQ ID NO: 127672 - DNA, 1143 bp, Enterobacter cloacae
atgaatatcaaatcaattgtcgaatttattcgcgacgtatacaagacggatgaatttattcctttgcatgcgccggtatttaatggtaacgaaaaacaatatgtattggatactcttgacagtacatttgtatcaagtgtcggtaaatatgttgatgacttcgaacgtaagatagaatcattcaccggaacggcacgagcagttgcaaccgttaacggtacagctgcacttagcgctgcgctttacttggcaggcgttaaaaggggcgatcttgtgataacccaggcattgacctttgtagcaacctgtaatgcactttaccatcttggagcagaacctgtttttaccgacatatccccggtaagcctgggcctttgcccggtcgcgcttgaatattggttaaatgaaaatgccgagttgacagagaaaggctgcgttcatcgcaaaacgcatcaggttatacgtgctgtagtacctatgcataccttcggtcatccggctgaattggatgagctcgttgccgtttgtaaaaagtggcatattattcttgttgaggatgcagctgaaagccttggctctttctataaaggtaaacacaccggaactctcggtgaatatggtgcactaagttttaatggcaataaaattattacgactggcggtggaggaatggtgttatgtcgctcgtcagaagcaggagtacgtgcgaaacatgtcaccacgactgcaaaagtgccccatccatatgagttttatcatgatgaacccggttttaattatcgcatgccaaatcttaatgccgcgcttggctgtggacagatggaacgcctcgattcttttataacacaaaagcgcggcttggctcagcgatatgaggaattctttgctggttcagaatttaattttgtcaaagaaccagaatatgcgcaatctaactactggttaaatgctgtcatttgtgaaaacttggatgctcgtaatgaaatgttggcgcaaatgaatgaagccaaagtgatggttcgaccaatctggaaattaatgcaccgtctgccgatgttcgggcatgcgatgcgcgatgaactcaaaaattctgaacagattgaagctcgcctgattaatcttccaagctcaccgatggaataa

SEQ ID NO: 127673 - DNA, 1164 bp, Enterobacter cloacae
atgggttctgcaaaacgaaaagttgcggtgtttaccggcacgagggccgagtatggcttgctgtactggcttttaaaagatgttcaaaacgataaagagttagaactacagcttcttgttagtggtatgcatctctccccagagtttggaagtacatggcagcaaatagaacgtgacgggtttgcaatcgatgagaaaatagagatcctgctatcttcagatacgccagtaggtacagcgaaaagtattggcttaggggtgttaggttttgctgatgctttaagtagattgaagcctgatgttctaataatactcggtgaccgttttgaagctctcgcagttgcgcaaacagccatgattctccgtatcccggttttacatctacatggtggcgaaattacggaaggcgcttatgatgatgcaatcagacatgctataactaaacttagctatcttcactgtacttctacagaagaatataagaaaagagttatccagctgggagaggatccaattcgcgttgcaaatgtaggtgcgattgggttggatcatataaaacgaagccatttcttgtctttagaaaagctttcagtttcattaaattttaaacttacgcatccgtatttcctcgtaacgtatcatcccgtaaccttaggaaaagaatcaccagaagaaagttttaaagctttgctagaggctcttgattcgtatccgaattatcaggttattttaacatacccaaatgctgatgatggtggacgtaaaattattcctctgttggaagcatatgcatcatcgcaaccaaatcgtgtacttgctattccatcgctaggacagttacgttatttaagtgctgtaaagcatgctgcagcagtaatcggtaattcatcaagtggtattattgaagtacctgcatttgacgtaccgacagttaatataggagacaggcaaaaaggacggctcgcagctaagagtgttcttaattgccctgcagacagtcaatctattattaacactattaaggtagccattacacgtagttataagggacctaatgaaaggattactaatccttatggtcaaggcaacgctagttcaaaaattattgaaatgatcaaatcaatgaattttgagcgtagtaagattttctatgatatcaagtga

SEQ ID NO: 127674 - DNA, 1074 bp, Enterobacter cloacae
atgactctaattattgctgaagcaggcgttaatcataacggcgatgaaaagctggcatttgaacttgtcgatgcggcacataaagcaggtgctgatattgttaagtttcagacgtttaaggctaagaaccttgttacagaggacgctgaacaagcggattatcaaataacaaataccggcaaaaaagaatcacagttagctatgcttagtaggcttgaattatcatgggaagctcatcataaattattagcatattgtaaaaagttaggaatagaatttctctcaacagcgttcgatcatgaaagtctggatttccttgtaaaagacttaggtttaacgagattgaagttaccttccggcgagctaacaaatgctcctcttgtcttgcaacatgcgagaacaggttgcgatataattgtttcaacgggcatggctaccttagcagaaattgagatggctctaggtgtcattgcttttggttatactactgatgataatgctattccaagtgtagatgctttccagtttgcatatgcttcgtcagaggggcagcgagcattaaaggataaagtaacaattctccactgtacgacagaatatcctgcaccactcgatgaaattaacttacgagttttagataccctgcaacatgcttttagtttgcctgtaggatattcagaccatagtgaggggattattatcccaattgctgccgttgccagaggtgcgaaggtcatagaaaagcattttacgctggataaaacgatggatggaccagaccataaagcgtcactggaaccagatgaactcaagaacatggtagatgcgatacgccaggtggaattagctctgggtagcacactaaaaagtccaactgcttcagaaattaaaaataaaaatatagccagaaaaagtattatcgcagctactaatattaaagctggtgaaaaaataacagaacaaaacattataattaaaagaccaggtggtggaatgtcaccttacaggtactgggatgttgtaggtaaaaatgcaaataaagattattcatcaggagaatacataattgaataa

SEQ ID NO: 127675 - DNA, 669 bp, Enterobacter cloacae
ttgaataatgcccattcatctggttatgtttttataggttctggtgggcattcaagcgttttagcagaaattgctcaaaatcttaataaagacgtatgttgcctggtgactgtaacaccaccagataataatgggattttttcaaagactaagttcttaacggataatgatttcattaagcaatatgataacaacgatgtcattttagtgaacggtattgggcaagtaccttacaatagaacacgtgagattatttataagaaatatactgagctgggatataaatttgcccaaataatatcaccaggttcagttatatcaactttctcttctctgaatgacggggtgcaaattcttacaggtgccatcgttcagtatggggcaaaaataggtagcaattcaattataaatactggtgccatcatagaacatgattcaatcattggagataattgccatatagcaccaggaagtgttatatgtggtgatgtgaaaattgggcattcaaccattattggtgctggagcaactgtcattcaggggattactattggtgacaattgcatcatcggagcaggggctgttatcactaaagacgtcagttcaaacagtatttgttttccagcacgtacatatattgaaaagatcactagtgagaaattgaaatga

SEQ ID NO: 127676 - DNA, 492 bp, Enterobacter cloacae
atggctattcctgcttacttatggcttaaggatgacggtggtgcggatatcaaaggatctgttgatattttagatcgtgaagggagtattgaagtgctttcatttagtcacggcttattggttccgaccgataacgggacgggcaaaataaccggtacgcgcctccatgcgcctctcgtaatcgaaaaagagtttgatagctcgagtccgtacctctacaaagcggtagcaacaggccagacgctaaaaagcgcagagataaaatggtataaaatcaacgatgcaggacaagaagttgaatacttcaatatgttgcttgaaaacgtccgggtagtcagtattaaccccgttatgcataactgcaaagagccagcattacagatacacaatcacaacgaaggtatacagctccgctatgagcgtatcacctggaagtactgcgacgggaatgtccaatactcggacgcatggaacgagcgcgttacagtctaa

SEQ ID NO: 127677 - DNA, 393 bp, Enterobacter cloacae
atggcatgtataccaatttacccaccccgtgggctggagattttacgggaacacatcagactcgcgagagcacggtgcgaagtgcaggacatggccgctccgctaacgtatatctggttttatcatcgagtcagaaacggtgggccgtgggattacaaacaaaaaaatcggctgtgggctgattttggtaactttcatttcggggcagtgggttatgctgcttgcattccggcagaaattttacatatggccgctggtgcggcgcagtggaaagcgggcacatcaagagaagaatggggaaatttcatgcaagacccaccgttcggcgatgacccgattgatcagttctggataaaacagggaattgactatgctaaacagcaccacttttag

SEQ ID NO: 127678 - DNA, 465 bp, Enterobacter cloacae
atgctaaacagcaccacttttagagtgctgcattggaccgccactgtgattatggccgttatgatcgcgatgtacggctatttacagcatattcagcacttaactgtgcgagacaagctttacgaggttcgtcaactcacaccaaggacgtggctatatatcactgaatacgcagaaccggacacgacaacaggggacgtataccgctattttttggcgagcaagtatgacggcgatcccctggagggtctcgaaaagcagcacatcgcccccacgcttacagcgaacacgccacgtgcaaaagttgatggaatcggaaataacatctctttcaccgttcacggcaccgtatacgactttacgacctccgcatttttttatgatgctgaggggatagcggtcgcgccatcggtcgatttaactgctcgcggtgaaggctgggataaagggaaattcaacaaataa

SEQ ID NO: 127679 - DNA, 264 bp, Enterobacter cloacae
atgcgcagtgtcgcgtgcagaacattaagcaaaatcgttgccagaatggttaacccattgacggcgttgcgacatgttgagtatagagcgccgttttacgcagccttgcgggacacgctgaaattacagcggagatcacatctcattaacaataaagcccataagttgtgcaagggtcacgatttgcacgtttttgcagcaatgattcgcgtaacttccgccgggaaaggcgtacgatatgtgttaggatcctttcctttttga

SEQ ID NO: 127680 - DNA, 1098 bp, Enterobacter cloacae
gtgatcaaatggctcaggaaagcaaacagatcgaaaaattattatctaaaaagagccaaattaaagctcaaattgaacttattaagtgaaattactgctcgttctcgagccaataagactgggagtgatttaggcacaaatcatttagtaatacctttcatcgctaaaggtattggtgatgctgttgttattggtggggtgattaatactctggtgaaacataattaccgagtttctgtaatagcagacaagagaacttattttctatttaaagaatgggataatttagatggactatatttatatgaagccaataataaagcccccctacttagtgcgctgaatgaaatcagcccatttattttcattgattcgcatgaggtaacacactctaatattgatacatttaatttgattagactatcaaagccttataagaccattggattcacaagcaaatatcgaatatatgatgaagtcattaaaataaaaaaacctctggcgcatattagcacccggtacattgacttacttgaaaggttagggatcagtgtaacagattatgattactcagttattatacctgacgaagatgctaatgcggcacgggagtttattaaaaaaaccaccaataaaaaaatagtctcatttatcccttacggtagcgtcagtgagcgttttttctcagcatcgcaaattgaagccataacaaatcatatggctaaatacgccaattcttatcacatgatcatcctcggtgagcaacacaagattgccactatcccagattcagaaaatgtcactaaaaatacaacgccgtcattcttttctgccgcacaaataatcaaagatagcgctctggttatttcccccgacacatcatttgtacatgtgtcaagagcattccagaacaaactgatctgtgtttaccctttaaaaatactcgtcgcaccagcagataacgcagatgtgtgggggccaaactacaaattagctatacaggtgagactgaaagaacgtcgggttatggatgccgatattaggcctatactttctttaattgacgagcaattgaatgacgctgctgtaaaagaataa

SEQ ID NO: 127681 - DNA, 219 bp, Enterobacter cloacae
atgtgggaatctataaaagaatttttgatgagatttttaaaaagttttttacaagatattatgaatgatttcttttggtatggcactggaatagtcgctgtcattccaggtgctgtcatagcgagttttatagaagatgaagaaattgcactattgattttttgcattattgtattagctgtttacttcattgcatttcgctacaaaaacaaagaatga

SEQ ID NO: 127682 - DNA, 792 bp, Enterobacter cloacae
atgagtaaccgactggcgtttccgatgtatgcggtggatcgtcatgataccctcgcactgtggcgggccgtccagcgtctgctggtggcgcgtggtctgcctgtggaggatcttatccccggctggccggagtctgacctgccggcacactggcaacagcctaatcttatcctgagccagacctgtggctacccgctgatgacacagttgccggcggtgcaggtcgtcggctgttttcactaccgggtaccgggctgcgaaggcatccactaccgtagttttctggtggtacgtgatgaggataaacaccgctcgctgactgattttcgcggacggcgggtggtatgtaacgcgcccgattcccagtctggctacaatgcgctgcgcaaccgcgtgccgtcacgtgcgttaaacgcctggttctctgaggttatcttcagtggcagccatcgccagtcgctgatcgaggtaaaacgtggaggaggggatatcgcggcgatcgactgcgtgacctatgcgctgttgcagcggcatgagccgaacctgctggcgggactggctgtgattgaccagacgcccttcacgccaggactgccgctaatcaccgcgcccggcaccacccccgaaacgcttcaagccatccgcgatgcgctaaccacgctggtgagcgccccggaataccggggcgtgtgtgatgcgctgtttatcggcgggtttagcgtcgtggcgcgcgaggcctggtctttgttaaccggggttacagcggacggatctctttcgagcgcagggtga

SEQ ID NO: 127683 - DNA, 477 bp, Enterobacter cloacae
atgtctgtgaatacaagacagataatggatgcggctgtgaaagtaacgatgagaataaaaactctcatagcgatgagtttgttgtttatctcattgcaggcaatcggtgaagtacaaaattatagttatccacgcgcagaggcactaccgcaggatgatacctccaattttctgcgcgatcctgatttgttaactggatttgatttgaatctctccgctgagcgcttcgccagagcatggctttcaaaaacgaatgaacgcgagcgcattaaagcggatatgtatttgctgggcgtaattgatgcatccgaagggagtgtctggtgcaaaggcaagccagtgttgccgggttctctgcatgaatttttttattctcgttttgcacatttgtcaaagcatgaagggaaacaacacgcttcaaaaattataactgaaggcatgaaaacattacgcccctgcaaaacccggcctaactga

SEQ ID NO: 127684 - DNA, 420 bp, Enterobacter cloacae
atgagagttttcttttttttacttatctgcatgacatcgtatgcgtatggcgtaaataactaccctgattttcaacaccagcaaacctacagacaggtgatgaaagattatgttctggcacgctgtcttgctgaggtggcagataaaggtgggcagttttctgctgatgcaggattgagtgcaagtgcattgttggaatggatgcctttcgatgtggaaaatggcatggagaaagttgaagctgttataaaaaaatataaagacgaaaagaacagctttcactccgaacgttctcaaaaaatcaaaggcgtaaccttaaattgtcttcgtctttatcatagcgacgaactgaataaagtggttccgcaggtcatcattggcgatcctgatcgtacctggattcaggataacccgcagtag

SEQ ID NO: 127685 - DNA, 990 bp, Enterobacter cloacae
atgacgagtcaatcattagttagcccgggatattgtattgtccagcaacccggaaccctggatttccagacaaggtttttattcaataatccaaatagtgatgctgcacgttatttcatgcaggttaatagcgatgcgcaatggtccaaacctggacagatgttgattcttgatgcaccgggaagtaataattctgtgcaacttaagcaactacagcttgcaaaaaagaaagtcaatagtgctctggccgatcttaactctggagaagcgaatttctttaatcaacactgtagtaccatagcagcagtcactaattttatggataagtcccttggtgtcgttgctgatgcaggcgaaaaatatttcagcgaaatagaaaaaaaacttaaatccattgagttggcttaccagaatcagtacaggacgcaaggaacattaataagccagcagttttttgttgagcgtcagcgcctgttttctgagctggatggattattaaacaaattatcaaggttgacgttaaagatgaaaccctataacgaattgaagcatgcattagggttgtcaagtagatcaattgtacatgaatggagcacagctggagtcgcttctattcgtggttattcaacttatatcgataatgcctctaaggccgctcgctttcttaaagcaggggggtggcttgcaataggttttgctggtgcaaataccaccaatgaagtttacaatgcatgcaccgtaggacgtgagcagagttgctctaaagtcgctgtgaaaaaatacagtagctttggtgcaagcctggcagggggtatttacggtggtaaatacggagccatggcaggtgctggtgtgtgcgttgcgcttggtgttgcgacggggggcgccggattgctcgcctgctccatagtcggggcggctgcgggtggatacgttggtggcgagatagcaggtggagcgactgagtatatgatggataaaatatggtga

SEQ ID NO: 127686 - DNA, 417 bp, Enterobacter cloacae
atggtgaatattgagaatttactattattccttatcgtagctttatttctgatcgtggtagttatggatctgttcagttctcgttatttcaaaaaacacgagactgattataatcagctactttctgactaccggcgcaaaggttatgatctggatcttgtaacagactacgcttctttttttggttcactggctaattaccaaaaaataatctggtttgtacgcctttataaaggcgtcagaatgaaatttaatcatgaaagattggtgcaggaagacgcttataaatacgtgcaatcgttaccggaagaaagaattggctggatactaaagttacatcgtcgttataaattccaggcgttaatattcactctatggctcattgttggattatattttataaccttcataaaatag

SEQ ID NO: 127687 - DNA, 765 bp, Enterobacter cloacae
gtgaataagctttttgtatcctttttcgtgattctattttcattgctgattcaggggtgtaaacaagatatggatctaaatccacaagattatttcagcggtcagcaactggttctggctgaagatattcagcgtggcgatattgacggtgttgaaaaacttgcgccgcgaactgatcttaacaaaccaggtaagcaagacatgacgcttctgttttgggcgcttggtaacagtatcaatgacaataaaactccttctcgattaaaaatcgtcactttattggttaagtctggtgctgatcccctgcaaccgaggccgcagggtaaaagcagtcccgctgagtttgtattgaatgcggacagtgcagattggatcaatgctttactcgacgggggattatcgcctgacgctaaagataaaacgtttcatgagcctataatttttgaaaccatcaaagcaaaaaatacggacacgcttgaggctctgctggatcgaggggcaaacattaatatcactgattcattaaacagtacattattgtttgaagccttaaactatcatgcttatgatcacgtaatgctactgctgaaacggggtgctgatacagaaattagagccaaaaatggctggacgatgggtaaccaactccaacgctatcttgaaagagctaaagaaggtagtgatgagtataaaaaacttaacgaaataaaagaactccttattcaacatggcggtaaatggccacctgcgccagtaaaacaatga

SEQ ID NO: 127688 - DNA, 774 bp, Enterobacter cloacae
gtgaaaatacggttaattgctagcctcatagtggttttcatttttctgatacagggatgtagacaaaattcggatttgaatcccgaagattactttagcggccagcagcttattctggcgcgggcgattgaaagcggcaatatggatgaagtcaaaaaatttcttccgaaaaccgatctcaataaacccggtcaacatgatatgacgctgcttttttgggcgctgacgaatacactttatgataagaaaacgcaaccgcgcttgcatatcgtgaccgaactgataaaggccggtgccgacccgctgcagccaagacccaatggaaaaagtagcccggcagagtttgtacttatggccgacagtggagactggataaaggcgatgctggatgggggattatctccgaatgcgaaagattacgtttttaataaaccaattatttttcaaactctggaagcgaaaaacaccgagacactaaaagcaatgcttgaccggggcagcaatatcgacataacggattccctgggtgagactctgctgataaatgctttcgattttcattcctacgatcatgttttccttttacttgagcgtggggctgatcctgacattcgtgctgataacgggtgggccttaggaaatcagttgcagcgttttcttgaaagagcgaaaaaagacagtgacgagtataaaaaccttatcgctattaaagaatcacttatccgacatggcggtaagtggccacccgagccggtcaaaagagggattgagtga

SEQ ID NO: 127689 - DNA, 846 bp, Enterobacter cloacae
gtgaacataaaagcaaaaaataaaatactctatttctggggcattatggatgtcatcggcattgtgttttattttgtcggcccataccacttgcttcagtcatggtgggattctaccggtgggaattttggtgtcatcatcttcatgctgatagcaggaggggtaaacggtttattgacaggtcttttttacctcgtataccttctgtggccggtttcattactcttttctgcctggttttttttcacaactcaccgatatgccgtccggtttgctctggcgcaggaagtgctacgcctgctcaccctgagttgttcggtgaccttgttcccgatgattattgtcggtctcggaatgagtgttatatctcttaatatcacgctgttcattttgtcggaaatagtaaaaattggctcgctcatatttgtcatgaaaaaatgggatgcgggtgatggggtaaacaaatttttaccgttaactgaacgggactatatcgaaagggccctcagactggcgcaaaaaagatatgcggaaattaatggcaagtaccccagggagccaattttacatatgtatgatgagattgtgcagcagttacgcattctgaaaaagattgtgatcaaaaacaaagctgataaatccgtattaaagagaatgacttttggcatttatgcggtcagagaatttgaaaactcagatgagctctttttcgagagactgacggaagcatggtatatcgcagatcaacgtctccgtggcgttaaagtgaaattaccgcatgaagtggatcctgactatgttcagaaacaatgcgtactggcggaaaaataccctgacgaattttga

SEQ ID NO: 127690 - DNA, 1056 bp, Enterobacter cloacae
atggtcgatctacacagcgaagatgcggtaattaatcactatgccgacctctaccgcaatcttatgccgttaaaccttaggaaggtgtcacggcaaaagagttccgataacgtctgggatgaaacattgccgctcgtcacaacggaggtcgtttcgcgcgataacgcactcggtgcgttagtgggattggccgttggcgatgccgtcgggacaacgcttgaatttaaatcacgggatagcgaacacgttagtgatatgcagggtggtgggcccttcatcttaaacgcgggtgaatggacagacgacacatccatggctttgtgtgtggcggaaacctatcttgccgaaaatcgaatgaatacagatacccttagaaagttccttctgaggtggtatcaaactggagagaacagcagtaacggacgttgtttcgatattggcaatacaacgcgtttcgctctggaacaatatctgcatgttgggccttcctggtacggtaacactgagaaacataccgcggggaatgccggacttgttcgccaggcccctgtgtcgatcttccgccgaaagtcactccgggcgatttattttgaatcgcaggcacagagcagcgcaactcacggggcggtagagtctatcgatgcatgtcaatttttggggctgattctgcatcatctgattaatggtcatcaaaaagaagaggcattttcaccccatgtttttcctttgtgtgcacgggtcatgataatcaacgcgggtgagtacaagcataaagctcgtcatcagattcgttccagcggttatgtaatcgatacgcttgaagcagcaatgtgggcggtatggaatacggataatttccgtgatgcgatccttcttgccaccaatctggcggatgatgccgatagcgtcgcggcaacggcagggcaacttgccggtgcattgtacggttattctgagataccgcaggactggaaagacaaactggtacaacatgaacgtattgctgcgctggcgggtgatttgtttgacagagcaccagaggacaactttctctag

SEQ ID NO: 127691 - DNA, 348 bp, Enterobacter cloacae
gtgaataaacaaagttatacagcgatggattatattgaaaatgccctcgatgttattcaggagcgaaagtcaattcatccttctttttctttgtataacgtggctgaaaaacaagtgacgtatgtcagggatatcctgacaggaaagaataaagataaaagtaaactccatacgttaaatcttggcgctatggctgcaaaagaatttgaaactaccgatgaagagcttgcccggcatctgtcaaatgtaaactacatcgcttcgcagattgctcaagggttaaaagttattcttcctcatgagcaggataatgaatatctaaaaaggcaaaagcggtatcgaaattaa

SEQ ID NO: 127692 - DNA, 129 bp, Enterobacter cloacae
atgttgtctgtagtttcacagttcaacaacatggcttgtatgattggttttagtcctatgatatggagcataacgtgttgtcttgatgagaacctgcgcactgcgaattccgagattgttcggcgatag

SEQ ID NO: 127693 - DNA, 381 bp, Enterobacter cloacae
atgaaaataactaatcgactgaaaaagaaaatattagtcctggatggcatagataatgactttatagattatggcacagaaatagcatgccctgaatgcgagggtgtaataatctattccatcgtgaactcatatgagttcgacttgctttctgaagaggtaaaatacttcctggttaagaaaatgagaggtgtgaagttcgtcagtgataataatatatatatttacgatgacagccaactaaatgtttcgcaaaacacatgttcaaagtgtttaaaagagttttctactgtattaacgtataaagaagtgcagccagcccgataccgggtttatcttgtggggctttttgaaggtgatttgaaacagctcaaactttaa

SEQ ID NO: 127694 - DNA, 831 bp, Enterobacter cloacae
atggattttcagagctggttacgccaggccaccggcgcgctctctgacagtgaaagcccgaagcgcgacgccgaaattttgctggaatatgtgacgggtaaagcccgcacgtatctgctggccttcggtgaaaccgaactgaccgcagagcaggaggcgcagctggccgcgctgcttgcccgacgtcaagctggcgagccggtggcgcatctggtcggggagcgtgaattctggtcattaccgctttacgtctccgcggccactctgatcccgcgtccggacaccgaatgtctggtcgaacaggcgctggaacggttaccggcggaaccctgcgagatcctcgatcttggtaccggcactggcgcgattgcgctggcgctggccagcgaacgtccggactgtgacgtcacggccgttgatgtgatgcccgatgccgtggcgctggcgaagcgtaacgtggcacgtctcgaacgtcataacgtgacggtgctgcagagcagctggtttagcgcgctggcaggccgctccttcgggatgattgtcagtaatcctccttatatcgacgaacacgacccgcacctggcgcagggcgatgttcgctttgaaccgttgacggcgctggtcgcgggcaatgctggactggccgatctggaacacattgtgacaacgtcacgacaacacctcctgcccggcggatggctgctggtggagcatggctggacgcaaggggaagccgtgcgtgcgttattcactgacgcgggcttccacgccgtcgaaacctgtcgtgactacggcggcaacgaccgtctgacgctgggacagtggtcatga

SEQ ID NO: 127695 - DNA, 141 bp, Enterobacter cloacae
atgaattcgggctatctgccatttacggataaaggcacatggctgactgagaggccgtttggcgttatcatctacatcgttttgggttttatcgcgtctggacgtcgttgtacgcgcagtcgttactggggtaagtcatga

SEQ ID NO: 127696 - DNA, 261 bp, Enterobacter cloacae
atgtgcatctatttcgtaatctccaataaaaccttaaatgaatggacgtggcgtgtcgtaaacgacgacggtgcagctgtggctcgttccgcaaagatctttcctacccgctatgaatgcatcgatgatgcggaagcatttagagacaagttaggtgaagccgctttctatgacttcgctggtgttcccattgataaaatgcatttgaaaaaaggtacctttccacctgttaagccgctaatcaaggttcaggctgactag

SEQ ID NO: 127697 - DNA, 1248 bp, Enterobacter cloacae
atgcttatatatcaaggtggtaaggaaattgatgaggatgatttccgttctcatgtttattcgctgtgccaattagacaacgtaggagtgctcttaggtgccggcgcttcggttggttgcggtgggaaaaccatgaaagaagtctggcagtcctttaagcaagatcatccagatcttttattgctacttattgaacgttatcttctcgtttctaagactgattcagagtctgattcagtaaacgtcgagcttttaattgatgaagcaacaaagtttttatcagtagctaaaacaagacgtaatgaggctgaagaaaaagaatttagaactattttaagtgcattatacaaaggggtaactaaagctgcgttactaacaggagaagaattcagtcaaaaaaatcaagggaaaaaatcacagtttaaatatcataaagagttaatatcaaaattaatttcaaatcgacagcctggccagtcagcaccagcactttttacaacaaattatgatttggctttagagtgggctgcggaagatctcggtattcagttgtttaatggcttctcaggcctacacacaagacagttttatccacaaaattttgatttagctttcagaaatgttaatgcgaagggagaggctaggtttggtcattaccacgcctatctttataagttgcatggttctcttacatggtatcaagatgatagtttgacagttaacgaagtaagctcatctcaagcttataataactacatcaaagatattataactgaagatgattattatcgaggccagcatttaatttaccccggagcaaacaaatatagccatacgattggatttgtttatggtgaaatgtttaggcgatttggggagtttctttctaaatcacaaacggcgctttttgtaaatggtttcggttttggtgattaccatataaatagaataatattaggtgcattattaaatccttccttccatgttgttgtttattatccagaattatctaaggctcaaatcaatgttgatactggtgtcgcctcggaaggcgaaaaagcaataattactttaaaacatttaactctcaatcaagtgaccgtcgtaggaggcggaggtgatgcttactttgatagttttgtgaaacatcttccatatccagttcttttccctcgagaaaatactgtagacgatttggttgaagctatctcaaaattgtctaaaggagaaggccatgacccattttaa

SEQ ID NO: 127698 - DNA, 1815 bp, Enterobacter cloacae
atgacccattttaaacattcagagctttccgcgatcggctatgtagttggattggaaggtgaaaaaattagaataaatcttcatgaagggttacagggaagattagcatcacatagggatggggtaagttcggttacccagccaggagatctcattggttttgatgccggtaatatattggtggttgcacgcgtgacggacatggcctttgttgaagcggataaagcccataaagcaaatattggaacttcagatattgcagatatgcctcttaggcaaatcatagcctacgcaataggttttgttaaaagagaatcagacgggtatgtttttgtttctgaagattggcgattgcctgcattgggtgcttcagctgttcctttaacgactaatttcttaaacacaatttatagcatcgataaaggagatttagataaagcaattgaacttggtgtcgattcacgtaccaaatctgtacgaatattggctagcatcgataaattgcttacacggcacatagccgtattaggcagtactggctacggtaaatcaaatttcaatgcattactgactcgacgaattgctgagaagtatactaaatcgcgaatagtcatatttgacataaatggtgagtattctcaggcgtttgttggcttaccaaatgttaaacataccattttaggtaagcgtccagacgacgaagcacctaacccacctctattgcagggtgtggcatacacagaaaattcttattattataagcagataccatatcaggctcttggttttgcaggtttaataaaattactaagacctagtgataaaactcagttgccagcactgagaaatgctctcaatgctattaatagaactcattttgataaaaaaacatttttcctgaaagatggaaaagggaattgctttaatatttatgacgattgtagagaagagaatcaactgcatcttgctgcttggttagcaggtttgcgtaacagaacattggataaagctggcaggtgggctccgtttaaatgtttggcaagtcttgttgcagagtttggctgtgtcgctgccgactctaggacggggggaagcaagcgtgatgcattttgctatggtaacgtactccctctaataaaaatcattcagcagttagcagacgatgtaagattcaaaaatattgtcgatatgaatggtggtcaagtcctggctgacaatggtatgcattgggacgctgctatgaaagatgaagtggattatttttttggaaaagaaaagggagagccgaatgattggaatgttcatatagttaatctgaaaaatctgtcacaagaccatgctccaatgctgttgagtgcattactcgaaatgtttgcagaagttcttttcttgagagggcaaaacaaagcctatccaacagtgttacttcttgaagaggctcatcattatttgagagatccatactctgaagttgatgcacaaatcaaagcttacgagcgtttggcaaaggaaggtcgcaagttcaagtgttccctgattgtaagtactcagcgtccttctgagctgtcttcaacagtattagccatgtgttcgaactggttcacattacgactgactaatgagcgtgacttacaagcgctccgttatgcgatggaaagcggaaacgaattaatgattcgccaagtttctggtctaccaaggggggatgcgattgcatttggttccgcatttaatctccctctaaggatttctatttatcaagctgaaccgagcccacgctcatcagacgcgatatattctgaagaatggaagtag

SEQ ID NO: 127699 - DNA, 456 bp, Enterobacter cloacae
atgagtgaatttaagccctttgacgacaggctcaatggtctgattgctgccctgtcaccggctgcacgccgtaagctggccggtgagatagcaaaggagctgcgcaagtcgcaacagcaacgtatcaagctgcagaaagccccggacggctcaccgtatcaggcgcgaaagcgccagcctctcagggctaagagcgggcggattaagcgggcgatgttccagaagctacgcacaagccggtacatgaaagccactggccgtgaaaacagcgcggtggtggaatttaccggcaaagtgcagcgtatcgcaatcgtccaccaatatggactaaaagaacgagtaaatcgacatggcagcattgtaaaatacgatgcaagacccctattagggactagcgacaataatgctgatgaaatagaaaaaatgatcattaattttttaagtcaacagtgttga

SEQ ID NO: 127700 - DNA, 1020 bp, Enterobacter cloacae
atggatatcaacctcatcattatttcagtaagaacaacagcaattaaaaaaaccaataatgcaagagcaaagattgaaaactcagtcacttcaattaaaaattttttaattgaaataaaagaggatgctattttcacaaaagaatcactcatcaagcaaaaaagcattttaaaagcacaacttcccggtgaaatcgactcattaaagagaaccatcaaaaccatgaaaaatataatatttatatttttcatttacgcagcattaattatcctcacaacatccaagactgacaactacgacaaggatttcataaaaaatttccttgtaaatgcgaactcatctatcttagatttcttaatccttggtgtaatactatattactttgagcataaaagacaaaacaaggaagctataaaagagcttattgaggatttaggaaacctcgctaaacactcctccgccgagcttaacatcatgaaactaaaaatcatgagacaattaatctcaaagggtgtccttgacatcaaggtccccagaattgagttaaatggccttacatcaattaaaaatttagattttaaacaagcagatttgagcagcataaatatgagcgaatcttacattaagaaatgctcatttacaaattgcaatttatccgccatgaatattaaaggcagtactttaagagaagtaaaatttatcaattgcgaaataaaaaacatcaaagcaatcaaagctaactttaagaatgtaaaattcgaaaattgtaactttgaaggtggcttcttcagcgacagcgaaatgaaaagctgtcaattacaagagtgtaatttcaagctcgtgacttttacaggcgctaacatgcgaagtgctaatttacgtaacgccacaaacataaacacatcccacatagccgatgcaaaaagcattgattacataatctgcgatcaaaatattgaaaatgagttaaaaaacatgaacttagggataaaattctcgcgaggcaggaatcgaggttag

SEQ ID NO: 127701 - DNA, 351 bp, Enterobacter cloacae
atgacggtgcgttatctgggcatgaacagccggaccggcctcagtatctctgaggttgagcatatccggcaaagcgtgcgcgacattctggtcacgccggttgggtcgcgcgtcatgcgccgtgaatacggttcgctcctgtcgcagatgattgaccagccgcagaccccggcgctgcgcctgcagattatggccgcgtgctattccgcgatccagaagtgggagccgcgcgtcagtctcacgaccatcacctttgaacggtcggaaaccgacggcgggctgtatgtcgatattaccggcacccgctccaccggcggccagcctttttcactcaccattccactgagttaa

SEQ ID NO: 127702 - DNA, 273 bp, Enterobacter cloacae
atgcaggttgtgacgtttaccgaagcgcgaagccgactcaaagatgtgttggacgacgtgaatgacaacgtggagacaaccattatcagccgtcgcaacggtggtgatgcggtagtgatgtctctgcagcactacaactcaatgatggaaaccatccatctgatgagttcgcctgccaacgccagccgactgatggagtctatcgagcaggcaaataccgggaaaacaacgcagagggatctgatagatgaccaggctactgatttggactga

SEQ ID NO: 127703 - DNA, 267 bp, Enterobacter cloacae
atgaccaggctactgatttggactgataacggctgggacgattacctgtggtggcaggaacaggataaaaagacgcttcgcagaattaataaactgattgaggatgcgaagcgccagccattcaatggtctgggtaagccggaaccccttaaaggcaacctttccggatactggtcccggcggatcaacgacactgaccgtctggtttacggggtgtcggatagcgctctcaccattctgatgtgtcgctatcactattattcataa

SEQ ID NO: 127704 - DNA, 1326 bp, Enterobacter cloacae
atgagttcgttatatcaatccatggttgcggtgattgagcagtcaattaccccgctggccgcgaagctcggtcagcagaagtatgtgattgccatccgcgacggctttaccgccgcgctgccgtttatgatcatcggctcgtttatgctggtgttcatcttcccgccgttctcggcggataccaccaacagctttgcccgcggctggctggatttctcccagacctatcgcgaacagctgatgctgccgtttaacctcagcatgggcgtgatgaccttcttcatctcggtgggaattggggcgagcctggggcgtcagtttaacctcgacccggtgatgtccggcctgctggcctttatggccttcctgctggtggccgcgccgtatgcggacggtaagatctccacccagtatctgtccggtcaggggattttcaccgcgctgatcaccgccatctacgccacccgcgtctatgcgtggctgaagcagaacaacgtgaccattcgtctgccgaaggaagtcccgaccggcgtggcgcgttcgtttgagatcctgatcccggtgatggtggtgattggcaccctgcatccgctgaacctgtttatcgaggcgcagaccgggatgattatcccgcaggcgattatgcacctgctggaaccactggtctctgcgtctgactcgctgcctgccattctgctctccgtgctgctgtgccagatcttctggttcgccggtatccacggttcgctgattgtcaccggcatcatgaacccgttctggatggcaaacctgtcggcaaaccaggcggcgctggcggccggtgcggcactgccacacgtctacctgcagggcttctgggatcactacctgctgattggcggcgtaggctccacgctgccgctggccttcctgctgctgcgtagccgggtaacgcacttacgcaccatcggcaaaatgggcgttgtgccaagcttctttaacatcaacgaaccgatcctgttcggcgcgcccatcatcatgaacccgatgctgtttatcccgttcgtgtgtgtgccgctggtgaatgcgtgcctggcgtacgcggcaaccaaactgggctggctggcacaggtggtatcgttaacgccgtggaccacgcccgcaccgattggcgcctcatgggccgccaactgggcgctgagcccggtggtgatgtgtctcgtctgtatggtgatgtcagcgctgatgtacctgccgttcctgcgggcttacgagcgtacgttgatgaaaaacgaagagcagaaagctcaggcaaccgtcggtgccgctgagaccgcaagccattaa

SEQ ID NO: 127705 - DNA, 633 bp, Enterobacter cloacae
gtgttttacagaatcaatattctgcaggagatgataagtgatgccctgcgtaaaatactgcctggatattccctgcaaatagcaattgtagaatcaacggagcagctctttgatgcgattactgaacgtcaggttgatattgtcatcgccgagttcagttatctgtttaaccataaatcatggggagcgcaaaccagtagcagactcaatatgttatgccaaacatataacgtaaaacgtgtgctttttgttccggaattgcagtacggattattaaaaaaagtgctggagatgaaatacgatctgaccctttctctgcaggacgagcccggggagctgaaaagagaattacagacgctgctgaaggccggggaggctaagccgcgagtctcatcgtatctgaaggggatgatgcgcgccggtgcgcgctcgcgttcggtgctttccgcccgggagtgggaggtgctgcatcttattgtggaaggctacaccgtgaccgaaattgcccagctgcgaagccgctcggccagtaccatcgccacccaaaagcacaatgcgatgaagaaactcaatctcgccaaccacagtgaactcatcaagtatctgcagatggcgggcaggatcggaagttga

SEQ ID NO: 127706 - DNA, 486 bp, Enterobacter cloacae
atgtcgaagagaaacctgagtctatttttgggcgtggtactgctgatttctgttatcgccattgtcctgttttatccgcaaagaacccaggaagagggatttggttgtcagtctgacacggtttccaggaaaacctattcaacgggtgagtcgacaggtctgtcgttaacgacgctatttctgtttaacagtagcgacattgtcaccgtgatccataaaggcgtatttattcgcggagacaaacgttatttgattgaccgcaactatgtcctgaatgtagagaaagttgctggcagtgatatttactatattaaaggaaaaaaagtgcacaaatctgatgatgatgttgcaccggatggcgtagttaatgagctgctgctggacagtatcgacttcttttatgtcacccggctcaagagtcatgcatggctaattaaagggctggttttgccaataatgatgtgcgtagccgtgccgacatcctga

SEQ ID NO: 127707 - DNA, 519 bp, Enterobacter cloacae
atgccacctgatgacgctgaaagtacacagttgcgagagctgatccccggcctgcgccgtttcgctctctggctgacccgggatgtccatgaagccgacgatctggtgcagacgacgcttgagcgtgcgctggataaatggacaacacgacgacctgatgcctcgttaaaaagctggttattcaccattctctatcgcgagttcctgatagagaaacgccgcacaaagcgctactggggattgctcagcagaatgaaaagcgatgacaatcctgcctggccgtcagcggagcaggagattgcgacgcaaagtatgctggaggcctttggacgtttgacgccagagcaacgcagcctgctgatcctcataaccattgaaggtctgagctatcaggaggttgcccatgtgatggatattcccatcggcaccgtgatgtcccgactttcccgggctcgccaggcgctgcaccgcctgggcgagggtgaaaccccacagccgatactgagactgatgaaatga

SEQ ID NO: 127708 - DNA, 753 bp, Enterobacter cloacae
atgaaaataccgcctgacgaacacgatttgcatgcttatgtagacgatcaactggatgagcatgagcgggtcattatggaacgctacctggcacatcatccgcacattgcccggcaggtgcagggctggcgggaggatgcacagcgtctgcgcgccacgctgggggggctgccgttgcctgacgtgaccacgtcgctggatcctgcgacgatacgcgcccgacaggtacgccgaacccacagccgtatgcggctggctgcctcttttgtcctgtgcatcgcgcttggctcactgggtggctggcaggcgcgtggctggcagagtgccaccagtgcgccaatgggcgatgcgctcagcgcctataagctgatggtggttgagaaaagtatggcagccgattttaccccggacggacccacagccctgaccgcgtggctgacgcaacacgtcggagcgggggcgcagatgcccgatctgcgccaggctgggttcacgccggtgagcggtcgcctgtttgctacagaacagggggccgctgcgatggtgctttaccgggacagcaccggccataccctcagcttctatattcgcccgccggatcctcgccagccgctgctctcaaccggccagcgcaccgcgggcgggctggtggccctttatggctcctcgcagggactgaactatgccgtcgtcggcccggcgggtatggtcaacaatcccgccatttcccgcgaactcggtaaacgcacctga

SEQ ID NO: 127709 - DNA, 1014 bp, Enterobacter cloacae
atgagaaaagcaacgttagcgactcacggttttttcatggcgtctttactgttcgcgggcgccgttttcccggttaccgccagcacgacgccgttaacggatgcggtcaaacagaacttcgatggcgaaatccagaacaacacgctggcgattagcccggatgaaaaactggctgtggtggcccgcagcggaaagccggaagtcatcgtttacgatttgacgaccgggaaagtcagcgccgtgctgaagcactacaacaccccacgaaatatcgtttttgctccggacggcaagagcttctatgtgtcggacagcagcctgggccttattgagcgcgtggatgccacgaccttcaaaacagctgagcagtatgccgcagggcctggcgcgtttggcacggtactgagcaaagacggcaggacgctgtacatcaataaccaggccagcaatgcggtcatcagcatgaacacggagacgaaaatcgctaacgcggtgattaccggcttttcgcaaccccgtcagggtgtgcggctcagcccggatggccgggtgctgtatgtgaccaacttcgtcagcgacaaaatcaccctcgttgataccgccaccaacaaaatcaccggcgaaatcggcgggtttaacaagatccgcgccatctctgtaacggcagacggcaaaacgctgtttgccgccaatagcggaaataacaccctctcggtcgtcgacaccaccacacaaaaggtgacgagcaccattcctgtcggcaagcaaccgtatggcgccgcgctgtcaccggacggcaaattcgtctacagcggcaacctgggtgataacagcgtctccgttatcgacgtgccgacacgcaaagtcatcgctaccgtaacgggctttaacgagccgcgacaggccatcgttttcaccgccgacaaccgctacgcctgggtactgaacaaggatttgagcctctcccgaattgatcgtgaaacacaacgcattgtgtccaccgtcaaatcctga

SEQ ID NO: 127710 - DNA, 423 bp, Enterobacter cloacae
atgaaaaaaacaacacacaacatcttactcgcagctgtgctggccctggcttctggtcagagttttgcggcggtgaaggatgacgcgctggcacattttaaagcgattgccgacgggaaaaccgacacgcttaagcagcagtatgcacaaaatgcgcgtctggagtgggtgggcgggccgctggacggtacctatactaccaccgacgcgattgacggggtatggcgcaaatttaccacggcccagggcacgctgaaccataacgttgaagacctgaaggaggcgacaaacccgaaaggcagcaccgtcaccgcacgcgtgcagtttgccggtaaggcgacgctcaacgtcctgtatgttctgacctaccgcgagggcaaaatcgtcaacgaaacgtggcagattgatcccgcgaagcgctaa

SEQ ID NO: 127711 - DNA, 774 bp, Enterobacter cloacae
atgcataagtattatatcatcaatggcgtcgtggagtttcatcctgcggccagcacattacgcgatctcaataatcctgagcaggtggtggtattaaactctcctgccggacgctgtttgctgttattaattgaaagagccggaagtattgtcacccagcaggagtgtatggacattgtctggcagcgtcggggaatgatggtgtcgccgaatacctattaccagaatatctctattctgcgtaaagggctgaaaaaagtgggatttgaaaccgatccgatcgtcaccatcccgcgtattggcctgacgctggccagtgatacgcaaattacgattaaagagacacagttgccctcagcagagccagacgcgccggttcagaccgtgcaggaagaggtgagcgtgccgcaacctgtcgccccggctgttaaacgtcgcatctggctgccgggcgtgctgctggggttgctgctatttattagcgtggtggtcatcagccatagccgggcgcatgacaactattttgtggacggttatcgcttcaccacgatgatgggcgagtgtcggctctattttgcccgcgatatcgagacgccgcatgacagggataaagcgctctcctatgccgcgccctttaaagatgaatgcagcagctacccctgggtctatatcagtggatataccctgttgccacgcgcttcagtgatccgctgcgacagggcaatgacggaaccaaaccgttgtatgtcagattactttattcaggatcattaa

SEQ ID NO: 127712 - DNA, 399 bp, Enterobacter cloacae
atgaagggatgcatcgttctggtggcgtataacgagcaggagcagaggttgcaggatgattataaacggacgaaagcaaagcttattgagatacatgaaacgctctggctgtcgcaagcagccatagcggctctttatcaggtcactcctcaggccattactcagcatatcaaagcaatctacaaagaaggtgagcttgaacagaaagcaacttgtaaggcttacttacaagttcaacaagaacgcgcaggcaaaatcagcaaaaaagcggcggatgaaaaggcgtgctcagaatacatcgagtatgaaaagaagctgcgcctgctgaaagaagccgagccgaggggggagaaagatattgtcggcttattaaaatgggataagcaggctaagcgctaa

SEQ ID NO: 127713 - DNA, 6858 bp, Enterobacter cloacae
gtgggcagcgtgcagggtaacctggcgaacggcggcactaccgacgatccgaccccgaccctgagcggcaaggcggaagcgggcagcaccgtgaagatctacgatcagaacggcctgctgggcgaagtgacggcgaaggctgacggcacctggagcttctcaccggtggcgaaactgccggaaggcgagcaccgcttccacgtgacggcgaccgacaaagccggtaacaccagtgtggcatcggacgactttgtcctgaccctggacttcaccgccccggacgtgagcaaagtgagcattaccgatgtggtggatgattttggttctgtcatcggatcgattgcctcgggtggtaagacggacgataacacgccgctgatcaagggtacgggcgcagagccgggcaacaccatcaccgtctacaacggtgacaaggtgattggcaccgcgaaagtacaggctgacggtacctgggaacttcaggtcacgaaagccctgcctgacgggacgtacaacctgacggtgaaagagaccgacagcgtgggtaacaccacggcggcatcaccagaatacattattcagatcgatgcgggcggtcagccgctgccaccgaccctgagcagtgtggaagatgatgttgcgccgcataccggcccattacaaaaggatgcgacaaccaacgacaacactctgttgttgacgggtacggctgaagccggtgtcacggttcgcatttatggcggcccgaacggtaccaccctgctgggtgaaaccaaggccgatccccagggcaaatggagtttcaatacgccgaaactggcggacggcgttcatacgtttgtcgcggaagcgattaacgacattggtcaggtaagcccgcagactggcggcttcccaatcacggtggataccagcgcaccgggtgaggtcacgggctttatcgtgagcgataacgaaggtccgaagaccggtaccttgtccaatggcgataccactgacgatgcgacaccgacgatcagcggtaaagcagagccaggcagcgttgttcacatctatgtgaacggccaggaaaacggtactgcggttgcagacgcgaacggtaactggacttataccaccggttctctggcggatggggaatacaccttcaccgcgcgtgctgaagattcagcaggcaacctgggggctgaaaatgccggtgtcaccgtcacgcttgatacctccagcgtaccggtcactatcgttcgcgtgatggacgataaaggcagcgtaacgggcgaactgaaggccaatgatgtgactgacgatgcccgtccggacattatcggtaaggcaaaagcaggcagcatcgtgaccatcaaagatggcagcgtggtgctgggcaccgtgacggcagatgccagcggtaactggacattcactccaaccagcgatctgggcgatggcgtacacaacattacggcgaccgctaaagatctgaccggcaaagaggatacctccagcaccttcagtttcgaaattgacagtaaagcaccgaatcgtccgagcattgattacgcggaagatcaggtgggtaccgttaaggacgatttgaacagcaacgatgttactgacgatccgcagccaatcctgcacggtacggctgaagcgggcagcaccgtcaatatttacaccgttgacggcaccctgttgggtacagtcaccgcgaacagcaacggtgcatggaacttcaaaccgggcagcaagttaccggaaggtaaaaacaccttctacgtgacggccacagatgaagccggcaacgtcagtgacaagtctgcggacttcgtgctgactaccgactacaccgcgccggatgcgagcaaagtgaccattgattccgtcacggataacgtgggtaacgttcagggtattgttgcggatggcggcgtactggatgactcacgtccggtgatccgcggctctggtgcggaagcgggcaacgtcattaccgtctataccaccgacaaagacggcaacacgaaagtgttgggcacgaccaaagtggatcagaatggcaaatgggaactgacgccatctgagtctctttacggtgattccatcaacaaactgaccgtgacggaaaccgatagtgttggcaacgtagcgaaaccggctgacagctatgacgtcattatgtctgacaccccgaatgcgcctgcgattgttaacgtcctggatgatactggcacaaccgttatcaatctggccgacaatgcgttgaccaaagatgacacgccgaccctgaaaggaactgcggatggtgttgcaggcgataccatcaccatctacaacggtagtcaggttgtgggtaaaacaacgctgaacagcgatggtacctggagctttacgccatcaccagcgctggctgatggtaactatatctttacggtgaccaataccaacagcgcgggtcaggagagcgatcgtagtggttcgttcaccctcactattgactcaacagcaccaaatccggtttccggtttacaggtggctgacgatcagggggcctggaaaggtcagttaaccgacggtatgaccaccgacgacaacaaaccgaccttcacgggtaaagcagagcagggtagcacggtcactatctacgataacggccaggcgattggttcagttgttgtgactaacactgatggtagctggcagtacacgccaaccacgccattagcagatggtgaacaccagttcgcgacccaggtaacggatccggcgggtaacgcgagcgcgatcgttgacgatatcactgttaacgtctccacgggcgcaagctatctgcaactgctgcaggtggtggatgatgtccaggaaacgggcggctcacgcgtgcttcgcgagggtgaagtcaccaatgatagccaggtacagctggtcggtaaggcgacggcaggcagcaccattatcatcactgacgtcggtggcgttcagcttggcacggtgaaagcagatgccaacggtgactgggaattcacgccgctgagcagcctgagtgatggcgcgcatacgctgcgtattaccgggaccgatccgtccaataacccgctcacgccgatcgactttgatctggtggtggacacggttgcgcctgtcgcgccggttattacggatgtgctggacgacgttaacccggttcagggttctgttgcccacggcaagccgaccaacgacaccacgcctgaaattaccggtacggcagagaagggcagcacggtgaatgtgtaccatcaggtggatgcgacaacgcgcattctgctgggtaccgccgtggccgatagcacgacgggccagtggacgctgcagatcactgacgcgaacaagctgactgaaggcacctggaatctggtggcaacctctacggatgcggcgggcaacatcagtacgccgagcaacacctggacgattgttgtcgataccaccgtgtctgacgcggttatcaatatcagctctatatcagaagaccgggggtcatcagatactgacttcgtcaccagcgataacacgctgttgattaacggtcagttgacgaaagccctgcaggcggacgaatgggttgagattagcctcgacaacggtgcaacctggacgcgtgcctcaacggtgaccagtacatcctggactgtggatatgcagaacacgccgctgaatgatggtgcttacaccattcaggctcgcgtggtggataacgccggtaacgttggcagcactgattctcaggcgctgcaggtggcaacaggcggcagtgacatgaatggtctgtctacgaccaccaaagtcaccaccgataccagccatggtctgacgacaggtgatcacttcagccatgctgcgacagcaaccaacagcgacatggtcacccgtgaccgtacggtgaccattagcggtaacctgagcgcggcgctacaggcgggtgagcatctgcagatctccctggataacggcaaaacctggcaaacgctggcacttaacggccagagctggagctatgtactgccggaagcgacagcaagcactactcacagcttcaagctgcaggtcattgacgttgcgggcaacccaggtacgaacacgaagtttgcggatagctacaacgtggttatcgatctggattctccgaacggtattaccggggcgccagatgtgccgcagcacaccaccacaggagattcgttcaccttctccagtggtcaatacggtcgtgttgaagcgggggcgattgtctcgctggtgagtgacgtcaacaacaacgggacctatcaggaaggtctggatcaggtcattggcttcgtgaaggctaacgctgacggctcctggagtctgaatacgtcactgccttctggcgcacataacctggcctttgtggtctgggatgaagcgggtaaccgctcaagcatgagcgccagcaccagtacaggtgtcaccgaaggtggcggcagtacgctgattgaacaaacctgggggggaacgaccgatgcggacagccgcggtctgaacgccgctgcggtgaccatcagtcaggatggtctgtggtcattcttccagagtgctcgtggcacttctggcacatcgaccgctaacgccggacgtgtctatgactccgtcacgcgtgaagactacgattcaacgtaccttgcccaaccgtcaactgaaaacggtgcgggttacgacgtagatagcacgtcatacagccgttatgttaactccgcagcctttgcggacattaaccgcgatggctatgccgacgtcatgtctcagatcagtagttatagcaacgcgggtcgtaccgcctactggctgcagaacgcggacggtagttactccgcgaaggcgctggatcagggcaccctgaaccacctcggcggcgtgatttcctatgaccgtgaaggtgatggctatctggactttgtgctgggtgactccgaagcagactccatttcgttcatcaaaaatacgcagggcacgctcagttacgaggacaattccggcttctctgacggacatcctggcggagcattgccaacgtcgctgagtgtgctgcacgaagtcggggctgtggatatcgataacaacggtaccgtagatattacggcacatatcgactacaacggcgctggcaacctcgtcggcaacaactcccgcggtctgggtatcttgtataaccagactaccgggacgtcgaagaccaacttcggtgaagttggctactacgcgaacgtgttccgtgacgatggccatgaagactacggtaacttgtctatctccatgacctatgcggattacaacaacgatggttggctggatctgttcctgagccgtggttcgaaggggggcagtaacagcgacgagagccgtatctatctgaacgatggtaccggcaagctcaatgcaacggacagccaggcgcagtggtttggcgataacgttgatggcggcacgtcgctggcagtggactggaaccacgacggtaagatggacatcatcgaagtgccacgctctggcgtgactggctcgccaatgttgtataccaataccggtagtaacaattggggcgccaataaagtcagcctgacaggtagcacgacgttcaacaacatgacgggtgccgtcgcactcgactatgactgggacggttcgatggacctggtgctgtaccgttctggcgcagatgctgatgtcgtggcaagagacgacgcgggacgcacgatgctggtgaaaaacaccaatatcgcggcggacggcacgagcctgcagatccgtattgttgacggcaacggcatcaataccttctacagcaacaccgtgaagttatacaactcagcgggcgagcttgtggcaacccagttgattaacccgcagtcctctggttccagcaacagtatgggtctggtgagcttcttcgggctggatccgaatgaagtttactccgtgcagatgctgcgcattaccgacggtaaagcggatcacgttggcgcaacgggcagcattggtggctacaccaacggtacggtaaatgagaactggggtggcctgacaacaggtaaagcccatgactcctacgtactgacggcggaaagcagcaatgcggcgaacaacacctccggcaacaacgggatcatcgggacgggctataacgacaccttcttcggttctgcaggcaatgacacctacaacggtggcggcggctggaaccagattgtgagcggtaagccagtctggagcgaaactgccggtatggacgttgttgactatagccgttcaaccactgcgatcaacgcgaacctgtggacaggcactgcaaccggtaacggcaccgataagctcctcaacatcgaggggctcgtaggttccagccagcaagatacgtttacggataactccgcgaataacgtgtttgaaggacgtggtggcaacgacgccttctacctggtcaacggcggtaacgatacgctgatgtacaaggtgttggcaggtctgagcaacgacagcaccggtggcaatggtcatgacacgatccacggctttaaggtgggtaatctggtgaaagacagtgatgcagatctgctcgatatgagtgaactgcttgactacaaaggttctatctccttcttcgaagacgaaggaaaactggagctggattactcctcccgcggcgtacttgactacgtgaaggtggaagttgtgggtagtgataccgtgatcagtatcgaccgtgacggtcagggcggacagcatggatttacgcaggttgtcacgctggctgacgtgcaaacggatttggtgacgctgctacagaataaccaaatcatgatgtaa

SEQ ID NO: 127714 - DNA, 183 bp, Enterobacter cloacae
atgcttgtgggtcattcgcatcagaatgaagttgaattggttctgcgtaaacatatgcagaactggcgccaattatccttatctgcctgccgtcataaccgattctgctatctccatcagaccgaacatcatatccccccgaatgtaccgcatatgcatgtagattttggggtatgtcagtag

SEQ ID NO: 127715 - DNA, 990 bp, Enterobacter cloacae
atgagcttccccaaatataaccagactaattctcaagaaagattgggtgtaaatgctgttgctgaagccatagcaaaaattggccagatttggcgtgaaactccaatggctgacgttggagttgatggccagattgagtatgttaatcccgagggctttgctacaggaaggatgatagctgttcagataaagtcagggccatccttttttaaggaaagctacggagattgggtcttctatccagaagagaaacaccgtttttactgggaaagatttccgttacctgtactgataattattcacaaccctgatacaaatttaagttattggcaagatgttcgccgcgcattaagagctgccaaaccaactgatgcaaagggtattactatacctaaatcaaatatcttgcaatcttccagtgctaaaaccctctttgaagggtttgcggtcggagatcaagacattatgtcggtcgaagatgttcttgactatttgattaaaactgagagtaacaatgcttcatttcctgtctcatatttcaatcttttctgcacaggcctaactaatgtctgccgatctttatattttggcatggatgttccactaaccgtggcagagattgagttgtgtaatcaaaattctccttttggtgtcggagtgggggcctcagaggataattttctatttgagtacataaaattcattgtgcaccagcatatagctgatgttgatttctctgactgtatgatagacagatatgaacatgatagacaaccatcttttatggcaccactgacctcaagaggtaaaaaattagtacgactcatccatgaaatagaatatagattaaagtcggatggaaaaataaaagatactgggactttacgcgctgcacaagcgggttttgtgcggttgcaatttaccccaaatgagatacagagagtcgaacttactaatctaattcaacaggaatatctaaaaaatacctga

SEQ ID NO: 127716 - DNA, 1047 bp, Enterobacter cloacae
atgaaaatggcgaaggaaaaagagagtgggttgggtaagggatgtaataatgaacttgatgacaaagacaagtggaatttgtttttctatggcgctggctttgttatattcctttcgttagttttatatttatgggaatttaactctgggctatctaataaccatacgaaatggggtgagtttggttcgtattttggtggcattaccggccctttaattagtgttatggcttttatcgggttattaaaatccatcagtttaacaaaaagtcagtttgaaattcaaagccaggagagcacttttttcaaccttcttaatttccatacaaacaaagttgataaaatatattcagagcgctccgataaagctgatgcatttaaatatttatgcgaggaatatggagggaaatataattattactgcattagcgtagcattaaatagcatagtagacaagccggatgaattaccagatttcacgtattttaattttcttaaaaaattattcgggctacatgacaccattaccaacgaagaagtaaaaataacgcttttacaatatttaagtagatttgaaagtaaacagctagttttgaatgacataacattaaaacgccaagttatatctgaggatttaaatcccgtattggttgaaactggacgcactataataagaaaaatgagttgcaaggaaagggttgagattttaagaaaagcatttgatatattttatgatgagtatgggcatatatctggatcatatatcagaaacatttactatattctctctcactcaaatgaatctaataatggaagtaagtatgcaaagatttttagagctcaactatctcgccatgaactcgctttaatttactttaatatatcaagttcttattgtaaccctgattttattaatttgattgaaaaatttgatatattaaatggattgtacataagtgacttatgttacaacccatcgactgaaatgtataaagatgatttgggatatatattttcaagtgcaaaaaaaataatgcagaattcatag

SEQ ID NO: 127717 - DNA, 213 bp, Enterobacter cloacae
atgggggcctgggcaatatgtcgcatatcattaatgtgcagggacgaagtcaatgtgctcatagacacgcgaataaaaatctatctagatgtcgaaaacttattactgtacctcaagctcacaggtaatagcctttggctatccctcaaccatcaagtcatactaacgaacctgcattatattgatttacacagtgtgcgtcttcgcacgtaa

SEQ ID NO: 127718 - DNA, 321 bp, Enterobacter cloacae
atgaagatcacagaagactctttgttgcattctggatttactcgcaaagaaatacaaaagttgaataataatatcgcgaattatggcggggatcttgatgaggtagtccacgatttagcaagaagatttaaaactctactatggattttctcttgtggcatactttttttcatctatctcgttttttcaaaacaggatgattattggtatgttttctcaggagggatttcaatactgattgttttcttgatctgtggttttgctcagccaccaatcatttcctacaaatcatggcggtatgtcaggtctgaaaaaagttaa

SEQ ID NO: 127719 - DNA, 315 bp, Enterobacter cloacae
atgaaagtgactgatgaggctttgttgaattctgggtttacgccttcggacctgcagaagattaagaacaacattcaaagctacggtggaacgttggggaatgccatcagggatctggccaggcgttttgttcttactgtgtgggttgtatctggctgttttgctgtattcatttttttgatggtattcgcatccgaggaaagtgtcttctctggtggtattggcctttcttgtggtatcgcggttgcaatttttatccaaccgcctttgcttgcctataaatcatggcgtttctgtagggtgaataaaaattaa

SEQ ID NO: 127720 - DNA, 324 bp, Enterobacter cloacae
gtggccagtgaactgacagaaaaggacctgcaagatagtggtttcactaataagcaattatctcgcctgaaaggcgtactgagcagagatgaaaatgccaacgaaacgctttcaacattagtggatgatctaagcaagcgtttttatggtggggttatttgtctggttcttattctgacaccgctgattttccttcccgtcttctatgcaccgtctctactgttatattacttacctgttgcagtttttggcgttattgcggtttggtatctcatacctgttagccttgcatggaaagcgcataaaatcatgaaaggccggtag

SEQ ID NO: 127721 - DNA, 573 bp, Enterobacter cloacae
atgaacacgaataaaggtatgcgagagcacgcgccacagcatttcaacaccctggcacgaagcctgcactggctgatggcggcgatgatcctggccatgctgttcatcggcgccgccatgatgacgtcattacatcatcggatttggttaattgacctgcaccggcccctgggtatcgccattttactgctggcggtgattcgtctggccaaccgtgtgtttagccggacgccccctctcccggccgatttgcccgtatggcaggtctttgcagccaaagcctcgcactgggtgctgtacgcgttaatgctgaccatgccgctactgggctgggcacagctgtcggcagcgggagtacccatcgtgatgtttgatggattcaacctgccgcctgtcgttccagccagtccggctgtttatgcgtggtgccatgacgcccatcgtcttctggccagggtactttttgcggtggtgctggtccatctttctgctgcactcgttcatgcatggatctaccgggacgcggtttttgccagcatggcgaaaggcggtaagccgtctcaggaaccctga

SEQ ID NO: 127722 - DNA, 885 bp, Enterobacter cloacae
atgaaaaagctgtttttaaatgcaatagcatcatttatggcactcaatgcagcgtctgtatacgcaggaagtgaacataaaaacttcaatgcagtacttgaatgtcgggctatggaaaataatgctgaacgactttcttgttacgacaaatcaataccgccatcacgaacacaaaatgctgataaattcgagagtagagatcaatgccctgacgagaaagataacaataaacgactatcttgttacgatcgcttcttctcaccaacgtttaaagctacaacaagcacgataaacacgtcagcaaaaactgattatcagcaacctgacagagctaagttgttagagtgccaaagtgaaattaatggcactaaaaggctggcatgtttcgacaagctattcccgcagactacatccgcagaaactgaagctgtagaaaattctgtttctaaccctggcaagtggcaaacatcaattagcacctcgccagtagacgactcaaaaaacataatcctctcacttaacagtaatgattacattcgaacaccttttggagaaagtgtgattccaacaatgtatgtagcctgccgcgaaaagaaaacggaggtattcattaactgggatgtgtacctaggtcttgagcaaacgagcatgctctaccgcctggataagcagaaagcagttgaaaaagaatggtctatctcaactgataccaaagcagttttttacaaggggagtgacatcgatttcattaaatctctagctaaagcagacaaaatgttcaccagaatcaccccatacaatgaagcccctgtgagtgcaaccttcgatctgaagggcctttcagatgcaatgaaaccgcttcaaaaagcttgtggttggaagtaa

SEQ ID NO: 127723 - DNA, 333 bp, Enterobacter cloacae
atggcattggttagctgtccagagtgtcttaaggatgtaagtgatacagcattacgttgcccgtcatgtgggaagcagcttaaaaagccacggcgttcactttttggaaaagtcatcaagtgggcttttatactgttcaacttatttatgatctactgcctcttcgcaggattaggtggtagtggtgaagtaatgaatcacgcaacttccgatgcagaaagagctggggctgcaattggtaccggtctaggtttaatggcaatcgctagtgtctgggttataggcgacataatcatcggtatccttgtattcctcacaagaccaaagggatga

SEQ ID NO: 127724 - DNA, 558 bp, Enterobacter cloacae
atgaaaaagaaaatgacattactggtgcttgcgatgactgccaccctgccttccgttgcgttaagcaccattacaggcaccacaagcgttgaggccacgtttacgtccaccatagaggccggcacctgcaatgcggagatacaagatgccggcggagcacctataagcattttaccgtttggcgacgtgtttaagtccgaccttgtgagcaagaaccgaagaggggcattcaaaatcgcgttcaccaattgtgccggggtcaaaaatgccgccattcaggccacgccgggggcaggcgggtcgtgtaccggtaatgctaaaaatggaacctcgtatgccgccgggcataacgtcggttttgaaatctggaaaggcactgtcgactcaggttccctgttgaactgcgccacagccccgacctctctcgtcaacctctctaacgggacggggaagtttgaaatggatgcgcgcatcgtcattgcgcaagataaaacgatttctgacgtgaccacggggtcggtcagcgcaccagtgacgtttatcgtgacctatcaataa

SEQ ID NO: 127725 - DNA, 1074 bp, Enterobacter cloacae
atggcacagcgtcctgggataactgtttccccacgtttttacggttttattattttatttatgtgcttaaccatgagtgccttttacgccagtgcagccgaggagtgccagattgggagtgctaagccacgtgcggttggcgattttacgggtggaaaaccgacgttaagagcggtggatgccgtcaccgctcccacaaaaatcagtaccctctatcccttaagcctaaccccccggttgatgagcgtatgctcaggtggacaacatggagaaaacatctttaccgcaacacgggctaccctgcaggtgggcagcatcgacggtaaagccttattcaaaaccaatgtgaccggcattgcttatgccctggcgtttcgaacaataggtacgggagtcacggcctattttgcccccagcacaaactggtttctgacgttacatttggaggatcaggatgaattattgcaataccgaacctgggaggccgcggtcgagttttatcagcttcccagctttgccggggttcccgcggaggtggtctccgttggtcctgccggagggactatcggagactttggtattggcgatccctatgcacctaatgatgaccatccaggcacaaccatcagcattgccgacatggcattcacaacaccaataataaaaccaacctgcacccttacggcccccaaaaccgtggatctgggggattatggtgtatccgacctggagaacgataacaccttaaacgtatatgcggcggtgtccgggaattgcaccaacacacgtaaaatcaccatgaagttgaccaccagtaagaccaccggcactgatggcacattactcgccaataccgcatcctcgaatgcagcaaaaggcgtaggagtgtttctgatgtggccggacaacagccaggtggtgcctaattccactaacagctataccacgcgggagaacaccaccattgcattattcagccggttacttacggcccggttagttaagtctggtacagaaaaagtcacctctggcacgttcagcgccatcggcaccctgcagttcacctatgagtaa

SEQ ID NO: 127726 - DNA, 180 bp, Enterobacter cloacae
atggagatgcgaatcactgcgctgatcgttgcgctcggtttactgcttacggcactgcacggtggctggaacatatccgacatcacggtgctgtttgttgtcaacctcggcaactcgctgctggccgctcgcaagagcggccttctgaaatcccagcggcttttcagctatcacatataa

SEQ ID NO: 127727 - DNA, 1545 bp, Enterobacter cloacae
atgaagttgccctttaaaccccatctgcttgttcttctgtgcagtgccgggctgtttgccgcctcaggcgtgatgtttgtcaaaagtcgggcgacagagcctgccgtccccgctcccgtcgcacaacaaccggtaacccccgcagcagcgcaacccacccccgtcgtcgctccagcctatacggctgcgcaaatcgatcagtgggttgctcccatcgcgctctatccggatgccctgctgtcacaaattttaatggcctcgacctacccggccaacgtcatccaggcggcgcagtggtccaaagacaaccctaaaatggaaggagacgccgctattcaggccgttgccagccagccctgggatcccagcgtaaaatcgctggtcgcgtttcctcaactgatgtcgctgatgggtgaaaacccgccgtgggtacaaaatctgggggatgcgtttctcgcgcaaccgaaagatgtcatggattccgtccaacgcctgcgcgcgctggcacaaaagaccggcgccttacaatcaacgcctcagcagacggtcaccaccgtgacaaaacctgctccggccaaatcagccaccagcgaatcgacgacttccaccacgcctgccccgacggtgatcaaaattgaatccgcggatccgcaggtcgtttacgtccccacctataaccccaataccgtctacggtacctggccaaacactgcctacccgccgacctatcttcctccttctccgggagagcagtttacggacagtctggttaaaggcttaggcttcagcctgggcgtggcgacaacctacgccatcttcagcaacatcgactgggatgatgacgacgactgggaccaccatcatgacgatgactggaatcacggcggctataaccgcaacggtgataacaatatcaatatcaacgttgagaacttcaataaaatcagtggccaacgcctgacggatgccaaccgcacctggcagcataacccggcatatcgggaaggtgtgccctaccccaccagccagctcaataaccgcttccattccactgacacggtaacggggctcagttctacgcagcaaaaaccggttaaccgcgacagccagcgtcaggcggccctgagccagatggagaaatcgacaggcaaaaccttcccgcaaaccgcgcgtccgggaaccaaagatgcacagcgccaggcttcaggcgaacagctgaagcagatatcccagcgcaacaactaccgtggctacgacaccagaccgcaaacggcaaagcgaaccacctcgcaacagcgtgagaatcgccatgccgtaacacagcgacaggagaaacggatcgcgcagcccgcccagcaacgccatatcccgcagcgaaccagccagcctcgcgcgaatgcgctgagcggcaacgacagccgctctgccaactggcaagcccagcagcaaaggggtgcgcaaagcagacaactggctgcccgtcatcagcagccgcgtcaggcccctgccggacgtgctgaacatcgtgaattccgtcatcgttaa

SEQ ID NO: 127728 - DNA, 489 bp, Enterobacter cloacae
atgagcatgaccaatcttcttccgtggcgacagcaacgacgcgcgcgccgcctgaggttctggggagggctgtctgcagccgcgtctgttctgacgctgataacggttttcagcctgagaatgcacgccaacctgaaacagcacgccctgcaggctgaactggcgggcatgcagaccgtgcagcgcgtgctgtcttcacgtctgcctcttgccacaccggcgcccacgcgccagccccggcgtagggcgtggcagccggtgctgacgtctctttccgatgccattccggcgcaggcctggttcacggagcttcgttatcaacacccttctgtgacaatcagcggctatgcctcagcactgcccgccctgtcggcaatgggtgatgttctccggcacatagcggggtttacctccgggccagcaggagagatacggcaggatggtcacgggcgctggatgttcacttttcagctcacagaccaggggtaa

SEQ ID NO: 127729 - DNA, 576 bp, Enterobacter cloacae
ttggcctccaccggtaaggaaaaattcactcactttttctctcttgatatgacgttcagatcgcttatttcaatactctcgttaagttttgcctcgttttccgcgttcagttttcaactgcccgcatccatgctatcgatgaaccacgacctcgcgggaacgccggcgaaatcggcgttgcttcacccgcaagcggctccgctgcgctcacgtattcttgaccagtatcagaaatggaaaggcacgcactatcagtggggaggctccacgcatcgcggggtggactgttccgcgctgatgcaacatctgttcagcgatgccgcacatctcagcctgccgcgtacgacgagcgagcagatccatcgtggcgtgaaggtggcacagtaccggcttcgggccggggatctggtgttcttccggaccggcccgaaccaaaagcacgtgggcgtctatattggcggtagccagtttattcatgcctcaagcagtcagggcgtgacggtgtccaccctgaacgatagctactggcaggcgcgctatattactgcccgccgggttgcaggcagtgagacctga

SEQ ID NO: 127730 - DNA, 783 bp, Enterobacter cloacae
atgaacgtgctcccctgtgcacaaaaacagatccagaccgcctgcgcccttatcgaaagcattctcgggcgcgagctgatggcgattcatttatacggttcggcgatggacggtggtctgaaaccgctgagcgatattgatctgctggtcacggtgcgttcgccgctgcgggatgaacaacggcataccttaatgcagaagctgctggccatttcggcctggcccgggacgtcggaaatttatcgggcgctggaggtgacggtggttgtctggtcgcagattgtgccatggcaatttccgcccatgcgggaactgcagtttggggaatggctacgggacgagattgcaaacggcgaatacgaaccggcgcagcccgaccccgatctggcgattttactgaccaaagcgcgtcagaagagcctccccctgcggggagaagcggccagcacgctgtttgaggcggttcctgaacgcgatctgcagcatacgtttcgccagaccctcgcgctgtggaacagggccgacgatctggagggtgacgagaggcatatactcctgactctggcgcgtatcgggtatagcgttgaaaccggtcagattgcctctaaagacgaggcggcggcctggctgctgccgcaactgcctgaagcccatgcgaaactgctggcggaggcgcgtgcagagtatctcgggttggtcaccgtggattgggcagaaaaaatgcctcagattgaggcatttgtccgcgacgtcaaaaaaacgatcctggaaaaaatggcgtaa

SEQ ID NO: 127731 - DNA, 3558 bp, Enterobacter cloacae
atgcgctttattactgcccggttaattagcctttttttgctgctttgcagtatcgggcagattcaggcccaggaactgaccctgcagcgccgcgtacaggtcaatgcgccgcatgtccagttcagcgatgatgttcagcaatggctgaataacaatcagacgcttcatgtgggcgtctgggggcagccgcatccgcctctcagcgaagggatggggcacgggattttcaacgggattgcggccgattatctggcgctgctggaagatagcctgaagatcaacgttaaactccactattacagccagagtcgtgatgcgttccaggcgctgcgtcgccatgaaattcagatggtggcgatgtggaacccggagctgtggccaaaccccgatctggtgaccacaccgccatggctgctggataaggcggtcttaatgaccccccgcgagcgggccgacgacgcgcccgaagagagcccaaaaacgttaggtctgatggctgataccaacgccagtccggccctgcggcgttactatcccggcagcacgctccgcttccagtcttggtatccttcggccgtcagcgcgctggcgtttaagcagatagacgcgctgtggattaaccgggccagcgcggagtacctcacccagtatcatcaggctcaggggctacgctggcgttacagtccggcgctgcccaatctgaacatgagctttggtgtggatcgccagttgccgcagctggcggaagccatcgacacggtgtttaaacatatcccgttagccagccgtttgcgtatcaccaccagttgggggcttaaccggagcttcgtgatcaccaccaatccgctggcgctggatcaggaggaagagaactggctgcgggagcacagtcagattcaggtgatcctggacagccgccagcgtccgctgtcgtttctggaggagggatcgccagcgggtctggtggttgacctgctcaaccagttcagcgagcagtatgatattcacttcacaatattgaccgctaatagcgacgccgaacttaacgcgctaaagcgggacaacccggatgcgctggtgctcagacaactggctgacgtatcgcaaaaaacagccgcctccgtggcgatgaccccgccgttgcttactacgcccaccgtggtggtgatggatcaggagatcaaacgaccggacgatttttcccagctgaagggcgaaaagctggcaattatggccgacgacccgctgctcccatggctggaaacctggtatcccacgatcaagctggtgtcgttgacggacatggacgatgcgctcgcacggctgaaaaaaggtgacgtgcgcggggtgattgcaccgcagtttatcgccaactatctggtgacgcgccaccatcccacccgttttcatctggcagtgacggtacccgtgcctcccattgatgtggttattgccgcgcagaccgacaccagtcagccgattaatatcctcaataaagcgctggcggatatgcaaccgcagggattgatgcagctggcgggagactggcgacaagcggccatcgacaatagcgaaacctgggcccaaagttcattactcaattccctggtgtggggcgtgttgcttctgctggtggtgaccgggtgctggctgtggatacagtatctgcgcgccgcgctgcgccgtggcaacgttctgcagcaccagcttaccgagcagttacgttttacccaggcgctgatcgacgcctcgcccgtggcgctctacgttcgcgatcgcaacggccatctgctgcgctacaaccaggcctgggcggatgccatcggtcagccgggcgatgccttccaggggcagccagtaacggcgatcgacattgctgaacccacggtgctggcgaacctggacgcaaaataccagcaggcgctgcaggatggtcaaccgcagaactggtctgacagctttacgatcaacgatcagacacgctacctgcagggctgggtggtgccgtggcacgacagtcagggggagattggcggtctgattggcggctggctggatgtcaccgagaaagagcaactgattgctcagctctcggagaccaaaagtaatctggagcaggcgataggcagcaaaaacgcgtttatgcagacgatggggcatgaagtgcgtacgccgctcagcgtgatcaccggcctgctggagatggagcttcaggcgctggatgcgcggcatgagcataatgaaaacctgaatctgatttgggaatcttccctcaatctgctttcgcttatcggcgatatgttcgatgtcttccgcgccgataacccgcagctgaacggaacgacgcggaacacgcatctgccgcagttaatccacagtaccgtggcgctttaccggcaacaggcagaagcgaaaggcatcaccctgaatgtactgatcgagctttctaccgagcgctttaccaccgatccgctgctgattattcgtattctctccagtctgctgcgtaacgccattaagcatgcaaattgccaggagattgacgttgaggtgtacgagggcagcagagatccagatgccacggccattccgctggtcatcgaggtatgcgatcagggcgagggcatagatggggagatgctggaggagattgccggacgtgcgcatcacgtgacgctgaaatcagagtggaccgacaccggattcagtttgccggcctgtctgtatatggcgcaggccgcgggtgcgcaggtgcgtatcgacagtgaaccgcatgagggctgcgtggtgagccttcactttaacgccgtgccagcggccagcaaagtattgacccctgcgccggtcgaacagatgcgcagcctgcatattcttggcgtggacgactatccgccagcacgccgggcgctgcagcagcggctggagtcctggggacaccgggtgtcgctggcgacacagggggcggaggcgctgtcgatgtggcagcaacatcctgaccgctacgatgtgattatcaccgactgtaccatgccggagatggacggctatgagctggcacagcagatccgccataccgagcagctttccggcctgccgcctgtcccgatctttggcctgacggcgatcagcggtgccgaagcggcagagcgctgtatcgctgccggaatgaatgaatatctggaaaaaccgctgacggcggagaaactgcagacgctgctggatcgttattttgccgtcggcagcgcaaaacctgatcttgtaagtgatgctacgcgggcgctgcaggccgaaatggtggaggttaaccgccaggatgccagccagctgacgcagtggctcgcacagaaaaatcgcgataaggtggggcgtatggcgcaccgtatcaacggcggcgcgcgcatgatgaacatgacagcgttgcagcaagcctgtgaagccctggaaacagcctgtcacgacgaacgaacctggcaggagattgagatcctcgtcgggcgcgtgctggaagagatgacccggtttaatcagcagttgtcctcagacgaagaggtaagatga

SEQ ID NO: 127732 - DNA, 351 bp, Enterobacter cloacae
atgagtaaaatgatagatgaccgcagcaataataacgctgacgccaaaacggatgaggcaattaacggtcaattcccggcgctggtggagatcacgcccggagatattctgatccagggagaggagaacctttttcctgaccacagcagtaagcaactgctgatcaaaggaacaccagaggagcagttcaatctttccgacctgttaccggcagatgccgacccaggagagtggatgaaagcgagaggctccgtcaccctggacggcgtgcagtatgaggtttatcaccatccggggacggaaacagagctgctggtacagacaggggtgcaggtcacgcagctcgcgtaa

SEQ ID NO: 127733 - DNA, 945 bp, Enterobacter cloacae
atgaggcgttcaattctggctctgactcttgcaacacccatttccttttctgccctcgcagattccggagaggctctgtttaccccggaaaaagtcagcagtgaaataggtctgggcagcctgagcggcaagacaaaagaacgggtttacgagccggactccggcggccataaaaacagccagctgaactggaaatacaataatgcggccataattaaaggctccattgactgggatcttctgccatgggtatcgctcggcgcttcaggctggactaccctcgccagccgcggcggttatatggatgatacggactggcaggacctcgatcaggatgcctggaccgatcagagtaaacaccctgacacccgcctgaactacgcaaacgaatttgatgtaaatatcaagggatggctgctaaacgaacccgcttatcggatcggggtgatggccggatatcaggagagccgctatagctttaaggcctccggtggttcttaccactataccgatgaggatacgggattacctgacatcggtgattttccggccggggtgaccgtcatcagttacaaacagcgttacaaaatgccgtacattggccttgtcggtcattaccgttacgaacgtgttgagtttggtggcagctttaaatacagcgggtgggtacgctcgtcagataatgatgaacattatctgaccgataccaccttcagatcgaaggttaaaaaccagaactattactcaattgccgggaatgccggttattacgtgacgcccaatgccaaagtgtacattgagggaacctggaaccgcaccaccaacaaaaaaggcagcttgtccgcctatgattacagcaccggcgaaacacagcgtgcagacaatagcagtggtattgaaaaatggaacgtcatgaccaccgtcggcctgaagtaccttttctaa

SEQ ID NO: 127734 - DNA, 1272 bp, Enterobacter cloacae
atgcgccgatcctttcatcctcattcctctgctgcaaaacacgaagcaatgcgtcagacatttactgcgctggcggaacagtaccgtcatgcaatggccgtggcggactatgcaacggcgtcccgctgctgcgaaaaagcgctggccgttctgccgcataatatgtcggtacagagcgattacgccctgagcctgatgcgtgaggggaaacatgagaaggcgtataaggtctatcgcaaaatttatcagtcgccgcgccgtcatgaagcgtcagaaacctggctcgatggcctggcggaattgtgcggtcatatgggcaaaacggatgaaatgcgcgcctgtggtctggagtcattaaccctctctgaccggcgttttcgtcagggtaccgtctggccactgccccagacgccaccgccacctttccgggcagattgcccggaaaagaacatcatcgcgttcagtttgtacggcgatcagccgcgctactgcgaaaccttaattaaaaacattgaggccgccgcagcgctgtttccggcctggcgctgtcgcgtgtatctggatgactccgtgccgcagcacgtctggcagcggctgacgcaggcgggggccgcgctggtggatatgagccaggaaaagcacatctacccaacgctgtggcgttttctggtgatggatgacccgcaggtcgagcgttttttagtgcgtgacgcggactccctgctttctgaacgggagcaggtttgcgtggacgcctggctgcgctcgccgttttatttccaccatatgcgcgactacttcacccataccgaactgttgctggccgggatgtggggcggctgtggcggcacgatcccgaacgtggaaggtatgatgcgtcagtttgtggcgaactaccgggggagcgcccgtttcaccgaccagtatttcctcaaggtggcgctctggcccacggtgcggcagagcattctgaatcatgatgagatcttcgcgtttcaccatgctcaaccctggcctgcacatccgcctgttcgctggcagactgagcacttccacgtgggcagcaacgccgggtttaccgtactggcggggccgagcgagaaagccggcggtgaaaagcaggctgtcgcattacgcattaagggagagcgctatcgctatacggcggtggtgcgtgatggacaatggcgattgcccatcccattcttcctcgccgacggttttcgcgcaggcgaggtgcaggttgaggttatccgggataatggcgtctga

SEQ ID NO: 127735 - DNA, 2934 bp, Enterobacter cloacae
atgcgccactacctttgccgttttttgcttctggttttatttttattcgtgatgcccgcggcacacagcgaagaatataagattctgatgcgcaccccgattgagggcatgaatcgtctgccgcttaccgaagaacaggcaacgctgctaaagcatgtacaacatttgacggtgggcatcacacgctatgacgcgccccctttcggtatgcgcaatatgcgccatgaatatgaggggctgagcgccgactatctcggcctggtgtcctggcagcttaatctgccggtgcaggttaaaatgtacgactcgcaggaagagctgtggcaggcgctggcgcgcggggatatcgatcttatcccctcggtctccgcctttgacgccaacgacgcctttgtcttctcaacgccctatgccagcgataaaccggtgctgggggcgaacgaccgggatacccagcctctcgccgacgatctggcgaataccgacgtcgcgatggtccgggactacctgcctctggcacaggtgaaagcggcctatcccaacgcgcgctttcgcctgtttgacagctatcaggaagcgctgagcgccgtggcctttgggcattcacgcgcctatctgggaaacagctattcgctgagccgaaactatttaaacaatattcatatcgagcgcttctcgcggctgcccaaccgtgaagtggggttcgccctgagccagaataacccgcagctcaaccagttgattaacgccaccatccgcgcggtacccgaagaggaaaagctggatctctatcgccgctggcagcccgatcgggtcgatattgcgcagggaaccaagtcgctggtctttaccgaccaggagaaagcgtggatcgcccaccatccggtggtgaacgtactcatctacagccaggataatgccgcgccggtctcctttatcgacaacaaggggatgctgcgcggggtggtggcggatctcttctccgtggtgtcgctgcgcaccggcttgcgctttagctttgagaccggcaataccaccgatgatttgatagcccaggtcaaccacgggcaggctgacatgctcgcgtcagtgacgccgagcgaggcgcgcaagggtcagatcctcttcacgcggccttacttacgcagcgcgtttgcccttgcgacatccacctcacgtaacgacattaacacgctggccgacctgcgcggcaaacgcctggcgctggtgaaaaacatcggcgtggaacaacaggtgcgcgagcgatacccggagatcaagattgtccacgtgggcaatgaatcgcaactgctcgccagcatcaccaacggcgatgccgacgcggcaatcggcattctggtgatgacggattaccagatctacaccaactttcaggataagctgaaggtggtttcgattgttggcgactcccccgcctggatctcctttggcgttggcctggcaagccctgagctgcagagcattctggataaagtcctgctgagtatctcacccattgagatggaaaatctggcaaaccgctggcggcccaacgagctggtggtggtcgacagcttctggtatcgctatcgcgaagtgctgattgccacgggcgtcttcagcgccgttctggtgctgttagcgctgggatgggcgctctatttacgtcgacagattgtgcgcaaagcagcgctgcgcaggcaactgaacgagcagctcacccagctgcgcgagatgctcaccgaacgtgagtcgttgctggcggagctgagcgaggcgaaagatcgcgccgaagactctaaccgggcaaaatcggtgttcctgtcaaccatgagccatgagatccgcaccccgatgaacgccattataggcatgctggacatcgtcctgaaaaaagggcgcaagggcgagcacgatcttcaggcgctggaagtcgcctacgactcggcagagggtctggtggggttgattggcgatatcctggatatctcccgtatcgagggcgggcatctcgatttcaacccggaacccgtgcagtttggcaaactcatcgacaacatgatgcgggtgttccagggggtggcgattgaaaagaatatccagttgaataaagtcttcccgacggaggcgctgtacgaggtctacgccgacccgctgcgcattaagcaggtgctctccaacctgctgagcaacgccattaaatttaccgaccgcggcagcgtgaccctgactttatcgcaacgcgaggagcccggcaccgataacgtgatgtttgttatcgaggtgcaggacagcggtgtgggtattgatgccagccagcaggccgcgctctttaagccgttcagccaggcggacaatcgtcgggcgggcaccggccttgggctatatatcagccgaaccatctgtgaaagcatgaatggcacgctcacgctggccagcgaaaagcatgttggcaccaccgtcagggccaccttctccctgcctaaagtcacccgtgccgttacgccgcctgcccggcgtgatgaggaggaggaaacgttaccggcgcttaacgtgctggtggtggatgacaatcccgcaaaccggatcctgttggccaaacagctggcctggctggggcagcacgcgcatctggcttccggtggcgatgaggcacttaaaatctggaccgacaccgcgtttgatgtggtgatcaccgactgcaatatgccgggcatcaacggttatcagctaacgggaatgatgcgtaacgctgagcgtgagcagggtcgggcaccgacatggattattggttttaccgccaatgcgatgcatgagattaaggaacggtgtgtgcaggcgggcatgaacgattgtctgtttaagccgtgctcgataagcgacctggcgacggcactgcgtaacagtacttcttgccgggtggcgctgcgctga

SEQ ID NO: 127736 - DNA, 687 bp, Enterobacter cloacae
atgaatcactattcaggaaagaaaatttatatcgccttactcgacgatcatccgattgtccgcaaagggctggagattattttcagccaggagccggatttcgaactgaagggcagttttgccagccgtatcgacctgattaattttttacgtaccaaccggattgatgtgctgatcctcgactatttactcggggatgaagacatcgacggattaccgatgattaagcagctgatgagcaattttccctggctgaaaattttgatttcatcgacgctggaaaataccgccattgtccgtatggccctgaaggccggtgtgcgcgggcatatcggtaaaagtcgtgatgcctcggaagtggtggaggcggtgcgccgcgtggcggcagggcatatctgcctttccgaaagcatggagaaggagttttatcttatctccgagccgtctgcacccggtgacgctgaagatgagcagcatgtgatcgacggcattggccgtctggatcagctctctgcgcgggagctggaggtgttacgccttttcctttccggtatgtcggtgctgcaaatttctgagaagttcagccggagccgtaaaacggttagcggccagaagaaatccgcaatgaaaaagctgggcgtgaagaccgacccggagctgttcctctggcacgaccaactgctgtga

SEQ ID NO: 127737 - DNA, 1461 bp, Enterobacter cloacae
atgaaaagtaactctatttttatgcagcgccgtctggcggcgctgttgacggccgcggcttgcctggcatcggctaaaagtgcagcaaacagtgacggcttattagcctttgcgcctgtagaccctgtggtaaaatctcgcatggtgatggcctccacaccgcccgcacccgctgcgccgttagtggagcaggcgccggtgacacacgtggccgccgcgccgaaacgtgataatacggcccacgcacccagcgaaagggaaattcgcgccctgtttaatgatgcggtgaatgccgcgctgagtatcagccccgaagtgcgtggcgcgaattataatactgaagcggcagaagcgaatgttgacgaagcgaaaggtcagcgctggccgcaaattgatgtcggtacccgttccaaaagttatcagtttggtggtggtgagcgtcgctacagcgacagccgaccggcggtcaccgtgaatatggcgaccacactgctcgattttggccgcaccagtaacaccattaaaagccgtgaagccctgcatgacgcggcgaaaaataacgtcgatgcccaggcggaagatatcgcctggcaggtcagcagcgcgctcgtcgaactgagcaagcagcgccagattatcagtctgagccaaaagtatgtggcgcggatgaacgagctggttgagatgctggacgggatcgtgaaggttgatcagggccgtcgcagcgagctgactcaggcccgggggcggctgctccaggcgcaatcgtcgctggacacggccgtctcacgtgcgcgtgatactgaaattacccttaaccgcctgctgggtgacaaaaaagtgcccctgcctgcggcgacgacctggaacctgaaaccgggtgaactgacgacacagctttcagccatcgacacgcatccgacgattcgccaggctcaggcggagaccgcgtcggcgctggcggatgcggatgccgcgcgctctgcctcttacccgacggtgacctggaacgtgggcaaaagcaccgggcgcgacgagctcggacgtgaacagtcctgggagacgggcgtgaacgtgagctggccgatttttcgcggcggttctcagcgagccgctgaactctctgccgcgcgtcgtgcggacgccagcagagaaaccattgaaaaacagttacgcgatctggataaccgcgtacgggcggccgatcaggatgcccgcagcatgctggagcgtgctgagttgtaccatgacttagcgtttgaatccgatcgcattcgccatgatttctttgatcagtggtaccaccttggcagacgaaccctgctggatgtgctgagtgcagaaagtgattattacggtaaccaggttgcggaagcgaccaaccgctttgacgcttacgctgctatttttcgtagttatgccagtgcgggaacattattgcagtggctgagtaagccctaa

SEQ ID NO: 127738 - DNA, 906 bp, Enterobacter cloacae
atgacttttttcaagacctctttattcgcggcgctgtttactacctccgcatttgttatccacccggcgctggcggcggagaattttggtaagacgtatcagcctgtcgctcccgtcggccagacgcagacgcaggtggtttactaccgtgacgccagcaacaccgaaggtggcgcggcgcatatttatgtcgataacgaattccacgacgcactgctgccgggcggctataccgttttctgtctggcgccgggcaagcataatctgggcgcgtaccagaatgatgcaccgcagtatcgtggcaaagagcagggctacaacgtcgagatgagcggcggccagacctatttcgtgcgcgtcagttccatcatgaatgcggtgccggaagcccgtacccgcgagcaggcggaaaaggatctcgctggcctgcgtgagcagacgcacgtgttgtcccgtgcctcaagtgtagaggcctgtaagaaccttgcgccacagtataaagattacaccctctcgggcgatgtgatgttccgcttcggtaagggaaatgagaagggcgtttccgctcagggtcgccaggccgtaaaagatctggtggcgacgatcaaacgtgaaaatgttgaactgaagcagatccaggtgatcggccacacggatgccattggcagcgatcgcagcaactatgcccttggcctgaagcgcgcgcagactgtccgcaccatgctggctgagaacggccttctggcacgcctgatgacggcgaccagcgtgggtagcaatgaacctgtagtcaatgactgtgacgcctcgaacaagagcgcgttgatctcctgtctgtcgcctaaccgccgtgttgtggtacgcgtaagcggcgatcagaacgtgactgctcctgcgcagaaataa

SEQ ID NO: 127739 - DNA, 5385 bp, Enterobacter cloacae
atgaaaaagaccattacttctaacaacaataccgaaaacatcgccgcaatggcgacgttgccgccgctgccgacagacgttttactgtggaacgactatcagttcccgcgtgaaattcacaacggcgatccgagcgaagataacaccccaacctttagcggtaagggtgaggcgggcatgacggcggtgatcgacctcggtggcggtcagagcgttcgcgtaccggtcagttcagaaggtatctggagctggacgcctgcgcctgcgctggcggacgggtcttatacctggtcagtcgctctggaagacaatcagggcaaccgcggtccgtctaccccgccaatcagcttcaccatcgatacggtaggtaatgcggtctccatcagccacgctgaagataacaccggtacgctgaccaacccgctggcaagcggcagcagcacggatgacgttaacccggttatcgtagggacggcgacgccgggctccctggtgaccctgtacgttgatggcgaacctgttggctcgatgaccgctgatccggtcaccggcgagtgggcgattgagatgaacccggcgctggaatcgggtaaaacctacgaaatcaccgcgggcgagtatagtggcccgggcgaaatccctgcgccaacgcgtccgttcctgctgaccgttgataccgttgtgccgaccggcaccttcgatcgtattgaagacaacgaaggccgttatcagggcgacgtggcgaacccgggcgtgaccgatgacaccaccccaaccctgcacggtaccggccgtcctggggatatcgtgttcatccgcaacggcagcgacattattggttccaccaccgtaggtgctgacaagagttgggaatacaccctgcctgagcagacgaacggcactgcgctggacgtcagcgtcgtattccgtggcccgaccggggtggaaagcgcaccgactgcaccgtggaagctggtgatcgatactgaagcaccaaacaaaccgattattggcgacgtcgaggacgaccagggtccggatgtcggccctattcacaacggtgacaccacggatgacacgcagccggtattcagcggcgaaggcgccgtgcctggcgataccgttgaactgattgttgacgacgaagtcgtggggaccgcgattgtcggtgacgacggtaaatgggaagtgaccccggagaaaccgctgccggaaggcgaacatgaagcggttgtggtgatcaccgatcctgcgggcaacgccagcgagccgtccgatccgatcgactttatcgtcgacacgcagccgccggcaaaaccgacgatcgataccgtttatgatgacgcaggtcagcagaccggcaatatcgctaacggtggtattacggacgacagcaccccggactttaccggtacggccgagaaaggcagcctggtgtttatcattgtgaacgggaaaaacgttgactctgtgaccgctgacgcctcaaccgggatctggacctggacgccagcactgggcatggccaacggccattacgatgtcaccgttgtggcgcaggacaaagcggggctgcgttccgagccgtctgacgcgttctcgtttgacctgctggcgggcggtattccgacggctccggccattactgacgtgatcgacgatgttgacgcgcacgtgggtacggtacaaaacggcggcatcacgaacgacgcacgcccgaccattaccggtaccgcacaggatggcaccacggtctatctgtacgatggtactaacccggatccgatcggcagtgccgtggtaacagctggccgctggaccattgactttgattctgatctgccgcagggcgagcaccgcttccgtgccgtggccgaagacagaaccggtaaccgcagtccggaaaccggcgagtgggtgattattgtcgattccgttgatccgctggcacctacggacattgagctgtgggacgacttcggcacgccgggtctgatcgccaatgacggtaccaccgatgacaacaccccaacctaccgtggtaagggtgaagcgaacggtaccgcgattatcgatctgggtaacggcaccaccgtgcgcgtaccggtagacgagaaaggtaactggagctacaccccggcacctgcgctggcggatggcgactatacctggaaagtctctatcgaagacaaagcaggtaatgtgggtccggtttctgaccctatccactttatcgtggataccagccgtaacggtgtttccatcagccacgttgtggacgatcagggtgacatcgtcggtaatctgggcagcggtagccacactgacgacacgaccccaacagtggtaggccgtgcgacggcgggtgccctggtgaacgtgtacgttgatggcaaatacatcgacagcgtacgtgctgacgccattaccggtgcatggcagtacaccctcagcccggcactgacggcggatgcaacctataagatcaccgccagcgaagacgcaggcgcaggtgagagtgcacaaaccgcaccgttcgaactgacgctggatacgcgagtgccgacaggttctctggatcgcgtcgcggatgacgtgggtctggttcagggcgatctggcgaacccggccgtgaccgatgacaccaccccaaccctgtacggtaaaggtgtggcaggtgatgtggtgtttatctacgacggtacccgactgcttgactccgtcaccgtagggccagcaaatacctggaactacacgctgccacagcagaacaacggcactgagctgtctctgacggcggtattccagagcccgaccggcgtgaagagcgcgccaacggcagcgtggaacctgaccattgataccgaagcgccaaacgcgccggtcattaccggctcctgggatgatgtccaaggcggtgtatataacggtctggtgggtaatggtggtgtcaccaacgacagaacgctggatttacgcggaacggcggaagcaaatagtgttgtttacattgtgatcgataactatggcactgttgcgggttccgtgacggcggatgcgaaaggtaactgggcattccctgtcacgactaactacaaccagcagtacgacttccatgcgtactctgtcgatccggcgggcaaccgttcagttgactctgcgaagttctcgattacggttgatacggtcaataacgcacctgtcattaccggctcctgggatgacgttcagggcggtgtttataacggtctggtgggtaacggtggcgtaaccaacgacagaacgctggatttacgcggcacggcggaagcgggcagcgtggtgtatatcatcaacccggcaaacggtggggtgcatggttcaaccacggcgggtgcgaatggacaatggtctttcccgctgaccaccaactataaccagacgtataacttccaggcttactctgttgataaagccgggaaccgttcggtgaactcgaccaacttcgcgattaccgtggataccgtagtggctgcaccgaacgtaacggttatcactgataacgtgaacggcggtaaagtcggtaacctggttgacggagatcgtactaacgacaaccgtccgaccattaccggtaatggtgccgaagcgggtgcgaagattgagatcgtgctggcgctgggtaaccagggatggacgagcggtacaaacctcgtctacaccaccacggccaaagccgatggtacctggagccttgaaattccgaaggcattgcaggatggcacctggtacttccgtgctaatcagactgacctggcgggcaacaagagcgctctggggaaccagcactatgttgttgtcgataccgtggctgccgcgccgaacgtaacggttattactgataacgtggcgggcggtaaagtcggtaacctggttgacggtgagcgtactaacgacaaccgtccgaccatcaccggtaacggtgcggaagcgggcgcgaagatcgaaatcgttctggcgctgggtaatcaggggtggagtaataacaacctcgtgtataccaccaccgccaaagcggacggtacctggagcctggaaattccgaaggcattgcaggatggcacctggtacttccgtgccaatcagactgaccaggcgggcaacaagagcgctctgggtaaccagcactatgttgtggttgatacggttaacgcagcaccgaccattaccagcgtgatggataacgtcgggaatgaaaccggcaatgttgccaacctgggtaaaacggatgacagcacgccaacattgaacggtacggcggaggcaggcagtacggtctatatcgccgtgaatggtggcacctactcgaccaccgcctcggcgacgggtagctggagctttacaccgtctgcactgccgctgggtaaccatacctttagcgtcttctcgattgatcaggcgggtaacaggagtgcgggtgtttcccgtagcctgacggtaatctcaccgaaaacaagtggctttgaggactttaatgcgctgaccccacagagctatgggaaggggctggttacactggcgagtggtctgaaatttacgttaagcgataactattatccgggttacggtggtgcaatttatcagtggggtgtagggaatagccgtaaactggcactgaccggtgatatcaccatgcattttgatggtgtgaatgcggtaagcatgaagctttccggtgcaaacgactcaattcaatcaagtgtcgtgaaatccaccttcattgtctacgatactgcaggcaaggtgatttcatccgggtatctgccttctggggaagcgaccttctccgccaccgcaccagcgggacgcgagattggcaatattgtcttccatatggggcgtggggccagcagtggtctgtcgggcggtggtaataccatcaacaccgatcagtacatgattgatgatgttcgctggacggttaataccacccgcactgcctccagaagcatgatgatgagcacggaagagcagcatgacgacaacacccatgccgtcagcacgctgaacggtcacgagatcaaactggataacctccaggacaaaacgattgatctgaccaacagcaagcaggacaagctgaatatcagtctgaacgacgtgctgactcacgctgagaaagatctgtttatcgccgatggcaataaacagatgatggttcagggtaacaaaggtgatgttgtgaacctgagcgatctgctgccagacaacagcgatccgggtaactggaccaatgcaggtaacgttaaggtttccggcgtggaatatcaggtttaccaggtggaaaaccttgatgttgaactgttggtgcagaacggcgtaaccgtcaacgtgaataatcactaa

SEQ ID NO: 127740 - DNA, 4908 bp, Enterobacter cloacae
atgactctcaagccagtaaatattgcagtcgttgataaagatacgattgtcaaagctgacgttctgcgcagtgaaaaggttggcagtgctgtcaaaattaaggccatcccgaatgcaaaatacattcttgctgaaggggaaaatggcgtcgcgccagaaaacattacgctgaaacgcgtaggcaaagacctgttcgtcatgctggaaggcactgatgaggatcagccacagctgatcattgaagactatttcgataacccgggtgagttggtgggtaaaggcgaagacggtcagtggcacgagtacatcgccaccgacggtgacgacgaccacaaagccgcgttcctgctggacggcgaatcctccgcccaggcgctgggtgcgggggccattgcgggtctcgacggtctggccgttgcgggcaccgcgttctctcctgctctgctggcactgggtgcgttagccgggattggtgcgctggtaggtctgggcgccattattcgtcataaccgtgacgatggcggcgacaaaaaaggcaccgttgcgcctgttactacccctgtgctgaccgacgtgcacgacgactacggcaccaaaactggctcgatcccgcaaaacggcgtgaccgatgacgcgacaccaacgtttagcggtacaggcaaagcgggcgatatcgttgagttctgggaaaacaacgttaagctcggcgaaacccgtgtgggcgcagacggcacctggacctggacgcctgaaaccccgctggcgcacggcgaccacagcattgtgctgatcggtaaaggcccggatggccgcaccagcgcgccgagcgactcttttgatttcaccgtcgatctggaagcccctgttaagccgattattggcgaagtggaagacgatgttggcgcgaaaacaggcccaatccacaacggcgatgcgactgacgataaacagccggtcttccgcggtgaaggtgctacgcctggcgataccgtacgcctgatcgttgacgacgaagtggtcggtactgcgatcgtcggtgaagacggtaaatggcaagtgacgcctgagaaaccgctgccggaaggcagtcacaccgggaaggtgatcatcaccgatccggccggaaacgacagcgaaccgtctgatgacttcaaatttatcgttacgccagaaaaaccgatcatcggcgaagtagaagatgatgccggtaccgtggtgggcccaatccagaacggcggcgcgactgacgatacgcagccgacgttccgcggtgaaaacggcacgcctggcgataccgtcagactgatcgtggacgatgaactggtggggacggcgatcgtcggtgacgacggcaagtgggcagtgacccctgagaaaccgttgccggaaggtagccacaccgggaaagtgatcattaccgatccggaaggcaacgccagcgaaccgtctgatgatttcgaatttatcgtggatctgcagggccctgacaagccggtcattggcctcgttgaagacgaccagggaccgtccgtagggccaattcacaatggtgacaccaccgacgacacccagccggtgttcagtggcgacaagggtacacctggcgacaccgtgcgtctgattattgacgacgaagttgtgggtaccgcaattgtcggtgatgacggcaagtgggaagtgacccctgagaaaccgctgccggaaggcgaacatgaagcggtcgtggtgatcaccgatccggtgggtaacgacagcgatccgtccgatccgatcggtttcatcgtagacaccacgccgccggtaaaaccgacgatcgatagcgtgtttgatgatgcgggcctgaaaacaggcaacctgaccaacggcgaggtcaccgatgacagcaccccggcctttaccggtaccgctgagaaaaacagtctggtgcacatcattgttaacggtaaggaagtggattccgttaccgctgacccgacaggtaaatggacctggacgccgtctccggcgctgacgaacgggcactacgatgtgaaagtggttgccgaagacaaagcgggtctgcgttccgatccatccgatgcgttctcgtttgagctggtagcaggcggcattcctccggcaccggcaatcacggacgtaatcgatgatgtcgatgcccatgttggcaccgtacagcagggtggcatcacgaacgatgacaaaccgaccatcaccggtacgggtcaggacgggacgaccatttacctgtatgacggcactaacccgacacctgtcggtagcgctgtggttacgggtggcacctggaccattgatttcgacactgcactttcgcagggcgagcaccgcttccgcgcggtggcggaaaacgccgtgggcaaccgcagcccggaaaccggggagtgggtgattattgtggactccgttaaaccgctggcacctacggacattgaactgtgggacgacttcggcacgccgggtctcatcgccaatgacgataccactgacgacaacaccccaacctaccgtggtaagggtgatcctgatggtaccgcgattatcgatctgggtaacggcaccaccgtgcgcgtgccggtagatggcagcggtaactggagctacaccccggcaccggccctggcggacggcgactacacctggaaagtctccattgaagacaaagcaggtaacgtgggtccggcttctgatcctatccactttatcgtggataccagcaagaacggcgtttccatcagccacgttgtggacgatgaaggggcgactcaaggcaacctgagcagtggcagccacaccgatgacacgacacccaccgttgtgggccgcgcgacgcctggtgccgaagtgaaagtgtatctggacggcaactttgtcgacaccgtgatcgctgacccggcgaccggtgtgtggaaatacaccttcaacccggcgctgaccactgacgggacgtaccagatcaccgccagtgaaaataccggcaccggtgatagcgcgcagacggcgccgtttgaactgacgctggatacccgcgtaccggttggctcattcgatggtgtatcggatgacgtaggcctggtgcagggtgaactggctaacccggctgtgaccgatgacaccacgccaaccctgcacgggaccggtgtcgcgggtgatgtcgtgtttatttatgacggtgacacgctgatcgactccgtgaccgtagggccgggtaacacctggaactttacgctgcctgcacagaacaacggcacggaactggccctgaagacagtattccagagcccgaccggtgtgaaaagcgcaccgtccgcggaatggaaaatcaccattgataccgacgcgccgacaagcagcgcggtggtggatgcgatgacccaggactccggcgtcagcggcagcgacttcatcactaacagtggtaaagccggtagcctggtcagcggtcacctctcagctccgctggaagcgggcgggaaagtactggtctccaccgacggcggcaaaacctggctggaagcgatggtcgacggcgacaaatgggcgtttgttgacggacagggacacagtgctgactggaccgtactgacgcgcgtggtcgatatcgccgggaactacaccgaatcctcgcagaaagtggtgctggatcaggtggcaccggatgcaccgaccgacgtggtgcgcagcggtaatgatgtgacggtgacgctgccgggcagcgggattgtcgagggcgacaccgtgctggtgaagagcggcgacattaccgtgacccatacgctgacggctgccgacattgctaacggtaacgtgaccctgaccatgcctgcgggcggatacaccgatattccggtgggcgcggcgattgttgacgcggcgggtaacagctccagctaccgcaccagcgcgttcaccagtaccaacagcttcgaagacgacacggagtttgcggacattaacgcgggggcgtgggtgcacgggatgcgtttctcccacacaccagataccggcacggcggactatgagttcgacaaacaggtcattggcacgggcagcaccaacagcctgtatctgtacagcacgtccacagataccggaatggcagccagcatgtttgttgacttccagtatggcgccaaaacgattgatttcgttttcaacccgcgctttgccggcccgtcgacggtggtgacgttctacgacgtcaacggcaatgagattggttcgcagccggtgagcgctttcctccctaaccgtaacgtcccggtgtcgtttaccagcccggatgatacaccggtttaccggatggagatccatcacgaggaactggcgaccagctccgggtttggtttcagcatcgataacctggtggtgagcggaacggcgaaaaccgtcaccccgggtgaattcctggcggataaccagggcgatatctggtatggggacgcagcggacaacctgtatcaggttgcggacgtggccagcctgaccggtgcggtgattcagggtggagaaggcactgacacgctgaagctgctgggggcagatcaacacctcgacctgagcgcgctgacccaccctgtccagtcagtggaagtgttcgacataacgggaacaggcaacaacaccctgacgctgagtgcgggtgatgtgctggaaaacgctacgcagaacctgttccacgacaacgacttcaaccaaatgatggtgaagggcgacgcgggcgacacggtgaatctgagcgacctgctgccgaacggtatggacccggggaactggaccgatggcgggacggtgaatgttgggggagtggagtatcagtcttaccagatggatagcctgaataccgagatcctcgtgcagatgggagtcacggtcacgctacagaaccattaa

SEQ ID NO: 127741 - DNA, 624 bp, Enterobacter cloacae
atgtcagataaaaaagtcattctcatggatgccagttcattactccggacaggcatccaggggttattagcagaacacggttatcagacggcggcacaattcctcacgattgaggcaatgcacagcgcgttgccgatgttaaatgctgacctgattattatggaacatttgcaacagagccccgacgttttctctcaactggtgcaaataagaaaagcctaccctgatattcaggttctcattttttcttcgtcctccagcgactttcatattcagttgagccgacgggccggtgcggctggttatttaaataaaaacagctcactggataaaattattaccaccgtcgataagattctctccgggggatattgctatggctcggagctatggcaacaccatgcccggtatccccgggatgcatcactgttattatcgctgtcacatattgatatctgtattttgcgctatatttccgcgggctacagcaaccagattatcgcctcgatgcttaatatgaataacaaaaaggtcagcgcgtataagcagcgcatcatggcaaaattcaatatgactcgcctggcggaactggtggatctggcaaaacggaattatctgtactga

SEQ ID NO: 127742 - DNA, 603 bp, Enterobacter cloacae
atgcgagtaatcatgtttgacaggcagtcgatatttattcatggagcgataaacagtctgcggaaggtaatgccggaaataaatatgacagggacccgtcaggcagatgaattacgggcgcagttgtccgcgtcaccgtccgctatcgtcatgattgacggagagttaattcatcacgagggcatcacatttctggaagacattatcacgcgtttccctgcgatacgtgtggtgatggtactggcgaaaaaagagccccggtgggcgaaacagctgttgcagtgcaacgtaatggcaattgttccccgcaacgcgtctgcggagcggttttgcgcggtgctggattcggtctccagagggatggtctgttttcccggcgagtggctgacgcagcaggcgtctcaccaggcgttgttatccttaagcgagcgccagcgtgaagtgctgaagttactcgccgccggggagtcgaataaagaaattggccgcacgctgaatatcagtgcggcaacggtgaaggcccatctggagttgctcttccggcggctggatgtaaaaaatcgcacgcaggccgcgatgtgctatacccggctcaccgcctga

SEQ ID NO: 127743 - DNA, 993 bp, Enterobacter cloacae
atgatgcgaaaatctgtctgcgccacactggtcgtgatgagtttgctggtctctccactctctcatgccggtcaggcctgggagagttataaagcacgcttcttcaaaccggaaggacgcattgtcgataccggcaatggcagcgtttcgcataccgaaggtcagggattcgccatgctgatggcggtggccaacgacgataaaaccgcgtttgacacgctctggaagtggaccgacagcacccttaagaataaagacaacggtctttattactggcgctataaccccgctgaaactgacccggtcgctgacaaaaataacgcttccgatggcgatgtactgattgcctgggcactgttaaaagcgaacgcgcgctggcatgaccaacgctacatccgtgcgtcggatgccatcacgaaggcgctggtttcccacaacgtcatccggtatgcgggttatcgcgtcatgttgccgggcgttcagggatttaagctggacaacgaggtggtgctcaacccctcttatttcattttcccggcctggcaggcgtttgccgaacgcagtcatttgccggtctggcgtgaattgatgaaggacgggcaacaactactggcccaaatggggtcgggtaaagccgggttgcccacggactgggtctcgctggacgcgaaagggaagctggtacccgccagtgcctggccgccacgtatgagctatgacgccatccgcattccgctgtacgtcgcctgggctgataaaaaaagcccgctgctgacaccgtggcgggcctggttcggccagttcccacgggaacacactcccgcgtgggttaacgtcaccacgaatgaatatgccccctatatgatggcaggcggtctgctggctgtaagggatttaacgatggggcagtcaaccggcgaacccgaaattacccccgaagatgactattattccgcgagcctgaagatgctcgtctggctcgcggaacaataa

SEQ ID NO: 127744 - DNA, 1428 bp, Enterobacter cloacae
atggcatttgatgatttgagaagcttcctgcaggcgctcgatgagcaagggcaactgctgaaaattgaagaagaggtcaatgcggaaccggatctggcggcggccgccaacgcgacgggacgaattggtgacggcgcacctgcgctgtggttcgataacattcgcggatttaccgatgcccgggtggtgatgaacaccatcggctcctggcaaaaccacgctatctccatgggattgtctgcaaatacgccggtaaaaaagcagatcgacgaattcattcgccgctgggataaattcccggttacgcccgagcggcgcgctaatcctgcgtgggcgcagaatacggtagacggcgaagacatcaacctgttcgacattttgccgctgttccgtctgaacgacggggacgggggcttttatctcgacaaagcgtgtgtcgtgtcgcgcgatccgctcgacccggaccacttcggcaagcagaacgtcggtatttatcgtatggaggtgaagggcaaacgtaagctcggcctgcagccagtgccgatgcacgatatcgccctgcatctgcataaagccgaagagcgcggtgaagatcttccggtggcgattacgctgggcaacgacccgataatcaccctgatgggtgcgacgccgctgaaatacgatcaatccgaatatgaaatggccggggcgctgcgtgaaagcccgtatccgattgccacggcaccgttgaccggtttcgatgtgccgtggggttcagaagtgatcctggaaggggtgattgaaggccgtaaacgtgaaatcgaagggccgttcggtgagtttaccgggcactattccggcgggcgcaacatgacggtagtgcgaattgataaagtctcgtaccgcaccaaaccgattttcgagtcgctctatctggggatgccctggaccgagattgactacctgatgggcccggcgacctgtgtgccactgtatcagcagttaaaagcagagttcccggaagtccaggcggtgaatgccatgtacacccacggcctgctggcgattatctccaccaaaaaacgctatggcggttttgcccgcgcagttggcctgcgtgccatgaccacgccacacggtctgggctacgtgaagatggtgatcatggtggatgaagacgtggatccgttcaacctgccgcaggtgatgtgggcgctgtcctcgaaagtgaatccggcaggcgatctggtgcagttgccgaacatgtcggttcttgagctcgacccgggctccagcccggcagggatcactgacaagctgattattgatgccaccacgcctgtcgcgccggataaccgcggtcactacagccagccggtgcaggatttacctgaaaccaaagcctgggctgaaaagctgaccgcgatgctggcagcacgtcaataa

SEQ ID NO: 127745 - DNA, 1224 bp, Enterobacter cloacae
atgatgcccctgcgccctgccacaacgctctggccgcccgtcttactgggcagccagtttgtgtttaacatcggtttttacgcggttgtccccttcctggcgatttttttgcgcgacgatatgctgctttccggcgggcttatcgggctgattctggggctgcgtaccttttcgcagcaggggatgttcatcgtcggcggtgcgctctccgaccgctttggtgccaaaatcattatcctctgcggctgcatcatccgcgttgctggttatctgctgctggcatttggacacgcgctctggcccatcatccttggcgcctgtctgaccggcattggcggcgcgttgttctctccctccatcgaagcgctgctggcaaaggcgggtacgcaaagcgagactaaagggaaacgcagccgcgctgagtggtttgcgctctttgccgtctgcggtgaacttggcgcggtgctgggcccggttgccggggctttgctcacggggctggggtttcgccaggtggcactggctggcgcgggggtcttcgtcgtcgcgctgattgtgctctacttctgccttccggctgcgcgacacagcaagcagacactcacaattgttccctggtggacgaccttccgtcagccacgttttgtcgcttttatcatcgcctacagttcatggctgttgagctacaaccagctctatctagcgctgccggtggagatccagcgcgccggcggtaacgagaaagatctcggccccctgtttatgctggcctctgtgctgatcatcaccttgcagcttccgctggcgcgtttcgcccgacgcgtgggcgcggtaagaattttgccagtgggctttttgctgctctcggcctcctttgcgagcgtggcgatgttcgccccggctgcgccatcagagggctggctgcggttacttccgtccgtgtgtcttgtgacgctgttgacgctggggcagatgctgctggtgccctcggcaaaggatctggttccactctttgcagaggagtcgacgcttggcgcgcactacggcgcactcgccaccgctggcggtgttgcggtgctggcgggaaatttactgtttggcagtctgctggatcgcgccctggtgccctcacctcaggcaatgtatccctggctgctgctggccctgttcccgttatgcagcgcggtcgccctgaacgtcatttgtcgccccttcaggggctga

SEQ ID NO: 127746 - DNA, 1452 bp, Enterobacter cloacae
atggccaaaaattatgccgcgctggcgcaagacgttgtcagcgcgcttggcggcaaagacaacatcgtcgccgtcacccattgcatgacgcgactgcgtttcgtgcttaaagacgaaacccttaccgatgccgcacgcctgaaaagcatcagcggcgtactgggcgtcgtgcgtaacgacaaccagtgccaggtgattatcggcaataccgtttctcaggcgtaccgtgaggtggtgaacctgctgcccacccacctgcagcctgccgtgccggaaggcccgcagaaattgactctccgccgaatcggtgcggggatcctcgacgcgctaattggcaccatgtcaccgctgatcccggcgatcatcggcggctcgatggttaaactgctggcgatgatccttgagatgaccggcgtgctggagaaaggcgcgccgacgctcaccatcctgaccgtgatcggcgacggggcgttcttcttcctgccgctgatggtggcagcgtctgccgcggtgaaattcaaaaccaacatgtcgctggcgattgccattgcgggggtgctggtgcacccgagctttatcgagctgatggcgaaagccgcacagggtgagcacgtcgaattcgcgtttattccggtgacggcggtgaagtacacctacaccgtgatcccggcgctggtgatgacctggtgcctgtcgtatatcgaacgctgggtggatcgcattacgcctgcggtgacgaaaaacttcctcaagccgatgctgatcgtgctgattgccgccccgctcgccatcgtgctgattgggccgctggggatctggatcggtagcgcgatctccgcgctggtctataccatccacggctatctgggctggctctccgtggcgattatgggggcgctctggccgctgctggtcatgaccgggatgcaccgcgtctttaccccgactatcattcagaccattgccgaaacgggtaaagaggggatggtgatgccgtcggaaatcggtgccaacctgtcgctcggcggttcatccctggcggtggcgtggaaaaccaaaaacccggagctgcgccagacggcgctggccgcggcggcttccgccatcatggcgggcatctctgaaccggcgctgtacggcgtggcggttcgtctgaaacgcccgctgattgccagcctgattagcggctttatctgtggcgcggtggccgggattgcgggtcttgccagccactcgatggcggcgccggggctgtttaccagcgtgcagttcttcgatccggccaacccgatgaccattgtctgggtattcggcgtcatggcgctggcggtcgtgctctccttcgtgctgaccctgatattaggctttgaagatatcccggtcgaagacgaggctgaaaaagcccgcgccctgcagagcgcgccggtgcaggccaaaaccgcacaagtttaa

SEQ ID NO: 127747 - DNA, 1023 bp, Enterobacter cloacae
atgttacgacgcttacgcaacgaacctcgcgccgcgctcctgctgttggcgctggtaatggctaatcttctggcgtggggctgggcgtggaacgcctttagcggcagttctgcgttaatggccgcaagcctgcttgcgtggtgctacgggctgcgtcacgcggtggatgctgaccacatcgcggccattgacacggtgacacgcaagatgatgcagcagggcaagcgcccctctggcgtcggggcgtggttctcgctggggcactcgaccattgtggtgctggcctccattgccattgccgcgacggcgaccgcatttcagaaaaatatggcctggtttcatgaaaccggcagcctgattggcacggccgtctccgcgacgttcctgctggcgatggcgttagtcaatatggtgattttgcgcggcgtctggcgtaattttcaggcgctgaaaaacggacaggcggtacaggatgacatgaccctcccggtgcagggtggggtcatgcactggctgtttggcgcgaccttccgcctggtcaacaaaagctggcagatgtatctggtcggttttctgttcgggcttggctttgataccgccaccgaaatcggcgtgctcgggatctctgccgccagcgcctcacacggcatgtcggtgtggtcaatcatgatcttcccggcgcttttcgccagcggcatggcgctggtggataccctcgacaatctgctgatggtgggggcatacggctgggcattcaacaagccgcagcgcaagctctactacaacatgaccatcaccggcacctctgtggtggtggcggtgttcatcggcgggctggaagcgctgggtctgctgatggataaatttgctctcagcggcggcatctgggatcgcattggcgccgtcaacgacaacctcggcaatgccggattcgtggtggtcgggctgtttgtcgcctgctggctgatctccatgatcaactaccgctggcgcggctacgatgcgctggtggtgcgctcctga

SEQ ID NO: 127748 - DNA, 1797 bp, Enterobacter cloacae
atgcggcgcgttgctgttccctctccgtaccggagagggaataaaaccggaacactttacctttccagaccttatttattccgcaaaacgccctacactctcagcatcccttatcatctccggtatgtcgccatgcgccagcttcagaaaatccgacaatatcaacggctttatcagcactatggtgctgtgccaaagcccaccaccatcgctgaagtggctgaggttgcgctgtgcagtgaacgccacgcgcgtaccctgctgcgccagctcgcgcagagcggctgggtaagctggcaggcccagccgggacgcgggcatcgtgccattctgcattgtctgacgaccaccagcgaactgagcgcgccgctaatgcatgcctgtctggagaaaggggattaccagagcgcactgcagctggcagatggtgatccggccagcctgcatcacatcatcaccccatttttaggcggtaaatggctcaagcaccagcccacgctgcgtattccgtggtaccgtccactgacgtcgctctgtcctgccttgcagcgtcgccgcgccgagcagcatattatctgcgcggttcacgcggggttaacgcgatacacgccaggtcatcctgaccccgtgccggatttggctcaccactggcatgccagtgaagacaaacgctgctggtacttttacctgcgcagcggcgcgcactggcataacgggcaggccatcagtgatgaggatatactcagcgccttgcaccagctgctggcggatccggcacgcaatgcggggctgttgcacgtttcccggatatcgcttgtcgccccctggtgtctggagatcacgctgaatatccccgatgccatgctggcgcatcgtcttgcccatcatgtttgccgtctgccgcatccactgcaaccgaccatcggggccgggccgtttgccatcgcacatcatcattcgcactatctgcgccttgagcgtcagccctggtactttgccgcacacccgctactgcatgcgattgagttctggcgaacccgctcagagacacaaaaaccggcctggatcaccgtcggtaagggacaaaacgcgcagaacgcagcaacctcggtcagcggcggttttacctggctcatggtaaatgccgggctgccatcttcgctcgcggcctggttgcgtcaggacgttcagcagatcaaccagcatattgcccatcggaatgatgtcgaaacccgcaccgaaatcctccccggtctgacgacgcccgcagtgccaaaagcttctgacgtcacgcttcctgccacgctttcactggtctgttatgacacgccggcgctgtgcgagcttgccagcatgctgcaaactcgcctgagaacgcgcggctgcgaattgcaggtgtcctttaaagaccgcgaagcgtggcatattccggacgcgctggcgcaggccaacctgctgctgggcgattatttgtcgggcgagtctccggcgtttgcgctggcagagtggttcgtcgatgaaccggcatggggggccgcactgggtgaaaccatatggcaacgtgagaagcagaaactgatgggttattgcgaaagcgagaagagcctgcacacccatctgcccgctttctttcgacgcatgcttgaaagcggcgtctgcacgccgctgttccactaccgctatcgcctgaataccctggaaaatgtgcaggacattgtgctgaccgccagcggctggcttgattttacccgcgcctggctaccgcctgctcaggagcgcaccaccagcgcatcgtag

SEQ ID NO: 127749 - DNA, 1491 bp, Enterobacter cloacae
atgaatgcatttagttatctgcaacgtctgggtaaagccctgatgttgccaatcgccacgctgccggtggcagcgatattattacgtctcggtcagcctgatgtttttaatattccctttattgccagtgcggggggcggtattttcgacagcttaccgctcctttttgcccttggtatcgccattggtctggctaaagacaacgcgggcgcggcggcccttgccggtgccgttggcttcctggtgctcaccaaagccacggcggtcattaacgcctccattaacatgtccttcttcgcggggattattgctggcgtggtggctggccactgctataaccgcttctcgaataccaaactgccggactttcttgccttctttgcgggcaagcgtctggtccccatcatgaccgggcttatctgcctgttcatcgcctgggtgtgcggctacgtctggccttcggtgcagcacggtattgatacttttagcctgctcgtttcccgcagcggcgaaccgggctggtttatctatggggtgcttaaccgggcgttgattccgtttggcctgcactacattctgcactccgttttctggtttagcctcggcgactgtctgaaggtgacctatgatgccgcgagtgcagttcataacatctgtctcgcgccggatgtggtgaaagggctggttgtcggtggtaccgtaccgggcatcgagggctccaccatcacacagattgccactgacctgacccgtggtgaccttaaccgcttcttcgcgggtgacccgcatgctggcgtctacatggcctgggcgtaccccatctttatgggcggcctgccgggagctgcgctggcaatgtatttcgccgcgccgaaagcccgccgttcagccgtgggcgggatgctgctctctgtggcgctgacggccttcctgaccggcatcaccgaacccatcgaattctccttcctgttccttgctcctgccctgtacgccctgcatgcagtacttgcgggcgtcagcatggtgatcgccaacagcctcggcgtgctgcacggctttggtttctccgccgggttgatcgactttgtgctcaactgggggcttgccacgaaaccgtggattttaatcccgctgattgtgctgttcttcgcgatctattttgtggtgttcaccttcgctattcgcgccttcaggctgaaaacgccgggtcgtgaggaagaggacgcaataacaggtgattctgacgatcagagcgaggccattgcccggtacatcgtggcgttaggcggcaaagaaaatctgacgagcgtcgatgcctgcattacccgcttgcgcctgacgctggtggataacagcctgctggatgaaccggagctgaaagcgctgggtgccaaaggtattctgaagatgggtacccggaatgcgcaggtcatacttggcccccaggctgaacgtattgccctgaagattcgggcacagacagaaacctga

SEQ ID NO: 127750 - DNA, 159 bp, Enterobacter cloacae
atggcgacgttcaccaaagagctaaactatctttcagcctattttaagcgggtaaaaaaatcagagcgtatattatttcgctggctctatcttagcccggaggcacgcattgagcgtctgcgtgaactgatgatgcccctgaaccacacgaaacgatga

SEQ ID NO: 127751 - DNA, 1515 bp, Enterobacter cloacae
atgagcttttccgtagacgtgctggcgaagatcgccattgaactgcaaaccggtatcggtcatcaggatcgttttcagcggctgatttccacgctgcgccacgtgctggactgcgatgcatcggcgctgctgcgctatgaaggacgacagtttatacctctggctatcgacgggctggcgcaggacgtgctcggacgacgctttaccctggaaggccatccgcgactggaaaccatcgcccgggccggggacgtggtgcgctttccggcagacagcgatctgcccgacccgtacgacggccttataccggggcaggagagcctgaaggtgcacgcctgtatcggcctgccgctgtttgccgggcaaaacctgattggggcgctgaccctcgacggcatgtcgccggaccagttcgataccttcagcgacgaagagctgcgcctgattgcggccctggcggccggggcgctgaacaatgccctgctgattgaacagctggagagccagaatattcttcctggcagcccggcggcgtttgaacaggtcgcgcatacggagatgattggcctctcgccaggcatggtacaactcaaaaaagagattgagatcgtcgcggcatccgatttgaacgtgctcatcttcggtgagaccggcaccggtaaagagctggtggcgaaatccattcacgaagcttcaccgcgtgcggccaacccgctggtctaccttaactgcgccgcactgccggaaagcgtggcggaaagcgagctgtttggtcacgttaaaggggcatttaccggcgccatcagcaaccgcagcggtaagtttgaaatggccgataacggcacgctgttcctcgatgaaataggcgagctttcgctgtcgctgcaggccaagctgctgcgcgtattacagtacggtgatattcagcgcgtgggagacgaccgcagcttacgggtcaacgtgcgcgtgctggcggcaaccaaccgcgacctgcgcgaagcggtgcttaacggcaatttccgcgccgatctgttccatcgtctgagcgtttttccgcttaccgtgccgccgctgcgcgagcgtggggacgatgtggtgctgctggcgggttttttctgcgaacagtgtcggctcaaaatgggcttgtcgcgcgtggtattgagcccgggggcgcggagccatctgctgacctacgcctggccgggtaacgtacgcgagctggagcacgccatccatcgcgcggtggtgctggcgcgggcgacgcgctcaggggatgaaatcgtgattcatgcgcggcattttgcgctgcatgaggaaagtgccccgttcgtgaagcccgcaacgcctgagagcgtgaacgagaacctgcgcgaggcgacagaagaatttcagcgccagatgattacccgcgcgctggagcagaacaaccgcagttgggcggcgtgcgcgcgggcgctggaaatggacgtcgccaacctgcaccggctggcgaagcgtctgggactgaagggttaa

SEQ ID NO: 127752 - DNA, 789 bp, Enterobacter cloacae
ttgaacgcgcaccgttttacaccgccctataatgacgaggctatcgtggcatggatagatggcgagatgtctcctgccgacgcacagcaatttaccgcccggctcaaaagcgatgcccggctctcagcgcgcactgctgagctgatgaaaagcaaccaggactatgcccgggcgtttaccgccatgctggacgacgctccgctggcgaagatgcaggcccggctggatgcccttcccgaaccgccatccgtcacgtcagcgggggtgagcagacgagctctgattgcggcgtcgctcagttttctgctggtgggcgcaggagtcgggcgctggctgagcccggccaccggcgctgtggatgagaatgcccatattcgcgacctcgaagcacaatacatgtccctttacagcgccgagacgctgctggatatggacagcgctctgcctgtgcttcaacgcgggctgcagcgggcagcacaggatattggcctgcagctgcaggcatcacagcttatcctgcgcggggctgagcttaagatggtgcgtatgctgcgctatgaaaccacctcgattgcacaaatcgcctggatccatgccgacttcggcccgatggcgctttgcatctccccgacaggacaggcgacgacggccgcgcttcaacaggagcaacggcacgatatgaacctggcgtggtggcatcacgcgggatatcagtttgtcctgattggccgtaatccgccgtcgcagttgcaaataaacgctgagcaactgcaacgccagctgtcataa

SEQ ID NO: 127753 - DNA, 558 bp, Enterobacter cloacae
atgctacgacgcctggcaatactgcttgttttagtctgcccgtgggctttggccgccccacagcgctataccatcgacaccgacaacaccgccatccggctatcgtggcatgctttcggtggcatcctctcgtgggccagattcagcggcgtcacgggtgacgttacccttaacccggataatgaccttgacgatcgtattcacgtcaccgtcccggtagcgacccttgtggcctcaaacagcctgctcacctggcagttgaaaagcgatatgttctttgaagctgagcgctatcccaccatcgattttaccagctctcgcgtggtcgctcagggatcgggacggtacagggtatttggcacgctgaccgtcagagccctttcccggccggtgattctggaggccgtcgtcaaggatgcgcacgcgcacctcctcacgctggatgccacaacggctatctcccgtgccgcctacggcatggataaatttgcgctggtcgttgatgatcgcattgccatcgccattgcgatccaggccagcgcggttccgtcgttatga

SEQ ID NO: 127754 - DNA, 390 bp, Enterobacter cloacae
atgaaaaaaacaattatcgctttatctgccgttctgctggcttctccagtatttgctgcgaccacacatgcaactgatgataccgtcgccgcggcgaaggctaacgccaacgaggcgaagcaaaaactgcacgaagagcagaacaaaggtgaagagctgaagctgaaacagaaacatgctgcggaaggtaaaagcgaaagctttggcagcaaggtcagcgaagactcccagaaagcgtggcataaaaccaaagaaggcactgaaaaagggtggaatgccaccaaagaaggcgctgagaaaggctggaatgccaccaaagaaggcaccgagaaaggctggaacaaagccaaagaaggcgccaacgagctggaaaagaaagtcactgagtaa

SEQ ID NO: 127755 - DNA, 339 bp, Enterobacter cloacae
atggctttgattataaagagggggattagcgtgatgataactgaagatgtattgcttagatcgggcttcacaaaacaggagttgcaacagcttaaacgccatgcagctactcaacatataacattggaacttttgctccctgcgctttcaaatcgtttcaaagggattgtcattctttcagttatgcttatcgttatgttcatcctggcggtgtgcttcgcttccccggaaaatatcatctcattaggcgttgctgtagtgtttattattggtatcttttgctggatgactccactgaaattagcttgtaaagcctggcgtttaaagaagaagcattaa

SEQ ID NO: 127756 - DNA, 549 bp, Enterobacter cloacae
atgttacgcacgggggaggcttatctggctgctgccgtaaaactttatgaagataatgggaaaatcgtcgggtacgtgattagcggcgttggaattgttctgggcggcattcagattgtgggcggtgcaatgatggcggttggttcagccagcaccgggaatatcctcggggtaattgctggagcaacgctgatctttcatggaaccagtaatctaatggaaaatattgataagctaacgggagtaccaaatccagggaatattgctcaggatgcgtatatgggcgctgcagagtttctcggatttgagcgtaagacaggcatgttagcctggcaagggatgaatatggtgacatcaatgtatggaatatttcgtcccatgctcaagccagaaagttggcggctgtacgactggttatcgacggacttttaccgcaaagtctcaacgatgacacggccagcgctggctattgaagttggaaaatcagcccataaactttatacgatgggcaaaacgtataatatcgatgaacaagagttttctcgttag

SEQ ID NO: 127757 - DNA, 327 bp, Enterobacter cloacae
gtgatagacgcgcaacaggaaacgaaacttcgttcatacgggtttactgataaaaatattacggctttgcgtgccgtacttgaagatccgaaacgtaaagatcggactctgcattcacttttagttgagctaaaaagacgcttctacacgtcctggtttattgtcattggtttactgttttttgctacctatgccactatcactaatgattatggtaatggttggatttatttcgcaatcattatcgttttatctctttttatattgggaatggcaccgctgtctgtctcatggaaggcggtgaagtttttgcgcaaggaggggtaa

SEQ ID NO: 127758 - DNA, 786 bp, Enterobacter cloacae
atgctaagtacattacccgatttacacagaagttttgcagagcaactcaagcttaaatttcaggctgattcgcgaattcactctcttctcgctggcggctcgcttgttcatggtgggttcgataattactccgatctcgattttgttgttgtggtagaccctctctgctacgacgaaatcatggcgcagcgtattgagttcgccggaacactggggcatctgctgcatgcctttaccggggaacatgtcggagagccacgtctgcttatatgcctgtatggtcctgaactcctccatgtcgatctgaaatttgtcacactggacatgctcactcaacgcgttgaggagcctgcagtgttatttacccgcgatcacctggctctggaacaacaactggcaaaatatagtgctcaatggcctgacatgacgccggagtggtttgagtcccgagcctggatctggcttcattatgcggctgtgaaactgggaaggggcgaattctttgaagcgattggcatgctgtcattcttccgcgagcaagtgctgggacctatgctgtgccgtcgggcaaatctaccgcaacgtggggttcgccgcattgaattccatggccttgatccagatggcctgctgacttccacgctggcaacacacgatcgtgactccgtcagcattgccatcagaaaggctattgacgcttatatcaatctgcgggctgatgcgctgccgaaaaatatcgcagacgatgcggcacgatgggcggttcttgccatgctgaaagcctga

SEQ ID NO: 127759 - DNA, 2799 bp, Enterobacter cloacae
atgcaaagttctgagaaagaaactcggattgcttttatcgatagccaattgtgcattgctgggtgggatgtacaagatccaaccaaggttgtgcaagaattcgatatcctcactaatcaatcagaaggtgtagctgaaccttaccaggagtatggtgggcaccagtacagtgactatgtgctcttagggaaagatggcaaaccacttgctgtagtcgaagctaagcgcactagtaaagatgcagctctgggccgtgagcaagcgaagcagtattgctacaacatccagaagcaattgggttgtgagctacctttctgcttttacaccaatgggcacgaactttatttctgggatctagaaaacgcaccgccacgtcaggtcttaggtttccccacgcgagacgatttggaacgctttgcatacatccgtcgcaatcggaagccgttgacgcaggaattcattaacacctcaattgctggtcgtgactaccagattcgtgctattcgttcggtgcttgaaggtattgaacaaaaaaggcgtgactttcttctggttatggccactggcactggcaaaacgcgcacctgcattgccatggttgatgctttgatgcgtgcgggacatgctgaaagggtactatttctcgtggatcgcatcgctttgcgcgagcaagcattggcatctttcaaagagcacttgccgaatgaaccgcgctggccaaatgtgggtgaaaagctgattgctacggaccgtcgcatatacgttgcgacctacccgacaatgctcaacatcatccgggatgatgtgcagcacctttcgccgcacttcttcgatttcatcgtcgttgatgagagccatcgctcgatctataacaccttcggcgaagtactcgattattttaaagccatcacattggggctgactgccacaccaactgatattatcgaccacaataccttccagctatttcactgcgaagacggtattcccacgtttgcttatacctatgaagaggctgtaaaccacgtgccgccttatctctgcaattttcaggttatgaagattcagaccaaattccagatggaaggcatcagcaaacgcactatttcgttagaagaccagaaaaagctgatcctgcaaggcaaggatgtcgaagacatcaactttgaggggacccagcttgaaaagcaggtgattaacaagggtaccaataccctgatcgtccgcgagttcatggaagaggcaattaaagatgccaacggagttctgcccggtaaaactatctttttttgcgccaccaaggcccacgcccggcgtatggaagatattttcgataagctctatccgcaataccacggagaactggctaaggtgcttgtatcggaagacccacgtgtctatggcaaggggggccttctcgatcagttcactaacaatgatatgccgcgcattgccatcagcgtggatatgctagacactggtattgatgtacgtgaaatcgtcaaccttgtgtttgccaagccagtctattcctacaccaagttttggcagatggtcgggcgcggcacgcgcctgctggaaaccagcaaactcaagccttggtgccttgaaaaggatatgttcctgatcctcgactgctgggacaacttcgaatacttcaagctcaacccaaaaggcaaagaactcaaaccgcaattgccattgccagtgcgtttgttcggcctgcggcttgacaagatcgagaaggcttatgatcgcggtcatgccgatattgccagtcgtgaaattgccaaggttcgtgtgcagattgcagcgttgcccaaagagtcggtcgtaatcaaggaggctgtcgcagctctggctcggctggaggatgaaaacttctggattaatctcagccacgaccgactggaattcttacgtgctgaaatcaaacctctgttccgtactgtttctgaggtcgacttcaaggccatgcgctttgagcgcgacctgctcgaattttcgctggctgtgctcgatgaaaacaaagaacaagccgaaacgctcaaagaaggcatcgtcgagcagatcagtgaattaccgctgtcagttagcttcgtacaacaagaagaggccctgatccgcacggcacaaactaatcattactgggccaaagccgatgaggatgcgttcgatgttatagtcgccaggctcggccctttgatgaagtttcgtgaaaaatccagaggcgatgagcaaactcagcttgatttggctgatgagctttataagaaagaatgggtggaattcgggccgcagcacgaagccgtcagcattacccgttaccgtgaaatggtcgaaactttgattgccgagctgaccgagcacaatccggtgctacagaaaatcaagaacggtgatgcggttagtagtcaggaagccaatgaactggctgagctgctgcatgaagagcatccgcacattactgaagacctgctgcgtcaagtctataagaaccgcaaggcacgtttcgttcagttcatccgccatatcctcggcatcgaagtgctcaaaagctttcctgatgaggttagtgcagccttcgaccagtttatccgtgttcacactacgctcagcagccgacagatggagttccttgaactattgaagaacttcattgttgatcgcgaaagggtggagaagaaagacttaattaacgcccccttcacggtcatccatccaaaaggcatccgcggcgtgttcagcccggctgaaatccaagagatcttacagcttaccgaacggttagctgcctaa

SEQ ID NO: 127760 - DNA, 1665 bp, Enterobacter cloacae
atgttacagaacaatcctgaactaaaatctaaaatcgacctgctttggaacaaattctggagcggtggcatcagcaatccgcttactgccatagagcaaattacctacctgctgttcatgaaacggcttgatgagttggatcaaaagcggcaggccgatgctgagtggacgaatgaagaatacacctccaggtttgaaggtacctggattccgcccgaggagcgcaactggcctgtgacggaacagcgtcccattgacaaacgtacgttgcgttggagcgaattcaagcgtatgcaggcagaggatatgctgcagcacgtacagggcaaggtatttcccttcctgaaagacctgaacggtacggagtccaatttcacccaccacatgaaaaacgccgtgtttatcatccctaagccggcgcttctggtagaggcggtgaagaccatcgacgacatctttgctgtcatggaaaaggactcgcaagagcatgggcaggccttccaggacatccagggcgatgtttatgaaatgcttctctcggaaattgctacttcaggcaaaaacggtcagtttcgcactccacgccacatcatcaagctgatggccgaacttgtgcagcctcaactgggtcaccgtattgctgacccggcctgcggtactggcggatttctgctgggggcctatcagtacatcgttacccaactggctatcaacgccggtaccaggaatcttgtatccgatgaagatggttttatccgcacctcagttgccgcaacattcgatgaaaagcgccaattagtcctgcaagaaagcctgtacggttacgatattgacgctactatggtgcgtttggggttgatgaacctgatgatgcacggtatcgatgagcccaatatcgactaccaagacactctgagcaaaagctataacgaagaatccgcctacgacatcgtgctagccaatccaccttttaccggtagcatcgacaaaggtgacattaacgaagccttgcaactagccacaactaagaccgagcttctgtttgttgaaaacatctatcgcttgctgaaaaaaggcggtaccgcctgtgtgatcgtgccgcagggtgtgctgttcggctccggtaaggccttcagagaattgcgtcaaactctggtggtacgctgcgatctcaaagccgtcatcaccctacctagcggtgtgttcaaaccttacgcaggtgtcagcaccgccattttactgttcactaaggtctggggagcaaaagataagattacgaaacctgctaccgaacacgtctggttttacgaaatggccgctgatggctactcgttggacgataagcgttctaagcaggaaggttatggcgacctgcaagacatcatcactaagtaccacaaccgtaatgtggggaccgacaccgaccggaccgcgaagtactttatagtaccgtacagcgagattgcagatgagaagaacaacttcgacctctccctttcacgctataaggaagatgtatttgaagaagtgaattacgacgcgcctagcataattttaggtcggctgattcatgctgaagtgggcgatgtggatgaaatggaactggataaggttcaaagtggcatcgtgcgcgagttgttggagttgaagaggatagtgggatga

SEQ ID NO: 127761 - DNA, 1587 bp, Enterobacter cloacae
atgaaaagcagtttcccgattgttgaactcggaaaatatattcgacaggtaagtcaacgaaatagggctaaaaccgatatcgaagtgttttctgttaccaactcagaaggcttcacaagatcatctgattacttcagcaaagaagtttttagcaaggacgtgtcgaattacaaaatcgtcaaacccgggcaattttcttacaatccatcacgcatcaacgttggctctattgactaccttcggcatgactgttcagtgctcgtaagccccctgtatatcgttttcgaagcacaaaaagatatttatgctgactatttactgcgctatctaaaaagtgattttggcaatgctcagattcgggctaatactgagggtgctgtacgagactctctgaagtttaagggattagaaaaaattaagcttcctctgccattccttaacgagcaaatccgcattgcccatcttctcggcaaagtggaaggactaattgcccagcgaaaacagaacttacaacaactcgacgatttgcttaaaagcgtgtttctggaaattttcggcgatccagtacggaatgagatggggtgggacaaacccggactgaaagcgtttgggaaaatttctacgggcaatacgccacccagaaatgatcctgccaattacgatggcgatttcattgagtggatcaagacggacaacatcacgagggatgctgttttcgtcacgtcagccaccgagtatctttctgaagttggtgcgagaaaagcaagaacggtaaagaacggagccttgcttgttgcatgtatagcgggcagcatagagtcaatcgggcgtgcagcactaacaaacaggacagtgtcatttaatcagcagattaatgctatccagcccggaaaggatgtgaactcgctgtatttgtatgcattgttcaagttgtcccaggcctacatacagagtcacgccgctaaggggatgaagaagattctaacaaagggtgattttgagaagatcacgatgatcaaaccgcctgttgaaactcaaaatgaattcgcagcaatcgccgaaaagatcgaagtcctcaaatcccactaccagcaaagtcttaccgacttggaaagcctttatggtgttctaagccaacaggcttttaaaggcaacctagatctctctcgggtttgcatgcctgactcaccttctcaatatgctgcctctgtttctcaaggagatcaatccgctgtgcctgaactagttttgcaaactgtaccagccattccgatgcctgaaaccaacaattcgctggctaccctgaaaaatgctgaggctcgcaagacattggttacagaatgcctagaagcctatcgcgtacaacttgctgaaacaccattttcgttacaacaatttatggaactggcacaaaaccgactggcagagctctacccggacaacgacttagtgatgggggctagtgactacgaatatatcaagacatggatgttcaaggccctggctgctggcacattgacacaggtgtttgatgatgctggtaattgcatcaagctccaagccgctattgagcaaagtccaacatga

SEQ ID NO: 127762 - DNA, 1791 bp, Enterobacter cloacae
atgaaactactacgcctgaaaatcaccgaccctgcaggcttccgcagcttgccctgcggttttgagcaccattttcgcaccgaatggaacttgcaggatgaactcgcaaaagctgaccactttgcccccttcgtctgcgccggaccgaatggcagtggcaaatccaacttgcttgaagttctagctgcaatcttctttcagctggaaattctgcgtgtgcgccggagttttcttcctgaagcattgcaagatgagactctggatctttcacccatttcctttgagctagattatttgattcgagtccttcctgaataccgtagctctaacagttccgaatgggcaaaagtgcatgtacggaaaaatgctggtgaatcggtgcgctttctttgggaaaaccaaagtgactttggtacgaatataaatgaagcattcactagtagccatatagacatgctgttaccccagtacgtgcttggttactcttcaggcgagaacgaaatccttagtcttcctttttttaagatgcgttttgtacaatttgacgagtactacaacgcacttacccagcaacttccatatcccggtcacccagaaaccagacttgcatatcttgataacggattcagccaggctatcttgctgtgcaacctgctgtttatcgatgaggataatttgcgacctttccgcgaggatgttggaattgaagagctgcaggaattccgcattatcgttcgtcgtagtgttgaactgcgaccagaacaacttgctgcttttgctagtgaagatgaaaatcaataccaattacctgaagacatagtcaacagtaatcccgctctacagttccatatcgatgaacaagggggactccattatcgtctaaatattctccatttgttggaaggcgacgaaagatcctcattaatgattaatgccttacagcgatgcgctaccttgagttacgtcgatgatgctactgatacgctaatcttagattaccgggttaatgaggcaactaagcaagccttccgtgaaaactttgacggttcaccattggctctattccaggcatttcaggtgttgttagcccttaacctttatcttgtaaatgacacgcttaagtcggatttatacacttcaaccagtcactatgtcagtgaaacagtaccgacgctagcatctgatgagcgaatcatgcgctttaaacacttctatttcaggaaaataggggtcgagaagccgatgcttctcaaagagctatcggatggcgaacaccagttattgcatagccttggtttgtgtatgctattccgtgacactaactgcctgcttctgctcgatgagcctgaaacccactttaacccaaattggcgagccagttttatcacccgtctgcgtcagtgcttaccagataaaagggatgtggggcaagaaatgttgatcaccactcatactccgtttctgatttcagatagtaaacctgacaaagttttagtattcagcaaagacgaaacaagtggagttgtcagcattagccatccagactacaacacgcttggcgcctctatcaacaaaatcactatgaacacctttgggaagcatgaaactattggtggttatgcacagtcccttctagaagatttacgacgacgctttgagataggtggggaagatagggaagctctgattaccgaaattcaccagcaattaggcgactcggtggaaaaactgttgttaatcaatgcaattcttggacagaatgcacaagacagtgaggaggggcatagctaa

SEQ ID NO: 127763 - DNA, 1086 bp, Enterobacter cloacae
atgttgtttacttacacttatgtaccacatcaaatggagagaatgcagcggtttatcaatttcattttctatcaagtgtggtgtagagcgaggaaattaggtccatatgacttgactctttttgatgctaatcagcctctcaaagagataatgacatcttttgcctatggcgacactcaggcaggagatcgtttttcaagtcaagttcaagctatttatcaaagtttcgcccagctctcgcgagatcaaatagctcagtttaagcggtggtaccaaagcaataataatctagagaaaatatgtgccaatgtgccgaatacatgcctagctcgttacgctgatatcgcggtgaaccataaaaaactgtcagaacaacttggtacgtttttcaaaggattatatacgcagtcattgctggatcttgctgctctacgcgccaagattggtgacattaacgatcattacaagaactttgtgcaaataaataaaactggaaaatgcccgttttgtggtatcagcgacttacttggtgaataccatactaaacgcgaagcttacgaccactacttgcctaaggcactatatccttttaattcaataaactttcgtaatcttgtgccagcctgtcattattgcaatagcagctataagacaactaatgaccccgcttacacaccaaaagaccctgtaagagccgttcatcgtcgtgctgctttctatccttacaaacttgaggctcattcaattgagctacaagtaacactgcaatcttcagatatagccaacctgacacctgctgatatcaccctgcaattcggacctgctgctgttaccgaagaaattgatacatggaaggatgtttatggcattgaggaacgttacaaagctaaattttgcgatgaaagtgctggcaagtattggctgacacaagtactcgacgaatggagagaggatgggcgagatccttatgattttctggcaactttggcgcggcaaactcggagtcgaccatacgccgattgcaattttcttagaaaacctttccttgatgcatgtgaggctcgaggtcttttacagaatttgtag

SEQ ID NO: 127764 - DNA, 222 bp, Enterobacter cloacae
atgaaaatcatcagtaaacgtcaggcaatggcgatataccgccagcattctgagtcccggctgtttcgcttctgtacagggaaatataagtggtccggcagtatctgtcattaccacggcaggggagtgcaggatatccggggtgtgctggccgtgtttgctgaacgccgacaggaccgcaacggtccgtatgtgatcctgcgcagcgtcaccctgaactga

SEQ ID NO: 127765 - DNA, 231 bp, Enterobacter cloacae
atggttgatggtgccggtaaagagcatttcatgggcaataagacgatgctggttattaaggaagagcaccatgaatacttcacgctccagcgtggcgagctgcagacgaagccagtcgcagtggaggtaaatgcaacgccgagctcgcgtaactggcgttccagtaaggtcagtacacgtctgatggtgcgctgtgcggtgggagatattcccctgcggtcagggggataa

SEQ ID NO: 127766 - DNA, 234 bp, Enterobacter cloacae
atgccgtatgaactgtctcgccttaatgtcctgtgggattcacttgggaaaacaatggtcaaggatgaggacggtgacgttgtgaccgacgaaaccttccagcatttcccgacgggtacccccctcttccatatctggtcatggtttgaatccctgcacggtgggttctccgttgccgtaaaactgtacaacatattcgctcctgacgcgtcaacagacaggaaaagcaaatga

SEQ ID NO: 127767 - DNA, 480 bp, Enterobacter cloacae
atgaccgacattattaatattaacgataacaatcagcgacctctgcaggctggcggtaacggttctgcacctgctctcacagccacgcccgtagcggacgaacagcgtgtggaattctggccacagcactttggcaacatccctcagtggataacccttgaaccgcaggtctttgcgtggatggaccggttctgcgctgactacagcggcggtatctggaatttttatactctcagcaacggcggggccttcatggctccggaaacggacagcgatgccttctggtcgctgttcaatacaatgaatggcaacgccgcagacatgagcgccgaagccgccgggattgcagtctgtcttatcgcttacagtcatcacgcttgccgcacggaatgcgacgccatgacggaacattactggcgtttgcgtgactatgcgctgcatcacccggaatgtaacgccatcatgcacattatcgactga

SEQ ID NO: 127768 - DNA, 822 bp, Enterobacter cloacae
atgcgattagccagccgttttggccgggtgaaccagattcgccgcgaccgtcccttaacccacgaagaactgatgcagcatgtccccagcgtcttcggggaagacaagcatgactccagaagcgaaaagtatacctacatacccacgatcaccctgctggagaaccttaagcgcgaagggttccagccattctttgcctgtcagtcacgagtgcgcgaccagagccgacgggaacatacaaagcatatgctgcgcctgcgtcgtgccggtcagataaacgttcagcaggtgccggaaatcatcattctgaattcgcacgatggcgcatcgagttttcagttactgccggggatattccggagtgtctgcaccaattcgctcgtctgcggacagtcgtttggcgagattcgtgtgccacacaggggggatgttgtcgggaaggtaattgagggagcctatgaggttctcagcgtctttgaccgggtggaagagaaacgtgacgccatgcagtccctgcaacttccgtcatccgcacagcattcactggctaaagcggcgctgacatatcgttttggggaagagtaccagccagtgactgaatcgcaaattcttgcaccccgccgctggcaggacgagggcgatgacctgtggaccacttaccagcgcattcaggaaaacctgctgaaaggcgggctaagcggccgtaccgcgcagggtaaacgtacccacacccgcgcagtaaacgggattgatggcgacgttaaattaaaccgtgcgatctgggtgatggcggagaacatgctgaacctgttggacaggtaa

SEQ ID NO: 127769 - DNA, 213 bp, Enterobacter cloacae
atgacctttctaaaaatgctggtgacggccctgagccaggcgctgacctggtgcggcgggcatcaggcccggcagtatattgaaattcgcctgcgtcaagcaggctacgatgacagcagtattgatacagcccgggaagcggtcacgttgctggtcactgcacttatcaccgccctgatggcgcagatactgaatattctggatacgctgtag

SEQ ID NO: 127770 - DNA, 360 bp, Enterobacter cloacae
atgaaatttaaacacatggtggtgcctgcactgcttgttctgtcagcccaggctctggcagagccaacgccgctcgtcaaagtggagaccagtaatcaggttcatcctgccggaacgcgatacgtcacggtcgtggttacctcactggatgacagcatcaaagttgaaaacatagacgtgaaccggggtaactgtcgtatcgataaccagaagtacctatattccagtaataaggatactattctgcccgccaccttgcgctacgggcagtccgtcaaagtgaatttttataataactgcgtggcttcggaagtggtcgtcaccactgacaaggggggatggcgttacacctaccactga

SEQ ID NO: 127771 - DNA, 465 bp, Enterobacter cloacae
ttgaaaaatgtatcactcagcatcctggtattggctggcagtctgctgccggttatggcgctggcatctggcagtccgggtacctggacccggggttggggacagggagtatcggagtttgtcatcaaagggaaaggtcagtcacaactgtctctgagttgtgaggattatggctcgcaaccggccacggtcatatttactgacgcaagcggacatcaggtcagtatggatgaagataaaagccttcaggtcagtatcgatggcggggcacttattgatatcagcgaatctggcagtcgcgtgggcggtaataacctggcgctggcctgggctcagttacgtaatggcaaacaggtctcagtaaccggagacggtgttaagcctgccacattcacgctgtccggggcgacaaaggttttaccagcattcgggacgcacggctgtgtaggtaaagatgctctctaa

SEQ ID NO: 127772 - DNA, 678 bp, Enterobacter cloacae
atgtctgaacaggaacaacgctatgaccgcctggcaagccgtctcgccatactggtcagccgcctctttatgggagaaacgctcagtgtcaggcaacttgctcaggagtttggcgtctctgagcgtaccgtgcagcgcgacctacgtgaacgactgcgctatatcgacacggaatattccgggggtaattttcgcctgcgggatgcacggggcccctttcgcactaactgcgacattatccgctttgcccagataacccgggtggcacattactttccggcacttgaccctaaattgttgtcggtcctgctcgacagcggccaggactccccctgcattatctggaatacgcccccccgtcaggctccggcgttgtttggcggttttcaggtcattatccaggccatcatcagcagtcgccgcattcattttctgcaccacggacaccatcagtccgccgtcgccccttaccggcttatctgtctggaaggcgagtggtacctgacggcaataactggcgagcggattcaggtatttaccctttcagccatcaccgatgtggttatgaccatcgggggcttcaccagaagcaatcatatccggcggatttttgaagacccgcgatttattcaggccctgccgcattttcagtacatcagcaggctcatccgggaatga

SEQ ID NO: 127773 - DNA, 729 bp, Enterobacter cloacae
atggctgtataccgtaatgaccctgatttgaatttgctgggccagtgcagcaatgaagaactgcaattgctggtttccatcctgaccaccgacccacgcgacggtgacacccgctggacagagagtcttaccggaaccccggagtttcgtctgctggcaccagaccattgccgctactggcaactgatagccgctgagcttcagcgttacggcgcgaataccctagcgagtctgatccggctggggcaaggcgttgcctatagggaaattctcgttgatgtctgtgacaagcttgatgtgaattacaaccagaaaagtactaccgaaactattgagcttgctctgctgatgaaggtactggaaaagagcttggatcagatgacacccgaagagctggctgctttttcccgcaacatgcatctggatctgacaacccccacgccgcaactcattcttatcgccgtacaggctgccatacgaacttcctcgctggctgcgctggagctggcaacaattttgtctgccagtgttattacctccctgggcggtattgccacctgggggactgttgtggtcgcttcacgcgcactttccgtactggcgggtcctcttgccatcgcactgagttcagcgtggatgatttccgacatcgccggtccggcttatcgggtcacgatacccgcatgcatcatcgtgtcatggctgagacagcagcacctttcccgttaa

SEQ ID NO: 127774 - DNA, 1164 bp, Enterobacter cloacae
atggctatttgtaaaagaaataactgtacgctttcaattggtgaattacctgatgagcgtaaactgcgcttatgcccaaaacattatcagggtaagctatctaatgcagctaaaagagtacaaaggtgtggtctgacgtgtcagtacccgccctgtggtattagtctgtctggtactcgcaatcaacggtattgttgtattgagcatcgtaataaagatagaaggctcatagatgacgatgccattgtcagtctggtaaaacattcttactggatcaacgtagagtccaagctaaagaataatcccctcgggctagggagtatcaccagccctgatgacattgctgatctcatccggttgtaccagcgcaaagcagactaccagaaagcttacaatactctaaatgggcaaagggttactgattcacaggggcaggttattaaacgcctgataccctggctggagctggagttatgtcacatatatcctaattccaaagggggggctaatacagtggataacatcattattgcccctgcgttgattaacaggatgatgaaggacactattcccgtgagcaaaacccgaggaacgttcagcggcataaaagcggcaggttctcccctgcctgtaaattcgacgttattaaaggcgctcacgatgcaatatggtcatgatgaaatacaggaagcgctagcctctgtaaaacatgtgacctttgcagatctgagtgtaccacgcaggctgtttggtacggacatttatgcttatccaccattactgaaacttttaaaagatcaggcaatgcgcttgggtctctggcgtttgagggagtccattaattctattgaaagcagtcactggctgtctgcaggtcctgcaaatgagttatttgctgttgctgcttttcatgccatgttaaatggggataaggatgacttaattgaggtattttcaagtctgcacgaagacataattgaacgagctaggaataaagaaaaattaaactatgattattatcaaaacattctggaacggtatgcatcccgttatttccaaatagacctacacaatcaggagtcatgcgttttattttacaattcatttttcacagtgccgcctttggacaaacatggggttttaatcatacctcatcacttctaa

SEQ ID NO: 127775 - DNA, 207 bp, Enterobacter cloacae
atgaacactcaacacattaaaatcctgcgtatatctagtgttgtcaacaagctaggtgtagcccgttctaccatctacgactggattaaccccaagtcaccacgttatgacgccacattccctaaacaacgtcgcctgggcatgcaatctgtcggctggcttgagtctgaactggatgagtggttgctgaaacgtaatctggcataa

SEQ ID NO: 127776 - DNA, 720 bp, Enterobacter cloacae
atgacagacgatagtgctcttgatagcatttttgattcagtaaagagcgaagctgagcgttttatatcgtgctacagcggtagtgatgatgatgtcagtagttacaatgaactccgtgaccggtgcgagagtaaagcaaaagaaaaaattaataaattcaaggaggaaggcggccatatcatggatgataattttgaatgcatgctttacgatgctaatttttctgcacaatttaatggaaagtttggaacgtatcttgccattgcattcttcttttaccactgggggcagtattgttattcctctgggcaccggcgtgaaggattgctatttatggcaagagcagctggttgtggtggagtctggcagggggctgggctatacgctgaccgtgtagagactgctgaattggcgttaaagaaaaagcaagatcatggaaagaagggaggggaggctaccgccacggctttagctcccgcacgggatgagttgaaacggttacttaaactaaactgcccagcagaaggatggaaaactaaaactgcagcaatcggtgccgttgtagatcaacttgaggtttttgttaaaaaaaacaaaataaatttgaaaaccgataatcttgatagtgccatatcaacatggtgtaagagatatgatgatttacaagacgtattggagagctctttaaaaaagaacatgaaaaataaccgcgtggattga

SEQ ID NO: 127777 - DNA, 459 bp, Enterobacter cloacae
atggacacaactgaagaactaaatggaacgtatttttatgctggcagaacaaatcttaccgctggcggccttttctttatgatttattgcgaatcaattgccgatcattttggtattgacgatgttgctggaattgctgcgttatatagcggtgctaataatcagaagaccagaaagaaacccgcgggagcgaaggaaggaacgtcccgagcctcgaaagccatgaggcgctatttcaaacaagctaagttcccgtatggcattaggctcccgacatggattggcggctacacgccatggactgtgcgctgtaggatggtttcacaaatcagtacatttatcggaagaacgattccattagttggtatggtgatattagtcgctgatgtatcactaatcacctatgctgcaatacgtgattataatcgaatcgcgcggggcagcgacaaactatggtag

SEQ ID NO: 127778 - DNA, 1380 bp, Enterobacter cloacae
atgaacaccctacacgcattcccctggcagcaggttgtcagcgctcagggctacacggcggaatcaaaagaccgtgtgacccactttagcgacacgctgttctgtatcgacggcagcggcaccattgtcgatattatacagggtgacgatggcgcgttcaggcccgtgcgagacgcggcccgcaaggcaggcaagctgaccgaactctcttcagaccagtacctgctgccgggcctgatcgatctccatgttcatgcccctcagtggccgcagatgggcaaggctctggataagccgcttgcagagtggctgaatgactatacgttcccgctggaggcaaaatacgccgacatcgcctttgcccgtcgcaactacacggaactggtcattgcgctattggcgaacggcaccaccaccgccgtctacttcgccaccctgcacacggaaagcagcgtggagctggcccgtatctgtctggcgcagggtcagcgggcgctggttggtcgggtggcgatggatgacccctcccagtgccctgattactaccgggatgaaagcgcggagacggccctcgccgaaacccgggcatttattcacgcggttgcacaactccccggcaatacggcaaaacgcgtgctgccggttatcaccccacggtttattccgtcctgtacggatgcccttctggaaggcctgggcaagcttgccactgaaacaggctgccacgtgcagacccactgctcggaaagcgactgggaacatgcttacgttaagcagcgtttgggtaaaacggataccactgcgctgcgggattttggcctgctgaccagaaagaccgtactcgcgcattcaaaccacatcgaagatgacgatgccgacctgatcaagcaaactcaggcgggcgtcgcgcactgccctttgtccaatttctactttgccaatgcggtcttccccctgcgcgccatgctggaccgcgggcttaacgtcggcttaggcaccgatattgcgggcggccatagcccttcggtatttgatgcctgtcgccatgccatgaccgccagcaaagccctgaatgatggcgtcgatgcccgtatcgccgcggaacagcgcggcagacccggctcggcaatcaacttccgggaagcgttctggctggcgaccggcggcgcaggagaggtgcttgacctgcgtgtgggcaagctggcggtcggctaccagttcgatgccattgtgatcgatacccgggccgccgggagcgacatttatatcgatacggctgaggacgcaccggaagaccggctgcagaaaattatctataacgccagacgcaataatatcagccgcgtctgggtggacggcaaagctgtcaatattcagtag

SEQ ID NO: 127779 - DNA, 765 bp, Enterobacter cloacae
atgtctacaaaaagcgcatggtctggcgccattgattcaacaaaagaacagggtataaataccggtctgaaggtcaaccaaggcgataagatcaccattattgctacagggctgatcaaatatggcaaggaagatcacgcatgggcttacccgggcggtaatattggcaagaacgggcaaaaaaaggatattgccatccttaaggcacgttttagcgattccggaaaaagctatgatatcggtaccggcgtatatcaactggctgcaccggaaagcggggagctgagattattcattagtgactcatcccatagtgataatacgggttcattccaggcggatgtctatctggggagtgatgaggaacacacgacacaagaccccgttcagtggaaaggccacattcctgcaaccagcagtgaatgggtgaagaccgggatcaccgttcgccagggcgacagcattctgctggttgccgcggggcaggcccagtatgacagccgcgggcgcaccttcggaccggatggcgacagccagcatccttccgcaaaggcaccagacccgtcgtttgttctgccgggtgccattgccggcacgctgttgattaaaattggcgatcaaatctcttctgtcggatccggcggcaaaccgttgaaagcccagacggagggagaaatcgcctttatttttaacgataccaacaaggcatcggaatacgccaataacacgggcggttatgacgtgaatttaatcgtgacgcgctaa

SEQ ID NO: 127780 - DNA, 1362 bp, Enterobacter cloacae
atgaatggcatcccttcccgtcagattaaaaccggcagtgatccgcgcacgctaccggattatgctgccctgcgcgatgagctgagtaagctgactcatccagcgcgtccggatgtgaactggcattatgtggaaaaactctgcctctccctttttgagcaaaatggtgtcgagcttcagaccgctgcctggtatacgtttgcccgtacacagctggccggtttacccggcctgaatgaagggctgacaatactggaggccctcataagccatcagtggggaacgtgctggccgcagcctgtgcacgcccgcatggaaatccttagcggactcagccagcgtttgcagcaactgatgcgaaccttttcccttaacgacagtgacctcagccagctttatcaagctgagcaacagcttacggctctcggggaggtattgcagagccttgagcttaaacaccttagccagctcgataccctgtgtaccctgatgcataacagtgccgtaaggctggaaaacagccatgatgcatcagaaccgggcgttgtcattcagcatcctgcggcggccggagaatttaatcatgctgcgccggagaacccgctgacgacgaaaattgacccgatgaagtgggtatatgtggcgcagccggagcctcagccgaatatcgacgttgtggaggcgataccggacccggtaaaaccctggcgtttttttgcggcgggaatgtgcaccatgctggtggctggcgcggccgcggtatggggctggcaacatttcaaccggccagatccgcaggagcagcaacttctggcaacccttgcgccattgcctgcaatgctcacgcctgcacagcgggatgcggcgcggcagcgcctgacgtcaccagagtcctttattgaagcaacacagcagcagctaacccggcttgatgcgcttcccccggactggaatattgcttacagcaggcagcttgtggagcaggcgcaggttttgtggccggagccggctgagtccatggcgttacagtggcagcaacagcttaacgccagcgctctgccgacagaaaacctggagggctggcatcaggggatgacaaagctgaagcaactgagtgaccgtctcaaccagatggatgaacagaaaggcaaatacatgaccgtcagtgagctgaaatccgtggtgttttccgcgatgcaatcctttaaccaggcgataccggcagaggagcagttgagagttctggccaaatcgcccgcaggccagccgctacctgttgctgcaagcgctcagacagaaatgtacctgaaacaattaaccgtccgttattcagagattaaacagaaagcatcgagtaaatga

SEQ ID NO: 127781 - DNA, 1761 bp, Enterobacter cloacae
atgagtcatgaagcgcgtttatttcaggaaagtacattcgcaaccagcgatggagaggtgctctattttcgacattggcctgcaacggaaggcaaaagcaagaaagtgatcgtgctgtttcaccgtgggcatgaacattccggacgtctgcagcacattgtcgatgagttggttatgcccgatacgcatttttacgcctgggatgctcgtggccacggccagtccccgggcgctcgcgggtacagtccgagtctggcacgctctgttcaggacgtggatgagtttgtgcgtttcgtggcgaaggatgcgcaggttaatctcgaaaatatcgtagtgattgcgcagagtgttggggctgtacttgtcaccacctgggttcatgactatgcgccgaaaatcaggggaatggtactggcctctccggcttttagcgttaagttgtatgtgccgtttgcccgtactggcctgactttaatgcggcgtatccgtggcatgttctatgtgaattcctacgtaaaaggaaaatttctcagccacgatccggaacgtatcgccagctttgagcaggataagctcatcacacgggcaattgctgtaaatattcttctcgatctctacaaaactgctaaacgcattgtttcggactctgccgccattacgctcccgactcagttgcttatctctggtgatgattttgtggtgcacgcgaagccgcaaaagcagttctacgccggtttgcgcagtgcgataaaagaacagcatatattgcccggcttctatcacgatacgttgggagagaaagaccgtgccctggccttcgataaaataaaaatctttatcgacaaactttatgcgactcagctttacacctttgattacagcaatgaagaccagtggagcccgagtgctgatgcgtaccgtgaactgcaggcaccgccgaaagcacgctcgctggaaggaatattctattcatctctcagttatgccatgaaaacggtaggcagactgtcaaaaggaatgcgtctgggttacgagacgggttttgattccggcagtacgctggattatgtgtatcgtaattctccggaagggaatggttttctggggcgtatgattgataaacattatctcaacagtattggctggcagggaattcgggtacgaaaagtcaatattcaacaggttatcgagcaggcggtaaccacgctaaaagcaagcgatatgccgatacgcgttgtagatattgcggccgggcacgggcgctatgtactcgatgcgctggaaagacatcacgatatagaaagcatcctgttgcgtgattacagcgaattaaacgttgtaaaaggccgggccatgattgaagcgcgtggattagataatgtcgcgcagttcataaagggcgatgcctttgactatgcctctcttgctacgctggaaccttcgccgacactgggaattgtttcggggttgtatgaactctttcctgataatgcattaatcaaaacttcgctcgctggtctggctgcagcgattccagcaggcggtatgctggtttacaccggtcagccatggcacccacagttaaaaactatcgcttataccttaaccagccaccagaacggcatcccgtggatgatgcgtgttcgtactcagaaagagttggatacgctggtggaactggcgggatttgaaaaatgccatcaggtgattgatgagtttggtattttcactgtctcgctggcagtgagaaagaattattag

SEQ ID NO: 127782 - DNA, 633 bp, Enterobacter cloacae
atgaaccgccttctgcgctggatctttacgctgtgtatcgcgtaccccgtggtctggatttggttgggcattcgtgtatacggccgcaaaaagctgcctgttgaaggcccaaccattatcgtggcgaatcacaacagccatctggatgtgctgacgttgttcacgttgtttccactttctacgctggtgaatgttctgcccgtggctgctgcagattatttcctgcgtaacaaagtgattggctggttcgcactgaaggtcatcggcatcattcctgtttatcgtggagcacatcaggctaatccgttacaggcatgtgtcgatgcactggcggaaaagaagatcgtgattattttcccagaaggaacccggggggagccgggtaaattttcagagatcaaatccggtatctggcatttaagtcagcagtgtccggaggtaccgattatccctgtttatatgcatggcctggaccgttcattaggtaaagggcagaaaattcccgtgccgttttttatcgacatcttcatcgacgaaccactgttttacgacgctgataaagctaagtttaaacactcattattaactcgcttcgtcatattacagcagcaagcgacaaggaaaattacatga

SEQ ID NO: 127783 - DNA, 930 bp, Enterobacter cloacae
atgcctgattctcagcatactttgtattattgcctcggtgggatcttcagtattttaatgctggcgaccattatcattttcgtcttaaaaagatgtcgcccgcagcgtgactggctggagcttcagcaacgtgtcaatagttggtgggttatcgttggcttattttctctggcaatgctttcacccaaagggctggcgctcaccttctttggatttctcagcttcctttcactgaaagaatatctgacgctggcaccgactcgccgttctgacagtatgccgttgctgtggatgtatgccgcgatcccgttgcaatatatctgggtggggatgtcgtggtacggcatgtttattatttttatcccgatttatgtctttttattcctgcctatgcgtatggtgcttgtcggtgatacgaaagggtttctgcattctgcatccatcatgcactggggcatgatgaccacggtctttgccttcagccatgttgcgtttctgatgacgttatctgagacgaatactaaagcaggtgctttgttggttattttcctggtagtggccactgagcttaatgatatttcgcaatatctgtgggggaagtcgctgggcaaaatcagggtcacaccgaaagtcagcccaaataaaacgctggcaggattgttgggtggcatattaacgactacgttgctggcagccattttcggtccgctgctgacgccgatgaactggatccactcgttgagtgccggggtgattattagtctgagtggattctgcggagatgtggtgatgtcggcgataaaacgcgattttggtgtaaaagactccggaaaattactgccggggcacggcggtatccttgatcgtcttgattcgctgatttacaccgcaccgctgtttttccacttttattactacttctatgtttaa

SEQ ID NO: 127784 - DNA, 603 bp, Enterobacter cloacae
atgacactctatgatattaaacctaaatttcaagatctgttacgaccattgaccaggggtatgtattcaagtggatttacggctaatcaggtaacaatatttgcggtatttgcatcaattgtgattggtctgatattaatcttttttgcgcaaccgagtttgtttattttactgcctgtttttctatttattcgcatggcgttgaatgcgattgatggcatgctggcgcgagagtttaatcagcagagccagctcggagccattctcaatgaagtcggggatatcatagctgatgcagcgctttatctggcatttgcttttttgactggggtctcatcatggctggtcgttctggttgtgttattgtcatggctgaccgagttttgcggtgttatcgctcaaacacttacgggcatacggaattatcgtggaccgatgggtaagagcgatcgcgctttcgtgctgggggcgttaggtttatttatcgctctttggccgcagtatacaaatgtggtgaatatcgtattcggtgcctcggcggtgctgcttgcatggacctcaatcaaccgctgtcgcagcgcactggaggtcaaaaatgcctga

SEQ ID NO: 127785 - DNA, 2739 bp, Enterobacter cloacae
atgatgccgggtagtacatggagcagaggggggcttgccggcataatagcctgcatctcagcgattatagtggccgtgatccttcatttcggcccctcgcatggtcttgatacccgaccgatgcaaatgcttgcattcgttgccgtatggatagtcctgctgattgtgttctatacgccgtttatgttccgatttatgaaggaaaggtatcatcgctggcgagaacagaagaacaatgcgttgccttctgatgaatcaagagttgcccggactccgccacgcaatgtcaccgttacagcaatccgcgaagccatgcgtaatctttatggtcgccgctgggggggcaaggttcgcattctgctgataaccggtactgctgctgaagtggagcaactgaccccgggtcttacagctcagctctggcaggaagaccgcggcaccttgttgctgtggggcggtgacctcaatacgccagcagacaacgcctggctgactgcgctgcgtaaattgcgtcgccgcccggtggacggagttgtgtgggttacttccgctttcgaccagttggctgctccggggctagagcagccgttaccggtgccgtctgatagcaccatggattacctgtctcatgccatcagcaaccgcatggatgcgctgggctggaaacttcccctgtacgtctggtccctgcacccgcgtgccggtaagccggaagggcgcattgtgcaggcgacaggctgtctgttgcctgccggttgtcgtaccgaggggctgactgaacaactctccaccctcatgccggagctgatttcgcatgggctgcagcagatctgtggtgatgtgaaacataacttcttgttaacgctggctgaccagcttattcgcgagccacagagcgtgactacgccgctgtcggtgatactcaatccgtaccgcccgttgtcgctggctggcgtaatgttcagtcagccttctgccggagctgaacgtgccgttcagaatcgctggtttatggacagacgctgggatgggctacctgcgtctgtccggatgctaccagcggcacttcgtccgcgcaggcggggcattccgtggcatacggtgatggtttcagttgtcgtctcgatgatggtgggatgggctgtttggatggggatcgcatatgttgccaatcgtagcctggtctcgaacgcacaggagcaggtccggcagacgctgaacacccggcagcctgaggccgggcggttgcaggcgctgtctgaaatgcaaaaaaccatatcccgcctgcaataccgagaggcgcacggggcgccctggtaccttcatgccgggatgaaccagaacgcagccctgctggcggcggtgttaccccgctacgcgcaaggcgcattacctctgctgcgtgatgccgccgccgggcaccttcagcagcagcttgagggctttatccagcttccgccggacagcccgcagcgcagccggatggcaaaagccgcatatgaccagctcaaactctacctgatgctggcatacccgcagcggatggagcctgtctggttcagccgcacactgatgcgggactggactcagcgtgagggtgtcgcacaggggatctggcaggcgaaggggccggatttgctggctttttacggtgcgcagtcagtagcgcatacgcaatggcagttgccagcggatgacgggctcgtcagtcaggcccgaaccctgctggtccgcctgatgggagtgcgtaacagtgatgccacgctgtaccaaaaaatgctctcgcaggtggcgcaccagtatgcagacatgcgtcttgcggatatgactggcgatacggacgccgcccggctcttcactaccgatgatgtggtacccgggatgttcacccgcaaggcctgggaagaggctgttcagccagctattgatcaggtggcaaaagggcggcgtgaagagatggactgggtgttaacggacagcggcagggcatcgcaggcgcaggcttcaccggaagaggtcaggcagcgcctgacggcccgctattttgccgatttcggcggcgcctggctggctttcctcaacggcctgcgctggcagaaagcggaaacgctctctgatgccattgaccagttgacgctgatggcggatgtgcgtcagtcgccgctggttgccctgatgaataccctgaatgtccagggacgtaccggcagaaccggcgaggcggtgactgactcgctggttaaatccgccagaaacctgctttcccgggatacgcaaccggccattgaccagagtgctgttgcgcacgggccgctggatgccaccttcgggccggtgctggcactgatggataatcagggcagtgacatgctcagtctccagaccttcctgacccgcgtgacacaggtgcgtcttcgcctgcaacaggtcaccaactcttccgacccgcaggctatgacccggacgctggcgcaaactgtgtttcaggggaaggcggtggatttaaccgccacccgcgactacggcagcctgatggcggcaggactcggccaggagtggagcggctttggccagactgtttttgtccggccgatggaacaggcctggcagcaggtgttatctccggcggcggaaagcctgaagccggtcagcacgccaccccgacagcccacatgcactcccctttatatggcgaacaagcctgggtttacccatttaccgatttgcccgaggaaataa

SEQ ID NO: 127786 - DNA, 672 bp, Enterobacter cloacae
atgttgcctgagacagtaccattcaacgtcaccattgtgagcgacatgatttcgtcagacttcgagacccggtttcgcaaatcatgggaaaaaatttatcctggacgtgagctaacaggttcgatctcatgttttgaagccctttcttttgtctgggtcgaggagcgccttaaaaatcccgttttcgatattgatttgatcctgatattgctgaatcaggggggtgaacagtattccgatgcactcgcagcaatggtacttaccagcgatgatgttgctgaaaaataccagctttcacactccgcccgcatattgcgaccgatgccgctggacatgacaaatttcagggctgatatggggttgttcctcgaaacacaaacgatcgcctgtcagacgtcaaaggtgttctgtgattacgggcactggaatgacgggtttgctgatctaatgaccgcggctcaatcacatctgacaccgtgggtgccccaggaaattgatgtactggaaaaatataacggaattccagggggcgggagtgcgtggcttctagccacattactggccgacatcgtgtccgtcagcaacaaacctgttttagggttgtttacctcaggtgctgatcgttttgtcagtactgttacctcagggagtgaaagtaatgatgccgggtag

SEQ ID NO: 127787 - DNA, 261 bp, Enterobacter cloacae
atgaataagaaattctggatcaggtgggggtgtatcgcgctgatttgcatagcgtattacgttatcgtgctgtatttcgatctggtcttcgccgttaacttctcagaaaccgtgagccaaggatgggattttaccccctctcagctaacgtcgtttgttatggaactatcgcaaaatcactctgattcggctttagcctctatcattggtttcgctgtctgcgtccctctgatcctgctcatctttaagaaagtaagatga

SEQ ID NO: 127788 - DNA, 285 bp, Enterobacter cloacae
atgacttatgaactggaatttgacccgagggcgttaaaagagtggagcaaactgggggagactgtaaaaaagcagttcaagaagaaacttgccggggtgttggtaaacccccggatcgaatcagcccgtctgcataatctgcctgattgctacaaaataaaactcagatccctgggttaccgtttggtctatcaggttcaggacaacgtggtaacggtagtggtcatcgccattgggaaaagagagaaattaaccgtatatcacgatgctaacaaacggctctag

SEQ ID NO: 127789 - DNA, 714 bp, Enterobacter cloacae
atgttgacagccataaacacggattcagcgcccctttttatctataccgctgagatgggacacatcgtgcctctccccgcgctgcgctattgcatggtctcgttcgtcatgtctgattatcacgacggactatttgctgaatggggcatcccctttcccgcaaagctccacagcgccgtggtaaaacgcaaagcggagtaccttgccgcacgttatgccgcgcagagaatactgcaatcctgtagctgtgacggcacgccgggcaccgccccggaccgctctccgctttggcctgccgggtggcgaggtagtctctcacactcacatgaatgggctctggcggtagttgtacctgaagattcaggcctgacgccaggcattgatattgagttttctgcaccggagataatgcagcgaaccgcacatctctttaccacctctgaggagcaggcataccttgcaacctgcccgatggaggctggtagagcacagctcatcactttttcggcgaaggagagtctgtataaagcgctctatcctgtcgttggccgcgtcttagactttgacgcagcccgcgtatgcaaaatagagcctgtacaccagaggatcacccttgaactgacccgaacgctttcagcgcgtcacattaaaggcagccagatccaaggctactatcacctttcaggcgacagagttatcacgctcatggcctga

SEQ ID NO: 127790 - DNA, 951 bp, Enterobacter cloacae
atgagtgagcaatttgatcagcttatcgagcaagcctaccaacaataccgtggaccggcgtacctgcgctccccgctgattgcgtgtgttaaaaccgggatccgtttgatggatcgggttgtaccggggccgacggccgactggctggggaatcgcttttttaccccgcgccggatgccatcgcgagtgagtgataaagagatgaacggcctggcgagccgcattgagcaccttaccctgagtaatcataagcatgcggtggtgtattactggggagttgaggggccaaaggtattactggcgcacggatgggagtcgagggcatctcattttgcgcagcttatcaaaacgctggttgaacagggttttcaggtggtgggctttgacgctcccggacatggtgacgcggaaggaaaccagagcagtatcgttgaatttattgaaattattgagcggctggcgcaccaggaagggggctttgacggcatcgtggcacactcgtttggcggtttatcggttattaacgccgtcaaagcggggttgcgaacccgtgcgttggttatcgtgggcgcccccacccacttcagtgggctggtgacgaaatattccgcgatcctcaatctcccggaccgtcagcagcagcggctacgccgatatattgaacgctactttggcattggcgaggcggtctggcggcgttttaacgcgtatgagggattgcaggatatcgatcaacccgtgctggtcattcacgatagcagcgatgacatcgtactgcggatcgaagcagagtgtctggtgaaagcatggcccggtgcacggctggccgaaacgcacggtcagggtcacaatccgttgcgccgcccgggggaaggcattgacagggtgatggactggctggcccccttgcagaggtcttcaggccatgagcgtgataactctgtcgcctga

SEQ ID NO: 127791 - DNA, 1170 bp, Enterobacter cloacae
atgttgagctatctgagatttgcccttgtgccctgtctgtttttaccgctaaccgcactgacgaccctgctcggcggcgggtggataggggtgtcgatgctttgcgtgacgttgagctatgtcttcttcgacaacgtgatgaagcatgacaccgccgaccatcactaccggctcccggcgttactggcgatgatcccctatttacagcttccggcggcggcgctggcgttatttgctgtgatctggcaagccgcaccgggcgatctgctcgggtttggcgcatggcttagcgccctgacggatcacaacattatggcgctgcatgaccttgcgatgccggagttgctgctggcggcagtgtccaccggctataccatgagcaccaataccgtagtggcccatgagcttatccataaaacccacagtctggtggcgatgattgccgggcgctggcttctggcgctggtgggcgatgcgcaattttcgatttcccatgtttattcgcatcaccctaacgtggcgaccccggccgatggcgcaacggcccgccgtggagagagtgtgtatcgcttctttattcgttcgtctctggcgcagtatgccgaatcctggcaggtggaaacgcagcgcctgtcgctgctgaaatcgcgcagcgtcctgttggcgaatcgggtgacgcgcggggtgctgatgagtcttttggtggttgccgcctgcgtgatggcggcgggcgtcaggggcgggctcgcctgtcttgtgaccatgctggtgtccaaattcctgttcgaaacggtgaattacatccagcattacggactggtacgcgttcccggtacgcacgtggagccgcgtcacagctgggattgtcataaccgggcctcatccgctggcctgttaaacctgacacgccattccgatcatcacactcatccgcgtcgcgaatactggaatttacaggcgcacagctatgcggtggggatcgaaaagggttacgtcgcacacattttctacgcgctgataccgccgatgtggttcaaacgcatggaggcaaagctcgcgtactgggatgagcacgtcgccaccgatgcggaacgcgcattgatccgtcagtgcgaattacctgcgggtaattcaaacgttccttgtgtttctggagagtcccatgagtga

SEQ ID NO: 127792 - DNA, 1056 bp, Enterobacter cloacae
atgctgaagagatgttttttccggcgtagggactttcagggggtgctggaaggacgggccttcccgctgatatccggccatacgctactggaaagcgcgctcaatgccggggtgcagttgccgtatcactgccaggttggaacctgcaaatcctgcctgtgccgggtggtcagtggcaagacccgttcgcttgtcgagctggggcatcttctcagtcaggaggagatttcaacgggccacgtgctggcctgtcagtgcctgccgcaatcggatctgacgctggctaccgcgtccaccgcctgcacctctgcgcgtgtcacccaggttgagccgctctcgtcaaccgtatggcgtgtcacgctcctgactgcacgggcgctgccttttctacccggacaatctgtgccgatcggcctcgaaaagtcgcgagatgtccgccatttttccgtgagctggccaagccaggggcgggaaatggttgtggatatcacgcgccgggaacagggcggcttttctccggtgttgtgcgatgcgcgcaccattggtcggacggtctggatctcagattgtcaggggcagttcggccagcaggatgacgggaaaggtcctctgctggccatcgccagcggctcggggctcggcaccactcttgggctggtgcgcgccgcgttagcgcgtaatccccggcgtcaagtgatgttcattcacgcggttcgccagcggcaggacaaattcgacctgcatgaactgcagtgcctgcgccagcactaccccggttttcattttctgcatgcgctgtcgcaggagagtgcggcgcaggagcatgagctggcgggccgtgtgacacgttggcttgaagactggcgcgccctctatcccgccccgacgcaggcggctgactggcgagtgatgatttgcggcaatcctgagctggcgcaggcgtgccagcagagactgcttgccgggggcgttaaaagccacttgcttgaaatggactgcttttcgccgccggtcggggcgaaaagcaacgataaaaataaggagccagtatgttga

SEQ ID NO: 127793 - DNA, 1017 bp, Enterobacter cloacae
atgaaaaaactgatgattctcatcctggtgggcgccattctggcgttcatcataaatctgctcattgatgccggactgttttatcaggtgcaggagagtggcgggaagctgtgtcaaaaaataaacggtattgagggggcggaagatatcgcccccttacaggaaggggatgcgatagccagcagtctcaaccgtcacggtaccgcgcccggcgcgctctattatctcaacggcggtgatacgccacggcggttaccgggcgattatccgcaggcctttttcccgcatgggattgatgtctggcaacaggagggtgagacgtgggtctatgtggtgaaccaccgccctcagcaggacagcattgatgtgtttcgctttaaccgcgcgcagatgcgcctggaataccagccttttctgtctcagcgcgtcgggaaaaatatcaatgatatcagcgtgattgataaaacccgctggctactaacgcgcgatcaccgctggtcagggtttgccggcaggatggaagactatttgcgtctgccgctgtccagtgtgcttctggtcgataacgggaaattgcataccctgattgatggcctgcactttgccaatggcctctactacaaccgccagcagggacgactgtacgtggcggaaaccacccatggtgaagtgagcagctgggaatggcggcctcacgattatgttcccgtcctgctgggacgttttagcgggctgcatggggtcgacaacatcatgcctgatggtgagggattgctggtggcggctcatccgcagcttctgaagttggctgcttatcaaaaggatgcgcaggcgcgttcgccgtcgatggtgtggcggctgacaatcggcaccgaaggtgcggtgcagcaggccactgtcctctatcagagccacggcgaggcactggccgcgataagcgtcgctgcgccagtggggagaaaggtgatgatgggtagcgttttcgatgacggcgtactgctgtgcggagggcaataa

SEQ ID NO: 127794 - DNA, 7737 bp, Enterobacter cloacae
atgatgccgtctcttcagttgtttaacaggggatatcattccttcaaccagctattgcccgaacttgctgttcaacagacttcgcagacggcatttgaattcgtacgcagcgccagagatattcacagtcaaaattatcagcaattacatcagcgtgccgcatcgcttgccgatgcattaatgcagtacgggcagcgtggtgaccgggtaatattgctttaccctgatggtgaagattttattggcgctttttttggctgcctttatgccggaatggtagccgtccccgtcccgatgcccgccaaatcgtcgggaagtgcgtgggagcgtttcgttggcgtattgcgcaatgcgcaaacggaatttattgttacgaccgccaaaggggctgagacgttaatccaactggcgttgccgctttccccacttatttttaccttcgatctgactgataacatcgcactgccttccggttatcgcctgcattatctggagcgtcatttctccggggcatttcacccggtttcggtcactgaaaacgatctcgcctttttacagtacacctcagggtcgacgggcgcgccaaaaggggtgatggtgacacatggcaacctgtggtcgaactcgctcgccatccaccactttttcggtcatcacagcgaaagccggggcatgatttggctgccgcattttcatgatatggggctgatcggcggattattgcagcccgtgtttggggcgttcccctgccgggtgatgtcacccatgatgttaatgaagaacccttttaactggcttaagcaaatttctgattaccaggcgacaacctccggcgggccaaatttcgcctacgatttgtgcgtacgtaagatcagcagagatcaggttgaggcgttagatctctcgcgctgggatgtcgcgttttgtggtgcagagcccattcgtcccgccacgctgcaacagttcagcgagcactttgcacctgccggattccgttctggatcgttcctgccgtgctatggcatggcagaaaccacgctcattgtcaccggtatggaaaaagggcggggactgcgcgtggctgacgatgccggggtggtttgttgtgggcacgccctgtccgacaccagtgtttgcatcgtggatcctgagctccaccagccgctggctgaaggggaaagtggcgagatctggttacgtggaccgggtgtggccgctgggtactggaataataataccgccacgcgtgaagcattccaggcgcgtctggctgataatccgcatccgtggttgcgcagcggcgatatggggtttctccagggcagccatctgtttgtcaccgggcggcttaaagagttgctgatagtgaatggtcagaatcactatcccacggatatagaagagacgatacgccagtccgaccctgttctggcggaagcgacggtctgtgtcttcgccagcgaagccgaacgcccggttgcgctacttgaggtgatgacacgcactaaaaatagtcttgatatgccgacgttggcaccgcgcattcatgccgctgtggcggagcgtcacggcatcacgctggatgagttactcctcgtcggacgcagggcgataccccgtactaccagcggaaagttacagcgtacccgcgcaaaagcgatgtaccagcaggagatgctcgaagtggagtggcgcagccgccaggcatctatgacacccgccacggcagaaagcacgcaggggttggcggcgctgatcgccgggataatcagcactgcgacgaatgccacaatcagcgaatctcaatgggatgaggcgtttatcggctttggcatgagctcgcttcaggcggtcggcgtgattggcgaactggagcagcatttggggcgcgagctctctccggcgttgatctatgactatcccaccatcaatcagctggccactgcgttgggacaatccgcaacagcacagcctgtccagacggctggcgcagacagcgccattgcggtgatcggtatcggcgtcgaactgcccggacatagcggcgtggaggcactgtggacgctgctgcagcaaggtcacagcaccaccggtgaaatcccggcacaccgctggccggactccatgcttgagggattcaaccgcaaaggcagcttctttgaacatgtcgacgagttcgacgctggctattttggtatttcgccacgtgaagcggtgtatatcgatccgcagcatcgcctgctgttagaaacggtacaacaggcgctcaccgatgccgggcttaaagcctcctccctgcgcggcagcgatacagcggtttatgtcgggatcagcgccagcgattacgctctggcctgcggcgataacgtctcggcgtacagtggtttagggaacgcgcacagtatcgcggccaaccgaatttcctatctttatgattttaaaggtccaagtgttgcgctcgacacggcctgttcgtcgtcgttagtggcgatagagggggcaatgcaaagtctgcggactggacgttgttcactggcgattgctgggggcgtcaatctggcgctgacgccgcatctgcaaaaagtctttaccgaagcccagatgctggcccccgacggtcgctgtaaaacctttgacgcccgtgctgatggctatgttcgtggtgaagggtgtggcgtcgtagtgctcaaaccgttgacgcaggcgctggcggatggcgatcgcgtatatgccacgctggtggcgagcgccgtgaatcaggatggccgcagtaacggtattaccgcaccgaatggcccgtcgcagcaggctgtcatccggcgggcgatggcagaggccggggtcgatagcgacagcatcgactatatcgaagcccacggcacggggacggcactcggcgatctgatcgagtatcaggcgctggaaacggtattcaccgatcgcaagacttcggttccggtgcaggtggggtcaattaaaaccaacattggccatctggaggcggcggcgggtgtgctgggcgtggtgaaaacctcgttgatgttgtattaccagcaatatgtgccgcacctcaattttgcacagaaaaacccacatatcgctgcaattagccgccatgtcgacgtttgcggggggcaaaccatcccctggcactccgcttccggtgtgcgctacgcgggcgtcagcagcttcggttttggtggcacaaacgggcatgtgatattgcgcagcgcgccggcggttaaaaaatgccaacagcccgcgactccacataccgtgctgctgatcagttctcatgatgaaaagggattttaccttcaacgggaggccattcaggccggattatccgcccgtcaggagagcgagactgccacctggtgtcgtctggtgaacacccgctacgatgccgcgcggtatcgcggcgtggcgtttggcacggatcgcacacagctgacggagagccttgcacagcttgctgccaacaaggcaggtaaagctcaacctcaggtctggctctttccggggcagggcacccagcaaatcggtatgggggcggagctgtatcaccacctgccaggctatcgcgagcgttttgatgcgctggcggcgaccattcagcagcgttatcagattgatatcacccaggcgttgttcgcccgtgacgaggtctggcagcgctgcgccaggacctgccagctctcactctttgcctgcagttacgtgctggcacagagcgtaatgcactttggtctgcgcccggctgcggtcatgggtcacagtctgggagagtattgcgcagcggtcatcgccggtcatctctcgctggatgacgggctggccatggttcatcagcgtgcgtgtctgatgtcggccctgacgcaggaaggggcgatggcggtggtgttcagcggagaagccgatgtgcgccaggcgattgcaccctgggcgggcgatattgatattgccgccttcaacacgccgacgctcacaaccattgcaggaagtacggccgcgattgatgcctgtcttcatgccctctcaacccagggcggccatgcgcgaaaaattaaaaccaccagcgcatttcactcttccatgatggatccgatcctcggagcctggcgcgagtggctggtcaataacgtcaccttctccagtggaaatattccgttttacagcaacctgaacgggaagatgtgtgaacgaactgatgccgattactggtgccagcaaattcgccagcccgtgcatttcctgcagagtgtgcaaaacgtgctggcgcaaggtgagttcacctttatcgatctgagtgcggacagttcgctgggcaaatttgtgagtgcaaccgaccgtcgtcaccgggtgctggccgcaggcgaccgacgacatgagtacaaatcactgctgacgctgctgggtacgttgtggcagcaagggcacgacatcgactggaacaggctctattgcgcgaccacgcgggagacattacccctgcctgctatccagttctgccgcaaacgttactggctggcgggtaagacgccagcgcagaccccatctgcaaaagaggacgctatgtcacatcaacaccatttagccgctgaaataaaagcgattatcgctggttttcttgaggcggatcccgccacgcttgacgattcactgcccttcctggaaatgggggcagattcgctggttttgctggatgccatcaataccattaaagaccgctacggggttgcgatcccggttcgtgcgctgtttgaagagctcaatacgctggaggcggtgatcgcctttgtggtggagcatgcacagacagagacggctgcggtgccggtcagtgtcacgcacaccgccagccctccgccgcagcccagcggggcgatgccagtgcaggccagcaagccggaggcggagcatgttcaggcgctgatcgcccgccagctggagcttatgtcgcatcagctccagctgctgaacgatacgccgcaccctgtcccgcagactgcagccacaacaatgtcggttgtcacgccacctgcgccagttgtggctccgaccgcaccggcaaaagccagtgcgcacagcagctggtttaaaaaagagaccaaaaaagtttctctgggcagcgagcgcgatcgtcatctggcgcagctcacccaacagttcgtcgacaaaacgggcggttcgaaacgtaatgcccagcaataccgtgccgtactggcggataaccgggcctctgccggctttcgtttatccaccaaagagatgctttatcccttagtgggagagcgctctgaaggttctcgcatctgggacgtcgatggcaacgaatatatcgattttacgatggggtttggcgccaacctgctggggcatgctccggcgtgcgtgcagcaggccgttgccgaccagttggcgcaggggatgcagattggccctcaaagtgcattggcaggcgaggtggcaacccttatcagcgagctaacgggacagccgcgcgtggcgttttgtaactccggatctgaagcggtaatgagcgcggtgcgcctggcgcgcgccgtgacgggaaaaaataaggtcgcactgtttggcggctcgtaccacggtgtatttgacggcattctcggacgtcagcagggcggcaaaactcctgagcgcgctacaccgattgccgcaggtacgccgcaatcgctggtggatgacctgctggtacttgagtacggcagcgaagagagcctggcactgatcgcccgctacgcggctgaactggcggtggtcattgtcgaaccggtgcagagccgttatcccgatcatcagccacgggagtatctgcataccctgcgtgaactcacggcgacccataatattgcgctgatgtttgacgaagtgatcaccggttttcgtctcgcgacgggcggggcgcaagcctattacggtgttcaggcggatatcgcctcttacgggaagatcgttggcggtgggctgccgattggtgtcattgcaggatcccgacgctttatggacagtatcgacggcgggttctggcagtatggcgatgactcctggccacaggcggaactgatcttctttgccgggaccttctccaagcatccgctgaccatggcggcaagcaaagcggtgctggagtacatcaaagcgcacccggcgttgtatgacgacatcaaccaaaaaaccgcacgtcttacccggtcgctcaatacctggttcgccgtgaccggtacgccgattgagatcgtgtcagccgggagtctgttccgttttaaatttaacggcaactacgacatcctgttccaccatctgatgctgcgcggcatctttatctgggaaggacgtaactgttttgtctcggtggcgcattctgacgaggatatcgaccggtttatcacggcagtaaaagagagcgtaaacgccatgcgcgtggatggcttctttggtctggaggggatacgtcctgacacgccgtatgccgcgaccgacagccagctgcgtttcctgcaactggcggcgcaggatgaaagcggactgttggcggggaatattggcggtgttattgagaccgcgcgcgacgtagacagcaatattatgcgcgaagcctggcacctgctgagtgcgcgacatgaggcattgcgtatgcagtttactgatgccggtgaactgcgggtgtcgtcggagactgaggttgatttccgtgaggaaaacgcggtgcctgcgacttgtctcgcagattttgccgcacagccttttaacctcgccaccgcaccgctggctcgccttttgctcatccgtcatgagggtaagactacgcttgctattgcggcacatcacacggtggccgatggctggtcgtttatggtgatgctgcgcgagttgctgcatctttacgatgcgctggcggcgggcaaacgtcctgagttgacggcggcggtaagctatctgcaggtgatccgcgcgcagaagagggtagatgaggcggcactcacacagcgtctggcagccttccctgcgagacggttaacgcctgacgcgcttactgtgctggagccttctctgacgtatcagggacagcgtctgatgcagcgtctgacctatccgggtcttgccggacaactgcgcaaagcctccgctgaactgcgggtgacccgtttcgccatgctcaatgcgctctttatcctcacccttgagaaaacgctcggccatggccgggtacctgtcgctgtgccggatgcggggcgcgatttcgaacagagtgacgcgattgtcggacagtgtgtcaggctgctgccgctgtgcattgacagcgcggcctttgcgtcgttgcacgagatggccggggcgatacataacatgattgttgcgcagcgcgacgaagttgcactgccgtctcgctgtttccagggaccgactgcggcactgccgttactggcaaccttcaatgtcgagccgcatgctccgctggcagaaatgcgacagtggcaggccagtttgtccctgttaccggtgagcgccgtagagttcccgttaatgatcaatattctggagatgaaagaagggttgtcggtcgagctggactaccagttgcgctatttcacccgggagcatgcaaatgcgctgcttgagcagttcctgagggcgataaccgtactggcagaacacggacctgacgctgccggagctttattctcttcgtcagaggtgctggcagcttcatga

SEQ ID NO: 127795 - DNA, 828 bp, Enterobacter cloacae
atgacatcattactgaatacccgccagttgggccgggacgctattgtctcgacggttgatcagcgcgtttaccgcgagaatcgtgcatttgccaaccggcttatcgacagggttgaatctcatccgctgatgcgcaaccccattctctcaaaaatgaccagcggcgaatttgatattcaacagatgcgtgtatttcatctggagttttatcacgcgtttgcacaggtcttcaccgatgctgtgattgaagccttgagcgcggcgaaacaactggaagcaccgctgggtgcacaagcgaaaatggcagcgcgttttctgctgcaaatcaacctgctggatgagctcggcttccatccgggtgaagacaacgaaggtaattacaacggccagcctgcgctggcgcactacgtacagttctttaataccatccagcaactggggattactgagcaggaggtgaaagcctggctgccgatgtccagctcactggcctgccgcgcgacgtttgagaacgcatatggcgattatacccggttggttgggctgctggccgtggcagagacggtcttccatgacttcgccacgccgtgggcgaaaggcgtggataaagcgacggatattgacgtcacacagggctatcacagcattcatgtggaaagcgagacgggagagtccattgaagatggtcactctgaggatgcatggatcctgttctgtcaggcaattacggaagaccgctatcgcgaaatggaacagcacgtcgatctgtggctgaaagtctggaacgacttctgcaacgacctgctggcaggccgcgccggaaaataa

SEQ ID NO: 127796 - DNA, 411 bp, Enterobacter cloacae
gtggctaatctcagtgcaatactgattgcctttggctggagtggtattgttgtcggtatattaatgggtggattaatgggaatgtatgcctttaagggacctttccgcgcgcctaaaggccatgaaaattatactgatttaaatcgccggatgttaaggttggcacatatcgcgtttattatgttgcccttgatatccatgctctatggaatgtgtattgatagcctcgcggtaccttatctctataaatattacgcggttatttgcatgatgatactttcggtgggtattccggtactgttgattgcatcatgtttttatctaccgtttaagtatgtgcaggttatcccgtttagttgtggaatgtatgcgttagttgtaatggcaattggcagagtctctgccctgtaa

SEQ ID NO: 127797 - DNA, 1899 bp, Enterobacter cloacae
atggtgaaattacccgtaataacagcatttggtggctatggtccggctggtcgtagttcttcacatcatgcatttcgccgaatggttattgagtcattatccgaagaggaacggcagcagacgttattatcgctcgctatcctgatgggcattcttaaatatgatgaaggcggatattgtgacatttccggtaaaagattcacgcccgatcaggctgccgcgacgataaagaacgaggcgcttgaaggatcccttatcagaaaaatcacggacgattattttgatgttgatggcatcgttagtcatgcaaaattgaatatggcttcggacgaaaacggttttagttttaatatctcttccagacaattacctcaacccttaccgcagggatggcatgctgaggaattaacggatcagcgcgtgcgcattaccgtccggggtgatatggactgtagaattgagacgctgttgcgaacggaagttcaggccgcaggtttgctgccgcaaggattccggccgggtgactattacaattcacagtttcacccgcgggcgttgcaaatggccgttgtcggggcgtcagatgcgatcaacgctctggggatcccgtggcgggagatacaggcgaaaatttcgccggatcagctgggtatctactcgggcaatattatgggacagctcgacgagtatggctttggcggaatgttgcagtcgcgtctcaagggccatcgcgtcagcgccaagcagtgtccgctgggcctgaacagcatgtgcgccgattttctcaatgcctatgtgctgggtagcgtgggccacaccagcgccacgctgggagcatgcgccacgtttctttataacctgaacgcggccgtcgaagacataaaagcagggcgcattcgcgtggccgtggtaggcagcgcagaagcaccggttacgtcagaggtgattgaaggttttgatgccatgggcgcgctggcgacagagagcaaactcaggcatatcgatcagacggagacggccgactggcgcaacagcagccgtccgtttggcaacagctgtgggtttgtgatcgccgagtccagccagtatatcgtgttgatggacgacgaactggcgatgcagctcggcgcagagatccacggttctgtgggaaacgtctttatcaatgctgatggctataagcgttcgattgcttcaccggggccggggaattacatcactatggcgaaagctgtcgcctctgcagtgtcgatggttggactggagacggtgcaaaagggatcgtttatccaggctcatggttcaagcacgccgaaaaattgtgtctcggaagcggatatttttgaccgtgttgcgcaagccttttcgattcacgactggccggtgacggcagtgaaatcttacctggggcactccctggggcctgccagcggggaccagttgataagctgtctcggtgtcttccgctatggcattttaccgggcattaaaagcgtgccgcacatcgcgccgcaggtgaataacgcgcgtttacacatccctgttcaggactgcaaattagaggatgaacaggggcaaattgcgtttattaattcaaaaggcttcggcggtaataatgccacgggggtggtttactcgccgaagcttacccaacaatggttgcgcaaacgctatggcgaaccggcctttgcagattatcagcagcgtaaccgccaggtgcaacgacaagcccgtgcttacgatgaagctgcctctcacggcgaattaaacgttatttatctgtttggacagcaggggataaatgaagacgatatcaatattgatatgaatggcatcactattccctgctttgaaaagcctatttcgtttgcgagggaaaaagaatatagcgatttttaa

SEQ ID NO: 127798 - DNA, 1044 bp, Enterobacter cloacae
atgacaaatacacaaataggatttgtgttatgtgaacgcatgctaagttccggcctcagtctaccgattgaaatgtggaaatcagcggccagtagctatttagctgagcaaaaaacaaacgccaacacagatacgcccctggcaaagcgatcgcgtttcaggctctgtcgacccgaaagcattttgaaggtcaataccatcggcataaacagtttgccgatccgcacgcacagtggcttcagtattactgccgacaccacgcttgccgacgacagacactacgatgttatttatattccggccctgtggcgcaaccctcgcgcggtggtcagacagcagcctgagctgctggcgtggctttctgagcaggccgcacgaggcacccgcatcgctgccgtcggaaccggctgttgttttctggcggaatcagggttgcttaacgggaaacccgccaccactcactggcactacttccggcaattctcacgcgattaccccagcgttaaattacaaaccaaacattttctcacccaggccgaaaatatttactgcgccgccagcgttaaggccttgtcagatctgacaattcattttattgaaacgatatatggaaaacgggtagccacacatactcaacggacatttttccatgaaattcgtagccagtttgatcgccagtgctacagcgaagaaaacaaaccccatcccgatgaagatattgtgcaaattcagacctggattaaagccaactgcgcctcagatatatcaatgcaaaatcttgcagatatggctggcatgagtttgcgcaactttaatcgtcgttttaaaaacgccactgacatgtcccctctgcaatatttattaaccgccagaattgagttagccatgaatatgttgcaatcaaccaacctctgtattcaggagatcgccaacgcggttgggtatcaggatatcgcgcactttaatcgccagtttaaacataaaaccacagtttcaccgggggattatcgtaagaccgttcgcgcaaagatgtttagtgcataa

SEQ ID NO: 127799 - DNA, 1650 bp, Enterobacter cloacae
atgtttaaacgtataaaagtcattacccttttgatttcggtgctgcttgtgctcggcatcatgcaactcgtctccgccggtatctttattaacgcgctgaataacgacaaagataacttcaccgtgtcgcagctatccagcaagaacgtggcggagtttaccgatgcatggattagcctgaaccaggcacgcgtcaccctgaaccgcggcatgctgcgtctgcaaagtagcatggcttcgcagattaacggcgggcagctcaacgagctggtgaacacggcgaaaaacctgctggccaatgcccagtctcattacgacaaatactatgccttaccgaataccccagggctggatcccaacctggcgaaccgcctggaagagcagtatcgcaattactccgcgacgctgacccaaatgaacgttttgctctctcagggcaatctggaagagatgttcaagcagaatgcggagcagaaacagaccgcgatgcaaaacgtgtaccgggaatggcgtgaagcccaggccgtgcttacggacaaagggatcaaagataacgaaagcgattacaagcgtatcctgtggatcctctctgcggtcatgctgctggtgattatcgtgattatctccagctggattgccatgcgccgcgtgctgctgttgccgctgcaggatgtgataagccatatccgcgccattgccgccggtgatttaacccagccgatccatgctgagggtaaaaacgagatggccgtgctggcgcaaaacgtccaggagatgcaaaccgcgctggcaaacaccgtgggcgtggtgcgtgaaggtgcggataccatttacaccggtgcgggggaaatctctgcgggcagtaacgatctctcttcccgtaccgaacagcaggctgcctcgctggaagagacggctgccagtatggagcagctgacggcaacggtgaaacaaaacgccgacaatgcccgtcaggcttcccgtctggcgcttgatgcctcctcaacggcgaagaagggcggtaacgttgtggaaggtgtcgtccgtaccatggacgaaatcgccaccagctccagcaaaattgcgcaaattaccaatgtcattgacggcattgccttccagacgaacattctggccctgaacgcggcggttgaagcggcgcgcgccggtgagcaggggcgtggctttgcggtggttgcgggtgaagtgcgtacgctcgctcagcgcagcgcccaggcggcgaaagagatcaaagcgctgattgatgactctggtgagcgggttaacgcaggctcgcagctggtgaacgaggccggggccactatggcggagattgttaacgccgtgactcgcgtcactgacattatgggcgaaatcgcctctgcgtctgatgagcagagccgcgggatcgatcaggtgggccaggcggtagcagagatggatcgtgttacccaacagaacgcctcgctggtggaagagtctgcggccgcggccgccgcgctggaagaccaggcggcacgcctgaacgaagcggtagcggtgtttaaaattgcccgcagccaggcggttaaggcggctccggtgaaaacctatacgccaaaggcgcagcccgtcgcttctgcgtctgaagctaactgggaaacgttctaa

SEQ ID NO: 127800 - DNA, 735 bp, Enterobacter cloacae
atggattatgaatatctcttcctgcccgttattatgcttttttctgtgattcagtctattttcggtatgggtattctggtcttcggtactccggctcttctcctgctgggatatgatttttcgtcggttctcgggttgcttttaccctcgtcagtcctgatttcatttactcagctatatacttgccggggagggaatgtagaaaggaacgaaatagtcaatatggtcatctgtgcggcggccgtgattttattgctgagtgtcattattatctcgggagttaaggttaatcttgatatcttagtcggcctggtgctgatattttctgcagcggtgaggttaagcgcaaatttcagacagtttatccgtgtcagactcattaaatatcaacgtcagtatgttctgataatgggcgctttacatgggataaccaatatgggaggtgcattgctggccctttatgcatccaccaaacaacgtgagaagacagccatacgggcagaggtttcacgctattatctgatgtttggcattatccaactgcttacgcttgttatcctgaaaccacattccttgagtctttctggatttatggctgcaccacttgcgttgtttgtctactgggttgtcgggaatgtgcttttccgtcgcgccagcgcatccgtatacgaaggtctgttgacagcctttattgcggtatatggcatcctggtgcttactaagggatatatctga

SEQ ID NO: 127801 - DNA, 1545 bp, Enterobacter cloacae
atgcaatcctctgttaatcaaaaagaaagccgaacgttcttcggccatccttatccgctcggttcactgtttttcaccgagatgtgggagcgtttctcattttacggcattcgtccgttactgatcctctttatggccgccaccgtctatgacggcggcatggggctggcgcgtgaaaacgcctctgcgattgtcggtatcttcgccggtaccatgtatctggccgcgctgccgggtggctggctggccgataactggctcggccagcagagagccgtctggtacggttcgattctgattgcgctcggccacctgtcgattgcgctttcggccatcatgggcgacaacctgttctttatcggcctgatgtttatcgtgctgggatcgggcctgttcaagacctgtatctccgtgatggtgggcaccttgtataaaaaaggcgatgcgcgtcgtgacggcggtttctcgctgttctatatgggcatcaacatgggctcattcattgcaccgctaatttccggctggttgattaaaacccacggctggcactggggctttggtattggcggcatcgggatgctggtggcgctgattatcttccgcgtgtttgccgtgccgtcgatgaaacgctacgacagcgaagtcggcctcgattccacctggaacagcccggtggtaaaacgcaagggcgtgggcgcctggctgctggcgctggcggtaggggtggcggttctcgtcacgctgatcgcccagggtgttattgtgattaacccggtcgcggtagccagcgtgctggtctatgtcatcgcggcgtccgttgcgctctactttatttacctgttcatcttcgcggggttgacgcgtaaagagcgcgccagactgctggtctgctttatcctgctggtttccgctgcgttcttctggtcggcgtttgaacagaaaccgacttcctttaacctgtttgccaacgactataccaatcgcatgatcggtgatttcgaaattccggccgtatggttccagtcgatcaacgccctgttcatcattctgctggcaccggtattcagctgggcgtggccgaagcttgccaccatgaatattcgtccgagcagtatcaccaagtttgttatcggcattctctgtgcggcggcgggctttggcctgatgatgctggcagcgcagaatgtgcttaacaacggcggggccggggtttctccgttctggctggtgggcagtatcctgatgctgacgctgggtgagctttgcctgagcccgattggcctggcgaccatgacgctgctggcgccagaaagaatgcgtggtcagatgatgggactgtggttctgcgcgagtgcgctgggtaacctggccgccggtctgattggcggccacgtgaaggccgaccagctggatatgctgccggatctcttcgcgcgttgctccatcgcactgctgatttgtgctgcagtcctgatcgttctcattgtgccggttcgtcgcatgctggaaaatgcccggacgaaacctgccactgaggcggtataa

SEQ ID NO: 127802 - DNA, 468 bp, Enterobacter cloacae
atgactgtaaatgtagaggcattcatgcatagcttgggtaagtcatataacgatgtacttgatgctgagcttattccctataagactccaccaactggatttccaggcgaccctgacctcagtctggatatggcaaaagaaggtgtatacctgtcctttcagcgtgatgggcgtatcttgaagggaattattctcaaaatccaaaatgataaggtaaaggattgggtgtttcctaatgagttacctttaggtttgaaaaaggaaatgtccagagattgggtgcatacaacttatggactcccgctgcgtagtgttgaacctaaagtaattatgcgtagggctgttggacgggctgatttgtattcagttgctggatttacaccgcagttatatatgcagattcgttatgacctaaccgacaacgtgcaaaaggtggcatttattccagcatcggaactgcgctggtaa

SEQ ID NO: 127803 - DNA, 381 bp, Enterobacter cloacae
gtggagctgtacagcgactttaaacgccgttcgcggcaggggaaatacgaggctgaccatatgccatcggcagcggctgttcgtgctcactttaaacagctatacccggatgttgatgatgaggatcttgatgcctacgtacaagatgttgctgcgatcgttatacctaaaaaagtacaccagaagatcagcgatacttacggcgggcgtaatacacgggcacaagttgacctggactcgcagaacttacaggcagcagtggatcgcaatctagacgccataaagccagcattaaaagagcatggagcaaatgaaactcagatagaggcggccagagcaaaaatgcataaattaaacagcgacatgggactatacaaatga

SEQ ID NO: 127804 - DNA, 459 bp, Enterobacter cloacae
atgggttaccgtaccgataattttggccggggacaggcgcttgagaatgataaaacgactaccggtgccaggtgtattgcgtctattacggacagcaccgaatttggacgcagaattctcagggtaggtgataaaaccactccctgtcctaaatgtggcaggaatggcgtgattgtatcaggtgaggaacgggtgacattttacggcgtaccggtcgccgttcacggttcaaaagtacactgtgattgcccaccaggttcaaatcgggtaattgctcccgcaggtcagtggctgggacgtggccgagacccggttgatgttgccagggaagaacacgccgccaggctggcagcagaaaagcaggctgaagaaaaccgcagagagaaggaaagggagcgcaaccgtgtatttgcaaaatcctgccgttccctgacctgccgccgatttatatctacctga

SEQ ID NO: 127805 - DNA, 258 bp, Enterobacter cloacae
atgaatcagcaatacaccaatgaattaacgccagaaataaaagcccagcagcctaaccctccatttaaagcggaagaaattgccgcaatggacgatggagcacgcgcgataatcgcagagggaaagaagctggaacggaaacatcctgtgaaagctaacggcgatgaaattatcagcatcccgcaagggcatacttacctggtcacgcgtgaagggattgcatccggggaggattttctgacaatcacgggagcctaa

SEQ ID NO: 127806 - DNA, 1980 bp, Enterobacter cloacae
atggtgccggtcgccacgttgccagcggcagcgatattaatgggtgtcggttactggattgacccggtcggctggggtggagacaacgcattagcggcgttcttcattaagtctggttccgccattatcgataacatgtccgtgctgtttgccattggtgtggcttatggcatgtccaaagataaagacggtgctgccgcgctgacgggtttcgtgggcttcctggtgctgaccacactctgttctccggctgcggttgccatgatccagaagatcccggcggaccaggttcctgctgcgttcggtaaaatcagtaaccagttcgtgggtatcctcgtcggtattatctctgcggaactgtacaaccgcttcagcggtgttgaactgccaaaagcgctgtcgttcttcagcggtcgtcgtctggtgcctatcctgacttctttcgtgatgatcttcgttgcgttcatcctgatgtacatctggccggtgatctttgacggtctggttaactttggtgaacacattcagaaactgggttctgtcggtgctggcgtgtatgcgttcttcaaccgtctgctgatcccggtcggtctgcaccacgcgctgaactccgtgttctggttcgacgttgcgggcattaacgatattcctaacttcctcggtggcgcacagtccattgaagcgggtaaagcggttgtgggtatcaccggtcgttaccaggcgggcttcttcccgatcatgatgttcggtctgccgggtgctgcgctggctatctaccactgcgcacgtccagagaacaaagcgaaagtgctgggtatcatgatggcgggtgcgtttgctgccttcttcaccggtatcaccgagccgctggaattctccttcatgttcgttgctccggttctgtatgttattcacgccgtgctgaccggtatctccgtgttcatcgctgcaagcatgcagtggattgctggtttcggcttcagtgccggtctggtggatatggtgctttcttcccgtaacccgctggcgacccactggtggatgctgatcccacaaggtctggtgttcttcgttatctactacgtggtgttccgtttcaccatcaccaaattcaacctgatgaccccgggtcgcgaactggctgttgccggcagcgaagccgatggccaggacgtgaacgtgagcggcgcgcaggatcaggacgtgtctggtctggcccgtcagtacattgccgctgtcggtggttctgacaacctgaccggtattgatgcctgtatcactcgtctgcgtctgaacgtcaaagactcttcactggtaaacgaagcgctggctaaacgtctgggtgcttccggtgttattcgcctgaacaaaaccagcgtgcagattatcgtgggctttgtggcggaaaaaattgctaacgccatgaaaacgactggccctgtcgctgctgcgcaagcgtcagaggcgcctgccgccgcaactgctgcggcaaaaccgcaggcggtacccaacgccaccaccatcgccgcactggtttccccggttacgggtgaagtggtcgcgcttgagcaggttcctgacgaagcgtttgccagcaaagcggtcggtgacggtgttgcggtgaaaccaacggagaagaccgttgtgtctcctgcggcgggcaccatcgtgaaaatcttcaacaccaaccacgcgttctgcctcgaaaccgaaaaaggcgcggagatcgtggttcatatgggtattgataccgttgcgctgaacggccagggctttactcgcctggtggaagagggggcagaagtggttgcaggccagccaattctggaaatggatctggatttcctgaacgccaatgcccgctcgatgataagcccggtggtgtgcagcaacatcgacgacttcagcggcctggtgctgcaggcgaaaggtcaggttgttgcagggcaaacgccactgtatgagattaaaggcaaataa

SEQ ID NO: 127807 - DNA, 2241 bp, Enterobacter cloacae
atgaataagaagattcactctctggccttgctggtcaatttagggatttatggcgtcgcgctgcctgccatggcagacgacaacaccgcctccgcgcagcatgaagacaccatggtgatcaccgccgccgagcagaatttgcaggcgccgggggtttccaccattaccgccgatgagatccgtaaaaatccgcccgcgcgtgacgtgtctgaaatcatccgcaccatgccaggcgttaacctgaccggtaactccaccagcggccagcgcggtaacaaccgccagattgatatccgcggtatgggcccggaaaacacgctgatcctgatcgacggcaagccggtgaccagccgtaactcgattcgtctgggctggcgtggcgagcgcgacacccgcggtgataccggctgggtgccgcctgagatgattgagcgtatcgaagtgattcgtggcccggccgccgcgcgttacggcaacggtgcggcaggtggcgtggtgaacatcatcaccaaaaaattcgacgaccagtggcacggctcctggaacacctatctgaacgcgcctgaacacaaagatgaaggctccacaaaacgcaccaacttcagcctgagcggcccgctgggcggcgacttcagcttccgcatgtacggtaacctcgacaaaactcaggccgatgcgtgggacatcaaccagggtcatcagtctgagcgtaccggtgcctatgccaacaccctgccagctggccgcgaaggggttgagaacaaagacatcaacggggtagtccgctgggatttcgcaccgatgcagtctctggagtttgaagcgggctacagccgccagaacaacctctacgccggtgatacccagaacaccaacaacgacaatgcgctggtgaagaagaactacggcaaagagaccaaccgcatctatcgccagaacttcgccgtgacctggaacggcggctgggataacggcatcaccaccagcaactgggcgcagtacgaacacacccgcaactcacgtctgggtgaagggcttgccggaggaaccgaagggctgttcaacagcgataaattcactgacaccgacctggccgacgtcatgctgcacagcgagatcaacctgccgattgatttcatcgtcaaccagaacctgacgctgggcaccgagtggaaccagcagcgaatgaaggattccacctccttctcgcaaaccctgcagggcgggaccgtcccggggatgagtaacgatcgcagcccgtatacctccgcagagattttctccctgtttgcggaaaacaatatggaactgaccgacagcaccatgctgaccccggcgctgcgcttcgatcaccacaccatcgtgggtaacaactggagcccgtccctgaacctgtcgcagggtctgggggatgatttcaccctgaagatgggcatcgcgcgcgcctataaagcgccgagtctgtaccagaccaacccgaactaccttttatacagcaagggccagggctgctatgccagctctgacggcgtgggctgctatatgatgggtaacgacgatctgaacgccgaaaccagcatcaacaaagagattggtctggagtggaaacgcgacggctggctggcgggcgtgacctggttccgcaacgactatcgcaacaagattgaagcgggttatacgccgattggccagacctccaccagcaaagtcaccaccgatatctaccagtgggagaacgtgccgaaagcggtggttgaaggcctggaaggttccctgaacgtgccggtcagcgacaccatcaactggaccaacaacatcacctacatgctgcagagcaagaacaaggagaccggcgaccgtctgtcgatcatcccggagtacacgctgaactctaccctgagctggcaggtgcatcaggatgtgtcgctccagtcgaccttcacctggtacggcaagcagcagccgaagaagtacaactacaaaggtcagccagtgagcgggtctgagaaagacgaagtcagtccgtacagcatccttggcctgagcgcgacgtgggacgtgaccaaaaacgtcagcctgaccggcggcgtggataacgttttcgacaaacgtcagtggcgtgcgggtaatgcccagaccacgggcaatgccacaaccggggcgtatatgtacggcgcgggggcttatacctataatgagccaggccgcacgtggtatatgagcgtgaatacccgcttctag

SEQ ID NO: 127808 - DNA, 687 bp, Enterobacter cloacae
atgcgcacaacccacagcacgttcgttctcgccagcctcaccgttcaccgcatcacctttgaccccaccaccttcaccgacgccgatctgctctggctcccccatcacgcacagctggctgacgccggacacaaacgcaaagccgagcacctggcgggtcgccttgccgccgcgcatgcattaaataaccgcacggtgccaggcatcggccccagcggcgaaccgctctggccggacggggtatcgggcagcatcacccacagcggcacgagggccatggccgtcgtcacacacgagcaccatgcgcttctcggcatcgattgcgaagcgatcctccccgacatggaggcccgagaaatcaaagacggcatcattgataagcaggaagagagtgtgctgtcacgcgcgggaaatccgttcgccctcgccctgacgctggtttttagcgccaaagagagcctgtttaaagccctcttcccgcgagcgaaaatctacatgggatttgacagcgcccgcatcacaacgctcgacgacgagacgctgacgctggcgctgacccgtccactggcggggtttaacgaaggcacccccttcacgctgcactggcaacgtgatggcgatggggtgatcacattgctgtcacgctctcccgccgcctggccctcacgccagtcaccacaaaggtaa

SEQ ID NO: 127809 - DNA, 387 bp, Enterobacter cloacae
atgaatcacgcgatagagtttatcgaaacatcactctttacccggcagattaaaagcattgctacagatgatgaattaaaggatctgcaaaaggaactcattgcctggcctgataaaggcgatctgatccagcagacgggtggtttacgtaaaataaggatggctacaggcccaaaaggaaagagaggcggtgcaagagtgatttactttttggccacgaaggaggtgatctatttcattatggcctacccacaaaacacgaaagacagcctgactgaggcagagaaagcagaacttaaaaaactgacttctgtgctgaaaaatactgcttccaatgccgcaaatgaaaggtgtactatgtactccgttcaggcaggaggaggctga

SEQ ID NO: 127810 - DNA, 819 bp, Enterobacter cloacae
atggcgagcgaaaaagagaacacagactgggtcaaatttgcacaaacgccagggaagatagagcgcattgaggcgtatttcagcgggcatggctatgagccacatcggcatgacacctacgcgataggcagaaccttgtccggggtacagagttttcactatcggggcagccaacaacacagccttccgggcgggacgatggtcctgcatcccgatgaagtgcatgacggagaagcggggacgactgacggatttcagtatcggatgctgtatatcgatcccgcgttaattcagaaaatcctgggcggaaaaccgctgccgtttattcccggcgggatctcctccgatccccggcttttcgcggcgacggaatccctgctcaaagcgccagaggaagctgttgatacgctggaagaagaggatgcgctctacgatctggccagcacgctggccattgtgggagggcaacgcgttcgtcgatgcgcattcgattatcgtcgcgcagagcgtgcacgcgagtatatacaaaccgagtttagccagaacattacgctggagacattatccgccgtcagcggcagggatcgctggagcctgagccgggattttcgcgcactgtacggaacaagcccgtatcgctatgtaacgatgcgccgtcttgaatattgccgacgtttgatagagaaggggctgtcgcttgctgaagcggccgttgaagccgggttttccgaccagagtcatatgactcgccagtttataaaaacggtggggatctcgccgggacgctggcaaaaattcattcaaaacagccgtgcctga

SEQ ID NO: 127811 - DNA, 456 bp, Enterobacter cloacae
atgacgactctccctggattttcttacgcactcgctgaagatagcgcggtttatcaccttattaacctgccccttcccgacactgcggatctgttcgaactggttgatgcctgcgccgcctgtgtcagcgtgctggttgaaaccgacgatgcagtaacccacgctaccctctgcgcgcgcttgctggcaggacttaaacgcctgcgtgaacgttgtgatgctgaactcccaccgcatctggttgaacggctcatcgcgggggagacgatcgtttcctgcgtgccggactgctggcaggagacgacgttgcaggtggattatgcgctggcactcactcgcgcggtcatgggcggcacgctgcctgcgaacgtggcgaaagacctgaccggattgctgcatgacatggtctggctgttggcggagtttgtgaaagagccctatatcacggcacactga

SEQ ID NO: 127812 - DNA, 246 bp, Enterobacter cloacae
atggaaaacgaaatgctttacacaggtgtctgggttactgaagatggattaattcgccatgaacttttaccggatggacgttacgatgaagcacgcggcacccggcgtagtgcctaccagggggactatgaaattcgtcaaaacagaatctactaccaggacgactccggttttaccgctgatgggatctttgtcagtaatgacgaacttcatcacgccggaatggtgcttttccgtcagaagtaa

SEQ ID NO: 127813 - DNA, 240 bp, Enterobacter cloacae
atgagaaatatttattctttcactgtagcggcagttctgtctttcatgacttttaacagtagcgcccagactattagtgctgtcgactcaaccattgacagcgctgagaaaaaaatctctttactggcacaggaggagggtaaatcctatgaaatcctgggagcatctgttaagaacagggtctatatgacggcaagattaatttctgataatccaaaagaaacacttctgatgaagtga

SEQ ID NO: 127814 - DNA, 189 bp, Enterobacter cloacae
atgagtaatgttaaaaatcttattgcagcgtgtattaactgctatgaagaaaatgatgtcttcaccatcggaataggggatgacaatcatgatccaaaaaattttatcattatcggacgatcgacgaagatgaattacccgttaacgaatgcattggattccagagtgagtcaacggaatatgaattaa

SEQ ID NO: 127815 - DNA, 522 bp, Enterobacter cloacae
atgcctatttcatgtggtcaatccaaaacaaaagatgagattagaattttggaggcaaaatttaaattcgttttgccagaagattataaagaattcctcagattgaaaaatggctttgttgtaaaatctccggatttttgtgagttggagtatgaaggtgttgatgaaggggttatcgccttttatgccctttttggaataaatatgaaaaatccaaactacgacatttttcgtcaaaatgaaaattttttaagtgaacttgatttcattgatgataagttaattattggtgatgatcctggaggtaacttttaccttatattaaatggcagtgaaagccaaggtgtgtattattgggacagaacacatctacatgcagaggatgatatccaagagtttgagatcgctgagcaaaatgagtgcggcaatatctataaaattactaatggctttactgaattttacaagaaaatatgtgagacatctcttgatgcaggaatgaatgtaactgttgatttatga

SEQ ID NO: 127816 - DNA, 1824 bp, Enterobacter cloacae
gtgatcgaaaatttgcgtaacatcgccatcatcgcgcacgttgaccatggtaaaactaccctggttgataagctgctgcagcaatccggtacgtttgatgctcgtgccgaaactcaagagcgtgtgatggactccaacgatttggagaaagagcgtgggattaccatcctcgcgaaaaacaccgctatcaaatggaatgactaccgtatcaacatcgttgataccccagggcacgccgacttcggtggtgaagttgagcgcgtgatgtccatggtggattccgtgctgctggtggttgacgcctttgacggcccaatgccgcaaacgcgtttcgtgaccaaaaaagcatttgcccatggcctgaagcctattgttgttatcaacaaggttgaccgtcctggcgcacgtcctgactgggttgttgatcaggtgttcgacctgttcgttaaccttgatgcgaccgacgagcagctggacttccctatcatctacgcttcggcgctgaatggtattgcgggtctggatcacgaaaatatggcggaagacatgaccccgctgtatcaggcgattgtcgatcacgtaccggctccggatgttgatctcgatggtccactgcagatgcagatctcccagctggactacaacaactacgttggcgttatcggtatcggccgcatcaagcgcggtaaagtgaagccgaaccagcaggttactatcatcgatagcgaaggcaaaacccgtaacggtaaagtgggcaaagtgctgactcacctgggtctggagcgtatcgacagcgatctggctgaagcgggcgacatcatcgcgatcaccggtctgggcgagctgaacatctctgacaccatctgcgacccgcagaacgtggaagcgctgccagccctgtctgttgatgaaccgacggtaaccatgttcttcaacgtcaacacctctccgttctgtggtaaagaaggtaaattcgttacctctcgtcagatccttgaccgcctgaacaaagaattggtgcataacgttgcgctgcgcgttgaagaaaccgaagacgctgatgcattccgcgtttccggtcgtggtgagctgcacctgtctgttctgatcgaaaacatgcgtcgtgaaggtttcgaaatggcggtttcccgtccgaaagttatcttccgcgaaatcgacggccgtaaacaagagccgttcgaaaacgtaacgctggacgttgaagagcagcaccagggttctgtgatgcaggctctgggtgagcgtaaaggcgacctgaaaaacatgaatccagatggcaaaggccgcgtacgtctcgactacgtgatcccaagccgtggcctgatcggcttccgttctgagttcatgaccatgacttctggtaccggtctgctgtactccaccttcagccactacgacgacgtacgtccgggcgaagtgggccagcgtaacaacggcgtgctgatctccaacggtcagggtaaagcggttgcgtttgcgctgttcggtctgcaggatcgcggtaagctgttcctgggtcacggtgctgaagtgtatgaaggccagatcatcggtattcacagtcgttctaacgacctgactgtaaactgcctgaccggtaagaaactgaccaacatgcgtgcgtccggtactgacgaagcaacggttctggttccaccgatcaagatgacgctggagcaggctctggaattcatcgatgacgacgaactggtagaagtgactccactgtctatccgtatccgtaaacgtcacctgaccgagaacgatcgtaaacgtgcaatgcgcggtgcgaaagaagagtaa

SEQ ID NO: 127817 - DNA, 699 bp, Enterobacter cloacae
atgaacgcgcttatcaaaaaaggaatgctggccacagtgttagcgatgtcggttaatacagctatggctgcacaaagcattgatattaaagtaaccggtaagatccttccctcttcctgtaccccttcctttccaagcggcggcggtattgctgacttcggtaccatgaaagtggcctcgctcaactcgaccagcatgactccgctggcggatttgaaagaaattcccgttaccattaattgtgaagaagccacacgtgttgcggtgaaatttaccgatgcgcgtgacgactcatccccaacagaaagtgtcaaaatgggtaatggtttttcgggttcaccatttaatatgtttggtctgggaatgtataacgataaaaaaattggtgcctatacactagcgttattccgcaatcagggtgcaaacactaacggcaatggtgactcactttatccattgttgagtatagatggtggggaaacctggcttgttaaaggcaccgactacatgcaaattaacagcgacaattctgaaatatatgcctttactttagatacagcgaatggcgtaccttctccagaaagcaagatcaactttaaagttgctgtgagtgccactattaacccaaccaacgatttaaatgttacggatgaattgacactggacggtttaaccaacattgagctggtttatctttaa

SEQ ID NO: 127818 - DNA, 576 bp, Enterobacter cloacae
atgagttatagcgaaacgggtaacatgatgaacattaataatttggcattaccaataaccagccttgatggaaagttgttagggattgaactggtgagccatgtagagcatgggggaatcaggcagataggagtactggaagaggaagtactaagggaacagatacgcctgattgaaagcaaggcggtatggttcagggataacggtttgtactgtgtgattaccactggcctggaagaacgctatgagtacttaccattcctccggcagatgacaagagataggaaagaacatgatcaccagtggcttgatggtcttggtgaacatggtcgtaacgctatttccctgctaacaggtggttttgaggttgccaggctaaatagacggtacacagaagagaacattgaccgcctgatctttccagtactcataaagagcatacgccagtactgcgaccaagtgattgtacccgtcagggataagacctattacccaatgcttagggaggctggcgtatgggcggtacagggagagtacaaggcagtcagattcgaacattgtgaaaaattaatatag

SEQ ID NO: 127819 - DNA, 363 bp, Enterobacter cloacae
atgaaaaaattacttattggggtgctaattgcccttagtgttggatgctccactacccacagcttcatggataaggcatacgttggctatgtagacaacaaggccgtagtactgtttgatgcaggtacacgtaatggggtgaagtactaccgtcctcagttccagagtgattgtggtcggctgtactcaaagatctatcaggacgacaataccagtactggatgcttcatacgttcatcacgaattgcgtatctacgcccctatagagagcatgtaagtaaagaaatcccacgtaaggccgatactgtcaacggtggcatagagggagttaatgcaccctcatatattcccgataatttataa

SEQ ID NO: 127820 - DNA, 294 bp, Enterobacter cloacae
atgggaaaggtagtagtatttttactggtattggttgcattatttttcaaaatcacgggtgatagtgggaagcaagaagcacatgccaaagaaccggttgtacaactcactggtgaagaattgattaatgctatggattttgcacaggcactaatccagcgtgattacacctgcgaaaaagtcactacgttcagcaacgcgaatttctcaggccgtattgatgtatggtgtgatgataagtacgagtatgaaatcacaaaacctggcggacgctggaaggtagtatcgaagtaa

SEQ ID NO: 127821 - DNA, 171 bp, Enterobacter cloacae
atgcctgtgccatatggctcttatcattacgtgacagcaccaaatgaagcaacctatgacgaagtggtaataaccagtgaagaattcaacgatggatattattacggtacgaaatatgctgataaagaaggtcaattgtactacgatataaaatgtaagcctcttaagtag

SEQ ID NO: 127822 - DNA, 570 bp, Enterobacter cloacae
  misc_feature (17)..(26): n is a, c, g, or t
atgaaaatatcacgatnnnnnnnnnntactattaatagatacaaacatgaattttatgatttacttcaattgatttctgaaactaaatacgctcatttccctaaaattaacaaaaatacctctgagtttattttaggaatgattagtgagccatatggtgattatggtatctgtaacttacaaaattggcgtgttgatttaaattccagaatatgcaatagacttaatgggcaacatatgcctaatttttatgatatcatcagtacaggaatagatgatgatggttatcaagattatggttatgttaaatctaaagaagactatcaagaagaattcaatcaaactcgtaagcaaatgaacttgattaaaacgttttttaatgaaaaccgacttaacgttcatgcaattggacgtgctgtaaaaaaccaagagcacaaatatgatgaagaagaatcctcgatagaaattatttgggttgatgtctattacagaaaagttgttcctgacagtattacaccttatggtggttttgaaactgtttttaatgaagcatattttgccggcagttga

SEQ ID NO: 127823 - DNA, 390 bp, Enterobacter cloacae
  misc_feature (372)..(381): n is a, c, g, or t
atgtcaacccaagtttcagtaaacgcgtactttgataacatagaccatcacatcaaaaatgaactacgttcagcacgtgaaaagatttatatttgtgtcgcttggattaactttcagtcttatcaggaaatcctttttaaaaaaatccttgagggtttagatgttaaaatcctttgcaatggcgattttattaaccataaaaacctttccaatttacacccatcattattaaatcgtatttcattaatcaaaaatccaataccaagaacattaattcatcacaaattttgcataattgatgatagcactttaataaatggtagccataattggtcaaacgctgcgttttatcattatgaaaatatcacgatnnnnnnnnnntactattaa

SEQ ID NO: 127824 - DNA, 543 bp, Enterobacter cloacae
atgcgtcagaataacaagaaaaatttgataataagttatagcgaactatcatgtcgatatggctatgatgtatctgtcattagccgtgattgggttgctaaaggacttgattgtactaaatcagaaaatggaatttaccaatggattagaactaacgttattgatcaactacgtaatacagatactaaagaattgattgaaaaagaacggctgatgaaacttacagcagaaagacagttagcagaattagaattagcagaaaaaaatgggctggtggtcagtactgaatatgtagaacaagtactaacgagatatctattccaggtcaaaacatcaatacgtgcaataccatcaaaaacttatcttgaattatttgcacaatcagatgcaaaggatttacgtgatgtattaagaacgcatattgataaaacattataccaattaggctcgatggaatttgagctacccgatgacatggaagtattagaggatggaaacaaacaagaagaaattaacgaggatgaatcgccacggataatctag

SEQ ID NO: 127825 - DNA, 450 bp, Enterobacter cloacae
atgagcgatttaaaaacacgattaaaagaatatgaaggtactaaagagtatcaggcaaaattgaagtacttcaggaatggtaaattctatccatatgctgatagtttaggatttagtactattggatatggtcacttaatccaggggggagaagattttagtactggcattactgaaagcgaagcagaccagttactatcccgcgatttagccaaaacaattatgcaggtacagacattagggttaactcttcccgatgactggaatgattttcttattatcatgaccttccagttaggtattggtggagtgaagaaattccgtaagatgttagcagccctgaaagcacatgattaccctgaagcaattaaacaggctaaggattcgctatggtacagacagacaccaaaccgtgtgaattccatgattgcagtacttaaaaacaaataa

SEQ ID NO: 127826 - DNA, 435 bp, Enterobacter cloacae
atgatgagtgaatggaaatactcagatgattggagcgaagagaaaatgttatccggtgaatatgctggtttcgtttatatctttcagtttgaggatggttctaattatgtcggtgctaagcagctataccagagggtgaaggatgctaaaaagataaaacccacctcaaaagaaaatggctggcgtgagtaccttagtagttccaatgtcgttaaaagcaaaattgaaaatggtgaacagtactcaaaaactattctatggtgcttcgcaacgatgcgagaagtaatgattgttgaggcaatactgatccttcatcagatgcttaaaccggaatgtttgaatctggcaatgatgagtaagattagatcaccaaatgcaaaagataaaaaaaggctactcggaatagtacaggaactattggagtacttgaattga

SEQ ID NO: 127827 - DNA, 579 bp, Enterobacter cloacae
atggcaagtggaataaatgggattggtagtacaaggaactatatacaaacgcagggagttagattaaataatcaattccagaatgaaataattaaacgttccaagctactatcccaaagaatgcagggtgatttgaataatagtgttgaccgtggggcagtgggctttactcaacgttccatcctattcttctataaaaaggttgggagaaattcagtcacatcaaccatcatggtaaaagatattcaggctaagtacctttatcaagtactggtacagccaaaggcaattgataagtttatacctacatcatctgcacgattaacaaagcagggcaacatttcaggactgaaaaagaatctattaagtgggcgatataaggtagtgaagggtaagaacggtaaagaaagattaattgataccgcaaagaaagataccaagaagaaaaccaaacgggtaattggtttacatgagaagaaacaacgccgccttatctatgacttctataaagaagctaatgatggtgtaagggtaattatgagcggtattcagggaacattcaggataagtagacaatga

SEQ ID NO: 127828 - DNA, 312 bp, Enterobacter cloacae
atgaattttgaacaacattacggtgatttaacaagcgagattaagctaaatggcatgacacctgatggtaatagtatgccaattaataaatgctttcttgataaaaaatttcaaaaggtcgttaagaaaagcaattatcagattgatatctatatgaacgttatctatgagaagaaaaaagatttcaaagtaggtgaagtacttgaatgggaattacagggtgaaaagatacctgtgtttctaattgagagtaaaaagctctttgtgaagggtaaacatttttgggtatatgccgtggggattattgaatga

SEQ ID NO: 127829 - DNA, 687 bp, Enterobacter cloacae
atgaaaataaaagagcaacttgctaaaatagatttttcgcatgtgatgtgtttatttcttggagcattgatacctatttttgctgatacattatttttacacgaatttaatagttcgaccgtttcagcaattatggatacaataatggctatagtagctatttacgctgcattcggtgtacgtcattggattaaagatcgagttaaaaataaaggattcgaacacgcccagtctatattaactgatttatataccgtaaataagatgttctttgatttgcattcaaactttgaatatttcgcgttacagtatatggatggcagtgaattaacaaaagaagaaaaaaactcactcaaattagaatatgatgctttacgtgtacaaggctcaaaaatacgtgaaaaagttattgaaacacttgtaaatattttagagttaagttcatgggatatgaaatgcaactttgaaaaagaatacataaactatttaaaaatcatagaagatgcacgaatagaaaatgaagggaaacttatacacttggatttcactaatcatattgttcgcttgaaacaaagcaatgattataagaaggaattttcggaaactgtactaaattgctcaatagtatatggtgaattaaataaaagatttgttagtgcgttttcttaccaacctcctgtagaataa

SEQ ID NO: 127830 - DNA, 249 bp, Enterobacter cloacae
atggcaagaattagtaaaaaggaatctgctaattacaataaagtaatggaattaatacattcagataagcagctcacatatgacgataaagagtttatcttcaacaactacagaggcgatgggataggggctactggtgctttcttcactcctgaaatgctcgcatgggatttcattattgatgctgaatgtactggtgactgtgttgaactatgtgctggtatcggtcgcctcagctactaccagtaa

SEQ ID NO: 127831 - DNA, 423 bp, Enterobacter cloacae
atgattgggaagagggtactaccagaggcagaatggatcactggtgacgcactacagtactcaccagaccgtttctttgatgttgcctatggtaatccaccctttgggaagatcagtacttcaaaagcgtatacaggccgttataagggtagtgagtttgaatacaaggtcattgaacatgcaagtacctttgcatcctatggggcatggatattaccgcaaggttccgcagggtttgtctacagtggggtacattgctatgagcggagagaatcagggaagtaccagaagtttgtgaaggacactggctatgagctacagccaggcgtaggtatcgatacgagtatctacagggatgaatggaatggtactaaggtgatatgcgaatcggtgttagtagattatgacggtacaaatctttag

SEQ ID NO: 127832 - DNA, 237 bp, Enterobacter cloacae
atgacctcaatttatatcttgattgtttgggcagcccagggagacaaagccgattttcggcgggtgcgtaacattgctcataggttaaaaattcatcaattatggagttgtcagggcgggattttacagcgtatcgcgggggatttatacactctttgcagtgcagatggtgcccgcgaaggttgtaacattgtaaagaatgttaatcagttaagaataattgatctcaggcattaa

SEQ ID NO: 127833 - DNA, 798 bp, Enterobacter cloacae
  misc_feature (773)..(782): n is a, c, g, or t
atgaacttacaactaacatggattattttttgcattatttcagcgtcatttatttttggcttccgaaataattcctttgaaaaaaatagaaattataacattgatggtttgagatatcttttagcagcatttgttgcttttcatcataatagctactcagagttttttttcgaaactggcttgtggaaaataactgatacctctatagggtatatcggtacattcggagttgcagttttctttatgataactggctatttattcggtgatataagctatcaatctgactggaaagtattctttataaaacgtattcttcggatattgccaatgtgttacgtctcttcaataatttgtatcgctatggctgcattgtttaatactgacccaattaacaccagtcatatagatatactctactggtttgatggcggcatcacaggcattaaacctgacctttttggaaatgatcacactaacttaatcaatgctggagttacatggtctttatattgggaatgggcattttatttcacccttcctcttttatcctttttattcaaaaaacaatatacagttgggatatgcattacagttttagctcttttgatgaatttattaccattgctaaaaatccccacttacaatatatctttccttatgtttttcgccatgggaattttaattaaaaatcttaatatcaaaatcaccaataaaaatatacaagtcaagaacttcttagcaatttcaactcttgtttactgtatattttnnnnnnnnnngtatatttttctctga

SEQ ID NO: 127834 - DNA, 609 bp, Enterobacter cloacae
atgtctactatctgcctcgctgcccagcgcagctataccaccggcgaaccggtctggttctcatggcgtttgccgtcattcagtaaaatactcagcgtggtgacgctctggtgtctggggctgtgcgcgctgatcgtcgccgggctttatgcccatgtgtactggaatttacgccatccggcaccggtggtgaaaaaagtgagcgtcgtaaaagcacaaaccagtctgtcggatatgcactatgtgtatgtgacaaaaccattcccccatctgcagcctaaaccgcagcaggtgaaagtgcaggacgatttaccgccgatggagaatatgccgatcaacaatgatgaaaatgactggcagcaggccccggagggtgcattaccggataaccccgtcacccaggatacctcacgcgatactttgcccggcaccggggcacacgaacaggcgatgaaatctgacgatgagggttcgttaaaagccctgtttatgcaggcgctaaaacagcagcaggatgatatggcgaagggaaaaatgcctgcgccaccggttgatgaaacgccgaatgcgtctccttccataataaaaggagacgccggaggagattaa

SEQ ID NO: 127835 - DNA, 531 bp, Enterobacter cloacae
atgaaaaacaaccacctcgatattggggtcggaacagggtattacctgacatttacgcccgatatctgcaacgtttcacttctcgatttgaatacgtcaagcctgcaggctgcgagtgaacgcgtcggcagaacccgagtaaaagtgtcaatattacatgacgtgttcaacccttatccttcgcatctgcgagagcaatttgattccgtgtcaatgttttatcttctccactgtctgcctggtaatatgaacgataaatctgaggtgattgctcatgccagcacggcattaacgaaagaggggcatttatttggcgcaaccattttgggtgatgatgctggccacaacctgttcggacggaaattgatgaaaatttataatcagaaaggcatcttttctaaccgaaccgacagtgtagaagcgttaacctctgtcttgttccgttattttcatcatgtagagattaccgttgaagggcgagttgccctgtttaaggctgaacgtaaaaaagagattatacaggccgaataa

SEQ ID NO: 127836 - DNA, 318 bp, Enterobacter cloacae
gtgctgtttctccagcgggcactggtggtgttcatacacattttgcacggctttctcagcggcgacgaggataaagcccagcgtctgaagacgtggtgcgtgaatgcggggctcgggaaaggtatcgcgctggagcgccggtctctggttcaggatgccatcacccgaggcgagttggttcagttaacctccatcaccgcgccatacccctggccttactggctagtgacatcgacgttaacagaggcaaagccagaggtgccccatttcgtcgaatggctggatgaggaagtggcggcctggcggcagttaacgtag

SEQ ID NO: 127837 - DNA, 174 bp, Enterobacter cloacae
atgattaactggtggatttttagcgctaatgccaattccctgtcaagattcacaccctgtcaggcaagggctttttctccgtatcaggaaccatccaaacgccatgtaagtcgcctttacaccagcatcaacgctgcatttgacgactacccgggcaaaaaaaaagataactaa

SEQ ID NO: 127838 - DNA, 807 bp, Enterobacter cloacae
atgaaattctcgttactgctttcgttatatgataaagaaagcccctcttttcttttcgaatgtctggaaagtattgaaaataatactctctcacctgagcagatagttattgtatacgatgggccaattcgcaatgaacttacggaaatcgttaatgaatatgctattcgaatgcctatggatattattccaatcgaaaaaaacgttggtctaggttctgctttaaattatggtctaaagttttgcaaaaatgaaatggttttgagaatggatacggatgatatttgtatgccagatcgttttgcaaaacaaattaattttctgaacatacatcctaacgttggattgatgggaggggcaatacaagagtatgacgaaaccatgaaacaatccaaaggggttcggttttcaaaatgccagcatagcgaaataagggaatatgcaaaaaaacggaatccttttaatcatatgactgttgcatttcgaaaaagtttagttgaacgagttgggggttatcaacatcatcacttgatggaagactataacctgtggttgcgtatgattgcttcaggtgttgaatgctataatatacctgatgtgcttgtcaaagtgagagctggaaacaacatgcttgcaagacgtaaagggctattttatgcaaaaagtgaaatcaagattgctagacttaaatacaatctaaaaattgatggtttttgggggtgtatttcatgcgcctcaatgagaattattcctagattattacctgtttttgcattgagctatttttataagatcttaagaaagtaa

SEQ ID NO: 127839 - DNA, 1236 bp, Enterobacter cloacae
atgactactattatctcgtcatttttgttcagttggattgtctcacgttattttggtgctgaaaatgcgggtgctgtttttttctatatcacattattaacaattcttgtaacctttgcatctcaaggagctgaaatagggatcgcaaaggcttcagctcgtcttgatgacaaagataaatcacggattaacgctctttttaattacgtactggctaaaagttacaagctgtatctcttaatatttccgttgcttatagtttatttattttatgaaaacctcagtttcactcaagctttaatattaattgtggctttgtttgttgtaggcatttgttttgtttatatgaatgtactttcatacctttatcaagggcttggaaacattcttatgatgattcttagtcaacgaacactttttaattttttatcttttattataattgcgcttttttgctttgtatttaccgaaaagaaagttaattataacaatatagcactcgataaacaaattgtattgatttctttcgccggtttaattgcagcaatgtgttttgctataatttataaaaagaaatatgggcggcttaaaggaattttcaagccagaaggatttgatgactcatgtcgacaactatttagaatccaaatattgcagttaattacaatgtatggttctcaaattataattaattttttcgccaccaaggctgatattgctggatttatcgtttctcaacgaatttcaacacttcttggtttttttgttttagctgtaagtggcgtagtgtcgagtcaagtttcgcgtgcatattctataaaagattttacctctgttcaaaagtatgcttttcaatcatttgttttttctgcttctttaggtattcctgttggcattcttcttatcatctttgccaaagagtttcttgccgtttttggttcagatttcattcagttttacatggttcttatcacccttgttatttcacagatggttaattgtttaactggtgcatgtgacatcgtcttaatgttcattgatggtgaaaaagaacataaacgtaatgtaataattggtacagttatagcaatatgtctttctcttattttgattcctttttattcagcgattggtgcggctattgctgccacagtatcagcagtaattgtaaatgttttggatgtgatatctattaagcagaaagcaggtttttggatctttaattcaaaattataa

SEQ ID NO: 127840 - DNA, 129 bp, Enterobacter cloacae
atggcgtttttatacactaaatcattcaaattgcatcaaggcagcaagtctgagaatccccaggagcttactcaagtaagtgactggggtgagcagacgcagccaacgcagaagcagcttgaaggatga

SEQ ID NO: 127841 - DNA, 1701 bp, Enterobacter cloacae
gtgcagcgtgatacctttgttgtaagacggtcttttctgcaatggctgcataagcgtagcaatccgggtgcgattgttaatctctgttttctggtggtactggttttttcgactctcctcacctggcgagaagtggtggtgctggaagatgcctatatctcaagccagcgcaaccatctggagacggtggccacgtcgctggacagacagctccagttcagcgtggataagctgctgtttttccgccagagcatgcgcgatgcgctccagacaccgctggcgtttgatgtcctgcgtgctgcggtgacacgcttcaatgcagatcggacgcgtcctttctggcagcttgccgtggatacaaaacgcacgctgcccatcaacggcgtttcggatgcttttgttgaaaaaaccacgctcctcaatcgcgacaatgaacttctcgataatgaagtgtctgctgcgcttgaagtggggtatttgctcaggctagcctcaccggtcatgcgaagcgaagagcgggtagtctatgtctcccgggccgggttttacctctccacggatacgcctgcacagagcgccgatatcatcccgcgctattaccatctggtgacccagccctggtttacgcagcaaacggaacgtaacaaccgtgcgcgcgcggtgctgtggtttatctccacgccgtcaacctggaccggcaacgaacgcatgatcaccgccagcgtacccatctattttgaccattactggtacggcgtggtggcgatggatttttctctcaataccatgaaacgtctgctggccgatgcgacggatgaccacgcggaaggggagtatcagctgtacgatacccggctcaatatgatcgcctcttctgaagcatccacaagcgaggccaaccattttgatgagcgtgaaacggcgcagattgcccatgccattgagaacgataccggcggcgggatccggcttggcagccgttttgtcagctgggagcggctcgatcattttgacggggttatcctgcgggtccataccctgcatgaaggcgtaaaaggcgacttcggcagcatcagtatcgtgctggcgctcctgtgggcgctcttcaccgccatgctgctgatctcctggctggtgattcgtcggatggtcagcaacatgtacacgctccagcactcgttgcagtggcaggcctggcacgatccgctcacccgtctgaataaccgtggggcgctgtttgagcgggcaaaagtgctggcgaagcaatgtcaggcacagtcgctgccgttatcggttatccagatcgatctcgattattttaaaagcatcaacgatcgtttcggccatcaggccggagataaggtgctgtcccatgcggcggggctgattgccagcgccctgcgtaagaacgacgttgccgggcgcgtgggcggggaagagttttgcgtggtcctgccgggtatcgggctggcggaggcgagagcggtggcggaacgcattcgctcacgcatcgacagcaaagagatcctggtgaaaaagagcacgacgttgcgtatcagcgcgtcgatgggggtcagctgcgcgcaggagaaggggaattacgacttcgaacaactgcagtcgattgcggatgcccggctgtatctggccaaacagcgcggccgcaaccaggtggtgtgggacgatcatgacaggaagtga

SEQ ID NO: 127842 - DNA, 894 bp, Enterobacter cloacae
atgcgattaagtacgctttatatgtatcagaaaagtgccgagagcatgacgaaacgcatgagtcaaagcaacgacgtctatttacgcatgtcggcaggcaaaacgctgttaaaagcctcggacgaccctgccgctgcgacggacgcagtgaaacatcaggatgcgctggcgaagctcgagctttacagcaacgtccgttcccgcgtgcgtgggggactggagtttcaggacaatattctcaacggtgtgggcaacctgctaaccacttcgctgaaagagaagattgtggcggcgaacagcgatacctattctcctgaagatcgccgtgcactgggggaagagatcagaggcattaccgccaaccttctggatcttgccaatacgcgcgacagcaacgggcgctatatttttgccggctttaatacggataccccggcattcgatgctgacggttattaccagggggggaatgaagcgcgcagacagaccgtagctgaaggaacggaaatgcaggtcagccacctgggggatgaaatatttggcgctatcgttcctgtattgaacgctgcggttaacgaactgacgcgtgatcccatcaatgaaacgacactcaaactcgcactcagctttgccagtattgagatcgatgcggggattgaccgcctgggcaaggcacaggctgaactcggcaccaatatgcagcagcttgacgcgctggatctctccggggatgtgctgatcaacgacaccattgttaaagtgcagaacgccattggggccgacaccagcatgctgatcaccctcgcttcggagtcgcaaatgtccgagctggcgtttaacgcctccatgtatgtctaccaaagaatgcaggcgatgagtctgtttaatcaataa

SEQ ID NO: 127843 - DNA, 1491 bp, Enterobacter cloacae
atggttggcgcaacaaattttttaggtgtaggttccgggctgccgtttgatgaatggctggcaaatgaacgtaaaattaatactcaaaaactgaacccgtatctgcaaaaacagagtacctataaaggacagatttctggctggggctcgatttccagtgcattaagcacgctgaaagataatctcggcaagcttgatgaggaagggtttaacggtgtcagtgtcagtgacaataaaacctttaaagcgacggccggaagtggggctattcctaatagctattccattgcggttacacagctggcgaaggcgcatcaggttgcagtgaagaatgacactcgcgaaggacttattggtaaatccgcggcgacggtgacaatcgccctgaatgagggggataagccaatggtcctgaatctcgatgacgatcaaacgtcacttgaccagatagccaaacaaatcaatgcccagaagggggatgttgttgctgaagtgatgacgatcaaggagggtgagcacaagctggtgctgacatccaaaaaaaccggtgaagccggtaaaatggatatcaaggtgacaggaaaccctgacctcgagaaaatgtttactgatgccgcagcagaccctgaaactgaacctaaaaatgcggaaattcgacttaatggtactctttactcccgtagttctaacacgatcaacgatctgatccctggcgtcacgcttgaattgcgtgaagtatctgacagcactcctggcgatgatccgaccgatccaccgatatttaaagaagaatccctcaccatcaccgaagatacctcaaaggtcaaaacgctgattgaggagttcgtcaaaaactacaacagctatctcagtaccacggccagcctcaccaaatacactgcaccggaccgcaacaccaattctgacgctctcccacagccggacccgagcaacggtgcgctgttcagcgacggttccctgcgtcgtcttaccagccagcttaaagccaccgtcggcgggacctatcccgacgcgggtgacgttatccagacgctgggcagtatcggtattaccgtgaagtttgatggcaagatcggcgacgagcgtggtgggattctgggcgaactctccattgactccaaaaagctggacgcggccctgaaggataacccgaaagaggttgaagcgctgttcctcggcaaaggcggtaaagagggcatcaaagaccgtatggaggggattttcgatacctacctcggtgataaagacgcgatcaaaaaggaagacggcgtgattgaaaccacgctggaatcactgcgggagcaagagaaacgtatcgcgaaacagatcaccgctatggaacgccgtatcgaagagacgatgctccgcaaggagaaagagtttcagcgtctcgataaagccatgagcgatatgacgagcatcagcaaccggctccagcagtcgctgctggaattatccagaagcctttaa

SEQ ID NO: 127844 - DNA, 1527 bp, Enterobacter cloacae
atggcacaggtcattaataccaacgcattgagcctgatggctcagaacaacctgaacaaatcccagggtcaactgggtaccgcaattcagcgtctctcttccggtatgcgtatcaacagcgcaaaagacgatgctgcgggtctcgccatctctaaccgcttcacctcctctatccgcggtatgacccaggcggcacgtaacgccaacgacggtatctccctggcgcagaccaccgaaggcgcgctggaagaagtgaccgaaaacatgcagcgcatccgcgagctgaccgtacaggcgaaaaacgggactaactccgcaagcgacctggactctatcaaaaaagaaatcggtacccgtctggaagaaattcagcgtgtggccgatgtaaccaacttcaacggcgtgaaagtgtttgacggttccaagtctgaaatcactatccagattggtgacaaagacggcgataccatcgatatcaaactgaacaagctggatatgcagaccctgggtctggacaaattcatggacgacttcgccgatatcggaatcactatgaatggtgtgggtacggcgagcagccagtacgataaagctgccgttaaaaagaatgcaaacgaggacacaggcatcgatgtaggtggcggcttaggtaactggaaagtagctgctggtgatgcagctaaaatccaggccgggatgactggcgcggctactccttcagctgaggtttatgtacttgatgacaaagcctttgcttatgatactgccaatgacaaattatatgaaatcgaccttgctgcggtgcaatttgaagatgacggcagcggcaacttcgccaaaatccaaacagacttaactggcgctaaccttaaagaagttaccgatgtagccgataaagatatgctcctgaatggcccgtctgacctcacagaaggctcgtctaccgcgcttaaagagggtgataaggttaaacaggctggtggtggcgctgaatttgatcttaacgcagccaaactcgacgaaattgctgcagccgcatttggtgcaggcgagactgctgaatcttcgggcatgaagatgatcatgatgaatgatggcacagacgaccgttacttcgtttacggcggcgatgatggtgctggtggtaaagtattgaaagaggtcacctttaatgctacaggtgtaccaactgctgatgatgtgcgtcatgccgattccgaagttgtgttgaaggaatttggtattggtacagcagataacctgctggaaaaactggatgatgcaatcactcagattgccgacttccgtgccgacctgggtgccgttcagaaccgtttcagctccatcattgcgaacctgaacaccaacatcatcaacaccaccgaagcgcgctcccgtatccaggacgctgacttctccgttgaagtgtccgccatgagccgcgcgaacatcctgcagcaggcaggtgtgtccgtactggcacaggcgaaccaggttccgcagaacgtcctgtccctgctgcgctaa

SEQ ID NO: 127845 - DNA, 1500 bp, Enterobacter cloacae
atgggtcaggttatcaacaccaactcactgagcctgatggctcagaacaacctctacaaatcccagaaccagctcggcacggcaatccagcgactctcttccggaatgcgtatcaacagcgcaaaagatgatgcagccggcctggcaatttctaaccgcttcacctcctctgtccgcgggatgacccaggcggcgcgtaacgccaacgacggcatctcccttgcgcagaccaccgaaggggcgctggaagaagtcaccgaaaacctgcagcgtatccgggaactgaccgttcaggcaaaaaacggaaccaactccacaagcgatctggactccatcaggaaagagatcgttacccgtctggaagaaattggtcgtgtggccaaagcaacccacttcaacggcgtgaacgtctttgatgacaaacacatcaccctgcagattggcgataaagacggcgacaccattgatatcaaactcaacaaaatggatatgcaggctctgggtctggataactttatgaaagagtttgaagagattggtattacgatgacaggaactgccggcagcaactatgataaagcagcaatatataaaccagttggcgcagatacgggtctggtgacggatacgggggaaaactggaaagttcacagtgacgacgccacgttacttgccgcagcaatcggtggcggcgtcccggctgacaaactgagtatttatgtgcatgacgatactgatgaagcgtttgtttattatcctgaagataacaaactctttaaattagatatgactcaaatagcgtttcaaaatgatggtggtacaacagcaaagattcagagcgttacaaaggatcacctgcacgaaattaccgccccagcagacatcgatatgataacaaggggtcccacttcactggaatcccctcagatccttaaggaaggggcgacattcacgtcggtgagtggtgctctggtcacactggacaataccacgctggataacctttcccggcagatattccgacgtgacgttgcttcttcaggaatgaatatcgtatccgtatatgatagcgtctggggtatgaaccggtttttcgccttgggtgatgacggtagtggcacggtagtaaaagaatttgattttgctaccccgacatctttcactgttcatcccgcacgctaccatgatgcagaatttataaaagatattgtctccggtgctcgcactgacgatctgctggagagcttgacgggcgcgatagataaaatcgctaatttccgtgccgacctgggtgccgttcagaaccgcctgagctccatcattgctaacctgaacaccaacatcatcaacaccaccgaagcgcgttcccgtattcaggacgctgacttctccgttgaagtgtccgccatgagccgtgccaacatcctgcagcaggcaggagtctccgtacttgcccaggccaaccaggttccgcagaacatcctgtccttgctgcgttaa

SEQ ID NO: 127846 - DNA, 990 bp, Enterobacter cloacae
atgaacatgttgagatatgcctttgcgttgctggttttgctcacgagcgtgggtctggtaccgcatgcccatgcagcgacaacctgtaacagcaacgatctgccttataccctggatgccggcacgctttctgtacccacgaccctcaatattggcagcgttatcccgggttcagcaaaaacacatactgttaacggcagctgtaccggaacgctcaccagtcacaccattatttcctgctattacggaacgggaacggaagtgccgggcatgccgggtgtttacacgaccaatattgacggcattggcattgaactcctgaacagcaacgggcaaatcattcgcggaaccggttactcatgcgacagcaccgcaacccccataggaacagtcagcagcgacagcggacaaacgttttctttcagctatacccagcagttaatcaaaacggcaacacatatcggaaccggaaccctttcggtttcgcaggatccctacggattcggtgtttttaattcggttgggatttctggcgatggcaataaaagccgctattccgccaccgtcagcgaaagaacggcgacctgttctgtcgatcccttaaatctgacggtcacgctcggcgatttcccggtgtcacaatttacccatgtgggcagctatacaccctggaagtatttcaatatcaccgccacctgcacggaagaggtcaacctcacggcctcggtgaccagcgcaaatggcatcaatagccagtatgcggatgtactgaacctcacgcccggcagcgacagcgccacgggcgtcggggtgagaatgctgcttgacggtgtcgatctgagatatgactaccctatcccggtcggtggaagagccgaacctgacgttccggatgtgatccccttcgccgtgcagtattaccagacggatgccaccgtcactgcgggaaaagccaacacgattgccacaatcgattttgaatatcagtaa

SEQ ID NO: 127847 - DNA, 789 bp, Enterobacter cloacae
gtgctgaccgggtgctatatccctcaccccttactatcacgtcaggccttctctgcatttgcactggactggtttgtctttggtaatgcctatcttgaacgccgctctaaccttctgggggctccgctcaaactccagcatgttccggcgctgaacacgcggcggggtagagacctagatacctactggtttatccggcagtggaaagatgaatatgaatttaagccgggtcaggtctgccacatcatgaacccggatattcatcaggaaatctacggtatgccggaatacatgggtgcgctgctgtccgccagcctgtcccattctgccgacaggttccgcaaactctactatgacaacggctctcacgccggatgtattctttatgtcggttcggagaaggtggatcaggaaagcataaaggtggtgcagaaaacgctgtcgcaggccagagggaaaggctccttcaaaaacgtgctgatccacgcaccgggcggcggcaaagatggcgtgcaactgttgccgttcagccagatatcggcaaaggatgagtttcttaacatcaaatcagcaacgcgcaacgatttacgcgacgctcatcgcatcccgccgcaactgatgggcgcaatgccggaaggcaacggctcgctaggtgatgttgagaaggccgcacgcgtcttcgccatcaacgaaatgttgcccgtgatggaagccatgaagggcgtcaatgactggctcggtcaggaagtgatccgctttaatccctacgctctgctcgtagacgagtga

SEQ ID NO: 127848 - DNA, 1113 bp, Enterobacter cloacae
gtgtttaacggttctaatttaagattggctcgtctgtatcacgagttatcgctggagcaagtagctgagcgggttgataagacccgccagtatattcagcggctggaatccggcacggctgttcccacacccgagcttgctaataaattagctgccgtcttgctggtgatgcctcattttttcgaagagcaatggcagtctcctgtaaatgaagagatcgttcacttccgcaagcgtagttctacgagagttgccacaaaaatggcgactctcgccaaggctgagctgtatcgacgacttattgaaatttttgaagagtatctggatttaccgcgagttagatttcctgaactgaaggtggatacacaagaggatatcgaaaaagcggcagagaaatgcaggactgactgggggctgggttttgggccgatcgataacatgactcgtcttgctgaaaagctgggagcatttgtcacttcttttgattctgtttctgacgatgttgatgctctttctgttcctttaagtcgaccatttatcgtaagaaatacagctaaaaagtcaccctgccgtcagcgttttgacatcgctcacgaggtggcacatttaattttgcatgaaggtatctctactggagacagggctactgagtcgcaggctaaccgcttcgcgtctgcattgcttttaccaagaacagctatggcgaaatattttccacgtccgattggcggtcgaatcgactggcaaggtcttagccagtttaaattaacgtggaaagtgagtaaggccgcgatcatttatagagcgcatcaacttgggcttttgactgacgctcaatacaaaaccgccttttttggtctcaagcgaaagggcgaggctattgatgagaaagaagattatctgatccctagtgagaagccagagctattcagtaaggcaatgaaatgcctgttaaatgatatgtctgtagatattgaaacattagcccagcgtttaagcataacccctacgatgctggcagaacttgctaatgatgacactttagtttctgcatcaagtgtggattctgagaatgtaatttcaatgtttgcgtatcgaatgaaaactgcttaa

SEQ ID NO: 127849 - DNA, 600 bp, Enterobacter cloacae
atgtctaagaagcctttaccatgggactttcacccacaattaacagaagagcgtttaacaattattgctaaagaattgttacaggtcttaaatgacacatacgctcaactttcgaccacattagataacaactatacacgctctacttgtacttttgggcgtcaatggcagttacttattgatttgtgtttgagtgggcagtatgactggcttcatctaaccaacgctggtttagacatcacttttactatcgatacaattcctgtgcgcttcttcactgatgacccggccaatcctaaaaaagatggtttttatcggaggaatcctgcagatcagctttttgctcctgaggtgaacattccagttttgcatcgctttgttgttgaaaaacccgaatttgagggtgagggagctaaggttcacttcattggttacaacgctttggacgaagaggtgtccaagtggacgtataacgatgaaccaacaactgcattgttgcactctactgatgatacgccgccagagtctgttagaattgagcttgatgacattcgcccttctcgtcccgaaaaggaagaaaaagagagcgataaagattaa

SEQ ID NO: 127850 - DNA, 564 bp, Enterobacter cloacae
atgaacattcaaaccgagacaatttttagcatagggcatggcgctcgcaggctagaagaatttataagcttattaaaaaaatatcatattaaatatgtcatagacgttcgctcaaaacccagatctaggtttcacccacactttaaccgtgaagctttaaatcttcatttgaaagaggttggtatcagatatgtttttatgggggagcaattgggtggtattcccaaagatgaacaatgttacgacgaagatggtcgagttgattacgaaaaaataaaaaacaaagcttttttccaagagggtattgatagaataaaaacagcacactccaaaaatttaaaggttgtttgtatgtgcagcgagctgtccccttgcgactgtcataggagtaaattaataggtgactatctgcaatcactaggaatagagatgcaacatattaataagaaaggagatttatcttcacaaaatgatgtaatgaaagaagttttaggttcaaatggtgagcttgatctgttttcaggggaaacaaaaaaactaaagtcaagaaagtcttatcgttga

SEQ ID NO: 127851 - DNA, 612 bp, Enterobacter cloacae
atgattactgatgtaataattctttctagaacaaaaatgtctggagaaaaaatctgtgtcggtggattagatcttaatagtggggaaatgttaagattacttgataacacagcaagtgctttgacttcaaaatttccatataaaatcggtgaaacgtatactatagaatttgcccctagacgctatcgaacctcgccccacattgaggatattgcagtctacgattataaattagctaaggcatacaacaaaactgatttggatactatcgtctatcaaaaagctgaaagttgtggtgatctgcgtgatttattctcaggaaaactactttggaataacaataagggttatgccttagaggctaatccacctgcatttagcgtccaaatagcaacattaaataaaattttagttaagaatggtactgactaccaagagtttggctactctaatcccagaagagtgaagtatgttggagagttggatatgagtaaaatgccgaccattattaatacaggcacccctatcaggttttctttggctagaccttgggacaaagatggtaatggtgttaaggtatgttatttacagttatcaggtgtttacatttaa

SEQ ID NO: 127852 - DNA, 2448 bp, Enterobacter cloacae
gtgactcaggcgcgtcgtgttcactctatgactacggataaaccgggcagctttaacgaggcgacccggtacgcctatccgtggaatgaacccaaacaagccatcgctgtcgataagactcccgctgttgatctatatgaactgggtcaagagcaggagtttttcgcgtgggttgaagataccctcaagccactacctacatttatccgccgccgcgtttcctcccgcataaatgccgtacacgctgacaaagggcgtcacattgcaaagttaacccttcgcaatatcgtggcacgcgaccttccccacgtgcgagcagttacagagcaatacgccgtgcctgttggcagcgactggatcatttcttccgaattaaacccactgtttcatacgtttgaaaaccttcgtgagctaacgcgccggttcaatcagttggctgacagcacggacgaagatattgatttacttgctcaggatatcgctatttatgcaaatgctgccttagctgaagttagtgaaacctgtgctgtacttagccctgtggattacagcaaacgaatgctgcgtgaaggctcaaggctaattgcttacttcgggctaatcgcgccctgggcttcacggcgcaaaatgccacttgatgaaatggccgcttcaattcgaaaaattcttgatgatcgtttttggtcacgcctgctgcgaaagtacgcgcgccgctggcgtgaacatctgcatattgcctttggtgatgtgcgccgcgatgtttccccctattgcagcaaaaatcacgttaaacagtgggatgcgcgccgcaaacgtagcagggaaatcatgagccgcctggaacttgaagatcaggttactggtgagcgcatgtcgctgatagagcagattgataaaagcgtatcgaaccctgaaaaacgccgtgtagaacttatgacgcgtattggtggttttgagaaggtggcaacggaaagcggttatgccggaagtttcttcacgctcacagccccatctaaatatcatgcctataccgcgtttggacaccgtaaccacaagtggaacggagcaagcccacgccgttcacagcggtatctcaatcaaatttggcaacagattcgcgctgaactcgcacgccgcgaaattcctgttttcggtcttcgtgtagctgaatcccatcatgacggtactccgcactggcatggcctgctgtttacagccccagagcacactgcggagttgaaagaggttatggaagactacgcaacgcgtgaggatgcggaagagctaactggcaagtctggtaagcagccccgctttgaacttaagccgattgatccagctcttggtagcgctacgggttatgtcgtcaaatacatctcaaaaaacattgatggttacgctcttgacggcgagagcgatcatgaaagtggacgccctctgaaggaaaccgctaagcacgcaacagcctgggcgtcatgctggggtatacggcaattccagtttgtagggggagcgccagtgtcagtctggcgtgagctgcgtcgcctgagaaatcaggagttagctgacaaagttagccctgtctttggagagctgcatcgcgcggctcatgcgggagattggcagggttacatcactttgcagggtggcccttttgtttcccgctccaggcttgtcctccgcgcctggtatcaatacaaaaacgagccgaccagctatggcgaatatcagaaatctattaagggtttggttatgcctgcttccagcattccgcccgtagaaacgcgcctccattcttatcgaattgtgaagatgaaacctaaatcttcagaccacgccgatccggattttgaccttaagggcgcgtctgcgccctcttggactcgtgtcaataactgtaccgagtacaaaaaacatacaaccccatcgcctttaaatccgccagatctgactgtaccagctggcgaagtgcagccagagcaatttgaaatcggtcaattaagccgagaacagagaaaacagattgcggaagacatcagaaaccacaaatcaaatcagcgtgtttcacctgcagatcagtttgaggcgctcgctttaaggattactgccggtaattgcaccgactatgaccgtgcgagagccgaaagctacatgaaagcagcacatgctattcgtcaggaagcatgcgcggtgagcgaggaagttgaatccctggcccaggaaattatggggtgggcgaagttaagaaaaatttcaatcaacccggttcaggccctgaagctggctcaaggaggagaggtgacggcacttgatactaaatatcgcgccaacccattaacgggtgaattgatcgtgaccagtgcggatatgcgctggcgcaaaacgctggcgcgacacaaggcggagacattagttagccgatggcgagaagcactgataaagttttaa

SEQ ID NO: 127853 - DNA, 174 bp, Enterobacter cloacae
atgaatacagttgaggcggtagtaactaaggttctggacgtgcgcccataccgtaatttctggatcacgcgcgttgaggttcttagtgagggtggttacagcaacaccgagataatcagttattccgaacgtgacgcgcgggaagtaaagcccggcgacactgtgacaatctag

SEQ ID NO: 127854 - DNA, 987 bp, Enterobacter cloacae
atgtttaactcccctcttatctgggcgggcggcaagtctcgcgctatgtcacatgtggttgatgctttgccccaaggtgattgcctggttgagcctttcgtgggcagtggcagtgttttcctgaatactgactataagacttatattctgtgcgatagcaatgccgcgcttatcaatttttattcgattctgaaaagtaacactgaaggtttgttgaatgccgccgctgaactttttgaaagcggaaataataaagaatcatattatcagtatcgaaatgaatttaatgtattcaatcgtgattttcgttcttgcactgataataaagggcgcgatgacaggctgtattatcctgaagaatttataagattcgccgccctattcctttatctgaatcgtcactgctataacggtttgtatcgtgtaaatgcaaagaatgaattcaatgtaccttttggacatcgccgcaagccaattttccctgtggcggagattcagcactttgctaaaagggcatatcagaaaggcgctcagtttctttgtgcggatttccgctacaccattcctgttgccagccgtgtatttgaaaacacagtaatttactgtgatccgccatacctgccagccagcgcaacggctgatttcacagcttatggaaagcccttcacggcaactgatcaccgtgacctggttggggcattaatcgccgctcataacaatgaaggttgtgtgtccgttttttcaggtagtgacaccgcggacacgcgccaaatttattacccattcacccttaagccttttgaagttcggcgctcagttggggctaaaactcgtaatctggctggcgaggtgattggcactctgcgtgtctgtgattgctgtgggcgcgtaggcggtggctgtcctgattgtggtgctgtaatgggcgatacgacttattcagaaatggtggcttctggtgcttttgaagatcaggaggtgttctga

SEQ ID NO: 127855 - DNA, 168 bp, Enterobacter cloacae
atgaccattcaaacaaatgaccgcgcacacctgcttgggttgttgcgtatcaaattaaacctgatgaagaaagaaaagctttccactaatgaaatttaccgctgcctggaagattggatcgtcaacagagaacaggtcgcagtaaacaaggagcgtaaaaatgtttaa

SEQ ID NO: 127856 - DNA, 462 bp, Enterobacter cloacae
atgacagaatcacgagaaatcaatttaacttcgggatctcaacatttacgccaattcccgttagacaatgcccgcgttgctcgcacgtgcaaaatgaccaccgcgcaggctgaaagcatccgggatatgaataccgaagaattgcaaaaacaaatcttcgtcacgccagttgagtttgcttatctgactgggcgcacgttaaagagcgttcgcaaccttatggaccgcgcacaattgccagtacatcgtgaaggcatgcctggttcgaagcgccctaagcgtttcatcatgctgcaagaatattgggatgcagtggcacactgccgcgccctgattaccccggaagaaaagcacttcattgatcgattgatgcgagataagaaaacatatcgccgtgtaactggtaaccagcattcaacgcacaagcggcacagtcacagccagcaacgccgcattgcatga

SEQ ID NO: 127857 - DNA, 1023 bp, Enterobacter cloacae
atgtcagttaagaagctcgaagatggacgctacgaagttgatgtaaggccgcgcgggcgcgatggaaaacgcattcggcggaagtttgatagaaaggcagatgcccacgcatttgaacgcagtatcattgccaaatttcagaatcatgattacctgaacaaaccggcagataaacgaaaactaagcgagtttattgcgctctggtggcagttgatcggacgaaacaaaaactatgcaaatcgcagattgagtgcggttaactgtatttgccaagatatgggtgaccctatgctttaccagcttgatgcacgatgcattattgattaccgggcataccggctggagcaggggatcaaggcttcaacgataaatcatgaccttttcgccttgagtgggattttcaagtcaatggcggagatcgacgagttccacggagaaaaccccgtgacgtctgttgccgcgttgaaagaacccaaaaccgaaatgtcatatctcactcagaccgaagttgatcggcttttgtcgttatgtacgggtgattactaccgcatagcaattttgctgttggctaccggtgcgaggtggggggaggcatacaatctgaaagcggaaaacattgtcggtaacagagtcatgtttaccctgacaaaaaacggcgaaaggcgcgttgttccgatatcggatgatatcgccaggataattaaacacagggaatcagggcggcttttccgagtcagttacaagacattccgtttgaggatgaaagaagcaaaacccaacttgccagatggacaggcggcccacgctttgcggcatacgttcgcaacgcacttcatgatgaaggggggcaacatcattgccttacagcgaattttgggtcatgcggatatttcgcaaacgatggtttacgcacactttgcaccagactatttactggacgctgtgagctataatcctctcagtggaatgtccacattgtgtccacactctggaggcaaagcgggggatttgcgggttagttaa

SEQ ID NO: 127858 - DNA, 306 bp, Enterobacter cloacae
atgaaagtgctgcactttacgtattctttgatatttcacgtggttcagagtcaaaaattaggaatagttgtaatttcgactttattgttaacggttaacataaaattaacatttttggtaagtaatttcctaaaggcctttaggaaagaaggggttaggttaagagtaaaacgagcagtcggagagattattgagaagatgcagcagttcctggcgatggctcagcccgagctttaccagaatgcagctcaggcgatagataatgcggctataggggcggttctgcagcagggcgatctggcgtag

SEQ ID NO: 127859 - DNA, 144 bp, Enterobacter cloacae
atgtataaccataaccgtgacaaaaatcggtttgagcataaagtgcgagagattgagcttcttacagagcaaatttccgcaaaacatttattttatggtacttctggtatttttttgagattcaacagctcgtgggtcatttga

SEQ ID NO: 127860 - DNA, 624 bp, Enterobacter cloacae
gtgggtcatttgaaaagagagatcgaatcccactgccttacctttctcggagggactcaaatccttgacgaacagatacgacatctccgtgaacaggatgatctgcttacctttaaccgagcaaaaatgtttatagttgtcgagaaaaatcaggcaacaacaacgactatagctctcaagcagattggctttgttgcaggcggagcacaagtttatggtggggctagtttatgcgttggatcgcttgggttagcttgtgctgcatacggggctccgatgattgctcatgggttaaataatgtatacgaaaacgggtactatcttcttttccgtgaagaacaatcaggaaccgtgagagaagcgtacagatttgctgcaaaaaagctgggttatggtaataatcaagcagatttaatttacggtgtaattgatctctctttatcagcatacggtgcaggtagaaaagttctggcttccagagaaaagtcatggagtttgtttcacaatatccaatctgattatatcagaggctggcaagaggcatctaaaaccgcaattacacttgatgcgaccagtagtagcattacaggttggcagatgtaccagatagctaaagagaactga

SEQ ID NO: 127861 - DNA, 399 bp, Enterobacter cloacae
atgaaagaagttacagagatgtggcctttcttattggatggaattacaggtgtgaaaaaaatcagctgtaatttgatcattttattgaagtttctttttagcctgttacttcaagcgttttccactgtaaagcattcgatgccatcttttttagaaggtattaggatcacccatatctgtaagaaagaccatcgttttacttctctcccagaaaaccaaggcaatactggacgccacaaatgcacaggatgcgcttttgagcgcgcaatggaacttaaggccaagggaatccctatgtgcaacgacgattcaattctggctgacttaccagagagccaggctggtaccgttcgccataaggatgccttcgaggggtacaagatggcgtatcaagcgtaa

SEQ ID NO: 127862 - DNA, 342 bp, Enterobacter cloacae
atggcattcaatgacattgagttcaacgccatcaaaaaggaagtgaagcaatttgttgaaagcattcgaccaccagtccacatccgctctgagctggatatcgtctacagcatcagcgaccagactgtagatattggtcagttacgacctgtatggcgaggtgaaccaggtgaaacgcacattcttccaaacgtcagaatcagatacgtccgctcacaggacagatggaaactctactggatgcgcaaggatttgaaatggcatctatacagtactgagctttcgctgacggatgcacttgagcttgtgcgtgcagacccggattattgcttcttcggatga

SEQ ID NO: 127863 - DNA, 138 bp, Enterobacter cloacae
atgaaacgagcggttgggaagaaagagcttctaactatagtgcctttgtcactgagcactatctacaggctggaaaagaatggaggatttccgaagcgttggtacattacggatgggcgctgtgcctggaacgcttaa

SEQ ID NO: 127864 - DNA, 321 bp, Enterobacter cloacae
atgaaactctcactgtgttcatacaacccggaggctgtacatccaggctacaacgcacctcacgacaatctgcagatgttagcggcggaaatgggaataagtggtctggcgatgatcagagggccggaacaaatgttgattctcaatttacttaaagatcatagcacgcagggactgtccacgagggagcttgccaatctgtgcggtatttcaatttataaagttagacacttacttcttccgctggaaaaatatggccaggttatacgggataaaatgcaaaagcatcatcagtggtttttgtcaaaggatgcgacataa

SEQ ID NO: 127865 - DNA, 729 bp, Enterobacter cloacae
atgaggtacgatattgagggatttatcacttttgatacggaggatgcatctctccttaatgtgcttaccggggattgcgttgaattatctcagacatcgacgcgtctattagcagaattactcaatcaccgcggcgatatcctgtccagaagtgaaatttttcattccgtgtttgatcagtacggcgccagagcatcaaatagtaacctcaatcaatatatctcaacgttacgcagaaatctgaacgacctgggtgtggaaaaagagattatcactaccgttccccgcattggttttaagattgcagatgatgtcatcatccataacgaccgcgagtatcgtaccccgttcctggaagaaaaagcctcagaagccacgcgcaacccccctcctccttcggtgtttgaaaggatagcccgaataatcgcgctaggtattgtgtcaatccttttagtaataaggcctcacaccgtcgattcagggaataacgtacataaaatagttgatgaccaatgcatcatttttacatcccccgcactgtcgctatgggatgtaaaaaatagctttcattttacaacacaaccattcgactgttcgcagccaaaagaactgtacctttacaagaagcagataaatggaaccttaggtaacattatacaattgctactcgttgagtgtgataacggtaactgcgaaagtttttattacagagaaaaaaacaatgtctaa

SEQ ID NO: 127866 - DNA, 468 bp, Enterobacter cloacae
atgtctaagcgcgtctttttcctgttgctctgcctcgctctcttcctggcgggggggatgtattcatttaccagccccgctgttttctcctgcgaatcgcaattttctgtcgtacaaaacattaacggaaaaagtgtccatgctgaagggctgatttttatcaacatggcgaacgatcatatcctcatgaatatcgatggtttactctctcatgacaataaaaaccaaattatttcgcgaacgctcaagataaaatacaaaaaattcaaccccagcgcgcatttatatcaagtcacgagcgttcgtaccctgcgcgacaacacagataatattgatgacactgtcgccataaatttattatttggcaaagggccagacgacaaaataatatacctcaatcaattcaataataatacattactctttggtaaccacacatttccgcagtatggttgcaaacgaaaataa

SEQ ID NO: 127867 - DNA, 1173 bp, Enterobacter cloacae
atgaatataaacttaatagaatcactggcttgcatctcaaaaataatagacatgatcaaccctcggcttaacttgcatcatgtcagaacggcgtatattgcctggctcctggcacgagagtcgcagtttacgccagcgcaatgtcggaaaaccctgctggcggccctgcttcatgatattggaggactgaatgaagagtctcgcctccagcctatgagctattacgataatgaactcaataaccacgctgctgtgggggcggaattgctggccagtgtacctttactgaatccgttgaatgccattgtgcgatatcatcatacccactggaataatggttggggagcgtgtgttaatggcgttaaaaccccgaaagaaagccatatcatctatctggccgatcgtctggatgtattaatctctcactaccgggccagcgatgtcatcaccgcacaagaagaaattataaaaattattgtcagcggtgagaatgacctgtttcaacctgactatatccatgccttccaaagggtcgcaagcagggatcatttttggctaagaattcaatcaacagagtttgacgattatattaaagaaatcccccgcattcataacgacaccctctcattacacaattttcgcgatatcgccggtatgctggcgtttattatagatggattcagtcaacatggggttcaacactctctggtggtcgggcgaatatcgggataccttgccagagaaatgggtattcctcccgtgcagtgtttaaagattgaaatcggagggctattgcataatctcccgaacctggccctgtgcgccacaccggcacaggccgatgagggaaaagcagtttgggatgagctctatcctattgaggcaataagagacatagcagggtggtgtcagctccagaaatccgtagatgcaaaatccgcttatccgccggaagtgacgattatcaaagccagcatctggctggcctcgttacttcagggggtcacgctatcatccgaatttaaggcccgggtaggtgaaacggcggaaatcacccccgcgctggcgggtatcgtgcagcaacacagtgcgattttattacagatattccatgagtcggtcaaagaacgacgcgctctggtacagcgaattaatcaactgaccctgtcatga

SEQ ID NO: 127868 - DNA, 738 bp, Enterobacter cloacae
atggcaaagagatggatgttgatcaccggcggcagcagaggaatcggacaggctttggtgagccaccttctgcccgagtggaacattgtgtttaccggccgcaatgaggccggaattggctgtacgctggcgcaggcgcaaggtctgcgcacggcaacctgggtaaaaggttaccgctgcgatggccgcgatgaggcggatgtccaacggctggcgacgtcgctacttgacgagtttggcgcaccagcggccattgtacacaacgccggaatgacccgtgacgcactgcatattcatcaaacggcacgcgactggcaggatgtgctgacgaacaacctggttgcgctcgtgaactggaaccgaacgcttttacccgccatgatgatgcaggggagcggagccgtagtattgatgtcgtccgtaacggcaataaagggcaatagcggccaaacggcctatgcagccagtaaggccgcaatgattggcctgacgcgttcgctggcgcaggagatgggacgctttggcattcgggttaactgtctggcgccgggactgattgaaggtgaaatggttgaggctatccctgaagcccgcctgaaagccatgcggcagagcattcccttacgccgtctggggcaaacgcaggacgttgcgcacgctgttgcctttctggccggagaaggaagccgctatctcaccggacaaacgctggtgctggacggagggctgtcagcctga

SEQ ID NO: 127869 - DNA, 252 bp, Enterobacter cloacae
atgaactcgtatgaaatcatctacagcaaaatcagcgaaatgattgctgatgcaaaagatctgccgctggaggcgctgacaccagacaggacgctgccgcagctggaacttgacagcctcgactatgttgaactgatggtactggcgaaacgcgagtttaacgtgacgcttacggccgaaatgtttatgaaaaagccgcatatgacccttcgcgatttgagtctgtacatcgaccaggaaatggctggctga

SEQ ID NO: 127870 - DNA, 804 bp, Enterobacter cloacae
atgatgacgctgcgttacagccaacaggatgcgcggctatgggctgcattttcaggggattacaaccccgtgcattttgataaagcctgggtgaaatcgcagggtggaagccggctcagcgtgcacggtatgcgcgccctgctggatgtcaaacggttcatcagtccggaagttcgccgctcatcctttctgaagtgtaccgtgcggttgcgcaggccgctgtggcgggataccacttatcttctgatgtgcgatcccaacaagcctgtttcagcctccgtgtacgatcttaccgctcaaacggtctgcctttcatgtgctatcgcgccggttaacctttttgctgtggcagaagcagaaagtcagcgagaactcggcgcgtcaaccattgccgcgctacatcagacgtttttgcccctgcttccccacgcacagcagtggcattttcttgatgccctgctgtttcgccatcttcttcaggataccgcgctgttacatcagaaagacatcgcacagctgataccgtctggccatacgctggaggcgttgtttacccgctatcccgttgtccagacccatcaggaggttgtttttgacagccatctgctcgtgccctggcagacggtgcctttaccggaaccacttgagatagagacattacccgccacggtggttggcgatcttagatatggcgcagtggtgcgaattgctgcgcaaacccgctatcaacaacactacatcagcagtgccgtgacgctgaaagttggcccgctgacaaaaggaaatgcaaatgaactcgtatga

SEQ ID NO: 127871 - DNA, 1254 bp, Enterobacter cloacae
atgaagctgaaaaatggagataatcgggtggttgttaccggctatggggccgttaccccccttggcgtgacggctggtgagagctggcaggcgatcatggactatcggctgggctatcgctacgtcgattacacggcgcggaatatcaaaacccattttctcgggctggtggacaacgaacccagcctgattggggttcctgccgccgtcagacgccgtctgccgcgttttgcccgactcacgtttggcgcggcgcgtcaggccatggcgatggcttttggcggccagccaccgcaggagttctatagcccgctagactgcggcgcgatcatggggaccggctggggagggctggacgaaagctacgatgcgcagagcgatttttcggcaacgggcttcgcctcgccgtttaactgtttttattcgatgcctagcgtcaccactgccgcctgtagccagttctgggggctcaacggcttccagaacaccgtggtagcggcctgtgcgacgggaaccatcgccattggcgaagcctacgaggtgatccgcaccggcagagcgcagatgatgctggcgggggccggggagtcgctgaccagtccctgcgcgatctggaatatcgacgtattaggggcgttaagtaaagaaacgcaggatccgcagcgcgccagctgtcctttcagtgcccaccgtaatgggttcgtgctgtcggaaggggcggcggtactgtgtctggagtcgcgcgagggggcgcttgcgcgcggagcgaccattcttggcgaaattacgggttacgccaatttctctgacgcctgggattttacctcgcccgctgaagactgccttgcgcgcgtgcaaactatcatctccgcgctgcggcaggccggacttgaacccgagcacctggactatattaacgctcacggtacctcgacaccgctcaatgacatcaacgaaacgcaatcgctaaaaatggcgctgggagaggcggtctggactgttcccatttccagcacaaagtcttactccgggcacttaatttcagccgcaggcgcgttcgagagcatcgtctgcctgcaggccattgccagcggcattatccccgcgacgaccaattttcagcatgcggatgagtgctgtgatctggattatgtcgttgaagggcatcgtcacgccactatccgccgtacgctcaacctgagctttgggtttggtggcgcaaacgcggcgttgattctggagaaacattcatga

SEQ ID NO: 127872 - DNA, 1383 bp, Enterobacter cloacae
atgactcgatacctctttttagccgtactgctactcctggcgggttgccgcgcgatgacccgcagcgactaccagcgcccgctgctgtcattgcccacacagtggcccacgatggcggaaaagggaacggaaaacggctggcgttttagcgatccccgcctgtctcgggtgattgaacaggtactggaaagcaataacgatcttgcagcggcagccctcacgctgcagcaagcacgcgttgcggcagggctcaccagcaccaacatctcccccgacgtcagagtgagtggagccgccagtaacagtaaaaatgtgcgtcggggagcacctccacaggagaactacagcggcagtgttgccatcgcctgggagttggacctgtggggaaaactggcgcgcacccgggagcaaagcgaatggcaggccagggcaagcgagcaggattaccgtgcaaccgttctctcaacgatgggcctcaccgctcagctttactggcgtatcgccttgtataaccagcagatccgccatcagcgtgacggtctggctgtctctgaacagaccgtgcaacaggtgtcctcatggtttaacgccggaaaggtggggaaacttgatgttctgcaagcacagcaggcgctgctggcgcggcaaaatcagctcagaacgttggttcagcagcgccagaacacacgcagtgcgctggcactgatgctcaacaggccggcggaacaacatgccgaagaattgcgcgagctggacgtgcatcagcaggtgcctgtggcacaaaaaacgccgctacgggtgatcgctcagcggccagatattcaggctgctgagtcgcgcctgcgcgccgcgcttgcgggttacgacgcggctcgcctgcagttctaccccacgctttctcttgatgcgtctctgaatgccgggagccaggtttttagccagtggttccgcgatcctatccgtacgacaggggccgcgctggccttgccgtttatccagtggaacacccgtcagctcaccgtcgcgcaggcggatttagcgataaaacaggccgcgatcgcgtttcgttctaccgcctataccgcactcgctgaagttgatgaggctatggaataccggctgagtgcagatgagcaacgcagccgactccatcagtcgctggcgcttagccagcggcgattatcccttacggaaagccgttatcgcgcaggagcggtggatttccagacgctgctcaacgcgcaggacgatctgctgaacacagagaacgccctcgcgcaaacccagtacgactacctttacgccacgctgcagctctggctggcacaagggggcgacacgcaaaacaggataatgaaagatgaagctgaaaaatggagataa

SEQ ID NO: 127873 - DNA, 1932 bp, Enterobacter cloacae
atggagccgattatcgtattacggcgggtgtgccgacgattccacgcgggcactcaaatgttagcggtgctgagtgatatttcactgacctttcatcgcggtgaaatggtggcgattgtgggggcatccggctcgggtaagtccacgctgatgaacatcattggctgcctggacaagcccacgtccggagaggtcctgatcaacggtacgcccgtgcataacgcggatagcctctaccttgccgatctgcgcagccgttacctgggattcatttttcagcgctatcacctgatgccgtatctgaccgcagaagaaaacattgccattcccgcgctgtacaccgcgatgtcggaacaggagcgtaccgcccgtgtgcagaggttagctgttcagctcgggctggaaaaccgtctccagcaccgtccagcggagctgtcgggtggacaacagcagcgggtgagcatttgtcgggcattgatcaacggtgcacacattatcctggcagacgaacctaccggcgcgctcgacagtacccgcggtaaggctctgatgggcgtgctgcatcaactgcatgcgtcagggcacacggtgattatcgttacccatgaccgcgatatcgcccgacaggcgcagcgcattattgagattagcgacgggcgaatcatcagcgatgtacggcacgctgaggttcatccctcaacgctgctgcctgagcaggacaacggccgagcgtcgctggcgagccgttttcgcgagtcggttcatatggcctggcgtgcactgcttgggcaccggatgcgcgcgtttctttccatgctggggatcatcattggcatcgcgtcggtggtgtcgtcaatggccgtaggggaaggcgcgcggcgggcgatcgtggatgagataggcaagctgggaaatacgacacttgagatccgcccgggcaccggatggggcaacgcgcgtccggacatggtgcgcgcgctgtcgatggaagacgtgcgcagtttgcaggcgctgccgtgggtgatgggcgtctcgccggtcgccagcagcactgcactcgcggtgcgcaaaggtctggattcctcgatgatgctgtcaggggtatcacaggactttttcaccctgcaagggctgcgcgttgttcagggtaatggcttcacggcgcgcgatgttgcggaaggtgaaccggttatgatcctggatgaaaccgggcgagatacgctgttccccggtggggaaaatccgctcggtgcacttgtgcagattgccggtgcgccgtggcgcgtgatcggcgtggccactcgacccgggccgaaagtggtggggggcttcatggcggcgtgggttccgcatactgctttgcagcagcggctgacggggcaaataccgctggagtcgctggtgctgcgttttcagccgccgctgacatcacaggaggccgcgcagcgtgtggagcgccacctgctgcgggaacacggacgaaaagatttctttatacaaaccgacgatcggctggcgaatgccatgcaaaaaacgtcggactccatgtcgcttctgattacagcgatcgcggctatctcgctgctggtgggcggcgtgggtgtgatgaatatcatgctggtgtcagtgacggagcgaacgcatgaaatcggcattcgattatccgtgggggcccgacccgcagacatcatgaaccagtttctcattgaggcggtgatgatctgcgtgctcggtggcctggtgggggtgtcaggcgcctggctggcagggcatatttttgccttcgtgacggacgccttttcaatggtatttaccgtattcccggtgctgatggcctgcggtttttctgctgcgatcggcctcacgtttggttatttcccggcgcgcagcgcggctcgccttaaccctacggaggcgctggctcgcgaatga

SEQ ID NO: 127874 - DNA, 1152 bp, Enterobacter cloacae
atgaagcataaatctcgctgggtgatgctgggctgtggtctggcgtttgccgccgcgatggcgggcgtctgggtgtctatggcctcgccctcaccacatacgcgtttacccgtggacactatcggcaccggcgatatcgaaaaggtggtgctggtgacggggatcctgaagccagcggtacaggttaacgtcggtgcgcaggtcaacggacagctgcgtaaattgtatgttcgccagggagagcgcgtgaagaaagggcaactgctggcagaaatcgacccgacgttacaggaatcggaactcaggaatacaaaggcgcagcttgccagcgcccgagcgcaaaagcgctctgcgcaggcaatgttgctgcgctaccgtcaggagctggaccgacagcgcctgatgcagcgcgacggctcgggggtgcgcagtgagtttgagcaggccagatcgcaatacgctgtgcaggtgcagcagatagcggtgagcgaggcgcagattgcacaggctgaaatggcggtgaaaacggcgcaggccaacctcagctatacccgcattgtcgcgccggtcgacggcgaggtgctgggtattgtgacccgtgaaggtcagaccatcgtttcttcgcaaacggcgccgaccatcctggtgttggcggatctcgatacgatgcaggtgcaaacgcgtatttcagaagcggacgtccaaaaaattcatcccggccagccgctcagtttttatgtcatcgctaatccgaataaacgctacgccagtaccatgggctatgtgcagcctgcgccgcaggacgcgatggaggcgtccggtgagagaggtatgggcgggaacgcgcaggcgatggcagtctactacaccggcacgttcgaagtgcctaacgtcgggcgtgagctcaaaacatccatgacagcacaggtatttattcagatcgccagggccagcaatgtcctgcgtgttccggttgccgcactgggccaggcgctggatgccgatcgttacaccatcaccaccgttaaagatggaaatacgcagtcccgcacgatccgcattggcattcaagatcggcagtacgccgaagtgctggaagggctgcaggcgggcgaacaggtggtgctggcgcaagagacggagcgaggatag

SEQ ID NO: 127875 - DNA, 2115 bp, Enterobacter cloacae
atgaaaaacacgatcccgaatctgatctttcaggaagagactaacgagtgcggactggcgtgcgtagcaatgctggcacaaacgcagggacagacgatctcactggaaacgctgcgcgacatttttccagcctccgaccacggtacgtcgctggacacgctgatggccattctggcgcggttgggcattgcgacggcccctgtgctgtttgagcatcacgaactcagtgaactcccgctgccagccattttgcactacggcgcgagccactatgtcctgctggcctggcgtaaaggcaaccacgtctgcgtgatgaacccggcgattggcgagcagtggctgccttttgccgcgcttaagcaggagatcagcggctatgccctgatagtggagccagagcagaggctggctgcagatcccgcgctggcgcgaccgacagcgggacagagcatgcctcgggtgatgagcatgcaggagacggcggatgtgccgggcatatatcggctgatgctgctgaccttcatggtgtcgttaacgctgtttctgatgcccacgatggtgagtagtgccatcaataaagctttctccagcgttgagagcagcggcttcccgtacggctggtttattctggcctttgtggtctcttcgctgatggcgctgggggttcgggcgatcgccgagcgctacattaaacgctttgtgctgatccacagcggtgtcggcttttctcgcctgcttcaaaaacccctccgtttttttgaaaaacgcgcgccgggggagatcttcagccgcttcacggcctggcagatgggcctcctgcagaagatcgaactggataatggtttgcgttccgattgggtgatcggtgcgatcgcgctggcgatcatgttctggatcgcgcccatcctggcggcgatctccgccatcggcgtgacggtgatggggatcatcagcgtctgggccgtgatccgcgatcgctggtttacccagcagttacagctgaaaagcgctgcgctgaatgattttttcatggagacccttcagggcatattgaccgtcaaaaccgccgggctggaagggcagcgtcaggcgcagtttgccgccttaagctgcgaactctacacatgtctacagcgccagaaggtctatcaacaggtgaaagaagggctctatcagctatgcggcagcctggagatggtggcgtttatgctggtggtactgccgatggtccacggcaagcagatctcgctgggcgatttttttgcctacagcttcctgcggcaaatcttcacgtcctacgtcacgcggatcttctacgccatcatccagaaaacgcagctgcacgtgatcgacacccgcgcacatgccctctttgctccaggaggagaacgcgcgcccgcgtcgctgaccgcggtaccggcagcggatacaacgcctgctttggcctttgaggcgcttggctacgggtatgaccccgctgtgcccgtcctttcatccgtctcattctcgctgccggcgggtgagcagatcgcgatagtcggggagtcgggggccggtaaaagtaccttacttcggctgatcgccgggctgttttcgcctcaggcaggaggatgttatgccgccggtcgcgcgctgcctgccgcgcagctggcgcagtatgtctgtttgcaaagccaggaggacattctttttaacgcctcggtgcgtgaaaacatcaccttattcgacgcgcactaccgcgagcgtgaccgcggacgggttgaggccctgcttgatgctctcatgctgggtgacgtggtgcgtgcattgccgggtgggctggatgctctgatccgcgaaagccacgcggcgctctctctcggccagcgtcagcgcctgttgctggcccgcgcgttgtacagctcacgtccggtgttattgctcgatgagccgacggccaatcttgatgacgaaaccgcggcaatcgtcatggcaacggttcacgcccactgtcgcagggccggtaagtcgttgattgttgtcacgcatagcgagctggttttatcgggctttcagcaggtttaccacctggtcgacggcaggctcagcctgcgggaagggagtgatgaagcataa

SEQ ID NO: 127876 - DNA, 843 bp, Enterobacter cloacae
gtgcgcgtcgtgcctctccctgtgacgctgaccgtggcgaagggactgtgcgcaacgcgactgttcgggcgtgcgtttcgcttgcgtaacgcggtggcgaatgaaaacgttcgttgcctgaccgggcaaaaggtccgcctgaacgtggcctggctgacagtacggcgacgcctgctggaagaggccgccacctgggcgcaaaacccggcgctgcttcagcaaatgcatacttgtgcagcggaactcaatgcggtggttacaccgctgtaccaacaaaacgcaccctacatactggcgccgctccatacggtgtctgacgtactcgctgccatcattggtgccagcgtcacgccggggaaagctagcgtggtggtctcgtccagcgcggagctttacagcgcccccgcccgtgcattaggcggcgtagcacttgactactgttcaatccaccaggaaaacaaaacgcttgccagcaacctgatggatctcatcaccgatgtcgccgccgggcagcggaacatgattattttccccgatatcacgcccgactatacctcgcaggctgaagggacgctggtggcgaaacagccgtgtcgtttatttggtcgcagcgccaggttgcacggtggtctggtacgtctttccggggcgatagctgcgcaggtcgtgttttatcacctgagctatgacaaccgcctgcgcattcacattcatccgccggtgagcaaccagcatgtcgccagcgcgctgcccgacatcattgaatctaccctgcgagcgtccccgcaggagtggctcctgtggcacagccattctctctactttattaatcactcacgataa

SEQ ID NO: 127877 - DNA, 669 bp, Enterobacter cloacae
gtgactacctgtacgcgcaaaacagcgatcggttattcgatctttctgattatgatttccgttttgattacggtactttgttaccatatttttgtttttaaaacttttacgagagatgattcgcagacgcaggcatttcgcgaggtcagccccgacatgcaggcgaacagtccgattaaaaatgagcgcagtattatcgaagttatgtcttatggttgccattattgtgcggcaaacgaagagaacctcgcggaatttagccgtactctgccgccggacagcacatttacctctattcatattgctggcgaggataatggtcttgcagcctatgcaccgctttttgcgacgctggaagtgatggggatagaaaagcagattcgcgacagtgcgtataacgccattatcacacgcaacgtcgatttgacggatgaaaaaaaactgaacggttggttagtcaaaaataatattgatgtcgtcaagtttaatacgttcaggctaagcaaggcggtaaaagaacgtctcagcgaaatggcggccattactgcttattatgatatcaacgccaccccgatgtttattattaataaacgctatgttgttgctcaggatcgcgagttcccggcgtttgcgcagcgcattcgggaattgctcgaagaggataaataa

SEQ ID NO: 127878 - DNA, 201 bp, Enterobacter cloacae
atgaaaaaactgaccgcatttgaagccgcgaggattgtggggggaacctgcaagacgtgtgaaatcacgtatcaaaacgtcaccgttggtggcgtcacctcctgtaagcagatcaccacctgtacagataagcatggctgtacgaccacaatgagagatgctgattccagcaaatgcggtgggatccctaaccgctattaa

SEQ ID NO: 127879 - DNA, 660 bp, Enterobacter cloacae
atgagatatcagttctttctttacgataaaaatattttttattcgcaaggaattaaaatggttattaccagtttactcgcagaacaagcggacgttttatattccttaacggatgattacgatcagctccttgttcaattacagcgtcaggttaatgacgagggttgcatgtggatcctctgtgatttagacagcctgccgcgagagcggcttcacacgctgcaattaatgaaagagttctatcagcaggaaaataaaagcctgattattctcttaagcaaacataatatgcctcttttttttgcgctgtattcgcttttgcccaccgcgcactggttgctcaaaactgaaaatatggagagcatcacgcctttttttcagcgtctgttggataaaacacgtcagggatgctgctttagcgcatcgctggtcaactatacgaaaaaaaaactttatgaccggagcgtggagcccacgatttccgggagtgagtggtggttgatggaagagctatttaagggaaaatccctgtcgcaaatatcagacgaagtaaacgtcgacattcgtcgcttgagctatatcaaacgccatttaatgaagaggttgaatatcagaagcaatatcgctttattctccgcgtttcgcggcattatgccctga

SEQ ID NO: 127880 - DNA, 549 bp, Enterobacter cloacae
atgcatcgcatgataatcatcctcacctgttatctcacggtattcgctgcggcacccgcctgggcgcggggggagttgatcggtggcgatcttagctttaaaggcgttgtaatggcttacccgtgcagtattgcgccagagtcgggtcggatcctggtggattttggtgaggtatcaacaaagtcattgtatataaacggaaaaacgacaccggttccgttcgcgattaaattgcaggactgtaatccgaacgtctttaacgcggtgacggtaacgttcagcggcatcgccaacgccaatatggcggaccggctggccatcaacgcaacagcgccgggtaatgcgggcggggtagggattggattgctggaggaggatgatactcccgtgcgcctgaatgtcgccacccgtcccactctcatcaacgacaacctgttacggctaagcttccaggcttttgttgaagcggaacccgatgccgtggcaagcggaacgttaactaccgggccatttaccgccactgcacattatacgttggattatcagtag

SEQ ID NO: 127881 - DNA, 1044 bp, Enterobacter cloacae
atgcaacatccttatccttatgccgctcttctggcgatgtgtgcgctcggattttccggggcggcgcgctctgtggtggacggtgaaattaaggcggtaaatggcacctatgaatacctgatcaacattagcaatcatgatattaccagtaatcaggtcggtgctgtcgttatcgacgaatttgatctggcagggatgtttcagggccgcgcgtactgcgcgcagccgatgataagccagccggtctattacacgtcgcaggcaacgttaacccaatcaggaatgacggcgggttacctcaagctgaatgactacatggacgtcaaaatcgagatctacatcggcggtaatctacagcagtacaaaaccgtacccttcgataacgtctccaataacgtcaatcagaactactgcaacccccccagcaccatactggacaaccagtttgcctccggtgcgaaggggaaagtgacctttatgatcaccaagcccattatcaacggggtcaacttgcaggggtcagaaatcgcaacactttatggacgactggggccgggtgcaatgggccaaacgccactgtcgcgcgtcaccatcgcttcaggcgtcatcaccgtaccggataaatgcatcgtgaatcagggaacgcccattgtcgtcgacttcggcaacattccggggacgggcagtcggctggatggcatcaattacagtcaaaacgtaccgattcacgtcaagtgccagggcggcagtttttcccagggagagctgaatatcaagctggggatccagcaagctaatccagcattcagtgacggtaaatacctgagtacgcagggagccgtcgaccggtctgaactggggatcgcgctgcgtgatagcaagggtaatcctgtggtgccaaacacgttctataacgtgccgggattttcccacaacgaaggtgactggaacctgatcgccgcgccggtggccaaaaacactacctcggttattcccgaaggcgagttccatgcgtcggcgacggttgtggctgaattccagtaa

SEQ ID NO: 127882 - DNA, 744 bp, Enterobacter cloacae
atgagcgagaacagacatagcagatatcttatggcggcgtgtgcgctgagcctggtggcgggctacgcgcaggcaggcgtctccctggatcggacgcgcatcatcattacggagaaagagtcttcgtccagcgccaatttgtccaataccagcccggatatccccttcctggcccagtcgtgggtggaggatgaaaagggcaataagatcacctctccgctgattgtactcccgccgttacagcgaattaatggggggcagaaagggatcgcgcgggtcactaaaacggctggcatcgaaaaactgccgaaggacagagagagtctgttctacctcaacgtcagggaaattccgccaaaaccggaaaaacccaacacgctgcagctggcaatgcaatcacgcatcaagttgttttatcgccctgaagcggtgatcccgaagacaaagggggaagtttggcaggatcgggtggtgttccagaaaagcggcagcgaaatgaccgtgcagaatcctacgccttactacgtgacgatcctcagcctgaccaaaggagacggggtgaagatcacccgtttcccggggatcatggttgcgcctaaatcgagccagacgtttgcggtaacggacgccggtgtcagtcagttttctatgaagtttgtgaatgactatggcgggcatccggagctgaaattccgttgtgatggcaatacctgtaaggcgttaccccctgcccagcagggttaa

SEQ ID NO: 127883 - DNA, 2475 bp, Enterobacter cloacae
atgtcagtaaaattaaaaacgaatcttacaattattgctctcctggtgatgaattgctgctatgcagcaatggcgcgcggagaagagcgcgttgagtttaatactgatgttctggatgcttcagatcgtacccgtattgatctgtcacgttttgcgacagataactatgtcacacctggtgattatctgctggatatccgtgttaacggccagtcggtaggccaggagaaaatccgttatgtggaatcgcctgaaggcaatcgtacgctgccgtgtatcagcggtgacctgctggacaaactggcgctgaaagaaggcgcacgttcacagatcgctcaaatctatgaaaactgctattccctgcagcgtttgtcgggcgcgaaattaagcaactatgccggcgtgcttgatatcaccgtgccgcaggcatggatgaagtacaacgatcctgactggacgccgcctgaacgttgggatgaaggtattgccggcctgatttttgactacagcattaacgggcagctgactcgtcaattcagcgacaataaaaactacagcgcgatatcaggttacggtcaggcgggagctaacatcggcggctggcgcatacgcggtgaatatcagaccagctactacagccagcaccatcaatccagttttgactggaaccagatctacgcctaccggccgttgccgatgatggcggcaaaactgacgctgggggagatttacctgaactcgcaggttttcgatacgctgcgatttaccgggattaacctcgccagcgatgagcggatgctgccgcctgcgctgcagggctatgcgcctgaaatccacggtattgctcgctcgaatgccaaagtgaccgtcagtcagagcgggcgcgtcatctatgaaactaccgtccccgccggaccgttcaatattcaggatttgcgcagttcagtgcgcggtacgctcgatgtacgcgttgaggagcaggatggctcggtatcgctgttccaggtgaataccgccagcattccgtatctcacgcgtccgggctatgttcgttacaacctctctggtggcacgccgtcccgctataaccactcgctaaagggaccgacgttcctgtctggcgatttctcctgggggatcagcaacgcgtggtcgctgtacggtggcctgcagtcatcgggtgaagcctacactgcagcctctgtgggtataggtcgtgatctgaacgcgttaggggcgatctctctggatgccacagagtcgtggagccgtgagcctgacggcaaacgcctgaaaggtacctcatataagttgagctacgcgaaaaccttcgacgaatacaacagctcaattacgttcgcggggtaccgcttctcacaggaagacttccgcacgatgacgcaataccttgatgagcgttatcagggttatgaccatgtcggacgcgagaaacagctctacaccattaccgggagtaaaaccttctgggccggtgaggcgggtaaagcgacgaccgtctttcttacctggacccaccaaaactactggaatcagcgcagccaggatcgatacggcatgtccgtggggcgagccttccgcattggcgatatcaacggcatcaacgccaatctttctgcttaccgtactgattataaagggcgtaaggacgactcaatctccctctcgctgtctgtgccgattggggataacacatgggcgggtctggacgtccagaccaacaacggtaaaaccagtccaatggcgtcatacaccgacaacagcgacttcaacaatctgtggcgcgttcgcgcgggtgccagtcagaacagtaacgccagcgttgacggctattacctgcaccgttcgcagtgggcggagattaataccaacgcaagctaccagcaaaatgagtttatggcgttaagcaccactctgcgcggcggctttacggcgacccggcacggtgcggcgatgcataacagtggcgcaacaacgaacacggcgcgggtcatggtcgataccaacggcattggcggcgtcccactcaatggtgaaaagtcccggactaaccgcttcggtattgccgttgtaccggatgtagtgagttacaacagctttgatacccgcgtagacgtcgacgccatggatggcgatatcgaaccggccagagccatcagtaccagcaccctgactgaaggggccatcggctatcaggcttttgggatggcgaaagggatgaaaatgatgggcacgttacgcctcgttgataacagcgtccctccttttggggcagaaatttacaacgccgatggcgtaagcgtcgccatggtgctggaggacggaaaggcatggcttgcgggcataaacactaatgaaaccctgaatgttatgtgggggggcaaacagcagtgcaaagtaaccgtcccgcctggagagaacaacggacgttcggacatgcttctgccgtgccgttaa

SEQ ID NO: 127884 - DNA, 531 bp, Enterobacter cloacae
atgaaactgaataaagttgctatggctgttgctttgaccgcagctctgagttcaatgtctgcattcgctgatacgacgaatggccagattgaattccagggtgaactggtgaataccgcatgtggtctggcgccaggctcaagcccggtaagcgttgattttggccaaattccagtttctgcactggctaatggtgcgcgcgccggaaatgtacatcagaacattgaactgcagcactgtgacaccaccgttgcacaaacagctgagataacgtactccccaaccagcgtaaacccaacggatacgtctctggctgccttcacttctggtactgcgtcgggcgctggtattggcctgcgtgacagtgccagccaggacgtcgtctggggtaacgcaaccacgcctgttcagttggttgatggcaccaacaccattccgttcgtggcatatgtgaaagcagaaagcgcaagtgcgaccgtaacggcaggttccttccagtcaacggttaacttcgagattgcttatcagtaa

SEQ ID NO: 127885 - DNA, 1095 bp, Enterobacter cloacae
atggctgaagatcaaaatccacctgctgacgagcaggacaaaaacaataatgagcgtaagcgaccgggcaaaaagccgttaattatcctcggcattgtcgtggtggtgatggtcgttgtggcgctgatctggtggtttttaacccgtaacgaagagacaactgacgacgcctttaccgacggtgatgtggtgacgattgcccctaaaacggcggggtatgtcacggcgctgcacgtgcgtgataaccagcgcgtgaaaaagggcgatctgctggtggttatcgatccgcgtgataccaccgcccagcgcgatcaggctcaggcccagcttggcctggctattgcgcagctgcatcaggcccaggcacagcttgcgctctcgaaagtgcagtaccctgcccagcgcgacgaagccaaagcgcaagtgctgaaagcgcaggcagacctcgccaacgcgcaggcggagtatcgccgccagcgcggggtcgatccgcgtgccactacccaacaaagcattgattccgccaacgcccagctgcgaagcgcacaggccgctctggcaagtgcgcaggcccagctggaagtggcggagcaggtacagctgcagatccgccagcaggagaccaacgtcgaagcacgtgagcgccaggtcgatcaggctaaagcgcagctggaaaccgctaacctcaacctctcttacaccgaagttcgcgccccgttcgacgggtttgtcactaagcgtaacgtgcagccgggtacgctggtgcaggcaggcacggcgctgttctcgctggtctcacccaacgtctgggtggtggccaactttaaagagtctcagcttgagcgcatgaagccgggcgataaggtggacgtctccgtcgatgcctggccagatatggcgcttgaaggccatgtcgacagtatccagcagggcagcggttcgcgtttctcggcgttcccgtcggaaaacgccaccggcaactttgttaaaattgtccagcgcgtgccggtgaaaatcgtgattgacaaagggctggatccgaacaaaccgctgccgctggggctgtcggtagagccgaaggtcacggtggaatga

SEQ ID NO: 127886 - DNA, 1047 bp, Enterobacter cloacae
atgatttcactacttctgtttagtcgtgccaacgaggaatcagaaactaaatctcaacgtactttaggaaatgttgaggcgttagtaactcgccataaaaatggattgccagtaaacattaaatctgtaggtcgccacccattctggattgatgattctggatcgcaatatgaagctgtaaaaaaacatcctatctactggaatattgctcgtgaagctattgatatgttcctgtctggtagtggtgtctatagtgttaaaaaacaccttgatcagaaatattcaaatggtttgagaggtaaagagtgggattatcaagtactaaagaaaatgcgtgataatcgtgctttgattggtgaacgtactgttactataaagggtatatcttataaattagaaaactactatccttggctatgtaaggatgaagcagagtttttattactggaagaaaggaaaaaacaaagtaattacaggtcaaaaaaagattctgtagataatataaaattactttctggcctatcaaaactaaggtgtagtaaatgtggcggtactatgcattcattcatgaatcatggtaacgcacgttatatctgtacaaatggagtgcatttacaaaagaattgtacaggatggtcaattaccgctcaattagttgagcactgtacaatgattgcactactcataggttacatggacaaaagtaggaagagtggtagtgacacgactgtaatagaagaggatcttaagaaaaaagaagcttctatacgagatttagattctcgtatatcaaatatggttgccgctattgcaattgcacctgatgttagttccttggcacattcgttaaatgaaacaaatatccagagaaaggaacttgttttagaagtagaaaagttaaaagaacgattggtatcgttacaagataaaggttcttttgaagtagatatcatggaatttcttatcctgattcaatgggctgtattcacgaatttggaagataacgatagagataagattagaaagataatagattcaatcatctaa

SEQ ID NO: 127887 - DNA, 234 bp, Enterobacter cloacae
atgtatgatgctgccgtagacatgctttcagaggttggctatccaaaaattgatggtaaacatttctggccgaataatgggaaatatgagaaagcagtagttgagtatgaaggtactgagtataaaatttctactaaaggtagattacctaatgcgattacgattgcacttgaaacaacaggattaacacgtcaacaattcatatataagtacagggtcgataaaggtgcttag

SEQ ID NO: 127888 - DNA, 183 bp, Enterobacter cloacae
atgaaaaaagtaacacctaaagatcgcaaacatcatgtagtaaccgcatgtcttaatgacgatcaagtactggtacttaaccagctaattagtagtgggaaagtacagaaggattcattatcagcctgtgttcagtacttaattaatcagtacatgattctacagggcggtggtaatgaataa

SEQ ID NO: 127889 - DNA, 303 bp, Enterobacter cloacae
atgaataatgagtttgatttagtacaagagtttgatgattacacaatagtaggggatatagattatcactacttctattgtgtgaaatataaagaaggttcattagaagcacattatgaacgaattggtgatccagaagtattaggtactatcaaatggaatggaagttatctaatcgacggattaccaatggaaatgtttgtactggctgctgaagatgaacataaagaatgtttaaaccgtttgctaatcgtatgtgagaaggcgagggatgaatataggctaaatgctactggcctctaa

SEQ ID NO: 127890 - DNA, 555 bp, Enterobacter cloacae
atgaaccctaaaataacttggagattaattccaaattcaaaacattactacgtatctgaaaatggcgatgtttataatgataaaacaaaacagtatatagctacgaaaaatccatctaatggatacaaaaaagtttctattaatggcaaatcactatatgtacatgttttggtttgtactttattcaatggcgctaaacccattggaggaagatacactgtagatcatatcgaccgcgataaaatgaataacaaagcaaaaaatttacgttgggtaactcagaaggttaataattccaatagaaagcataaaggtactcgtactcaaaagcttactctaaaacaatggttaatgattgttggagagtaccttaaaggacaattatctcaatatgcaatcactaaatggttttcaaatcaaactggtattattatttgccctcagaatataggtaaattattcaaaggtactacctatacaaaatggtactcaacatatcttacgcataagcaaagacaaagaatacaaagcctaaccattcaacgtaaaccataa

SEQ ID NO: 127891 - DNA, 156 bp, Enterobacter cloacae
atggtttaccaatccgaactgatgatccgagaggtggtgagtacctcaacggagaagagttatataaccttattcgccttattgagagtaacccaaccaaaaaagaactctcagaatttatcaaaaaaatttacccatcctaaattagtacgatag

SEQ ID NO: 127892 - DNA, 792 bp, Enterobacter cloacae
atggatttatcacagttgagtactgtcgaattgatgcaattgaatcaattaaccctcgatgagttagagcgaagggaagtcattcgaaccaggaataaccctgtcagtgagtacactgaatggctggttgctgataaaatgcaaatggaattggcagcaccaagtactaagggttatgatgctactactctcgatggtcgaagaatccagattaaatcacgtaaaaataaccttaaaaacaaatctttagtacttggcatcatcaggaactatgaactcaaccagtttgatgaactcattgcagtaatatataactccgatttctctatacgatatgcgatttctatacctcatgaattagtgaaagaatacggcttttataaccaacatcaaaatggatatacccttagaattagtaactctctattaattgacccgcgagtaaaaaatatcattgaattttttgaccaagaaagccctatcaccaatgaaataacagtggaaaagttagataccaatacggtacgggatgtgcagacgataggaatgcaaacattcgttgagtactatcaatgtgttgaatcaggcatggatgctgtagagcttgttgagaagatgattacagaacattcagaatggaaggaaagtactgccagaactaaagcatcatctatgcgtagagttttcaaaaatggtaagaacattgaagccctcaaaatcatctataactctaatcatccggctataacggatgaaattaagatgatgctgtctacaattttgaatgattaa

SEQ ID NO: 127893 - DNA, 237 bp, Enterobacter cloacae
atgaataataaaactacaatcaatggatttacttacatgatcactcagtatgatgtatttgtacaaaagggatttaagggatttaagggatttaagttcttcggaaatggaacagaaccattcctgaaaagttaccttaatcccgatattgagaagatgacggaaaagaaagtacaggagcaatcattagaagatgaacacattaaaattgtatgggaactaattaaacttcaataa

SEQ ID NO: 127894 - DNA, 2154 bp, Enterobacter cloacae
atggatactaaaaaactactgaagcacgtgccctgggccttactcgggatcctcggcgctttctgtctggcggttgtcgcattacgccggggcgaacacgtaagcgccctgtggatcgtggtggcgtcggtttccgtctatcttgtggcttatcgctactacagcttatacattgcgcagaaggtcatgaagctcgacccgacgcgtgccaccccggcagtcattaacaatgacggcctgaactatgtgccaaccaaccgctatgtgctgtttggtcaccactttgccgctattgcaggcgctggcccgctggtcggcccggtactggctgcccagatgggctacctgcctggcaccctgtggctgctggccggcgtggtgctggcgggtgcggtgcaggactttatggtgctgtttatctcttctcgccgtaacggtgcctctctgggtgagatggtcaaagaagagatgggccgcgtgccgggtaccatcgcgctgttcggctgcttcctgattatgatcatcatcctcgcggtgctggcattaatcgtggtgaaagcgctggcggaaagtccgtggggggtcttcaccgtctgctctaccgtgccgattgcgctgttcatggggatctacatgcgctttatccgcccgggtcgcgtgggcgaagtgtcggtaatcgggattgtgctgctggtggcctctatctactttggtggcgtgattgcgcatgacccatactggggcccggcgctgaccttcaaagacaccaccatcaccttcgcgctgattggttacgcgtttatctccgcgctgctgccggtctggctgattctggccccgcgtgactacctggcgaccttcctgaaaatcggcgtgattgtcggtctggcgatcggcatcctcctgattaacccggatctgaaaatgcccgcggtgacccagtacatcgacggtaccggtccactgtggaaaggggctctgttcccgttcctgttcatcaccattgcctgcggtgcggtatctggcttccatgccctgatctcatccggtactacgcctaagctgctggcgaacgaaaaagacgcgcgtctgatcggttacggcgccatgctgatggaatccttcgtggcgatcatggcgctggttgctgcgtccatcatcgaaccgggtctctacttcgcgatgaacaccccgccggcgggcctgggcatcaccatgccaaacctgcatgagatgggcggtgacaatgcggcgctgatcatggcgcagttgaaagacgccagcgcccacgcggcggcgaccgtcagctcctggggctttgtgatctcccctgagcagatcatgcagacggcgaaagacatcggcgaaccgtccgtgctgaaccgcgccggtggcgcaccgacgctggcggtaggtattgcacacgtgttccacaaagtgctgccgtgggcggacatgggcttctggtaccacttcggtattctgttcgaagcgctgttcatcctcaccgcgctggacgccggtacccgtgcgggtcgctttatgctgcaggatctgctgggtaacttcgtgccattcctgaagaaaaccgactctctggtggcgggcgtgctgggtaccgcgggctgcgttggcctgtggggttacctgctgtatcagggcgttgttgacccactcggcggtgtgaagagcctgtggccgctgttcggtatctctaaccagatgctggccgccgttgccctggtgctcggcaccgtggtactggtgaagatgaaacgcaccaaatacatctgggtcaccgtggtgcctgcactgtggctgctgctctgcaccacctgggcgctgggtctgaaactgttcagcgccaacccgcagctggaaggtttcttcttcatggctaaccagtacaaagcgaaaattgccgccggtggcgcggatctcaccgctcagcagattgccaacatgaaccatatcgtggtgaacaactacaccaacgcgggtctgagtattctgttcctggtggtggtgtacagcatcatcttctacggcatcaaaacctggatgaaagtgcgtaacgctgaaggtcgtacggacaaagagaccccgtacgtgccggtgccggaaggcggcgtgaagacctcttcgcaccattaa

SEQ ID NO: 127895 - DNA, 537 bp, Enterobacter cloacae
atgtcgggaggtcaggctatacttcccgccatgaacatttacattcgccccaccacctgcgacgacatcgccactctgcccgcacttgaacgcgcggcgggccagcgttttcgggattacccggaactcgcctggcttgcagagggcgatgtcatttccgctgagcagcatctcgactacgccggtcgtggtttgagctggctggcgctggccaacgaccagccggtcggttttatcctcgcagagacgcacgcttcgtcgctgtttattgtagagctctcggttcatctggactggcagggaaaagggatcggtcggcggctcatcgcctgtgtggctgaccatgcccgcaaaggggggctgacatcgctgacgttgacgacattccgggacgtgccgtggaatgcgcccttctatgcgcggctggggtttgaatacgtcacagacctcacgcatgagctgcgtcagaaaagggaagaagaggcaacgcacggtttagcgtatgaatcgcgctgcgccatgcgcctgcctctgtag

SEQ ID NO: 127896 - DNA, 957 bp, Enterobacter cloacae
gtgtcattaaaagcaccgttattgctgctgctcgtgctgtccatgaaagcgatggcggcagcatgctggataacctcacccgccgccattaactttggcagcgtcgtggcgggcaatgccgcctcgaccaacaccgaggtgaaatttagctgtcaggccgacaataacggcacgctggaatatatcaacgtctgcctgagcagcatggatgctccgccctttcagatgctctcgaccggggaccaggaggggaaacagtactccctgctcttccgcctgtttaacggcgtcgcgcgttctcaggagctgggccccgccagcggcggggatctcattcagcagaccctgactgcacaaagcaataccagcatcagcggtagctttccgcttatcgccaccctcctgccgggacaaaaccaactgccggcgtaccactattacaactacaacatgaatctgcgcatcgcctggcacagcgccacccgtcaggatgcgctgcaaaattgcttggacggttccgcggagggcgagcaggtgcagggcggcaccaacgcgcaggccgaaatcagccaggggtgctacatagaacgcgtcaccccgcttaacttcggcacgctgagcagcaccgccacgctgcgcccaacgcgttccacggcaacactcaccacgcgctgcccggccggcacggcgtttacccttgctatgggcaacggcaaccatgccagcggcaatcagcggcagctttgcaacgacgaaggccagtgcctgcgctatgggctctggcaggatgccgcggccacgcaacgctggggcgattggcgcagcggggatgcgctggtcgtcgcccatcccacaggcggcacccagagcttcaccgtttatggagaagtcccggcccagcctctgagcggtacgggggagtttattgacgacgtgataattacgctgacttattaa

SEQ ID NO: 127897 - DNA, 2232 bp, Enterobacter cloacae
atgctgacagcccaggctgaacccgccgccgacaccgtacaatggctggccatcacggtgaatcacgctcctcgaggggagctgtgggcctgccgggtagtgggtgaagcgctgtggattgaccgcggcgacctcaaaaagctggggcttcgcgtcccggatgaccacagcgagtgggttgaactgacgtccctgccgggcctgaaggtcagtcttgatttacatgctcagcaggtctccctgaccgccgacgcaaaggcgctcgacggccagcagcgcctgactatcgagaggccgaccgcgcagtatcgctatcccgaggcgcagcccatcagcgcgtttacgctcgggtatgccctttatgccagcgattcccaggggaaccgccagcttaacgcgcagacctcgctgaccgcatccggggcgcttcccggcaccttcagcagcagcttttcaagccatgcgggggaggaaaacagcgcgggccgacccagccacacgcgtcttgaaacccgctggcagtgggacaacgcagactcgctgaccagcctggcgctgggtgacagcatcaccacgggcacccgctggagccggcaggtacgttttggcggtctgcactgggcgcggaattttgagcttgatccgcaactcaacaccgaaccgcgcagccgctacagcgacactgccgtcctgccttcaacggtcgatctttacatcgacgggcttaagcagagcagccagcacgtgacgccgggggattttctgctggataccctgccctccttcaccggaagcggacaggcgcaggtggtcattaccgatatcaacggtcagcgtcgcaccgtacagctcgatctctacggtgcgcctgggatgctggcggaagggctcagcagcggctcgctggatatcggctggatgcggcagaactacgccctgcgatccaatgactacgcccccactcctgtgctcgacgcgggctggcgctatggggtaagtaaccagctgacgctggcgctgcacaccgaacagcagagcaaactgcgcaatgtcgggacaggcgtcgactggctgatctcacccgacatagggattgtcagccagcatgttgccctgagcgacagcccctacggtctgggaaaacagtggggccttggctggcaatggaacggcagcgggacgggcttatctgccagcaccgtccatactgatgccgattttgccgataacgcccgcacgatcggtgccctgccggtcagacgcagcgatagcgtctggctaagccactccgtgccccatttcggtaccgtaggcgcaggctgggtacagcaaaacattcagggcaacaaacagcgctacctcaacgcctcctggtccgtctcgctgcctgcccacctatccaccacgctgagctatacccgttcgtttacggatgcgtcgagtaacgttcagcttatgctctcggtcccgttaggccgtacggataccctctccgttcagaccagccgcgagacgtcgcgcatggattatcgccaccagccggacgatcggctcggcggctggtcatggcagctgggacaaagcgttggtgagcgccgggatacctatgcggacgtgggctatctgggtcatgccggtgagtggcacgtcgggctggagcaaggcgctaagctgggcaaccagtacgcctcagccgaaggcagcctgacgctgctggatggcagccctcatgccctgcgctacagccaacagagcctggcgctggtctccacccacggcgttggacacgtgccggtcatgctggaaaaccgcccggcaggcgaaaccgatgaaaacggttatctgctgctgaccgacctgccgcaataccacagcagcaaagtcagtatcaatccgctggatctccctgccgatgtgatggcccccgtcaccgacatagatgccagaccgggcaacggcagcgcggtaaaggtcgattttaacgtccatcacgccgtgacggttcaggcccggctggtcgacagccgccataagccgctcccgctgggcagcatcgtttcaacgccacgcggcgcgaccatcgtcggacgtgacggtttcatctggcttgaagatccgcccctgccgggtgaactggtggtgaaaaccggcgagggggagtgtcgggtcacgcttccggccccgcgcgccgcgtcatcaatacagaatattggagaacaactgtgtcattaa

SEQ ID NO: 127898 - DNA, 540 bp, Enterobacter cloacae
atgacgcctttcatcccgaatgccggctatcaggtcatcgttctgagcagcaacgcgtttttgtggctcggcctccattcgatagtatcgacggccgtgtctccccgtcctgaagcgtactggatcaataacgttactccagaagggcttcagcgtttgcaggaactgttcagcacgcacgtcgggcagagctggctgttatttacggatacggccagggtcaacgatattaacaccctgccaggcaatgagcggatcagagtggtcccgggaaatgtgtcccttgcccaactaagccactgctttagcgacatggccttctctttagaaaataccgccacgctcacgtaccaggaaatgcgggtttgcatgctgattcaaaaagggttcagcccggtgcgtatcgcacaaatccttaataaatcaccgaaaacgatctacacccacaagcgtaacgcgatgaaaaaattttgctgtcagaacctggcggaattctatcgaaaactctgcctgctggacgctctggccacttctttgtaa

SEQ ID NO: 127899 - DNA, 639 bp, Enterobacter cloacae
atgctaaccggctataagttcgagtccatccgggcactgcgcagtgaaaatgtgattgcctgggaggtactgtccacggcaaagccccacgtcaatcttgaagactactttagctcaatgccttctacacagcgtaaagaacacttctttgcgcagcttcgccatatcatgtcttgcgaagaaggcgacaagtattacctcaacgcgacatcggatttactgctggaaccggacttcctcgacaggctgaaagaagaaaccgcctgcccggagaggctggctatcgaagttaccgatctccctacgatggtacaactcgacgatatgcaaagccgctccctgcgaacaggtatcgcaatgctccatctgtggggcgttgaagtgtgggcggacgacgtcggcgaagacattcttcccgagctgcttgccagccagatccgcttctgcggcgtcaaaattgacaaacataccttctggagcggacgtaccgagcgggctaagttcctgcacctcacccgccagtacaagcgtgtcgccagtaaggtactcatagaaggcatcgaaaccgcgggcgatttcgcgctggcccgcgccagcgtggccgactacggccagggttatctgtggggcatgaaatga

SEQ ID NO: 127900 - DNA, 2799 bp, Enterobacter cloacae
atgagtgttataaaaatagaagtagatggtaagccaaaacaagctgttatttatgataatgtaaagaaaacaataattttctatttggttatttcctttttgattctagctgggatgtacttttcacggtattgcaatgaaccatataaatatcttttgattagcccatctttttataataattcttatctcaactggattactggtgtttggggcagttttttaggaatacacggtactatagctgctttgtctataacctttatgggaatgtttgttgatcaggtttctaagacctctgagcatggtttcgagtctttgtctaaagtgcttttactaagggaatataattttttagggtttagtgtccaatctgtatgtagtcttttatgtggtgtttttttacttcttatcggtagcggtttaattgggtattttatttcatctttcttttcattgtttttcatttttaaatacggaataatgtattataggctttacaatataaccgaggaatctggtgttattaatgggattttgttggactctatacgctctacgggaaaaaaatataacgaggtaaacaatcaacgtcaggaaattactaatgaattttctaaggtgatttctagttgcaattactacagtaatgaccaaagtactttctactggagtgatgatgctataacattaaatattttccctgaaggaaacgatattgctatttcaggttacaaaccaaaggtatttagcgaactttcaaataaacttatggagtttaatcttaaacatgcccctactatatttatttcattgtcatttttatcgcccatatcaacttcctcaataaagataattactactgtagattctgatttaactgaagcgcacatttcagaaattgaatctattttgaagaaaggaataagttatagtattatcccttatgtttatagcgattttaaaaaatttgaagaagcacttgtagaaaacattagaaattgtttactaaatggtgatgagtggtcgttagattttggtgtgcgtatttttaatgaattaacttcaaatgaaaactatataaacacattaaggaatattgatttatcaataacatcatcgaataccaaagatcttgttaagacatcaatgctcgcaaagttttttgaaaaaatgatttatgaggcctttaaccaaaacgatctagagaaagcagcgaatataatgcggtcattaattggacttgcaagatatatttatagcaagagtaatttttccgatttttacaaaagaattttcaggctgtttgaacaccgagttaggtatcgttcggaagaatcaaattatgtgttcttagatttatatatatcgatagttttgcgaaacttagtttataataattatgcagcattcaaagttgatactgattttgtaactaatagattgcagtacttagatcttagtaataaggcagagcatgactcactgaacgaaatgcaacgtaaaatgttacgctgcttatttgaagtaataactttgttaattatgcggatagaacatgttgaaaaaaaggagggtgagtacaaagaagagcttaacgatttgatttctttattgaagtcttgggtgaatgctaagtttttgcaagaattatattataagaaagaactttacgatgtgttattttctattcctcaagagttttcggtgtttgatgcggaaactaaaattcgagaaattcctgatggagaggcgacgtggagatcggtttcgaatgacacatataagatgattgcatttatccttactcaaagttcattcaataataatcaattgaacctcttgtttgttcgagatgttaatgagttcaaagatgcaacttcaatattgacgcatgaattaaactctattgtaaagtacatgaatggggaatctttttctaaattatttacacttatcactaatacagatgtcactgataacaaaaacaaacaacaagttgtgtcaaaactggagtcaattatttcagcgttaaattctttagtattgcgcaacataattgaatcagaattagaaccctcactagttgataaatataaaaatgaaataacactttctgtggagaaactctttgagctaattatgcctttggataatatcgctttaggagtagagataaatggaattgatacttatctcttaataaataaaagagaagtacttccagcaacagacggggtttcttatgaaatgaatattcacaaccatagccaatggttagtatatgaatggattcgaagtgtattgaatagcatcaatgcaaatgttgtgaatattatcaacattaatgaccctgaagatttgttagtcgacaagttaattacaatcgaatatatggttgaagataggagtaatacgtttagatattcaagaggtttaaagattactgataaggaaggtcatctaaaattaaacggttcaggattgtattatttggatttgttaagtaattttgaattggaaaaatcaaatgaattactatctgtaaatattgagaaggttactgatagtaatattgaagtcatcaaggatcgatataattttgaaaatgataatccttatctgtactcagttctatatgccacatttaacatcgttgcggtaccaaataatgtatgtaacctttatttcttatcagaggaggcatgtcaaataatcaatgaaaggcaagaaagagaaatggaacagttgattataggaaacagaaccgagaatcctgataacagcaatgtggcttaa

SEQ ID NO: 127901 - DNA, 453 bp, Enterobacter cloacae
atgaattgctgggcgttttgccagaaccgcgcctcaccggaggagatcgtcgaacactttaatcagtgtgacccgctatttgtcgcgtctattaccgaaataatcgcgttgcaggactatgccaaaaaaatagcggagcgggcatggcgaaccgaagcctggcataacaccacgctcaccggactggttgcagcctattacaatgcccagcgtcagcagggatttattacgaatgtttccgttttgcctgacgctcagcattgcggtgtgggtagtcagctattaattcaaagcattgaacatttacagtccctgggtgtgactgaaattaatcttgaagtcgataagaataacgtgtcggcgcaacgtttatatctaaagcatggatttatcttcggacgatcaaacgcttcaaagataaccatgactttgcagagtgagataacaacatga

SEQ ID NO: 127902 - DNA, 435 bp, Enterobacter cloacae
atgaaatacccgatcgtactgatgttatgtgcttttacagccccggcaatagctgacgttactgactggtcttcagcacttaagggtatcgcctcaggggatgcacactggattgagcaagccccagcgctggctgccgtcgctgatgggaaccaggcgcagcggctagaggatgccctggccgctgcgctcacaacaaacacaaacgccacgctgaaaacgctccgcaccattgacgccggaaaatggccgcacatggtaggcagcgatatcatctgcaccccgcctttagagaaatcccccgcagaaatcgatgcgttctatcaactcacacgtcaggcgctactggaaaacatagacggtgctcattgcctctggatcctggaagcaacaatggaagagctcaaagcagagaaagcccgtcgggctaagtaa

SEQ ID NO: 127903 - DNA, 435 bp, Enterobacter cloacae
atggctattcccgcttatttatggcttaaagatgacggcggtgccgatatcaaaggctctgttgatatatatggtcgtgaaggaagtatcgagataatcggactgaatcacggcgtagtgcaacccaccgacaagcataacggcaaggcaaccagtctacgcgtccattccccctattctttcgataaagagatagacgcctccagcccctatttgtacaaggctgtcagcacaggccagaagtttaaatccgcagaggtcaaatttattcttgagcaaacctcgggagaaagctttggtcgctcagaatttcgcattcatggtgaccacaagtatggtcccgccggttttgcgtccgagggatgcattattctctcaccgtcaacgaggcgtaagattcttcgcgacggcggtgagctagaggttgtacgatga

SEQ ID NO: 127904 - DNA, 1980 bp, Enterobacter cloacae
atgaatatcctcatctctcgctatttacccgccgcgctgcaaagcgatgcccgcgcgctgctctattccgcaaggacatttgccgccgcgatgctggcgtattacatcgcgctgtcgatcggtctcgaccgcccctcatgggccattattaccgtttacattgtgtcgcagacgtcggtgggggcatcgctcagcaggagcctttaccgtctggccggaaccgtaacgggggcctgcgctaccgtgctgatcgtgcccactttcgcaactatgccgattgtctgcagcgtggtgctgaccggctggatcaccttctgtctctggttatctctgctggaacgcacgccccgggcctatgcctttgtgctggcgggttacaccgcgagcctgattggtttcccggcggtctctgagcccggtgcgatttttaacatcgccgtcgttcgggtgcaggagattgcgattggtatcttctgcgcagcggtgattcaccgctatgtattgcctgcgcgcatctccgcgcagttcaacagcgccttatcgcagacgctgcgcgccgcacgcgagcaggtggccgacacgttagcgggcaaacccggtacggtgacgtcgcccctgcattttgcgctgtcgctgcagttcctgcagggaatgagccaccatatcccgtacgatttcgcccttgccgttccggtacgccaggcccgaaaagccattcatgaccggctggcgcggttgattatagtgaactgtgaactgcgtgaccgcttacccctgacggcgacaatgcccgctgaactgcaaaccgtgctggacgatgtccagacctggcttgcctgtgacgatgaagaccagcgaaaacatcgggcagacgctctaatcaagcgttgccagcaggtcgctgaccgcgatgcttctcaggcgctgagcgtggaagacgcggagcgggcaagttttacccgttatctgacagaggccgtgcgccttctgcaacagtgcgatcgtctttcagatgcgatccaccacagccggtttgcgtccgatcgcgttcagagcagcgcgatcaaaggctacgtcttccaccgcgatccgcttaccgctgcgcgcacggcgctgggggcgttcgtcatcatcctgagcggttgtctggtctggatttactccgcctggcccgacggcggcacggcagtttcgatcctcggtgtttgctgcacgctgtttggtagcttcgacaccccggcgccgcaccttgtgaaatacatcattggcagcatctggggcgtagtgataagcctgctctacagctttgcgctacttccacaggtgagtgatttcgccgtgctggtggcggtgcttgcgccagcgtatctgctggccgggtcgctgcaggcgcgcccacccaccacttttatggcaatggggatcaccctgacgctgccggtgttatcggagctaagcgcgcgctacagcggcgatttcgccgcggcgctaaacaccgccattgctctctttttcgcgaccggttttgccgtcatcagcatgagcctgctgcaaaccgtgcaggccgatgccgccatcaaccggctgctgaggttgtgccagcgcgatatccgccgcagcgtgaaaggaaaaatgcagagcgatgaaacccactggatcaatctgatgatcgacagggcggccctgttactgccgcgcttgccacgcagcggacactccaccgaacaggcgcttaaccggctgctgcacgctctgcggattggcctctcggtgcggcacctccaccgtgctgacacgccgccggaggtcaacgcgctgctttatcaactgacgacgacgtcagacaccgccgccttacgtgaacgcctcgccgccgccattagccgccgtttgcctgcggctgatgaacaaacgcggcaggttatcggcaggctggtggatctctactgcgcattacgggggccggacgatggtcaatga

SEQ ID NO: 127905 - DNA, 216 bp, Enterobacter cloacae
atggtcaatgatctcaatgtcgggggcgtattgatccccgggttactgatggtggcgctcgtggcactgatctgcacgctgcttctcctaccgcttttctctctcagcaggctttaccgccgtttgccgtgtcgcccgctgatggatgtttcaacctggatcgtcaccttttacctgctcatgcaggggttaaccgcgttggggttattgatatga

SEQ ID NO: 127906 - DNA, 351 bp, Enterobacter cloacae
gtgatcgccttcacccagcggtttctctggtttcagcgtccagttgcctttatcgtcaataacggttgtgccaagcacctcgtcaccatcataaatggtcacggtgtcgcccggttcacctttaccgctgaataccggacgggtttcatccgtgacgtcaccgcctttcagctggcccgtaatcggcccggtattatcctgggcatcggccatatccggtttggctggcggcgtggtatccacaataatctgaatcggatcggaaggatcgccttcattgccgagcggatcttcctcaacgaccacgacattatgttcaccctcggtaagttcatccttaggtgtaaatga

SEQ ID NO: 127907 - DNA, 867 bp, Enterobacter cloacae
atgatcgcctttagccagaggcgtgtctggcgtataggaccatttaccttcgtcatcaacgatgacggaaccgatcttctcgtcgttatcgtagatgtccaccacgctgcccggctcggcttcgccgctcagggtcggggactgatcgtcggtggtgtcgcctggacctaccggtccctgcttgtcgcccacgttatcattgataacgatattttctgccggagacggtgccgcagtgtcaatcacgatcgggaaggagccgctggtgcgcgcgttgcccgctgcgtcagtcgccgtgacggtgaaggtgtgcttgccatccgccagcgcagtatccggggtgaacgcccacttcccgttgctgtccgccgtgacggtgccaatcactttcccgttgtcgaggatagacacaacgtcgcccggtgcagcgctgccgctcagggttggggtggtgtcgttggtggattcgcctttctgcattggaccgacgtgcggctcggcgttgtccacaacgctgttgatggacggtgcagtactcaccgggatcagcagattgatgtcgtaagacggcgcttcaccggcaacgcggttgcccgccgggtcctgcgtctccagggtcagcttgttcaggccttccgtcagtggggtttctggtgtcaggctccaggtgccatcactgcctaccaccgctgtaccaatcaggtgtttgccggaagagtcggtggtgtagacaaagacggtgttcccggcttcaccgataccgctgataagtggtttgctgtcatcggtgatgtcaccgctggctacattgccctgacgatcgcctacgtcatccgcaacggcggtaatattcagaacatttgctga

SEQ ID NO: 127908 - DNA, 849 bp, Enterobacter cloacae
atgtttgccgttagcatccgtgctgtaaacaaagacggtgcttcccgcttcaccaataccgttgataaccggtttgctgtcatcggtgatttcaccgctggccacgttaccctgacggccgccgacatcatccattacggacgtaatgttcagtacatcgctgcttgccactggtggggtgtagtcggtcaccagcacaaaatcatccgattccggaccggtgttgcccgcttcatccgttgcggtggtggtgatatggtgctcaccttctggcagaggtgtggttggcgtgaactgccaggcgccgttgtcgtccgcaatcgtcgaaccaatatgctcaccgttatcataaatatcgacacggctgcccggttctgcagagccgttgaaggttgggtttgcgtcgtcggtggtgccgccgttgctcagatcgccacgaattgttcccacatcatccgttgcggatcccagtacaggtttttccggggcagtcgcatcaacggtaatatcaaaggacggagaggtcacctcgtttccggccgggtctttggaaatcacggtcaggctgtgatcgccatcggccagatcctgttcaggggtaaaggtccagttgccatccggatccactacggtggagcccagtacatcgtcgccatccatgatggtcacggtgctgcctggcttacctttaccgctcagttcagggcggacatcatcggtcacggtgcctggcttcaggttgcccacgatcgggccctggtcatccaccacttcacccacggtgacctggtttggatccggatcgacggtaaaggagatccccggagacggttcactggtgttgcctga

SEQ ID NO: 127909 - DNA, 654 bp, Enterobacter cloacae
atgatcgcctttagccagaggcttgtctggcgtataggaccatttaccttcgtcatcaacgatgacggaaccgatcttctcgtcgttatcgtagatgtccaccacgctgcccggctcggcttcgccgctcagggtcggggactgatcgtcggtggtgtcgcctggacctaccggcccctgcttgtcgcccacgttatcattgataacgatattttctgccggagacggtgccgcagtatcgatcacgatcgggaagctgccgctggtgcgcgcgttgcccgctgcgtcagtcgccgtgacggtgaaggtgtgctgaccatccgccagcgcggtatccggggtgaacgaccacttaccgctgctgtccgccttgacggtgccaatcactttcccgttgccgaggatagacacaacgtcgcccggtgcagcgctgccgctcagggttggggtggtgtcgttggtggtttcgcctttctgcattgggccgacgtgcggctcggcgttgtccaccacgctgttgatggacggctcggtgctgaccgggatcagaacagtaatgtcgtaagacggtgcttcacccgctacgcggttacctactgcgtcctgggtttccagcgtcagctgattaagtccttccaccagcggtgtatctag

SEQ ID NO: 127910 - DNA, 594 bp, Enterobacter cloacae
atggtgctcaccctctggcagcgcggtggttggcgtgaactgccagccgccattttcgtccaccacggtagaaccaatcagttccccgttatcatagatatcgacacggctgcccggctctgcggtaccgttaaaggtcgggtttgcgtcatcggtggtgctgccgctgctcagatcgccacggctggagccgacgtcatcagtcgcaacaccaataaccggtttttccggtgccacggtatcgacagagatatcaaaggacggagaggtcacgtcgtttccggccgggtctttggaaatcacggtcaggctgtgatcgccatcggccagatcctgttcaggagtgaaggtccagttgccgtccggatccaccacggtggagcccagtacatcgtcgccatccatgatggtcacggtgctgcccggcttacctttaccgctcagttcaggacgtgcgtcatcggtcacggtgcctggcttcaggttgcccacgatcggcccctgatcgtccaccacttcacccacggtgacctggtttggatccggatcgacggtgaaggagatccccggagacggttcactggtgttgcctga

SEQ ID NO: 127911 - DNA, 1050 bp, Enterobacter cloacae
atggataacaatacccgccagctatttgatcagtacatcgcccggcaggcacagctcaacggcgtatcaaccgccgccgttgctgcaaaattcgccgtagatccgacgcgtcagcagcgccttgagcaggccgcacagcaggatgattctttcctgagcaaaattaacgtgtttggcgtcaaccagcagatcggtcagaaagtcctgatcggcagcaaaggcccgatggctggcgtaaacaacagtgttaccagtcgtcgcaaccctggctcaaataattcaatggagccgttcgattacatgtgccgcaaggtcaactatgactacggtatcagctatgaacagcttgatgcgtgggcgcacatgccggagttccagccgctgatcagtaaggcaatggcccgccagatgtcgcttgaccgcatcatgattggctttaacggcgtgaagtacagcgacccgtctgaccgtgccgctaacccgctgttgcaggactgtggtattggctggctggaaaaaatccgccaggaagcgccgcaccgcgtcatttccagtgtgacgatcacctcgcgcgatgaagataacaagattgtcgcaaaaggcacctacggcaaccttggcgctgcggtgtacgacgccaaaaacagcctgatggatgaatggcacaaacgtaacccggataacgtggtgattctggcgggcgacctgctgacgagcagtaatttctcggccatcaacgcgttaagccagaccaacccgaataccgaaatgctggccggtcagcttattgtcgcgcaggagcgcgtaggcaatatgccgacctttatcgcgccttacttcccggtgaatggcgtgctgatcacgccgttcaaaaacctgtcggtgtactaccagcgtggcggtctgcgccggacgatcaaagaagagccggaatacaaccgtgtcgcaacgtatcagtcgtcaaacgatgacttcgtcattgaagattacggcaatgttgcgttcattgacggcattcagttcgcccaggccgaaccggcaggcgagtga

SEQ ID NO: 127912 - DNA, 507 bp, Enterobacter cloacae
atgcgcctgcgccttcttccagatggtcgtgcgctgctttcgcttctggccgtccgtgaaccacatcagtccagtacaccccacattaagaccggcatccgtcatggcctcaaaggcagactgcggcatatgcgcgccttcaaaattctggttaatgcagttttcagcgtgccgcatatcgttaatccagcgaccggcgatctcgccgtcgctgtactcacgcttttcaacacgtcccgtcgaaccaatcccaaccgtcagcacgccagccgtgcagtagtagggcgtattccggcagtcttcccagccagcaatcttttgctggccttcaggcgtggtgcgcaacgcgccaggactcagcgttatacccagcgcaacaatggccgcaatggagcattttttaataagctgtttcatcttccggctcattctgttgcagaaggtcaagcgcccggcgctctgactcactcatctgcctgtgttctgcctgctcaaggatctggttaa

SEQ ID NO: 127913 - DNA, 315 bp, Enterobacter cloacae
gtgaatacatgcgcgatgccatcaaagacgatacgtgtgccagtactgttgtgcctgattctgtcagtaacagcctgcaacaccgtaccgccgcagccgcaaatgaaaatcgtgcacgaaccggtgccggaaagcctgacggcagcaacgccagcgccggaactgaccgccccggtaacgtggggcgcgatagccatctggagtgaccgcctgcgcgatgcgctggatacctgcaacgccgataaggcggcgatagccgatctcgatctgcgccgcctgaaaagactgactgaccacgcgagggcaacaccatga

SEQ ID NO: 127914 - DNA, 603 bp, Enterobacter cloacae
atggcgcatcaaccgcttcgctatgccgggcagtacgctgacggtgagacggggctgcactataacctgttccgctactacgacccgcaggtcgggcggtttattgtgcaggatccgattgggctgaatggcgggtggaacctttatcagtatgcgccgaatccgttggggtgggttgatccgctgggtttaacaaatttaaatagcgttcaacagcaaattgatgctgttcttcgtgagcatttaccagcaatacaagcgattgaccctaatgcaactattggttaccgaggaagcgtagcaagcggcataagtaaagcacatgatccaaatttatctagaccaataaacttcaataattttgatgtggatgcttttattcaatcggattatttagctaatgaacctgtatttactaacagacgccgtgatgcatcgaaaattgcaggaatgagcgaaatagaagcgtctatagatagtaaattacgttctaccctacctggtttaagagaagaacctttcggtttcagaatttttaagagccatgagttaagcgacatggcaaggcgtggtgatgttcagcacaaagtcggctgtaagtag

SEQ ID NO: 127915 - DNA, 345 bp, Enterobacter cloacae
atgagtatacataaacgatggttaagctttgtattgcttgaagatatatcatttaaagagctgcttacaaagttagagcaggtgtttgaacgaacactagtttgcgaggatgatgaggggcgttatatcgctaaagctgagtgtgatggttttactgtaacgcttatagataaagaagataggttaagtgaatttttatgcgatgaaaactatagccttgaaataatgataacatctgatgactattttaattccaattttgaagatttcataaaggaaactttaaggaatggtaatataaaatgggaaagatcagtctgggctcctgatgaaatatctcagtga

SEQ ID NO: 127916 - DNA, 387 bp, Enterobacter cloacae
atgtcacttgaactggatttttatgaagacgatgaaggtgtttcagtagatttagtattatccgtatttggtccttctctcgtccagtgcataaaccttgaatctgattcggtcgatgaaaaaatgaaaaaagacatcgattttcttattaagaaacagaaatatttttccgagaaaatcgaaactgaaacccagacatatagcaagcgtatttatggtgcggatgcaaaagacttgattttgctgaaagtttatctttccccagacgaggacaatgaatttgggttcatgttctcgaccaatttagatgaggatcatgggattggcatcaaatttaaagggcttgaagtgaagaaaattggtagtggcgaaacagcatttttataa

SEQ ID NO: 127917 - DNA, 264 bp, Enterobacter cloacae
atgctaaataaatttgagcaatgggtgattcaacaagatgattatgttgtttctcataatcaaaatgagttatccaatagtctagtgatagatttcgaaaacgaaaactatatagcaagatttacagtgtgggatgatttgagctgtatgtcagaagtaatggatgtgaatacaggtttgtacaaactcaataagcgaaatgaatttttaacgtttgatgaacttctggatatatttgaaatttttcgaatgagtatacagtag

SEQ ID NO: 127918 - DNA, 528 bp, Enterobacter cloacae
atgatccacccgcgccagcgggctccaggcttcattcgggtcgtaaatatacgtactgcacagcccgctctcctgctgctcctgcaacaggcggtagccctgccacaggaagcgcgtttcggtggtgccgtgcgcggtggtgacgactttgcgggtacggcggcccagcgcgtcgtagtgatagcgcgcctcaaaacgtcctcccggcccggttccccgggcggacaccagacggttctcggtgtcatacgcataatgctgttcatacagcccgttgcggcggctgaccaggttgccccagtggtcgtatttcatgaacagcgcctgccagtgctgcaggcggttatccgtgaccggtaccgcatcatcattggcggcgaggttatccgcggcgtcatagctgaactgcgcgcggctgtgcccctggcgggcctcgtagtgcttcagcagacgcccggcagcgttatgacggtaagcgatctcatcgctttcaatacccagggcaacgccttcggcggttgcgggtga

SEQ ID NO: 127919 - DNA, 324 bp, Enterobacter cloacae
atgggctttctgcttatttgtgagctgcgtaccttcccgctgcgcctgattcaggccttcaagagtccggctggcgtcgtcgattttgcgggaggtcttttgtacgctgtcgcgcagccggttgaaagtgcgggactgactgtccagatctttaatgctggactgcgtttttttgatggactcagacaaaccgcccgcactctggcgggcggaattgaccgggcgggtaagtttatcgatcgcgctgaacgcgacgcggatattaaggcttttcactgtcactggctccacttcggacagccgcccgctcacgccaggctatga

SEQ ID NO: 127920 - DNA, 321 bp, Enterobacter cloacae
atgaagaaaaacacacaaaatatagatgaattaaaagagatcctgacctctatggaggaaattgttgtcgtaatagataagatcggatctgggtttattgaagaaaatagaacggcatcagccctcttgcttttttttaatcaatgcaatgttttagaaaaattatctaaaaccagaaagtatctttatcgggagttagagtcaaagatatctgctgaggaatttgatgaatggatagaaaacgatttgcctttatggaaacctccttacgataaaagtgaaggagagatattagaaatgttgaaaaacaataaaaattaa

SEQ ID NO: 127921 - DNA, 294 bp, Enterobacter cloacae
atgagtattgaatatcatttgattgtaaacagttctcatcaagatgatatcttcttgggaattaaagttgctttcgaaaagagtgattcatacattttgagtcattcttcagataatgcatttgggttttctataaaaggttcttcatctgactggggggctgatttcgaaatagcaaagaaaaaagatgagttttttattcaaattcactccggtaattataagaaaattctgttagtaatagaagattttctcaacaataaagcaatctcttttgagttggaagaagagtaa

SEQ ID NO: 127922 - DNA, 339 bp, Enterobacter cloacae
atgaaagtaattaccttatctattgattttaaagaaataaatgatgttacagaatttcatgatagggttaagcagttgtttggctttcctgatttctatggtaataatttccatgcgttcatagattgtctgactagtttgcgattcccagaagaggggatgacatctttaaacctaaagcaagacgagtttttattacttaagataagtaatatcaataacttggatgaggaattgaagcatgattttcttttgtcaattcaagagataaataatagaagtattttatttggtgaggagccaactatcttgttattgctttgtacgcaacataagtga

SEQ ID NO: 127923 - DNA, 234 bp, Enterobacter cloacae
atgccccacaacattactcagcccctgggtcagggcgcgaagctggttgttgacgagatcgttaatctggatacggaagccttcccaggcgctgtccagattcttgagatcgccatcaaggttatccgccattattttggcggctttctgtgcctcacccttggcgtttttcagttcaccaagcaatttctgaagttcgccgctccctgccgacataaccagtgcctggaatga

SEQ ID NO: 127924 - DNA, 405 bp, Enterobacter cloacae
atgctcgcccagcagggttttcactatctgcggcaccgtctggccctggaagatacgcaggttacggtcgcgcttcatcggccacaggtccggctccaccatcagctggtacaccgcatagcgcgtccccgtcagctcaacggcgctcaccgccacgcgggtgactttgccgttgatgtagcgcggggtaagcaggttctgggtcgggatggtcaccgtgaccggctggcccagcagtttgctgcggtcgatacgcgcatccgtgccgagcagggtcagcgtcagggcgaacgactcggacatcgcctcgcggccggagagtttccagaagagcagcccctcgaccgggagctgaacggtaattcggttgagcataatcgttattccgtaaatgcaacatcttag

SEQ ID NO: 127925 - DNA, 435 bp, Enterobacter cloacae
atgaactggtttttcttttttttctttttgatcctgacacttacgcttatctggaataacaataacctgtttaataagaaacaatggatcaaaacgggtctgatgctggtacttgtcctgctttctacagtcggcattggttttcttttgaagtggctggctcagtcattttccttatttccggtcgcggtggctaaacactactccatcatcatatctatgtccctcctgtgcgtctggggtatgaaatttacggtcgttttgctatgcacaatattgtctggtgttatggtggggcataaaaaatacaacgctccgaattatgaaaaaatctcccgggtcacacacaccgtagcgccgcccctgtttatctttgccaaactccttctctcgttggggtgtgtccttatgttttcaggtttgtggcttaagtaa

SEQ ID NO: 127926 - DNA, 309 bp, Enterobacter cloacae
atgtgcgtccgcgaatatgaatatcaagtgccatatggggtaattgaaggtaagggaaatcaaattacaagcatgattgagaaaccggtacaacgtttctttgtaaatgcaggcatttatgtcgttgagccagctattttcaaaaacgtaccagaaaattataaagttgacatgccatctttgctagaagcacatatcaatgcgggaaaatcagttatgatgtttccgattcatgagtattggcttgatattggacgtatggatgatttcaaaaaagcacaattagattataaaggtctttttaaatga

SEQ ID NO: 127927 - DNA, 426 bp, Enterobacter cloacae
atgccctttcgcaccgtggtggcgtcctgtgccgtgtatttcccactggcaaggtcatacgccgccttaaccgctttcggcgtcgctgcgagcgcctcagatgtgctgtcggtcgagctactgagctggacgatagcctttcgcgctgtggtggcgtcctgcgccgtgtatttcccactggcaaggtcatacgccgccttaaccgctttcggcgtcgctgcgagcgcctcagatgtgctgtcggtcgagctactgagctggacgataccctttcgcgctgtggtggcgtcctgcgccgtgtatttcccactggcaaggtcatacgccgccttaaccgctttcggcgtcgctgcgagcgcctcagatgtgctgtcggtcgagctactgagctggacgataccctttcgcgccgtggtggcgtcctga

SEQ ID NO: 127928 - DNA, 657 bp, Enterobacter cloacae
atggaaggcattggctgggttctggaaaaactcgaacttatcccttctggtctggaagctgcacgcctgaaagctgaaagccttaaaaaagacccagtgatgtgggagtgggatccgcaacagaaaaaaatggtgcaaaagggctggaactggtcgcctgcctcaacaggtaaaaacaataccgcgaacaccccaccaccgggagcaccgcagcccacatccccgctgaccggcgataacggcactatgcgcaggttgcagagtatcgacagcaacaccaaaacgacagccgacaacacgaagaagatcggccccggcgatatcgtgtttaaaaacctgccgcgtgcgctggcccttcgtggggaatggaaggagtcgcagctggccagcacggtcaggaacaacgggttaagcacacgtcccgcagtgttagcagcatcacttcccgttaaacaggctgaacttctgccagtcagccgcagagccagcgatatcccggttgccagtggcggttttacgggcgaaatccacgtacatctgcacggcgttgaccggcaggacccgcgcgaaatgggcaggattatcgccgatcaagtaagtgccgaacttgcccgccgtgaacggctcaaccgtggcagtttcaaagacagagaataa

SEQ ID NO: 127929 - DNA, 657 bp, Enterobacter cloacae
atggaaggcattggctgggttctggaaaaactcgaacttatcccttctggtctggaagctgcacgcctgaaagctgaaagccttaaaaaagatcctgttatgtgggagtgggatccgcaacagaaaaaaatggtgcaaaagggctggaactggtcacctgcctcaacaggtaaaaacaataccgggaacacccctccaccgggagtaccgcaacccacatcaccgctgaccggcgataacggcactatgcgcaggttgcagagtatcgacagcaacaccaaaacgacagccgacaacacgaagaagatcggccccggcgatatcgtgtttaaaaacctgccgcgtgcgctggccgttcgtggggaatggaaagagtcgcagctggccagcacggtcaggaacaacgggttaagcgcacgtcccgcagtggtagcggcatcgcttcccgttaaacaggctgaacttctgccagtcagccgcagcgccagcaatatcccggttgccagtggcggctttacgggcgaaatccacgtacatctgcacggcgttgaccggcaggacgcgcgcgaaattggcaggattgtcgccgatcaagtaagtgccgaactggctcgccgtgaacggctcaaccgtggcagcttcaaagacagagattaa

SEQ ID NO: 127930 - DNA, 660 bp, Enterobacter cloacae
ttgcatcattttagtgatccaatattgtcaaataaagctgattatacaaagggaaaccgattttataacccagaagatgttaagtcgatgcccaaaataagattattaggtaatcttggattgtctttcatgcagaaaatatcttccggttattgggatctcttcgaccctactaatggttatacagcaattaatttgaatgttctcaaactattaaatctcgataagatttctgagcgatatttttttgagtcagatattcttttccgtttgggtaccattaacgctgtcgtgattgatattccaatgaaatcagtttatgcagacgaaatatcaaacttaaaaatatcagatatactctttaaatttatgaaaggtcatattaaaaactcaatcaagagaatcttttataaatattatctgagagatttctctgttgcatccgttcaattaccattaagtattttaatgatgtcatttggtattattttcggtctttcagaatggtataattccataatttctgacactgttgcatcgagcggtaccgtaatgcttgcatcgatgccaataattattggtgtgcaattatttctatcgttcctctcttatgatatgcatacgcaaccacaacgtccattggcagaaagtctggagtga

SEQ ID NO: 127931 - DNA, 1359 bp, Enterobacter cloacae
atgggtattaaatcacaacggattatttttatattcttagttattgttgttgtcgcattttctttattaaaaaaacctttcggaaatccagatgaaggggctcatttcctgcgagcctatgaagtatcccattttcatttgataaatcgtgaaggggatattggtgttggtattaattgccaagattatttttcagcagcaaaaaaacattttttaattgcttggtaccaacctgaaagtgaaagcttagatgcgaattgtatggtgaaatctataaattctgctggcacttaccccccgcttccgtacctgccattggcgatttctttatctgtatcgaagctcatgcatttaagtgttgagcattccgtttattttatgcgtattgtaaacggcttttcttgtttgtttttaatttatttttttagctctcgagttttgcttgggcaacattcggtatcagtcctacttattttggctatgttacccatggctttatctctatgggcttcagtcagtgctgatgctttaactctggcgctttgtctatgttttatattctatatattgagttttgattatagtagagcgtcgctgataaaacgaaaagaatggatattactttaccttctcgcctttgccatagggaatagtaaggtaggatattcaatgattactataactccattggtgctacatttttgctgtaatggcttcatggtttttaggaattctttaatccggagtactttgcttttaatgggatgtgtacttcttgcagttggaacgagtattgtttgggtaaagtttactgacaaaagtttggtttatttaggtaatggtgctgtaccgctcgaacaaatttgttttgtgttgaggaatccactttactttatttcactttctttatcaactgtgtttgatgttaaaaaactttactcaactattctcccattacattatggcctaaatggcatgtatatgataattgcattttggttgttattggtgaatcttttctttgcatgcttaacaaatccacattttaatgtgcccaataacttttcatgtgtttctcgcacaagttgctttgcattctccttaatgttgttctttatttttggaattgttctttcattgccgttatatcttacttataacccagtggcatatgataatttactcggctttcaggggcgttatttacttccgattttgcccattttagtggtttcattgctggcgatcagcatgtctaatctgataaataatgacttaaaacagattttatcattaaccaccttcgtcattcctgctgttacaaatatagcaatcataataagaatgttaatcagatag

SEQ ID NO: 127932 - DNA, 375 bp, Enterobacter cloacae
atgacaaataccatcccatcactgactgactggcatgctttgcatgcgctcagcatttccatgctaaatctcgcccattcaggcaaatgggatgaattaattgaacaagaagtcaaatatgtgcaaattgttgaaagtattgcacagaatcctataagctccaacaatatgctgcagatcgagagagcgaaagagttgctcaaactggtgctggaaaatgaggccgagcttaaagttttactgaacttgcgtatgaaagagttgcgtgagctcattgataccaccggcaaacagcaatccatcacgtctacctatggaaagctgtcagggaatattctttacccagaaagttttacccgcgacacacaactatga

SEQ ID NO: 127933 - DNA, 411 bp, Enterobacter cloacae
atgtatagccaaaatggtgcactttcatatcaaaaggtgggcattgaaagcgctgtgatgagcgctagcccccatcaattaattgtcttgctttttgatggggccatgagcgccctcgttcgggcgagactttttctggatcagggagatttgatatctaaaggagaagcgctctcaaaagcaatcagtatcattgataacggtctcaaggctggacttgatatggatgctgaaggtgaactgtccaacaatttggcatcgctttacgactatatggtacgccgattgttacttgctaatatgcacaatgatgtggagaccatcatggaagttgagggattactgaacaacatcgccgacgcgtggaaacaaatcggtgaagcgccttctagccaccaggatatgcgttaa

SEQ ID NO: 127934 - DNA, 1437 bp, Enterobacter cloacae
atggctactgttgatttgagtaatttgggtgttggttctggtttgccactcgctaccctatataacaaccttgaaactgctgaaaatactaagcttagtgcgattaccaaacagaaaacgacttatacagctcagctcagcgcctacggtaagttgcaaagcgccctgacgaatctgcaaacggcaacaactgcgctgggtaaagcctcagtatggaatgcaacctccgtcgctagtacgaacacagcgttttcagccacaacctcaacggatgccacgacagggtcttatacagttaatgtaagtcaggttgctaaagctcaggtgttgatgtcaggaagtatcgacagcaatacaaaacagttgggcggcacgacctccggcggcactcgaactttgacgattacgcaacccggtactaaagatccgctaaaaattacactttcagacgcgcaaacatcactgaccaacatcgcaagtgaaatcaataaagctgggggtaacgtttctgctaccgtcatgaaagcggatgatggggaatatcgccttttcctgacctcaaaatcgacaggaaccgatggagatatgacggtcaccgttgatggtgacgacacgctacagcagttgattggccacgatatgtcgtcaagcgcaatgagcgtacaaacaccatctcaaaatgcccgcgtatcaattaacggcattgtgatcgagcgttctagcaataaaattgacgatgcattaactggcgtcacactcactttgaaagccaaaagttcagcagatgaaactttggacgtaacgcgttctacagatgcaacggctaaagcagttaacgactgggtgacggcatacaatgcacttcagtcgacaatcgcgagcgtaaccaaatatagtcccgtagaagcaggtgcagacaatcagtcaacctctaacggcgcactgataggtgacggcacggttcgaagtgtacaagcacaattgcgtagtcaactgacgcaggtgcagtcaggttcgtatgccatcatggcacagtttggcattacccaagatcctaaagtgggatcagatggttctaccggcaacctgaaagttgacaccgacaaactaaatgccgccttgacaaaaaaccctgaagcagttcaggcctactttatgggcgatggtaaaacgacaggtctggcaacaacgatgggtaccatgctaaccaagatgttggatacctcagccggtagcgaaggcgttattcaaagtgctcaggacggtattaatgccacgattaaaactctagataaacgctataccgcaacggaagccagcatagaagccacaatggctcgctataaagcgcaatttaccgcgctggatagcattgtaaccaaaatgaacagtacctcatcgtacctcacaactcagtttagtaagtccagtagttaa

SEQ ID NO: 127935 - DNA, 861 bp, Enterobacter cloacae
atggcagttatcaatactaacctgttgtccctgactactcagaacaacctgaacaaatctcagtcttccctgggcactgcgatcgagcgtctgtcctctggtctgcgtattaacagcgcgaaagacgatgcggctggtcaggcaatttctaaccgcttctcttctaatattaagggcctgactcaggcttcccgcaatgcgaatgacgggatctccatcgcgcagacggctgaaggttcactcaacgaaatcaacaacaacctgcagcgtattcgtgagctggcggttcaggcacagaacggcactaactccgcttctgacattgactccattcagtctgaagtaaaccagcgcttgtctgaaattgatcgtgttgcaagccaaacccagttcaacggtctcaaagtactgaactctgctggcaccattagcatccaggttggtgctaacgacggagaaaaaatcgacattactatcggcgacaaaactaactggagccttctggctgcgggtgctgctggcgcggcaggcggggctgttgctgcttctgaccgtacagtcagtcaatctggtgttgacgttctggcaacgaatgttctttctaccattgataaagcattaaaagctgttgataatcaacgttctgacttaggtgcgattcagaaccggttcgagtccaccatctctaacctgaacaacactgtcactaacttgtctgctgcacagtctcgtattcaggatgctgattatgccaccgaagtatcaaacatgtctcgcgcgcagattctgcagcaggctggtacttcagttctgtctcaggctaaccaggttccgcagaccgttctgtctctgctgcgttaa

SEQ ID NO: 127936 - DNA, 3432 bp, Enterobacter cloacae
atgaatgatgcagaaaaccttaccctaacgacaaagctctctatcacacctgaattaagttggacccccgctcaggttcatgctgcatgcagcctatataatattaattccccaacagttaaatattctcgcttgctggtattgggatgcggagggggagatgagcttctgagcatcgcaatggcatatccgtttgcgagtatagtcgggattgatctcatcactgaggggaatgagatacagcagcaaaagctgatggttcatgctccagccaacttaaaactctatgctttatccgtagagcaaattttaggccttgaggataagggttgggattatgtggtcattcataatactttctcttatttaaaccgacaggtatcctccgcacttttgcagcatctaggcggattgttggcgaataatggtgtcattctcttccaatgggcgagcctgccgggagcggcacacttggatacgttgcgagatgcattgcagatatacagtagtcaggtaacttcacttgagatgcagctagcccgagccaaactaatgcttgcgagtttatctcttgccagcaattcattggcgatgcgagaagaactgaataaaagcgaacgactttcggatacactttttgctcaccactacttggaaagctctcgtgacagcgaatatctggttgagtttcactcaagaattaataatcttgggctctgttacgtgggtgacattgatacagcaagcgaactgcctgagagctatgagctgaaaattggagaactccatgcggcgcttggagaaaagcagcagaaggtgctgcttcagcaaaacctggatctgctgacttaccgtccgggacgtttcagtattttgacgagtgaaaaaaatgcggaaaaagtttctctccttcctctaagaagtgagttccaaaaaatgcgttttgcgggatcgttcagacgtaccgcgagtgacgatcgaaacgtctactcttctcttgctggacacgatgggcttaaagtcgcaacgacagatgaagttacgctagcagtacttgatttacttggtgatgcatggcctcgaagtgtaacttttgaacaaatcgtctttcactgtgagattgtcggtacgcaagacgcggaggataacaggtcggcgattgagaatatattgtggactctatttctaaagcggcttcccacactacatatctgtaaaggactggatgtttacagcacagacgaagacctacatgtgcatgtcctgtcatcggtcacagcacagttagccgccaatcctcaggctgtgtggttaatcaatggctggggtgagcgcgtaagactcactgaagcagaacgtcgtcaactgttaacccctattgtggtggaaagtgagagctgggccgtactcgattctctctattttaaaggccttttgaatgctggtggagttggctggaaacattttctgcaagagatgattcgctgttgtcctccaacagctatatcaaaaatggcaagcgccttatttctgtattccagtgatgagagtgccttcggttttatgacgaatgagcagagaaaagcggataaagtaaagaacgtcgccgaatttgttgaagatgatgttgaactgacaaatgagcagctacaggttattcgcaactatacactgcgcggacagtacagcaaagcatatgatgtggcgtgttccttacttgagggaagtactaatactggggcgaaagagtatttcttgtgtggcctggctaagagaataggtgactatgataccgcactggtgaggctctcgagagcgttatcataccattcaactagtttgttcctttattctgaactggcatttgcatttgtatcatgtaaatatcactggcaagcttggcgtttggccagttcaattcttcgctgtaataaaaagagctccccagaatggtatttgttagcgtcgattcattatgattttaaacggtttgagcaaagtgaatattgtgcacgtaaggcttttggcctagcgcctgaaagtaaacttatcacaacattacttggtggagcgctatgtgaacaaaccaaactagatgaaggaatagcgttccttcgcaaaggaataaagaaaaaagagaccgattatagtcttatgacaggtcttgcatttattttgtcgcatagtgcggaggctagcttagaagatattcttgaaatccattacgattatggcaagcaggtcatgaaatgggcgcatgcccaagatttctcaggatatatcgagagggataaagatccagaaagaaaattacgtattgggtttgtttccggggatttccgagaccgtcatccggtaggcttctttttctctcccatttggcactcattagatcgtggaaaatgtgagcttttcgcatatagcaatataccggcatctcatgagaatgaaggtacgttacgctttaaggccaccgccgatcactggcgcaatgtacgacatattagtgatctcgaaatggctgaaatgattaaattggatgaaattgatattttggtcgatttatctggttataccagtgatcatcgcttaccagtctttgcactcaaacctgcacccattcagatttcatgggtaggctatcatgccacaactggacttgaggctatggattactatgcaactatttttccagtgaaaaagtcagccgatttggagtcgcaattcaccgaaaagctgatctatatgtatttgcctaaaaactttgaccagaccggtgaaaatgtggatgtgaatacgctcccggcatttagcaataggtactttacttttggtagtttcaatcgtacaaataaattgaataatcgagtttttgatgcctggacggcagtacttaaacgggtacctgattccagaatgattgtgtgtaatatgccaaaagtagtctggaaagatgtggcctcgcaatttaaccagcgtgggattgactccagtcgtttcgagttgcgtgaattagccgatatgaatacctatctcaaataccaccatgacgtcgatctcctgctggatacttttcccttcaccggtggtaccgtaacaagtcatgctgcctggatgggggtgccaacagtgtcctttgccggcgagacgttggtatcacggcaaggggctgccattatgtattctcttggtcttccacaatttgttgctgagaacgtagatgaatatgtgaacatcgcggtccaatgggctgataataaacaagaattgaataagataaggcagtcgttgcgctcacggatgaatattcaaagtgatactaagcagcaaatcggtaacatggtcgaagagatgtttcggacatgctggaaaatatattgtgatggcaagcaacctgaaagcttctcaataggtgaactcccgaacatttaa

SEQ ID NO: 127937 - DNA, 240 bp, Enterobacter cloacae
atgaggacttttatagaaatcaccttcagccttgcaatcggtcttatcagttttcttttatatacgcgctggctttttattttgatacctgtcgaatgggcttatgccgtgatggaccatttcgggacatacgggatagaagaactggaggatacgttagtcgatatcgcctctttgtttggattgcttccggcaattcttacaggtttgttagtaagaaaagcagtaaaaagaatgtga

SEQ ID NO: 127938 - DNA, 480 bp, Enterobacter cloacae
atgattattgctcgctatgcattgaatggcttaccgtcatctattcttaccgttccgggtataggaaactttccggcattctcaggccagctctatggcagaaacaatccgactatggcaagcaaaccagaaatcggacctatcccgccaggacgttacttcatcgtgaaccgacagagcggaggcaggctcggaggactaagtgattttgccctgaaaaatatttatggcaccgatcgctcaaaatggtttgccttatacaaagatgactggcagatagatgatcaagtatttgttgaaggtgtccggcgtggccatttccgcctccatccgataggaccaagagggttaagcgaaggctgtataacccttcttcatctgagtgactttgattacttgcacgaagctcttatgaaaacaactatgatgccggtaccttgcacgagctttaaagcttacgggacaataacagtaacatga

SEQ ID NO: 127939 - DNA, 492 bp, Enterobacter cloacae
atggctatacccgcatatttatggctcaaagatgacggaggtgcgaatattacaggttctgtagatgttcagcaccgtgaaggtagcattgaggttttatcgtttggccatggtttacacattccaaccgatggcaatacagggaaactaaccggtacccgcgtccactccccactaacaatcgaaaaagagtttgattcatcctcgccttacctttaccgggctgtagcaactggccagaccctaaagtcagctgaaatcaaatggtaccgtatcaacgatgcagggcaggaagttgagtatttcaacatgcttttagaaaatgtgaaaatcgtagggataacgcctgtaatgcataacgtaaaaaatccctcaatggaaaaacacaatcaccttgaggcgatagaactgcgttatgagagaatcacatggaagcactgcgacgggaatatccagtttactgacggctggaatattcgggttacagcatga

SEQ ID NO: 127940 - DNA, 870 bp, Enterobacter cloacae
atgctggcgctgtgttatatcgggttgcgctttatccatttcggggcgctgatgctgatttttggcaacgcgctttacagcgtctggtttacgccttcctctctccagcggctgatgtcccgacgtttccagctgcagcagaaagtggcggcttttgtgagcctggcggctgcactcctgatgtttatgcttcagggcgggcagatgggtaacggctggggcgatgtatttgccccacaggtctggtccggcgtaatgaggacacagtttggcggcgtttggctgtggcaaatgattctcgctgcgatgacggtcgctgcagcatggctcgcgccgctgaaaggttcgcggctgctgctgctcgccatggggcagcttatcctgctggcgggggtagggcacgcggcgatgaacgacggtccgatgggggcgttgcagcgccttaatcacgcttttcacctgatctgtgctgctacctggcttggcggattactgcccctgctgttctgcatgcgtctggcgaaagggcgctggcagaatgcctccatctataccatgatgcgcttctcgcgcgtgggccattatgcggtcgcgggcgtgctgctcagcggagcgatcaatgcgctcatgatactgggcgtccatattccctggcaggctgactacgtgcagtttttgttgttcaaatgtgcgctggtggcgttgatggtggtaattgcgttggcaaatcggtattttctggtgccacggtttcgtccggagaccgggcgagcacaacagatttttatcaggatgacacaggcagaagtggtgctgggggcgctggtactggcaacggtcagtctgttcgccacctgggaacccttctga

SEQ ID NO: 127941 - DNA, 645 bp, Enterobacter cloacae
atgtatcagcgaattgaaggtggaatgtggcgtcacgtctgggtggtcagcgatatacatggctgttatcagcggcttatggatgagcttaaacgccgtcattttaatccgtatgaggatttgctcatttccgttggggatatgatcgatcgcggtccggacagcgttaaatcattacagcttatcaatgaaaaatggtttcgtgccgtccggggcaaccatgagcaaatggcgctcgacagtctggataataacgatttttcactctggacaatgaatggcggaatatggttcaggcaacttgaacgggaccagcaacagcttgcgctatcgttgctcgaggcctgtcacgatttaccgcatatcatcgagataacctgtgcgaacggtctgaacgtgatcgcccatgcggattatccgggagcggaataccgctggcaaaaaccggtgagcgcccagcgcgttttatgggatcgcgatcggttgatggggttcatggtgggtaaagggcagggcattagcggtgcggatcatttctggttcggacatacgcccgtcgacagaaggtatgattttgacaatctccactacattgatacgggcgccgtatttgacggttactttacgctggcgcagctgcagtaa

SEQ ID NO: 127942 - DNA, 252 bp, Enterobacter cloacae
atgaaacccgttaatgtgatctttatattttccaatgagcgcatccattttctcagtgccattttcagcatcaaaaggtatccactcaatgaatgcactcgcagtgcgagcggcgtcagtagaaaactggctgcctttatctgccacctgcgcaaggcagcgcgcaaggacaaaatctttaactacctgccggtatgtttgctgctgataaaaatcaacgtatgggttatcgccgcgagcagaaaaacataa

SEQ ID NO: 127943 - DNA, 408 bp, Enterobacter cloacae
atgattatgcaaaagttattcggtgtgtttgcagtcacgttaatggtcagcgcctgtttgtctcatccagaacaatatcagtcgctttcgctaacgctgaaaaataatgaaccctgctttgctatccctgctaattccgggttagaagcgccggtcaccagccattcacccaccattatgaaacgcgcgggaaatgaatggaaagcggtatcgccgccgtcaacgtttagccctgaagtgacgttaacgacccaacagtgtcaccagtggcaggggattgcgtggcaagccggagaatatgatgttgccctgaaggtgtcagggaaaaacgattctattcgctatgcggcccgcttcaccttacaagaaggtccctcaggccagtttaagcttacgcagactgaatag

SEQ ID NO: 127944 - DNA, 1077 bp, Enterobacter cloacae
atgcccaataaatttttagcatccgcattgtgcgcggctttattggctggcgtcgttgaaacctctacggcacttgaattatcgcagtacaataagctcaatacggtaagtcgcatcgttaatgatagcgaagtgacggacattctcaggaaaacgctgggaaatcattaccaggcctttattgataactttgatgtcttcggtgaaccgcataccactccaggtggaggattgtttgttgagggctggctaaaggatctctaccaggaaaatgcctcagcgctggttatcaatcctgacggcaaaatcttcgcggcctgggtggttccagaatcaaacgttatccattaccagtcctctgataatagtcagccgattaatgccgatattcagcaatgggccgccaggttcaatacgatgcagtttgcagcgaacagccaatcgagacctgcgtttgacggggtttgggcaggcggggttggcaacgactcgacgttaaccctgcagttagctgaatcaggcaaccgtatcaccgggtcttattgctatatctcccagagaggaaaccgcatcgactgcccggaagatgatgagcgaaatcttagcggtacgatcgcaggaaaccgtgcgaacgttgagttcaactcatcgtttggcggcgcaggcggacgggctgttctggaaataaaggggagtgagatggaatggcgtttagttactcctcctcaaaaaggaaattattatgctccgcagcgttatacgttacgtaaagccgcttcggttcaaaacgctgaaaccagaaaactggacaccgaaaggttcgctatttctcttataaataagtgcggtcattttgatagcgaatgtgatcagatggtctatctcggcgtgcgcaaaagcgataacagtacgatctccttaaggggaaaaacgttgcacgactccgcaggtaaaataatcggctcaacctacaagaatggcgagatcgcttataccgtgacgtatgcacccgtgaaattggttgtcagcaaaggcagccatgttttagtcgaacaatcaggtcaatggcgtaaataa

SEQ ID NO: 127945 - DNA, 465 bp, Enterobacter cloacae
ttgtacaacacgtccgatctgcacaaaaaactggctatcgccgtcgcctcgatctggaaaaagaaactgggcgcgaacgtgaagctggagaaccaggagtggaagaccttcctcgacagccgtcatcagggcacctttgacgtggcgcgtgccggctggtgtgcggactataacgaaccgacctccttcctgaacaccatgctgagcgacagctcaaacaacaccgcgcactataagagcccggcgtttgacaagctgattgccgacacgctgaaaaccactgacgaagcacagcgtactgaactgtactctaaagctgagcagcagctggataaagattccgcgatcgttccggtttactactacgttaacgcccgtctggtgaaaccgtgggtaggtgggtacaccggtaaagacccgatggataatatctacgttaaaaacttgtatattatcaagcattaa

SEQ ID NO: 127946 - DNA, 1710 bp, Enterobacter cloacae
gtggggccgcgtcttgagcgggttaatcagttaaatggaatgaacgagactgcatcgcttctctttctgagcgagcgcgaaagctattcacgattagcgggtatgagtgacaaagcgctcaaaaaatttgctgctcgtattgcttcgcagctctatgttgcttatgaggaacttagcgacgcatgggcagatgctcatggcggtaaagaagcccttttcaccgatgaagcgcaggcgcacttatatggtcacgttgccggtgcagctcgtgcattcaacatcaccccaatgttctggaagaaataccgcaaagggcaaatcacgatccgccaggcattttccgctatcgctcgtctgattaacgatgaatggtggattaaccagtttaaggcgcagcgtattcgctggcacgaggctttgctgattgccgccggtgaggtgaataaagaccgctccccatacgccagcaaaacggcgatccgtgatgtacattctcgccgtcatgctaatttcgaatatttgaagtcgtgtgacttggaaaacaaagtcaccggtgagcgcatcgatctcatcagcaaagtcatgggaagtatttcaaaccccgaaatccgtcgtatggaactgatgaatactatcgtagggattgaacgctatgcggccggtcagggtgacgtcgggatgtttatcactatcaccacgccgtcgaagtatcacccgacacgtcaggttggaaagggcgacaaaaagacggtgcagcttaaccacgtatggaatgaaaccgcttttacgcccaaggatggacagcggtatttgtgccgtatctggagcctgatgcgtacagcttttaaagataacggtctgcaggtctacgggatgcgtgttgttgagccgcatcatgacgggactccgcactggcatatgatgcttttttgcaaaccagagcaacgcaaacacatcaccgaaatcatgcgccgttatgccttaaaagaagatggcgatgaaaaaggagctgcagcacagcgctttgaggcgaagcacctcaatcaaggtggcgcagccggttacattgcaaaatacatcgcgaagaatatcgatggttacgcgctcgatggtcaggtcgatcacgacaccggcaagcctctaaccgataccgcatcagcggtaaccgcatgggcgtcaacatggcgtatcccgcaatttaaatcaattggcctgccgacgatgggcgcatatcgcgaactgcgaaaactgcctcgcggggtcagcattgctgatgaattcgatgagcgtgtcgaggcggccagagctgcagctgatgaaggtgaatttgacctgtatatcgtagcgcagggtggggcaaatgttccacgcgatagccagactgtccgtgtggctcgtaacgtgactgatgaggtcaacgcctacgaagaggatatagagagagttgtgggcatctacgccccgcacttgggctctgagctggtacgtgttacccggacagccgaatggcgcattgttccaaagcttttggccgttgagcctttgactttaaaaagcggcattgccgcgcctcggagtcctgtcaataactgtggattagattaccagaaggaaagggaacatgcgaaatttagagttcaaatggctggaatagatgaagattttcattttttagaaggctggactaagcagttgccttacaagacctaa

SEQ ID NO: 127947 - DNA, 135 bp, Enterobacter cloacae
atgttccaaaagggctgtgagtccagtcagaaggccgaacaattacgggaattagtactgcctcgcctcttttatgtttttcaattgctgttttcgcctctatattttggcaataatcagatgctaaaaaactag

SEQ ID NO: 127948 - DNA, 2025 bp, Enterobacter cloacae
gtggttttaacacataggagcgtagataagataaatctttctgatatttacgtttcttgtgatatgcagccgcttgattatgctgagagaaatgaaaaaataacctcggctaaagtttatagttccaatgttctctttgaacaaaaagatatatatttaatatctggtgaagagcaacaaggaaagacaactctattaaaacagatatataaagagctgttaaaaaaagaaatacagcctgtatattttgatgcaaagggaattaaaagctcagagctgtcaaagtgttttgatggtgcattggctgagcaatatgaaaattcaaactacgatgaatttataaaggttagtcaaaaagcaattttgatcgatgacctagatcaaattggtcttaacaataaatatcgtggtttatttttatcagcaattaaaacacaatttgattatataatagccacttgtaattcatcattcactttaataactgcggaaatacctgaacttaataactataaacagttcgaattacgcggatttggacatcaaaagagagccgagattgttgagaagtgggttgcattaggtgttgaggaatccatttcggaagaagtactatttgaagagtgtgatgattttaatgcgcgattagatgctattattagaaaaaacatcgttcctccaaaaccaatttatgttttaattttgttgcaaatgtttgaggcatatactcagcagaatctcgaacttacctctcatgggcattgctatcagcaactggtttatcaggcatttgataattcaggtattcctaaaaaggagttcgatcgttatctgaatgttttaacagagcttgcatgggcaatacatactaaacaaggtgggcttaactcagatgaattagatatattttttgatagctataagaagatttatctaggtgtagatgaagatactgttattggaaggcttcgttcgaattcaatactaacacttaagaacggcaaaacagattttaagtacccttatctcttctatttctttgctgctaagaaaatagctgagtcttatacgactgataatgatgtatgtgaaaaaaccaaggttattttgaataacttgcatagagaggactatgctaacattttggtttttgttacgcatcatacgaaggataagtgggtattggagtctattcagacagccctctcttgcttatttgacgatcagaaaccggccgtgctttccacttcacagctgacttttttaggtgcgtttattgctcaaattcctggtcttataatggaacaaagagaagtaagagatgaaaggaaaaagcatcatgaattgcttgatgatattgagcgaaatgcaaatgaattagatgcgtttgaagaaaatgatattttggcgaaaataaataaaactttcaaaggaatggaaattgcaggccaaattgttcgaaataggcacgcaacgctgacaagggaagcattgcttgatttaaccgtaaagggagctgatactggtctgcgttttttgaactattttatttgtttgtccgacattgctaaacatgaggttgtgaaattagtagaacttaccttaagcgagaatcctaatttcaccaatgagcagataaaaaaagaagcaactaagttctttttgcaaatgacctacggtgttattaatggcgtaattagaaaaatagcatcctccattggttcaaaggaagcttctgaaatctatgatgaaattggtggctctgaaccaacacctgcagagatactgttgaaacaagcaatccaactccagttcaaaagaaagatggatgttgagactattgcgtatacggtcagccaacttcaaggtaatcctgtttgtataagaattctcaaggaaatgattattcagcatgtatatatgttcccagttgactatcgagacaagcaaagaattgatgcaatgcttgaattatcagtcaaacagcaacaattaatggattcgaagagaaggttaaaaggctaa

SEQ ID NO: 127949 - DNA, 453 bp, Enterobacter cloacae
atgagtgaatttaagccctttgacgacaggctcaacggtctgattgctgccctgtcaccggcatcgcgccggaagctggccggggagatagcaaaggagctgcgcaagtcgcaacagcaacgtatcaaacagcaaaaagccccggacggggcgccctatcaggcgcgaaagcgacaacgcctcagggctaagactgggcggattaaacgggcaatgttccagaaactccgcacaagccgatacatgaaagccactggccgagaaaacagcgcggtggtggaatttaccggtaaagtgcagcgtatcgcgcgagtccatcagtacgggctaaaagaccggcctaacccgcacagccgtgacgtacaatatgcagagcgccagttattagggcttagccaggatagtaaacagatggttgaaaaaatgattataaatcattttagtattaggtaa

SEQ ID NO: 127950 - DNA, 1185 bp, Enterobacter cloacae
atgtatttttataaatacctgagggtcgacaaccttaacctttccatgcttcgtcacggagaggttttttttgcatccccaaaagaattaaatgacatacatgaatgcaagccacagttcatatttaatgccaaccgtgaggtatgggcaaggttcattgatgaaatcattcttagcatctgtattaaattaaatttacaccccaaatcgcatgtatcgatggctttacaagcctccaaaaaagacatctttgccgcacttttaaataagaggaagtccctatcgctaaattacgaagaaacaataaatagagtttcatatgaaatcagcaaaaaggccatcacagaattaaacttccttgatgcgcgaaatgtgatagatgcccttaactcatacataaaaaacgaattaaacacagagttaaatgataaattatatattacatccttttcaaaaagcgccaccattctaacaatgtggggccactacggtagcgcagaaaaggggttcgcaattatttatgaaacaaatgacggtaacatcactttagaaagtaatatagaaatcttcccttcagccgaaagattatccgaatcaagttattcattaggcatgtcgaggttcagtaaagcaaagcttcttgaggtggcgtataaaaacaaaccagttagatcaaatggtttcagaaaactaatcccaacattctcttttaatgaccaggaagatttttacgattgctgtgaaattttattggcagacttaccgaaatacaatgagagcgatatcggacgcgtaaaattcactgactggaagtatgaaaaggaattgagattacatttgcctgtttatgatgagctagcccctcccctcagaaacataaaaatatccatacaacacattaaaggtgtaattttcggaaccaatacaagcgctagtgacaaggaaaacattctctctgcctgttatcatttaaaaaaatcaagcaaaaatgaaagtgagatttatatctttcaggcaaagtccataccaagtcagtataaaataaatataacagctctaggtaggatttgtgatattcaagggaaaggatcgccttttatagaaaaagttagcccgaaaaaatttgaagataaaaaataccttgaggaaatgctaaaaatatcagaatctatcaatgccagttag

SEQ ID NO: 127951 - DNA, 909 bp, Enterobacter cloacae
atggcaaccgttgacctgaatcagttacccgttcccgatgtggtggaagaactgaactttgaaaccattcttgccgaacgcattgcgacgctaatttcgctttatcccgaaaatcagcaggaggctatcgcccggacgctggcacttgagtcagagccgattgtgaagctgctgcaggaaaacgcctaccgtgaagttatctggcgtcagcgtgtgaatgaagccgcgcaggcggttacgctggcctattcaaccggtcgcgaccttgacgtcgtggccgggaacaacaataccgaacgcctgaccatcaccccggcagatgacaccaccataccgccaacgcctgctgttatggaatccgacaccgacctgcgtctgcgcacgcaacaggcgtttgagggcctgagcgtggcgggtccggtcggtgcatatgaatatcacggccgcagcgccgacgggcgggtcgccgacgtgtcggtcgaaagcccgtcgccagcctgcgtgacgatttccgtgttatcccgtgagggtgacggcaccgcgagccctgagttactggcggtcgttgaaaaagcactgaacgccgaagatgtgcgaccggtggctgaccgggtgaccgtccagtcggcggagattatctcgtacaagattgacgcgacgctctacgtttaccccggtcccgaatctgagcccatcaggcaggcgtcagagcagaggctacagagctatatcagcacgcagcaccgcctcgggcgtgatatccgcctgtcagccatttatgcggcgctacatgttgagggggtgcagcgtgtcgagctggcatccccgcaggctgacattgtgctgagtaagtcgcaggcgtcgaactgcaccgagtaccagatagctatcgggggctcggatgagtga

SEQ ID NO: 127952 - DNA, 609 bp, Enterobacter cloacae
atgagtgaccggctgttacccgtcggctcgtcgccgctggaggttgccgccgctgccgcgctcgctgagattcagcgcgtaccggtaccgctgcgcaccctgtggaactggcgcacctgcccggtcaacctgctgccctatctggcgtgggcgctgtcggtcgaccggtgggacgagaagtggccggagacaacaaagcgcagcgtctgcgcgtcgtcgtttttcgtccatcagcacaaaggcaccatcagcgcattgcgtcgggtggttgagccgctcggctttctgattgaggtgcgcgagtggtggcagctcgacgaggagccaggcactttccgcctcgttgtcggcgtgctcgacagtggtatcactgacgaaatgtatcaggagctagagcgcctgattgatgatgccaaaccggcaagccgccaccttacggggcttgctatcagcctgagcacgtcaggcgagctgtacgtcggcgcaggatgctaccacggcgacgcgctgaccgtttacccctacacctccgaggagattgttgtcggcggtgaatattacccggcttcggccatccatctaattgattacctgagagtgaacgcatga

SEQ ID NO: 127953 - DNA, 1044 bp, Enterobacter cloacae
atgaccgcaaaatattttgccattctgaccaatcagggcgcggcgcggctggcgaacgcggcggcactgggtacaaaactcaatctgactcaaatggcggtcggggatgcgaacggcacactgccgacccctgacccggcgcagacgaagctcattaaccagaagcgcatcgcaccgataaacctgctgaccgttgacccaaacaacacaagccagattatcgcggagcagattattcccgaaaatgagggcggattctggatacgcgagattggtctctacgatgatgacggcattctgattgccgtggcaaactgcccggagacctacaaaccgcaactgcaggaggggagcggtcgcacgcagaccattcgcatgattctgattgtgtcgggtacatcggccatcacactgaaaattgacccgtccgtcgtgctggcaacccgtcagtatgttgacgataaggtcggggcggcaaagacctacaccgacagcaaaattgtcgaagtgaaagcctatgctgatactctgctgactgcacacctcgccgcagctgacccacacacgcagtacctcaaaacggcggatattgataaatatatcccggtcggttttccgctgccgtggccgcaggcaacaccgccagagggctggcttaaatgtaacggtgctgcttttgacaaggtgaaatatccaaagctggccgctgcttacccgtctggttttctgcctgatatgcgtgcgcagacgatcagagggtgggatgacggaaggggaattgataccggacgcgccttgcttagcgagcagagtgacgctattagaaacattatcggcagtgtggcaaacgtctataccgctgacccaaacacgaccagtggagcgctcagctatgccgggaatggttacggtcagtggcagtctggcgcgggcgttaatcttaattatcgaaaccttgtactcaatgctgctaatcaggtgccgacggcctcagagaaccgggtaaaaaacattgcatttaactttatcgtgagggcggcataa

SEQ ID NO: 127954 - DNA, 597 bp, Enterobacter cloacae
atggcgaaagctacgctgaataaaaatggaattgccataaaggcaggcgaaatcacggtttataactttgccggtgatacgcgcgaatttttatcgccatcggtggagtttctcgcggtcggcgtgggtattcctgccaactcctgcaccgacttaccactgagtccaaaagagggcttcgccgtctgccgcacggccagccttgacgggtgggaatatgttgccgaccaccggggcgaaacggtctatgacacggccacgggtgagcctgcagacatcaccacgccgggtgaatatgccgacagcgtgaccacacttgcgccatcaacacgttttgacaagtggaacggtagcgcgtgggtcacggatgtggatgcgcaacaccgggcgcaggtgcagaacgccgaaaccgtaaaggccacgttactgaaagaggcgcaaggcacaatcagcatatggcagactgagctgcagctcggcattatcggtgaggatgacaaagccagcctgattacatggatgaaatacattcaggtgctgaacgcgatcgacacctctacagcgccagatattgagtggccggaaagaccagaataa

SEQ ID NO: 127955 - DNA, 465 bp, Enterobacter cloacae
atgttaatggttttgggcttatttgtgtttgagcgccgcacgctgccctatcagtccatgcagtattcgaaggactaccgctgggcgtcaaatgaccgtatcggcaagccaccggcataccagtatctcggggaaggggaaaccacgcgcacgctgtcgggtgttctctatcccgaaattaccggcggacgtctgtcgctgaccgccatcgagctgatggcaggcgaggggcgagcgtggccgctgatagacggaacgggcataatccacggcatgtatgtcatcgacaaagtgacgcacacccacaccgagttattcagcgacggtgcggccagaaaaatcgagtttagcctgtcgcttaagcgggtcgataaatcgctggcgtccatttatggcgatctgcagacgcaggccgacaatctggtcacgtctgccggtgactggctgggaggaatggcgggatga

SEQ ID NO: 127956 - DNA, 807 bp, Enterobacter cloacae
atgattaaaacatttttgataaactcttggactataaccaacatcacaccggagccgaaattgaatttagctgattttttaataaaatactgggatgtcattgttgcaaaccccattttttttatttcaactgcctttgcttttctgggtcttggtttttatacgggaaaattagtttatggaaccataactaacattaccaaagaacgattagaagctgcgcgcgatgacttggggcgattggaaaaagccaaaaaagacgaatcagaaacagtcgcacggctacaagcagagttgaagaagtgttttaaggatagagggcatatactacatgcaccagttttcaaaaatgaaactgcggaagggagtgcagaaacaaaagaaagcaaaaaatcctctgttaaggtaaatagtgggatagaaatagcggactccttctttctgtccattcctcatagaagtttagaagatgcacttgttgacgcaaaaaagaatgaaaaactagtttttgcagtaatctatgatgaaactcatccaaaatttagcaaactctcatattcgcttgggtattttatggaataccacactaccaagagccttgttgatgagtattttgtttcagcgattattaaagcttctgatgaacaggctgcgacgttgatacctagtgatgatcctttggagaattgtctgtgggtggtgctgaccccagagggagagattctcaggcgtgaaggtgtgtatgcaaatccagatgagggacttaagcgtgttagagctgtgatggcaagtgctggaaaagtttga

SEQ ID NO: 127957 - DNA, 504 bp, Enterobacter cloacae
atgatgtttatatggacaacacaacttccgggaatgctcgatgaatttgcctgtggagtccttctggcgaaattgtggacaacaaaacgacaattctttgaaaataattatattggaacattcttgtttatgagtggattgctgatagtgtcagtatttgtttttcacgtaaaacatataggccctcagttctggacatcagcctcaacagtcattttttcgagaacttttctcgcggttggtatcgctagtgttatcgcctcctttattgtttttgaacgtaataatatctttgtaaaactatgtcattggtccggtttttgttatataggaactatcagttatagtatttatttgtatcatttgccaatatttttgaatattaaaaactcacttccatcaaacaatctcggacaattttggcccgagttaatatcgctgatagtgatcttgggtatttcagctttgtcatacacgctcatagaaaaaagattttataaatga

SEQ ID NO: 127958 - DNA, 495 bp, Enterobacter cloacae
atgaaagataaattaatcagcctgaatgtcctacgtggcgtcgcggcaatgcttgtcgttctctatcacatggaggtattgcaagtatcttttattacaagattgtttacgtggggttggattggggttgatattttctttgtcctcagtgggttattcataggtattagtgtcatcaagtcgaagccctgggatacattaaaatacctcaaacgtcgctttttgagaatagcgccagcttactatttttcgatgctcgtgcttgtggcgttggcatcttcttattttttagttactacaaatggtataacacatattgctgttcacctgctttttttacattcatttgatgcacgtttccatggcagtattaatggcgtctattggactttaggcgttgaattcatgttttacatcctcatggctttaagttataaaatcatacaaagtgataaaaagatttattattacattgcgctgtggtttgtcatttaa

SEQ ID NO: 127959 - DNA, 2226 bp, Enterobacter cloacae
atgagaaaaatcgatatagtcattcctatttacagaggaatggatgagacggtcgcggcaattgaaactgttcatagcagtatcgataaagatctcgtcaatgttattttaattaacgactgcagtcctgagccagagttgactgagtacttaagaataactgccaaaaattatggtttcattctgttagaaaatgaaagtaatttaggtttcacaggtacgactaatcgagggatgacttatcataatgatactgatgtcatttttctaaacagcgatgtggaagttgtaaatgattgggtagagcgattgcggaaaattgctcattcaaatgacaaaatagctacagtaacgccttactcaaataatgcaactatttgtagtttccctaatttctgtgaagacaatgtgctctttgcaggaatgtccgtagatctcatcgataaaacattttctagcgttgcaaatagttcctccaaagcaaattatgtggaagtacctacgggtgtcggtttttgtatgtatttgaagcgtgaggcaattgaggatgtaggtttactcgatgtagaaacctttgggcgtggctatggtgaggaaaacgactggtgccaacgtgcgattaagaaaggatggaaaaatgttcatgccttagacacctttgtgtatcataaaggtggcgtgagttttgccgatgagcagaacccacgtaaggaacgcgctatggagttattaaatgagctgcatccacagtatactcatgacgtaatgcgttttatagaacaagatcctgcgcattactctagaatacaaacatatttgtcattgcttaccaaaagtcaattgccaacgattttattagtttcacacaaacttggtggcggtgttaaaaaacatattgccgaaatggcaaaattttacaaaggtaatgtgcatttccttctcttaacaccaggtgcaacagatggtgatgtcaatattaggatcgatttatcttctcatagtaacaaatatgaattctcctttggagttgaagattatcaaaagctactggatttcttgaaacgagttggcataagtcttgtacattttcaccatactttgggattcaatgaaagaattttaaaacttccgaataaattacaagtcaaatatgcgattacgattcatgattatttcttattatcatctaacccaacattaactgatgagaatggcttgttcattggtgataatgtagttgtagaaaattataataataaacaaaaatcatttttattacaatctaatagttatcaagaatggctcaataaagctgatgaagtaatttttccatcaatcgactgttatagtcgttttattcaatttatgccacagctcaaaaaaaggtcgcgtgtcgcttaccatctagatcatgagctttatgctaagaataaaattaataatataaaaaaatgcaaccaaagtgacaagcttaaagtccttgttattggtgcgttaagcaaggagaaaggcgctgataatctagaaaaagttgctaaagctctccgcaaaaaaaatattgaattttacctcttggggtatgcttatcgtcaacttgatagttcagttattatacacggcccttataatgaagaacatgcaatcgagttggtaaataacatctcgcctgatgtggtttggtatccggctctgtggcctgaaacatatagttatactcttagtttggcgattcaaaatggttatccagtcattgttcctaatattggagcattcaccgagcgggttacagctaatcacttagctaaagttattgattgggatagttctgtcgagcagttagtatcaatgtttgaggagtttatgctgcaacagcctgacttttatgactgcaaagtgagcaatgttttcaagcatgtagctcatgaggtatctgaaaactattattcagaaatgtatttgtctttgctgagtaataaaaatattatggaatatgataagagagataatgctctccagttgtcggagattttaattaatcactcaatattgcacaagaatacggaaaaaacggcaagtataaaagaacggatattattattattatggatgtccatgaggataaaattacttgctagattggtgaaattcatacctattaacatccaaaagaagttgaagcgatatctctcaagaaaacccatgcatgaaataataaataaaaaataa

SEQ ID NO: 127960 - DNA, 1824 bp, Enterobacter cloacae
gtgagctcaatgtataaaaaaaacaaaaaatataatttctatgagaaaaatgactcgtcatctatcaattactctgatggctcggatactgaaaatagactttatgaaatagttcttaatctcaatgataagagtgtttggtcaaatgagcttgcgcaaaaaatcactgattggccaactgaatatcatttctcaaggcagcgtcattgtttgcttcgccccttgaatattcaggctggagaagatgtcctggaattaggttgtggatgcggggccatgaccagatatttaggcgagattggcgcgatagttgattctattgaggggacttcctctcgcgctagaattgctggagagcgttgtcgcgaattagaaaacgtaaaaatccatgtagataattttcttgaatatgaaagtgagaaaaaatatgactgggttttattcattggagttctagaatatgcacctttattttcatctgccagtgatcctattcagagttacctcgaaatagctaaaaaataccttaagccatctggaaaacttgttgttgcgatagagaacaaattggggctgaaatatttcaatggatgtgcagaagaccatcttgatgaaataaatcttagtattgaaaataggtataaaaaagtttcacctattacatttggcaaaaaagaaattaaacaattacttaatgctaatggttttttgagcacaaagttcttttatccatttcctgattataaattaccagtacttatacttgatgacgaaagctttaatgaagcaaatatctctcaagaactgctgagttctatacaatcaagggattattctggcagaactgggcgtgtttttgaagaatcattagtatggcctgagctatgcaaaaatgatatcgcacaagatttgtctaactcatttttaatagttgccgaatatagtgatatcagcggtggaacaagtaatgatactatatttcagaagaatatcattgcatcgtattataattgccatcgcaatagcgcatttgttacagagacaagatttaatcatgacggtcaaagtattactgtatctaaaagtaagataaataaatgtaaaccacagaatgacattgtacttcttgatcttgaacaagagtatgtttcaggtaaaagtctacagaatgaattagagcaagaatggaatatatataaaaatttagattccttcatgatttattacaaacactggttcaatcttctactcacaaaagcggatgaaaataatacaataccaggcaatttaatcgatctcactccatttaatgtgaaatttttgagcgacagtgttttcatatttgatcaagagtggtgtattaatgaacgtgtatccctcgcctggatggcttaccgaggtgtctattggagtcttgttaatctcaaaacaattcatcctttagagatatctcctgctgaaatagcaagtgcacttttgaaaagtatcaatattgattttgatgccaatcttctttctaatgttcagaaaaaagaaagaggttttttaaataaaattaatggctcagatgttcaattttcgtcattaatatgtaaaatacctgaacgggtgatggagctgcatcctaagcatcttcagataattaatgagttacgtaataagatagcattagatgcagctgtaattaatgaacatcatgacctcttggaaaaacttgctgaagagagggattatttcaaaaatgagcttttagaaataagaaaatctatcttggcaagagccgttattaaagtaacaaaaaaagctaggaatatcttaaaatga

SEQ ID NO: 127961 - DNA, 1290 bp, Enterobacter cloacae
atgttatatagaacaactttaaaaattgataatgtttgcaaatcgtataatatttacaaaaatcagttccaaaaacttgcgaaattttctcgcgatgtatttgggctcaaagattcctctactgtcaaaaaatttcatgctcttaaaggtatttcttttgaggcacaacgaggggaatcaattggcattcttggccgtaatggcgcaggtaagtctacattgttgcaaattatctgtggaacacttactcccacatccggaaaaatagaagttcatggacgactatctgcattgttggagctaggggctggctttaatcctgaattcaccggcagggaaaatgtttatattaacgccgccattttaggtttaactaaaaaagaactagaagaaaggttcgatagcattctcgattttgcggacattggcgactttattgagcagccagttaaaaactactcaagcggaatgtttatgcgcctggcttttgcaattgcttcttctgttgatccggacattttaattattgatgaggcccttgctgttggcgatgttcggttccagtcaaaatgttttaggcgaatcaatgaacttaaatctaaaggaacaactgttctccttgtaacacattcgacggaacaggttacgaggcactgcgaccgcgctgtgttgattgagcagggtgagatgctggcaataggggagtcaagtattattgcaaacaaatatttggaactcctttttgggaaaaacgaagaaccgacaaagcttaaagcattaggcactagttttgaaagacgagagttatcagatgctatttattataataatcatgagcatcgatggggtaataggcaagcacagataattaactttgatatacagcagggcgaaaaaagaaaccctattatattcgataatcatgctgatctggtattttgttttgaagtcgaattttttgaaagcttcttaaacgtaattataggctttacacttaaatccgtagatggaattactatttttggtaccaacacccgtgcatcggttgatgatgcatctcttaagagtgtgagtgcagggcaaattatccaatgtgcatttagattgaaaccagaactctgtactggtgactatgtgatttctcttggtgttgttactgagataaacgatgaaattgttccaatagaacgtcgctatgatgcaataaatattagagtcgaatcgaaaactaaatcttatggtgttgtagatttactgagaggagttgaagcgagtgagctcaatgtataa

SEQ ID NO: 127962 - DNA, 810 bp, Enterobacter cloacae
atgtcgattttcaataagttatataaaagcttatttgctaattataatttaatctatcagctaacaaaacgtgatattttacagcgatacagggggtcaacagttggactcgcatggtctgttattactccattgataatgcttgctctttatacatttgtgttttcatatgtatttcaggctcgctggggaaaaggtgaagaattaccacgagacatgtatgcgttaattttatacactggcatgatacttcatgcgcaattagctgaatgtttgaatcgaacgccgggactcatgcaaaataattcaaattatgttaaaaaggtcgtgtttcctcttgagtcattaatttgggtaattgtaggaagtgcgacgtttcaggctggtattggatttgttttgcttgtaatagcgaaagtaattataactcacagtatatcacttaatatattgtatttgttccctctgattataccatttatttttttactcgcgggtatcagttggattatttcagctattggtgtctattttaaggatgttattcaccttacgggtatattgacagcaatgctaatgtttgcttctccaattttgtatccagtttcaatgctacctgaaagacttcagacaatcatatatttaaatccgctgacatacttcatcgaagaatttcgaaatgtcctaatttatggcaaccatcccaattatcttcattatataatatcattagttagtacatttgcaattgctgctctggggctaattatttttgatagaacaaaaaaagggtttgctgatgttatatag

SEQ ID NO: 127963 - DNA, 927 bp, Enterobacter cloacae
atgacacatcagccgaaagttaccattttactttgcacgtataatggacaagaatttttaaaaaaacagttagattcaataataaaccagacttatacacactgggatatttacgtttctgacgatggttccagcgacagaacaatagaaattctgaggcattaccagaaaaaattaggaaaaaaccgtttggtcatactagatggacccggccagggttttgcaagaaactttctttccttaatatacaaccactgtattttttctgattactatgctttttgcgatcaggatgacatttggaattcggataaattagaaagaagtctatcggccctcagtagcaagtcacagactcctgcattatactgctcgagaactgagttaatcgatgaacaagatattacaattggttattcatacaatttcagtaaagctgccacacttaaaaatgcgctaatccaaagcattgctggcggtaataccatgctgataaatcacgcggcaagaaaaattataactaaggttcctgaaagtatactagttccatcacatgattggtggatatatcaatgtgtctgtgcatgtggtggttacgtctactatgattcaacttcgacagtaaaatatcgacaacattctggaaatatagttggtgctaacaggttactgtcagcaagaatattaaggtttaaattacttttctctggtagtttgcggccaagcatagataaaaacattttacttttgaaggcattaaatgggcatcttacagaagaaagcaaaatattaattgataaatttaattatataagaacggcatcttttattagcagaatggtaaatgctcacagtgttggcttatacagacaaagtgttttagaaagtattgctttttatgtggcgctgttattaaaaaaaatatag

SEQ ID NO: 127964 - DNA, 549 bp, Enterobacter cloacae
atgaatattattaaaacagaaattcccgatgtattgattatcgaacctaaagtatttggtgatgctcgaggttacttttttgaaagcttcaataagaaaatttttgatgaagctgttggttccaatattgattttgttcaggacaaccattcccagtcacagcgcggcgtcttgcgaggcttacactatcaacttgaaccgaatgcacaaggtaaactggtgcgttgcattgaaggtgaagtttttgatgttgcagtcgatatacgcaaggactctccaacatttggaaagtgggtcggaattatcttgagtgaagataacaaaaagcaattgtggatccctgaaggttttgctcatggattcttaacattaagtgaaaaagcacagtttgtttataaaaccaccaattattattgtccaacctctgaaagaagcatcatctggaatgattctgatattggtattaaatggccattagtagataatattcagctttctcaaaaagatgcttgtgccgtaacgttaaaaaaagcagatatttattgttga

SEQ ID NO: 127965 - DNA, 891 bp, Enterobacter cloacae
atgaaaattttattgattgggaagaatgggcaggttggttgggaacttcaacgttcgctatgttttctgggtgagctgatagcaattgattattttgataatgagctttgtggagatctgacaaacctttcaggaatagcagaaacgattcgccgagttcaaccggatgttgtcgtcaatgctgcagctcatactgcagtagataaagcagagagcgacgttggattagcccagtctttgaacgccgatgctgttgatataattgctaaagaaacggcaaatattaatgcactattagttcattactccacagattatgtttttgatggaagtggttcgcattttcgacgtgaggatgaaaaaactggaccactaaatgtttatggagaaacgaaattatcaggtgaactggccattattaataataatcctaggcatctgatttttcgaacaagttgggtttacgcaacacgtggtgcaaattttataaaaacaatgctgcgtctagctggtgaaaaagaagaactttcaataatcaacgatcagtttggggctcctacaggagctgaactcattgcggattgtacgtcattagctatccacaaagttatgtcagaaaatgccaattatggaatttatcatttagtcgcaagcggtgaaaccacatggtaccattttgccaatcttatttttgaaacagctgaatataatggcgaaagtttgaatgttaaaaaggttaacggtgtatcaacatcttcatatgttactcctgcgaaaaggccattaaactcacgtctttgcaaccgtaagtttgagcaggtatttaatgtatcattaccggactggaagacaggcgttgtgcgtgtagtaaaagaaactcttggtaaataa

SEQ ID NO: 127966 - DNA, 876 bp, Enterobacter cloacae
atgatgaaaggtattgtgctcgcgggtggttccggaacgcgtctttatcctattacgcaaggtgtatctaaacagttgcttcctgtttatgataaaccaatgattttctatcctatttctgtcctgatgttggcaggtatccgtgagattttggtaatcactactccggaagatatgccttcattcaaacgtctactgggcgacgggtcgcaatttggcatcagcttgtcttacgccgttcaaccttctccggatggcctggcgcaggcattcattattggtgagcagtttattaataatgaaccatgtgcccttgtacttggtgataatatttacttcggtcaaagctttggtaaaaaactggaaactgccgcacagctcttaggcggtgccatggtatttgggtaccaggtacaagatccagaacgtttcggtgttgtagagtttgatgaaaactacaaagcactttcaattgaagagaaaccagtaaaaccaaaatcaaattgggccgtgacaggactttatttttacgataatcatgttgtggaaatggccaagcaggttaaaccctctgaaagaggggagctcgagatcacaacactcaatcagatgtatcttgaacaaggtaacctgcaagtagagttgttagggagagggtttgcctggcttgatactggtacacatgacagtctagtggaagcttcccaatttattcatacaatagaaaaacgtcagggaatgaaagtggcttgtctagaggaaattgcattccgtaaaggttggctttcacgtgaacagcttcaggaacaggcaaataaaatggctaaaaatgaatatggacgatatttaagaatgctcattaatgaagaactttga

SEQ ID NO: 127967 - DNA, 897 bp, Enterobacter cloacae
atggcgcgtatttttgctgagcaccaacctgatgctatcatgcatcttgcggcagaaagtcatgttgaccgttcaatcactggtccagcggcatttatcgaaaccaatattattggtacctatgttctgcttgaagcggcacgaaagtactggtcacagctggatgatgtccgcaaagatgcgttccgtttccaccatatctcaaccgacgaagtgtatggtgatttgccgcatcctgatgaggtaccagccggaagctctctaccactgtttactgagacaacaccttattcccccagcagtccttattcctcttcgaaagcatccagtgaccatttagtccgcgcatggagtcgaacctatgggttacctactctggtaactaactgctcaaataactacggtccttaccatttcccggaaaaactgatcccactcatcatcctcaacgcactggcaggcaaaccgcttccggtgtacggtaacggcgagcagattcgcgactggctgtttgttgaagatcatgcgcgtgcgttatacaaagtagtgactgaaggtgctgtgggggaaacttacaatatcggtggacacaacgagcgtaaaaacattgaggtcgttaagacaatctgcaccattctggatgaaattatagccgctaagcctacaggcattactcacttcgccgatctgattacctatgtaaccgaccgccctggacacgacctgcgatatgccatcgatgccagcaaaattaaaaacgatctgggatgggtacctcaggagacatttgagtccggtatccgtaaaacggtcgagtggtatttaaataacgaaagctggtggaagcgcgttatggatggctcctatgcgggcgaacgtcttggactggcggaataa

SEQ ID NO: 127968 - DNA, 852 bp, Enterobacter cloacae
atgaactatttaaatataacagctatcgctgtttttggttttgtgttcgctggttcaatgaataccgcaaatgctgcggaagtaaacgtaaaccttgacgataacgtcaataatccaagtgcttacattcaaattcagggtaccgataaaaccgcctataaccttgataacatcgaggggagtaacattaagcaagacgggcaaatctataaccttcagggcgatattgaaagagcaaatacagctattaataaagcacaagatacagctaataccgctcaagatggcgtaaacgctaacactcaagcgctggcaggtaaggtagataaaagcattttcgacgccgatcaggatagacaagatcacgctcttcaggatgcctctgacaaagcgactcaggcatttaatacgggcgcttatgcgcaatctttagcggttgatgcacaaacggtagccgctgctaacaaagctgctgttgctaacgttcagtcacgccagcaagcacaagaaacgacgattcagaatcacagcgcacaattagcgaatcatgaatcacgtattactgcgttagagagtcaaaataacgcgaagttctcttctctggagcatcagcagaatgaggatcgcaaggaatatcgtgctggtatcgctggcgctgcttctcttgctggtttgcattacgttgatacagataacgcggttgccgtcggtgctgccaacttcaaagatgcgcaaggttacgcagtcggttaccgtcataagttcgctgagaatgttgccgctaccctctctacatcaggtacatccaacggtgatgaaattgttgcggcgtccgcatcttatggatggtga

SEQ ID NO: 127969 - DNA, 384 bp, Enterobacter cloacae
atgaaaaaaatgactgccatgctcttttctctggccgtggggcttaacaccgtctccatggcggcgaaagctgacgcaccaaaagagcaggaaacggacgtccttttaatcggtggcggtatcatgagcgccacgctgggaacctatctgcaagaactgcagccggactggtcaatgaccatggtcgagcgccttgatggcgtggcgcaggagagttcgaacggctggaacaacgccggtaccggccattcggcactcatggaactgaactatacgccgcagaaaaaggacggttccattagtatcgagaaggcggtagagatcaacgaggcgttccaggtatctcgccagttctggtctcaccaggtcaacagcggcgtatag

SEQ ID NO: 127970 - DNA, 1278 bp, Enterobacter cloacae
atggctataaacgagctttcacccaaacagatcgagaatgccaagccacgagacaccgattacaaaataaccgatggtggcagtctgtacctcttggtcaaaaaaacgggtggcaaatactggcgcatgaattatcgctttgctggtaaacaggcgacattagcattgggcgtgtatccggatgttccactgacaacagcacgtaaacgcagagatgaagccagacagcttcttgccgacggcaaagatccacgtgaagcaaaaaaagctgaaagcactgaaccaacgtcaccgactttcgaggctatagcccgtgagtggcacggcggaacgatgggacatcctgagtggaaagagatcacccgtaataaaatattgagggaaatggaaaaccacatatttcctctcatcggtagtaaacccatcgacagcttaaaaacacgggatctgctacctttgcttatcagcatgaacgaacaaggcattggtgctactacgggaagagtaaagacaacgatgagcagcgtattccgctatgcggttcagcgtggaatagtcgagtacaacccagctcacgacctgaaaggtgctttgacgagtcctaaaactaaacaccgccccgcccttcctctggatcgcctgccagaattgatgacgaaaactgcaacatacacaggcagatctctcaccaaactcgcagtattactatctcttcatacgtttgttcgctccagcgaacttcgccacgctcgctgggacgagataaattttgatactgccatgtggacaatccctggtcagcgagaagaaatcgcaggtgtaaaattctctgaacgtggggctaaaatgggcagtgggcattcagtaccattgtcttcgcaggcaattgacgtattgaaatcgattaaaagcatcagcaatgagtacacactgatttttcctggcgatagcaacccctataagcctatgagtgagaacacggttaataaagcgctccgtactatgggttatgatactcaggccgatgtttgcttacatggtttccgggcaatggcctgctctgctcttaccgaatcaggattgtggtcacgggatgccgtagagcggcaaatgagccatcaggaacgtaatgaggtacgtgcggcttatgttcatctggcgcagcacatgcaggagcgccgccgaatgatgcagtggtggtcagactatcttgaagcaaactctgatcaacatgttgcaccatatgacatgaagaaattacgggttgttggcaattaa

SEQ ID NO: 127971 - DNA, 879 bp, Enterobacter cloacae
atggatagcaacgtctggaaagagaaccgaatcgcgcctttagaatactgctcattcgaaagagctgctaaattgctcaattgcgaatgtgaagacttaattcactggaataaaataggtgctatctcaatagcttttgagcctaaaaatttagctggtgatttgtctgttagcttttacgaaaatgccgctgataatattgaacgatataacctctcgtacaatatcacagccgagttgagcttttatggttctatttttaactctaaacgaggacataaagaaggtgtgtatttccatcaatcccgttatggatttaatttttcagggtacattaatggattgtggattattagctccggaattataaatgaaaataatggagtattcataacaaataaaaaccacaaaggacataatttatttcaccctgttagtagacctgatgaaatttgctctgtcttttttatttacaaaggagaggaggagttttcacttgaattgagtgagcttttcataacaaggttagatatcgaaaaaatctggacagctacaatccttggtgagccaatggatagctatttcacgggtaaacctcgagaagataaacctattattccaaatgctgtatcgctaacacaaagtgcaaggcatgataaaaataggcagagactcgaatctgcggctaaaaaggtacttgccaatcaccggagtgaatgtgtcgacaaaggtggtaaattggtttttacaaaatgggcttcagccacattgaaatatagaaatgattatggaggctttattcattcgagccaaagaggaataagtaaaatactcaaggaaatgcaggaagaggaaattgctcaacataatgcagagtaa

SEQ ID NO: 127972 - DNA, 2760 bp, Enterobacter cloacae
atgcgtaatatcgactttatacgcgaagtgactcataccgctgccgggcaatggcattccgttttgtctgacctcagtatcgcagtttctgattcaccgctcaggcataccccctgcccggcgtgcggaggaacagatcgctttcggttcgacgacaacgagcgcggggctcatatctgcaatcagtgtggcgctggcgacggcctcgatctgattaagaaggtgaatggctgcgacacgacagaggccgcgcagctggtagcggaagtgctgggtattgattttcgggtatcgcaaacgaatctaagcgctgtcattgagcgccggaaattacttaagacagagcgcctgcagcgtgagcaaatgcgacaggagcaggccgcacaggacacagagcaccgtcgcctagccttttctcgccgctatgcagcgatgtgccagaatgtcacacagggcgaatctgactatctgaaatcaaaggggctgaacggcctcacctatccccttctcactaatggcgcgatcctgctgccgctggtggacaacactggtgcggtcactgccgcacaaaccattacctcgagcggggaaaaacgtcttgtagtggattcagccaaacgcggagcattccacgctatcaacgctacagagcaaccgcaggaggtgatccttgccgaaggactggcaacggccttatcagttcacttaatgcgaccggatgcactgaccatctgtgcagtcgatgccggtaacctgttacacgtcgccatccagatgcgtcagcagtacccacaagcaaaaataattattgccgctgataacgaccaccacaacaaccagccaaacaccgggaaagcggtcgcagataaagcggcgcttttggtagctggatgggtggctcttccaccgggtgagaataaagccgactggaacgacatccaccagcaatacggggtagctgagagcatctgcatgtttaccgattcgatgtaccaagcacagggagaaagcatgaaaccagagttgcaggccattgagggaggtaaatctagccctccagaaatagacccgttaaaaccgcgtatcgagagccgggaggatggtgtgtactggattgtgccaaaggtggacaaagaaagcggcaatattatcaataacgaaaactggctggcgtcagcaatggacgtgatcggctccggacgcgacgataaagaccagtatctgatattacgctggctggcctttggctcagacgtaccgacgaccgctgccattcccctagcggatattggagagcgagaaggctggcgcgctttgaaagcaggcggggttaaagtcactgctaaaagcaatatgagggcaattttggccgactggttacagcgcaacagctcacgtgagctatggcgtgttacctatgccactggctggcagtgcggggcatatatcatgcccgacggagaaatcatcggcacacctgccaggcctgttttattcagcggtcgcagctccgcaagtgcaggttatgccgtacagggcacaactgagagttggcgtggcagtgtggcgcgtctggcatacggcaactatgcaatgatgaccggcgtcgctgccgccctggcagcgccattaatcggcctgacgggcgcggatgggttcggcattcacttttatgagcagtcgagtgcaggcaaaaccaccaccgcgaatgtggcgagcagcttatacggcaatccggatttattacgcctgacgtggtacggaacggcattggggctggcaaacgaagccgccgctcacaatgacggattaatgccactggatgaagtcggacagggagctgacccggtgagcgtgtcgcagtctgcctatgcgctatttaacggtgtaggaaaattgcagggcgcgaaggaaggcggcaaccgcgatttaaaacgctggcgaaccgtggctatcagtacaggtgaaatggatttagaaacattcatagccagtgcggggcgcaaaaccaaagcgggacaactcgtgcgcctactgaatataccgctcagtaaagctgtgcgctttcatgaatacgcgaacggcaagcaacatgccgacgcactcaaagaagcataccagcaccatcacggttccgctggaaggtcgtggataaaatggctggcagaccactcgcaacaggcgattgataccgtgcgtaagtgtgaagcacactggcgcaatcttattcctgccgactatggcgagcaggtacatcgtgtggccgcacgatttgccattctggaggctgcgttacagttgagtgaagcggtcacgggatgggatgcacagacctgccgtgatgcaatacagcacagttacaacgcgtggctacgcgagttcggcaccggcaacaaagaacaccagcaaataattgaacagtgcgaggcgtttttgaattcctatggattcagccggtttgcaccgttcccctatagctcagccgatatgccgattaaggatctggcggggtatcgtcagaaagggaagcacgaaaacgatccgacaatctactacacctttcgaagcacatttgaaaaagagatcgcccagaactttaacccgaagcaattcgctgaagttctgaaaaattcagggatgttgacccctcctacgagcgggcgaggttaccagcgcaaatcacctcgcatcgacggaaggcagattaacgtttacgtcctgaccttccagacagaggactacgccgcatctgaggaatag

SEQ ID NO: 127973 - DNA, 456 bp, Enterobacter cloacae
atgaacacagcagaattagggcagttagcggtattgcacaaattaaccagccttggggccagaaatattgtcgttcaaaaggaaggcaacaagtcattcatcttatttgaggcacccaacggtaaaacgtgcaaagtgacgacccgatcgaaaaaagcaggaacatggcaaaccacaaccaactatgctgcccagtgtactcttgataaaaaagataatgcgttttgggtgtttgttgatctcggacgagagccgaatactttctatattacgccgctgtcgtggatcaggaatgatatttatgaggctcatttggcgtatctggataagcatggtgggcaccgtgcgcagaatgatgagtcgacgcatcattctatttcggtaaaacgcattgctggctggaaaaatgcttggggagaaatgggcttgagtgagtctgcaaataattctgcataa

SEQ ID NO: 127974 - DNA, 909 bp, Enterobacter cloacae
atgcttttgcccattcttggtgattatcctcatctggtcaatcttcccagtgaacctaaaggctacaccccgttgcatcaggcggcatggcatggggctaatttgtcggtgataggggaattgttatctcttggggccgagcgaagtgcgacaacgaacactaagcggcagacggcttatgacatcgtggtcgaaaagcacaacagacccgaactggagtatcttcttttcccacaaaaagagactctcgcgcaaatcatcagaaaagtcgttgccactgaacggcaattgttcactgattatgatggcaaccaaattttggtcgataaaatgatttcggcttcaggtgttgagccatgtcctgatgaccttagcgaactggataccaggctaaatcacctcttttttgcgttgacgggtaaagcgatatcaacgactgaagccattcactttgatgtggctgaaggttttacattcatggtagaggctgattttttcaggcagatatttttcccattggtacataaggttgcggcaaaaaagattagctttccggaacgtgaatgggctgttgtatctgacttgtttgatcctgcgccaacccagtggggatcgcgcgggagtctcttcttatggttggaaatgcgcaaggctttgtgtcaggtgagtatcccggaagatgaagacgagttggcaaatatcatcgcggcggcattccaggcattgactggaagatcattaattcatcgggtaggggaagatgagttttttgtaaaacggtttagccgtggcggcggatcttcaggctatgtttcctccctgtactggctgaataacgttatcccacagttgcaaaaaagactgtcctggatgcaggtggtgtggttgatatcaccacatgaggcgtag

SEQ ID NO: 127975 - DNA, 1767 bp, Enterobacter cloacae
atgaccgttggtaagctgatctccgaccatatcgatatctggtcctctgcgctgcaaacccgttccactgcggggcgcggcagtaatggcaaaatcgacctgtatggcattaagaaactgcgcgagctgattctggaactggcggtgcgcggcaagctggtgccgcaggacccgaattatgagccggcgtctgagctgttaaagcgtattgccgcagagaaagcggaactggtaaagcaggggaagataaaaaagcagaagccgctaccggaaattagcgaggatgagaagccgtttgagttgccggaggggtgggagtgggtcagattgggaaccttaggatatacccaaaccggaggcacaccttcaaaatctaatgctgaatattatgggaatgatatcccctttataaaacccgcggatattactgcacaaggagtcatatacgataatgaagggctctcaattaaaggggcagaaaccttaggccgtgtcgctccaagtggctctattttaatggtttgtattggtaccattgggaaatgtcaggttataaatcgaacatgttcatttaaccagcaaataaactccattactcctttctctgatatatctgattttatctatcttgatgtttcatcctcttattttcaatcactagcgtgggattattcatcaagtacaactatacctattctgaataaagggaaatgggagtcgttgttagttcctatagcaccactttcagaacaggctcggatagtgaccaatgttaaaaaactgatgtctctctgtgaccaactggaacagcaatctctgaccagtctggacgcgcatcagcaattggttgaaaccctgctgtcaacgctgaccgatagcccaaatgccgaagaactcgccgaaaactgggcgcgaatcagccagcatttcgacacgctgtttaacaccgaagcgagtatcgatgcgcttaagcaaactattctgcaactggcggtaatgggtaagctggtgccgcaagatcctaacgacgaaccagcttctgaactgcttaaacgtattgaacaggaaaaagcacaactggtaaaagaagggaaaataaaaaaacaaaaaccttttccgtcaattagtgatgatgagaaaccgtttgaattaccgcagggatgggaatggtgtcgtattggtgaaatcattgtaaatatggatgctggttggagtccctcgtgttctcctgaaccatcgccaaatgaaaatatttggggagtattaaaaactactgcagtgcaaagtttggaatatagagaacaggaaaataaaactttgccaagtagtaaactgccccgacctcaatatgaggttcatgatggtgatatcttagttacaagagcaggaccaaagaacagagttggtgtttcgtgtttagttgaaaaaacacgatccaagttaatgatatcggacaaaatcatcaggtttcatttaatttctgatgagatatcagcgaaatatatttcattatgccttaactgtggggtgacagctgattatttggaagcatcgaagtctggtatggctgagagccaaatgaatatatctcaagaaaatttgaggtcagcaccggtagctcttcctcctacagcaatccaattgaaggtgatatccactattgaagactttttcaaagtatgtgaccaacttaagtcccgtctgcaagccgcccaacaaacccagcttcacctggcggatgcgctcacagaggcagcattaaactaa

SEQ ID NO: 127976 - DNA, 1473 bp, Enterobacter cloacae
atgtcgattagctcagtcattaaatccctgcaggacatcatgcgtaaagacgccggtgtggacggcgacgcccagcgtctggggcagctttcgtggctgctgttcctgaaaatttttgatacccaggaagaagagctggaactggagcaggacgactaccagttgccgattccgcagcgctatctatggcgcacctgggccgccaacagcgagggtatcaccggtgatgctctgctggagttcgtgaatgacgatctgttcccgaccctgaaaaacctcactgcgccaattgataagaacccgcgtggctttgtggttaaacaggcgttcagcgatgcctacaactacatgaaaaacggcacgctgttgcgtcaggtaatcaacaagcttaacgaaatcgacttcagcagcagccaggaacgtcatctgtttggcgatatctacgaacagatcctacgcgacctgcaaagcgccgggaatgcgggcgagttctacaccccgcgtgctgtgacgcgttttatggtcaaccgcatcgacccgaagctgggtgagtcgattatggatccggcgtgcggcaccggcggcttcctcgcttgcgccttcgaccatgtgaaagagcattacgtcaaaacgactgaagatcataaaaccctacaacagcagatctatggcgtagagaagaaacaacttccgcacctgctgtgtacgaccaatatgcttttacacggcattgaagtgccggtgcaaatccgtcacgacaacacgctgaataaaccgctctcttcctgggatgagcaggtcgatgtaattgttaccaacccaccgtttggcggcacagaagaagacggcattgagaaaaacttcccggcagagatgcagacccgtgaaaccgccgatctgttcctgcaactgattatcgaagtgctggctgacaaaggccgcgcggcggtggtgctaccggacggtacgctgtttggcgagggcgtaaaaaccaaaatcaagaagttgttgaccgaagagtgcaacctgcacaccatcgttcgtttgccgaacggcgtgtttaacccgtacaccggtatcaaaaccaatattctgttcttcaccaaaggccagccaaccaaagaggtgtggttctacgagcacccgtacccggacggcgtgaagaactacagcaaaaccaagccgatgaagtttgaagagttccaggcggaaatcgactggtgggggaacgaagccgatggttttgccagccgcaaagagaataatcaggcgtggaaagtcagcatcgacgacatcatcacccgcaacttcaaccttgatatcaagaacccgtaccagggtgaaaccatcagccatgacccggaggaactgctggcgcagtaccagaagcagcaggcggaaatcagcgagctgcgtaaccagttgcgcgatattcttggtgccgcactggcgggcaacaagggggcgaactga

SEQ ID NO: 127977 - DNA, 2436 bp, Enterobacter cloacae
atggctggcgttaacaaaactcatctgactgaaacggacatcatcactaaattcatcctgcctgctgttaaggatgcaggctgggatgtgatgtcgcagattcggcaggaagtgaagctccgcgatggcaaagtggtggtgcgcggcaagctggcggcgcgtctgaccgtgaaatcagcggacatagtgctttaccataaaccgggattaccgcttgccgttatagaggctaaagccaataagcatgagatcggcaaagggatgcagcaagggctggattacgctcgtctgttcgacgtgccttttgtctttgcctccaatggtgatggttttatcttccacgacaaaacgaatcccgtacagcttgaatcagaaatcacactcaacgatttcccaacgccggaacagctgtgggctaaatactgcgtctggaaaggtttcaccatcgagcaattgcctgttatcagccaggactattacgacgacagcaccgggaaatcccctcgttactaccagcttcaggcgattaacaaaacggtagaagctgtttctgcggggcaaaagcgcctgttattagtcatggcgacaggcaccgggaaaacctacaccgcgttccagattatctggcgcttatggaaagcaaaaagtaagaaacgcattctgtttttggctgaccgcaatattctggtcgatcaaacaatactcaacgactttcagccttttggaagcgcgatgtcaaaagtgacaggcaggacgattgatcctgcctatgagattcaactggcactctaccaggccattaccggtccggaagaacatcagaaagcgtttaaacaggttgcccctgatttctttgacctgattgtgattgacgaatgccatcgcggcagcgcatcggaagacagcgcctggcgcgaaatcctcgaatacttcagtagcgccacgcaaattggccttaccgccacgccgaaagaaaccgaagaagtctccagtaccgactactttggcgaaccggtttacacctattcgctcaaagaaggcatcgaggatggttttctcgcgccctacaaagtggtgcgagtggatattgatgtcgacttacaaggttggcggccaaccaaaggacagattgataaacacggtgaactgattgaagaccgtatctataaccagaaagattttgaccgcacgatggtcattgatgagcgcacctggctggtggcacaaaccatcactgattatcttaagcgcaccaacccgatggataaaaccatcgtcttttgtaacgacatcgatcacgccgatcgtatgcgccgggcgctggtaaacctaaatctggagcaggtggcaaagaacgaaaagtacgtaatgaaaatcaccggcgacgatgatattggcaaggcgcagctggataactttatcactcccaaaaaaccttacccggttatcgccacaacctcagaattgatgagtaccggtgtggatgcacagacctgcaaattggtggttctggaccagaacattcagtcgatgaccaaatttaagcagatcatcgggcgcggcacgcgtatcaacgaaaaatacggcaagctgtggttcaccattctcgacttcaaaaaagcgaccgagctatttgcagacgaacgcttcgacggcgtaccagagaaagtgatccgtaccacgccgcaagatattaccgatcctgaatctgatttcgaccaccagcttgaagacgaaacgccagagcacgaattacctgatttgataaatggcgtcgctgaaacacctgccatctatggcccaacatcaggtaacggcagtggggtttttgaagaagacgacgaaaacaaaatccgtaagttccacgtcaacggcgtcaccgtaaaagtgctggcgaaacgcgtccagtattacgacgcggatggcaaactggtgaccgaatccttccaggactacacccgcaaaacgctgctcaaagataaagactacgcatcgcttgatgacttcatccgtaagtggcactctgcggaccgcaaacagctcatcattaatgagcttgagcagctcggcgtgctttgggatgtactggccgaagaggtggggcaagatctcgacccgttcgatctgctgtgccacgtagtttacggccagccgccgttgacgcgcaaagagcgcgccgacaacgtgcgcaagcggaactacttcaccaaatactctgggcctgcgcagaacgtattgaatacgctgcttgataagtacgcagatgaaggcgtgcaggagatcgaggacatccaggtgttgaagctgaaaccgttcgatacgctcggtcgcccgctggaaattatcaaaagcagctttggtagcaaacaggcttacgaagatgccgtgaacgaactggaaagtgaaatctaccagttaccaccacgcactgcctga

SEQ ID NO: 127978 - DNA, 1245 bp, Enterobacter cloacae
atggcacgaaggaaaaaagatgacaatgccgtagggattgttttggttattatcggtgtaattgtctggtgtatttatgtcgcggtaagagcattaataaattttaatgagcgatttatcgagtctgtgtcgaatccagctggaatcatcagtttattctttggcttactgatagccgttgcgttgataatgcgggttttcatttaccggggcttccgtaagaaaacagcggagctggaacaggctatgtcgtacctcattcagaaagagaaggcctttgaagaaaccgtcagtactgaagtggctcgcggtctgtatcaggaaaagcaacgccttgccggtcagtgggatgactttcacaatgccaaaaataaagcctctcgggcactgcagcgtattgtggactccgcgtataaattcaaagtcaaaaccctgctttctggcaccacggtgaataactggcaaagcaagtacgaccagctcaggaaggaaagagaggcttacgctgctatcagcgagaaaatcgcctttctggaactggaagataacgccgactgggaaggcgtaaaacagcagtttctggataaggttgctctgctggaaaaagcgcaggaagaaaaagaatatcaggctgagctcaagcgccagatgcgtgaagaaaaacagcgtcaggatgaactggaacagcagcagcgcgaagcggaagaggaggagcaacgtctcgccgaacagcagcgtttactggaagaagccctgcttgccgctgaaggtgctcacagggtagaactggaaagacagcgcctggagttggagcagaaaatccaggacgtgcatcagcagtatgaacgtgccaaatccatggcccagctcaccaaacagggatacgtgtatgtcatttcgaatatcggttccttcggtgaaaacgtcttcaaaatcggtatgacccgtcgactggagcccatggagcgcgtgaaagaattgagcggggcagctgtgccgtttgattttgatgtccacgccatgatttcctgcgatgacgcccctgcgcttgaaaggacgttacatgaccatctggaacgctaccggattaaccgaatcaatctgcgtaaagagtttttccggatcgagcttagccgaattattgaagaggtggagcgtcaccacgggcagattgaatatattgctgacccggtagcgctacagtatctgcagagtctcgaatatgcagaaagcgaagccgcataa

SEQ ID NO: 127979 - DNA, 471 bp, Enterobacter cloacae
atgtcagcaaaatcacaatttatgaaaaaactacaggccagacaacccgcacctgttcctgttgtcagtaagagtcaggtcgatattgcagagtttcgcctgcgaatggtaaagcttcaggagcagatggatgcgtggctggtgggtaccggacttaatatagaaccgtacacagcattcgtctcggacctgctggtggtggacggcacttttgaaatttcaggtatcgttcttcgttacgatggccgggtcgtaaagtttacgccggtatttctgtatggtaagggggtgactgggtgcgtagaggcaattttccatgagggagggcatatgacctccctgggccgtttattcatgagatcaggtaccgtgagtgactggacctttactccgcctggtgctttatcctgctcaagacagcaatttgatgagagcacattttttgggctaattatcgcgcttctttcatag

SEQ ID NO: 127980 - DNA, 363 bp, Enterobacter cloacae
atgaaaatcaaaaaaatatatcttgcattttttttattgctaatcatttgggcatttttgccttctactttgtttatcaatgaaaaaacaaaggtgtttgatatagtcagtcctgataaacaatataaggtaaatatatatcatgctaaaataatatctccgttatcactttataaatacctgaaagatgaagattactattttgttttatatgattctaatgggggtgtgatatttaagccttcactattttacggtatgtctgaaattgcggcatatgactccattgaatttttgtacggtaaggataaagaacttctttttcctggtgaattaggctatgacggatttgttttaaaataa

SEQ ID NO: 127981 - DNA, 870 bp, Enterobacter cloacae
atggcagtttcatcaacgactaccacaaaagaaccggagcagcaggaaaagaaagtcagtgtagacttcttccatattgatatgatccctgacgcgatgagagaaatggggtgggaaatggctcctaagttaatggagcattggtttgaaatttcaccagcatttatttttactactgaaagtaaaagaaaaaaattagatgaagatgcaagaaacttaccatcaactcaagttagtactgaaatagtcaaaatgtcatgggcacttaaatttgagcaggttagcgctgggattgaagagcttactggtcgttggaaaagtatgaaaggtattgctcgattaagaaaattgcttcaaaataaaggtgattttaataaaggtgcgatatctcttgggtatactgacgatgttatggaattggataacacatcccaagtaaatctaataaccataggaagtaaatttgatacggtaaacgattggtatggtgcaatgggaaattcgaatcttaaagtatgtgttcgtggaatgacgcaagtcagggagggaaaagtattttttattgtagataagttgggcttttacctcaaggatacttatgatttcgttgatgaaggagatgcatcagagcctttaggggtttggagtaaaaaccgtatactaaacaaggaagaaactggcatttacatgtccacttacttatctggtttttgggggcatctggtgaggagtttttcaggatttgtgccgatttttaacaaagacttccggaagtggcaaaaaaaacatgattcaggtggtgattacattgttttttctgatgtattatgggtctcgccgagagaaactgacaaggaaattcctctgtaa

SEQ ID NO: 127982 - DNA, 513 bp, Enterobacter cloacae
atgaagtatattattgcgctattcttcttgtgcttaccgatggggttatttgccaaaaaccacactcctgaacagatcttgcagatgataaacggcaaaggcgccaggcatgttgttgcacaattatatgctaatgatagcgatgagtcggaatggtggaatcatgttatcccagagattagcaaaggaaatcagaaatggttagctgtcgcgagtgcgcttgagccgggcgtggacgccagtacggctgaagacttaaaagcagcgctttctgaagctatcccacataatcctcaaggtgtcttagcaatcttaaaagacgataaaccattactcactattgaacaaatttgcgcgtttgataatttccccgaaacagaggcagaaagtaataagctttttgtggattcaatcagggagatgttcaaaataaaaagcccgccgggtaaaagatgtctcgccgttatgatatcaactgttgaacactctgttccattcgataaggatatgtaa

SEQ ID NO: 127983 - DNA, 1263 bp, Enterobacter cloacae
atgtctacagggaaaacactgctcgcccttgcgctgagcgcgctgttaccagccggtgccgcatgggcggcaaacaacgacacccttatttactgttcagaagcctcccccgagtccttcaacccacaaatcgccagctctggcccgtcttttgtggccagctctcaggtgctgtataaccgcctgatcaatttcgacccggtgaaaaatactccggtgccgtcgctggcggagtcctggacaatctccccggacagcaagacctatacctttaccctgcgtaaaggggtgaagttcaacagcaacaaatacttcaaaccgacgcgcgattttaatgccgatgacgttattttctcggtcatgcgccagaaagaccctaaacacccgtaccacaacgtgtcgcagggcaactacgaatactttaacgatgtgggtctcgataagctgatccaggacgttaaaaaggtcgatgattaccacgtccagttcacactcagcgaacccaacgccgcgtttctggccgactgggggatggatttcgcctcgattctctccgcggaatacgccgacgcgatgctaaaaaaaggcacgcctgaaaacgttgacacctggccgattggtaccgggccatacgtgctgcagcagtataaagtggattcgctgatccgctacgtcgcgaacccgaactactgggaaggcgaggtgccgacgaagcatctcatcttctccattacgccaaacgtggaaacccgcctggcgaagctgcagaccaacgagtgccagatcgttcctgcgccatccccggttcagtttgacgccatcaagaacaacaaagacctgacgctgcacgccgtcgatgcgctgaacgtcggttatctggcgtttaacaccgagaaaaaaccgtttgataacgtgctggtgcgtcaggcgctcaactacgcgaccgacaagaaggccatcgttaatgcggtctttatgggatcgggcacggtggcaaaatcgccgatcccgccgaatatgctgggctttaataaagacctgaaggactacagctacgatcctgaaaaagcgaaagccctgctgaagcaggcgggtctggagaagggcgcggaagtcacgctgtggtcaatgccggtgcagcgtccgtataacccgaattcgcgtcgtatcgcggagatgattcagagcgactgggcgaaagtcggcgtggaggagatggacgcgcgtgaggaacagctgacgaaaggcggtaccatactgtaa

SEQ ID NO: 127984 - DNA, 570 bp, Enterobacter cloacae
atgtttaaagttttaacccgtcgcctgcaacactgtaacgaggtggctaccagcataagcaatacctccccgacacagctgcaacagctaaagactcagttggctgaagaaatgggcaaacctgtgggtctacacaccatgggtattccggcggcaatcagtactctcggggtaattgtcagcttcgcgattcctcagctgtggttgggctatgatgtactcgccgcactcggccagccagccgaacgcgtattcgtgtgggttgtgctgatcgccctcctgttcgcaagcatcaacggcgtgacgatgtttatgattggcaaaggcagcatgcgcgccgtgcggttacatcttacgctggcggtgatgagtctggtattaacggcagcctatttgctggccgcgctgagcggtagcgctgctccgggcgtcagtctgaccgctgcgatggtgagtactgtcatgctggggcttagtggcagctgcatcttctctaccgctttctataagatgctgctatttactctgcataacagagcctggcgcaaactgatcagcaaggcgcgctaa

SEQ ID NO: 127985 - DNA, 966 bp, Enterobacter cloacae
atgaacttacccggtcagcagtcgcctgacagcacccttccctcttatgatctctcgcgaagccttggcctacaggccggtgcagatatcgattttaaaaagctggccgcacagctcgactgcacgcgtaatttttacaatgtcggcatcatttttgatgatggcaagcaacgctggctggttcgcccgtctcgacgcattgctgatgtgaatcagagcaccgtcagccatgtagtcatcagtaaaattccggatgctaaggaaatcagtgcagaaaaagctgtggttgcgacgctaactactccgtcacttgctacggaaattacctcgaccggttttgcctgtggcgcgatgattgttacgcttgtcatggcgtttggtgccggtgcggcagtaccgtttaccgctggcgggtctggtgtgattgcggcgattagtctgtccggtacactggctacgggagcgcaatgcatgattggcgcgggccgtctgctggctatccataacgaccatggttccgatgttgcatggcttgacagccaggactggtacgttgccaccacgacagttctggatgtcatttcgcttgctgcggcaggaaccgcgctaagaggtactttagaaacgtacaagctgatgaaagcggcgtcttcaagtaaagttaccgcctggttccagagcctgagccgtgccgaacgtaagcgcatcacggaagagatcattaaagcgcagaatccaggtatctccagtgccggggtaaaggccgcgatccgcgcaggtgtttatccgaaacgtttcccaagcgaatcgttacaaaaatcactgcagcgcgaactgatgagtgcggtcaacaacgcatcggcctttgtggggagctcactcactgggactatccgcaatccacaaaataccgtccagtcaggacgctatgtagtaggtgtgctgcaatcatttttacctaactga

SEQ ID NO: 127986 - DNA, 267 bp, Enterobacter cloacae
gtggtgaatcacgctgacgatatactgctgctgctgcgcggtgagctgaacaccgtgaggaatattatgccatttcgccagacagccccggcaacaggtggcggtggcatgctgggcgataaataccgggtgaccgcgcatgggcgtctgtttgccgtcattcgcgggttgtgcaggggcaaggcgcttttcgacaaaatcagcggcatgctgatcaatggtatcggggcctttgtcccagcaatactgccgttccttatcgcctaa

SEQ ID NO: 127987 - DNA, 1011 bp, Enterobacter cloacae
atgggggagctggagcaacatgttgctcagatgccgctggctaacgcgaagcatgttgtggaatcaatcggccagcaggtaatctctgctgaagcgctgaaaacctttgctgcaggtgttgaaggtggcaaacgtatcagtatcccagttaaggcggcactgacttctgctgatgtgcctgatggcgttatcgaaccacagcgaattccgggcatcgatacggcaccgaagcagcgcctgtttatccgcgatctgattgcgcctggtcgcacttcctcccctgctattttctgggtgcaacagactggctttaccaacaacgcgaaagtggttcctgaaaatacacagaaaccatacagcgaaattgagtttacgccgaaaatcactggcgtaagcactatcgctcacctgttcaaagcctcaaagcagatccttgatgacttcgcacagctgcagtcaaccgttgatgcagaaatgcgctacggactgaagtacgcggaagagcaggaaattctcttcggtgatggtaccggcgtgcatctgcacggcattgttcctcaggcgtcggcatttaacccggcgtttactgtagaacagcagagcggtattgacgatctgcgtctggcaatgctgcaggcgcaactggcgcgcttcccggcatccggccacgttcttcacttcattgactgggcgcggatcgaactaaccaaagacagcctgggccgatacattctggctaaccctgcggcgctgactggaccgacgctttggggcctgccggtagtagccacggaagcggcggccttccagggtaaattcctgactggtgctttcaacgctggggcgcaaatcttcgaccgcgaagatgcgaacgtgattatctccacggagaacgccgacgacttcgagaaaaacatgatcaccatccgttgcgaagaacgtctggcactggctgtgaaacgccctgaggcgttcgtgtacggttcattcagcaccggcgcggggagctga

SEQ ID NO: 127988 - DNA, 450 bp, Enterobacter cloacae
atgattgagacgagcctcgatttttcagggctgaatgacatcgcaaaggatctggaggcgcttagccgcgctgaaaacaacaaggttctgcgtgatgccacgcgcaccggcgccgaagtgcttaaggaagaagtgatcgcccgcgcaccggtgcgcaccgggaaactgaaaaaaaacgtggtggtggtgacccaaaaaagccgccgtcgcggggaaatatcttccggtattcacatccgtggccgcaacatgcgaaccggtaatagcgacaacaccatgaaagccagcgacccgcgtaatgcgttttactggcgtttcgttgaaatgggtaccgttaacatgccgccgcaccctttcattcgtcccgcgttcgatgtacgccaggagcaggcgacggaggtcgcaatcaggcgcatgaaccaggccattgacgaggcgttaagcaaatga

SEQ ID NO: 127989 - DNA, 348 bp, Enterobacter cloacae
atgacggaagacgatctttatcctctgctggcgccgctggccggagggcaggtttatccctacgttgccccactcggcagtgacgggaagccttcagtctctccgccctgggtaattttctcgattattaccgacgtggccgcagacgttctttgcggtcaggctgaatctgccgtttctgtgcaggttgatgtctattccagcaccatcgctgaagcgcgcacgatcaggaatatggcgcttgatgctctgcaggtgctgaagccggaaagcattgtgaaaacgccgggctatgagcctgatctgcgctatcaccgggcaacgctcgagtttcaggtaaccgtttaa

SEQ ID NO: 127990 - DNA, 471 bp, Enterobacter cloacae
atgaccagtaagtatgaagtcacaaaggggatgacctttgccgtctccgacgcacccgtaaccgccgaggattttaacgcctcaggtttcccgggggttggcgttacctggctggaagcagcctgtgcaacaaaggagatcaccttcaccggcgggcagaaaggggatatcgacgtaaccacgctgtgctcaactgaacaggagcaaaccaacggcctcgccgcgccagctgaaatgagcattacccgtaactgggttggcgatgaagcagcacaggaggcactgcagaccgcttacgaaaatgacgaactgcgcgcgctgcgcgtggtattcccgtctggcaacggtttctacgtgctggttgaggtgcgccagagctcatggtctgctgcaacctcttccgttgttggcgctacctattctctgcgtgtacgcggcaaacctaaacgcatctacgcgtctggttcctga

SEQ ID NO: 127991 - DNA, 402 bp, Enterobacter cloacae
atgccgcaaaaaacatcacagaattcattacgcaacgtggcgcttacagcatcgaaagcctaccgcaccaaagaaggtatcacggtccctgaatgggatggcgcaaaggtaacgctgcgtgaaccctctggcgatgcctgggtgaaattccgggagatcgttaatccccagctcgccgagggcgaagaggcaccgacgctgacggaggcggaaaagtttctgcgtaacaaagaggctgatgtggttctgtttattgacgttctgctggatgaaaacggcgagcgagtattcagcgatgaggatcaggagcaggtatctaaaatttatggtcctgtgcactcccgcctgctggctcaggctctcaacctcggaatgagccaggaagaagcgggaaagccgtaa

SEQ ID NO: 127992 - DNA, 264 bp, Enterobacter cloacae
atgtcgctggcgctccggttggggcgtactctccacgaactgcgccagacaatgaccgccagcgagctcaaaatgtggatcgagttcgaccgcatcagtccgattggtgactggcgcgccgatgctcaggcggcgcagatctccgttgcaatgctgaactctcagggcgggaaattcaccattcctgacgtgatgctgaaatggggtgagcaggaagaaggcgcagaagtctctgaacttgaagaatggatgtccagtctttga

SEQ ID NO: 127993 - DNA, 3210 bp, Enterobacter cloacae
atgggaaccgattactaccgcactatggaacagggcggaaaaaaagctgcagcggccacgcgtgaaactcagcggtctttggctgacctgaattctcagcttgcaaccgtgcgatcctctgctgccgggcttgccggtgcgtgggctggtgcatttgccacgcatcagctgattcagtttgccgacacgtggaaccagttgaatgggcgtcttcgccttgcgtcctcttccagcgaggattatgtgcaatcccagcgcgtgctgatggagattagccagcgcaccggaacatccctcgaggcaaacagcaacctgtacagcagaattgcgcagtccctgcgtgatgccggttacgcttctgctgacgtcgcaaaagttacggaaaccgtagcaacctcactgaagctgtctggcgcgagtaccgaagaggcgagctctgttatcacccagcttagccaggcacttggctcaggcgttttgcgaggcgaagaatttaactccatcatggagaacggcggccgcctggcgaaactgctggctgatgggttgggtaccactgtgggtggtctgcgaaatatggccaacaacggtgagctgacgaccaacaagatcgtcccgttgctgaccaacgtcgagatcctccgtaaagagttcgacacgcttcctgcatccatcagcggatctgctcagaaagtgcaaaacgcctttctcgcatgggtaggtggggcgaacgatgccgtcggtgcatcatccacgctttccggcgtgctggatggtctggcgaataacatcgatgatgttgccaatactgcaggcattctggttggcgtggggctggctcgttattttgggaatatggtcggcagcgttgctcagtcgacccgggcggtgctctctaatacggccgccgagatcgcgctggcgcaggcccaggttcgcggcgctcaggttagcgttgctgcaggtcgccaggctgtttaccgcgctcaacaggcgcgcgcagcggcgacgagtattgaggctcagattgtcgctgagcgtaatcttgctgctgctcaggcatcactgaatacggcgcttgctggcaggacttctgccgctaataacctcacaaatacggcctcggtgatgtcccgcctgggtagtggcgttcttggcattctcggtggctggcctggagtgattatcggtgccggcgctgcgatgtatggcctttatcagcatacacagcaggtgcaccgtgaggcggtaggttttgccaacaacctcgacgagatcaacaccaagctccagcagatgtcggtgcttggcctgcgttcgaccgcagccgatgcccgcacatctttacaggcgcaaaaacaggacctggccgacctcgactctcagatcgcgaaggtgaaagacagccttaaggcggttgaccaaattcagcaggactataaccgccatccgacgctgaccctgataaatacttttatggaccaggccgacatcacggccaaaaacatcgagctgaccgataagcttaatcagctggagtaccagagagaacaggcagcctcaaaagtcgagcaaacccagaagctcgtaaacaatgccagtgacctggctacgcaaaaggctatcgaacaggctggcgccgtttcaatcctgaaaggcgcttatgacctgcttaatcgctcaatgtcagcgaccgctggcgcgaagccgccgcagtatgccgggcccgtcgtttcactggcgaacgcaactcctcagcagcaaactgcactggagcgctcacgccgcgataacgagctggccagcctcagcggattagaaaaactccatcagcagcacgtctatgaagcagaagacctgcaactgacgggagcgctttacacccagtacatctacaacaaggatcaggcagccaaaaaggatgctgcggctgcggaggcaaaaaaaacctctaccgccgcctcgaaagcacagagtaaagccgagcgcgaagcggccagcaccgccgaacagtattcccggaaaatggccgacctgagcgtggctatcgacgtgcaacgcgtcagggcgacggaaggcgaaaaagcctccgagctttacgcggcatcgcaccaggcaggcactaaatggaccgacgagcagcgcagggcaatccaggcatcttcagcagagctggcaaaatggacgcaaaaagccgacgagaacgtacgcaagcagcgcgaacaagcggatgccctgaaggatttaaccgaagcggccagaaagttcagggatgaggcgacgctgacaaccgaaaccgcaggcatgagcgatcgccagcgcagccggttcgacgagacgcaacagatcgaccgtgtttttgctaaagcaggtggcgacaaaagcacccaggctgtgatagctcggcgcgaagctcttgatgctctggataagaaatacaaggcaatagcagcagctgaagcggattggatgtccggagtatcacgcggctatgccaactggtttgatgaaatcagtaacgtatccggcacggtttctgacggggtgaaaaccacactcgacagcgcgtttggtaacgtcacctcaatgctcgaaggcaataaagttagctggagatcgtggggtatttctgttctgcagattatcgaaaaagtggctctgcagatggcggtggtcagcgcgatgggtggtgcctcttccggttctggcatctttggctcactcatcggcagtgtaggcagcctcttcggaggcggggcgggagcatcagccagcaccggtacggcggtttccagttatggctcaaacttccagtttaacgccaaaggcggcgtttatgactctccatccctgagcgctttcagcaatgggatcgtcaggaaccccaccatgttcgctttcgcaaaaggcggggccggaatcatgggcgaggctggtccggaggcaatcatgccgctgacccgcgcgccggatggttctctcggtgttcgtgctgtcggaggtggcggaggtcagtccgtatcgtcggcgccacaggtttatatcaccatcgatggtaacggaaacactcaaacgcaggcggcgacaggctacgaacaatttgcgcgagaagttggtgcttttacagataagcgttacagggaactgataatgagagatttagcgccaggcggcgctatctggaatatggcaaaaggggggcgaggatga

SEQ ID NO: 127994 - DNA, 756 bp, Enterobacter cloacae
atgagtcttaacgctgattttcagaaactcgaacctggtgatgtggtcaggcttttcgaagtagatggcacggcatttggcaccggtgaagtcatgcgctttcacagctacagtctcgcgcatactgaggctgaaatcctcgctgctggcggtgatgaaaataaactgcctgcaaaatctatctggtggcagggtaatgagtataaaccctggccatgccagatagaggggatcgaggcgtctaccagtggaagcagtgcgcagccaaaattatcggtggctaaccttgacagctccattacagcgctttgtctggcttatgacgatttgctgcaggcgaaagtaactattcatgacacgctgggcaaatatcttgacgcgaataactttgccgacggtaatcccacagcagatccgactcaggaaaagctgaaggttttctacatcgatgcaaagagcagtgaaaccaacgaagttgttgagttcacgctatccagcccgatggacctgcaggggcaaatgatccctacgcgacagcttcattccctgtgcacctggtgcatccggaacaagtatcgcaccggcgacggctgcgactatgccggaacccgatatttcgacaaaaacaacaatccggtaagcgatccgtcgctggatgaatgcaacggcacgctaacggcttgcaaactccgattcggtgaaaataacgaactctcctttggtggcttcccgggcacgtctttgatcaggagttga

SEQ ID NO: 127995 - DNA, 579 bp, Enterobacter cloacae
atgacacgcattgaacttggcggcgttctcggaaagacttttggtaaaacacattatcgctcgataagcacaacccaagaagcctgcaaagccttatctgctacgattaatggtttcgaaaaattcatgaatacgagcaagcaaagaggactttcttatgcagtttttcgcggaaagaaaaatataggcattgatgaattaggttttcctgttaagggtgaggttataagaatagtaccagtaccgattggaagtaaaaaagcaggtgtattacaaactattttaggtgcggtattagtagcagtaggggtggtattgaatttcacaccatttgcaggagcatcaccatttttctatcaagctggtggcgctttgatccttggtggtgttgtccaaatgctatcacctcagccaaccggattagccagtaaacaaagcgcagataaccgcgcatcatacgcattcggtggagtgacaaacaccgctgctcagggctacccggtaccgctgctttatggtcgccggcgaatcggcggagcgattatctcagccggaatttatgtcgaagatcagcagtag

SEQ ID NO: 127996 - DNA, 3189 bp, Enterobacter cloacae
atggctacagaaaaagtagtaaagggccgcaagggcggcagctccagttcccgaacccctaccgaacagcctgatgatctgcaatctgtagcgaaggcaaaaatcctcgttgcgcttggggaaggggagttttcagggcagctaaccggcaaaaatatctacctggacggcacggcgctgcagaactccgacggctcccaaaactttagcggcgtgacgtgggagtttcgcgcaggaacgcaggcgcaaaattacatccagggcattcccggtaccgaaaacgaaatcagtgttggtaccgaagtatcaagcactacagcctggacgcgcaccttcaccaatacgcagctttcagcggttcgcttgcgtctgaaatggccgtcactctttaaacaggaaaacgacggtgatctggtcggctactcaataaactatgctattgacctgcagactgacggcggtatctggcatacggtactcaataccagtgtgaccgggaaaacgacatcaggttacgagcgcagccaccgaattgatttaccgcaggcgggcagcacctggacaatcagactgcgtaagattacagccgatgccaatagtgcgaagatcggcgacacgatgacgctgcagagcttcactgaggtgatcgacgccaaactgcgctacccgaacacagcattgctttatattgagtttgattcaagccagttcaacggctctatcccgcagatttcatgcgagccacgcgggcgcgttattcgcgttcctgataactacgatcctgaaaccagaacctacttaggcacatggactggggcgtttaaatgggcttggaccgataacccggcgtggattttttacgaccttgtggtttctgaccgcttcggacttggtcaccggctcagcgcggcaaatatcgataaatggacgctgtatcaggtggctcagtattgtgatcagagagttcctgacggaaagggtggcagcggtaccgaaccacggtatacctgcaacgtgtacattcaggaccggaacgacgcctacacagtcctgcgtgattttgccgctatcttccggggcatgacctactggggcggcaatcaaattgttgctctggctgatatgcctcgtgatgttgattacagctatacgcgcgcaaacgttattgacggtcgcttcacctattcgagcagcaccacgaaaagccgatacactactgcgctggtatcatggtccgatccagataatgcctacgccgacgctatggagccggtatttgagcaggcgctggtcgcgaggtacggttttaaccaactggaaatgaccgccatcggctgcaccaggcagtcagaggcaaaccgaaaggggcgctggggtattctcaccaacaataaggatcgcgttgtttcgtttgatgtcggcctggacggaaacataccacagccaggctacatcatcgccgtggctgacgaactgctgtccggaaaggtaatgggtggccgcattagcgaagttaacggtcgcgttatcaggcttgatcgtgttcctgatgcgactgcaggtgatcgccttattctgaaccttccatctggagcttcgcagagtcgcaccattcaggcggtaaacggtgagtcggtaactgtcacaaccacgtacagtgagacgccacagcctgaagcagtttggctggtggaatcaaacgagctctacgcgcaacagtaccgcgttgtcagtgtgagcgataacaataatggtaccttctcaatcactgcggcatttcatgaccctgacaaatacgccagaattgataccggcgcgattatcgatcagcgaccgattagtgttattccgccgggaaaccagtcagcaccagccaacatcgtgatcagctcgttttctgtggttcagcagaatatcagcgtcgaaaccatgcgcgtaagctgggaccaggcaaaaaatgccatcgcctatgaggcacagtggcgccgtaacgacgggaactgggtgaacatgccgcgcagctcgactacgtcattcgatgttcctggcatttatgcagggcgttacctggtgcgcgtgcgcgccatcaatgctgccgaaatatcatcaggatgggggtattcagaagagaaggcgctgacaggcaaagtaggcaaccctccgaagccagtgggatttatggctactggcattaactggggtattcgtctgaactgggggttcccggcaaacaccggtgatacgctaaaaacagaaatccagtacacggccaacagtgacttttcagatccgctacttctgtcagacgtgccttacccatctgctgaatatactcagcttggactgagggcggggcaggaattctggtaccgcgcgcagctggtggacaaaacaggaaatgaatcagggtataccgactggattcgcggcatgtctaacgataacgccgatgactatctgggtgatatagccgatgatttcctgagttctgccgatggcgatcggcttacaagtgacattgatacagatttggaagcagcactgcaaaacgcactggcgaacaacgcaacggttgatcaccagtgggcgcagtatggtgaggtccgtgctgaaatcctcattgtcagaacgacaatagccgaagttgataaagctatggctgaactctccacgactgtacaggcgcaaattgaggacgtcacggcaacgcttgaagataagctgactgctgttgttgatgcggacggcgccacggcgatttataccctgaaggcaggggttcgcatcaacgatgtgatgtataacgccgggatgtctattgcagtgcttgcagaggcagggaagccggtggtcacccgggttggtttcaacgctaaccagttcgtgctgatgagcggcagcggtgatacccagtattcgccgttcgcggtggtaaacggtcaggtgtttatcagctcagcgtttattcaggatggcacgatcaccaatgccaaaatcggcggcttcatccagtccaataactacgttgctgggtctgtcggatggaggctggataaatcaggaacattcgagaactacggctcgacagctggagagggagccatgaaacagacaaaccagacaatcagtgtgcgtgacgccaacaatgtgttgagggtgcagatcgggagaattacgggaacgtggtaa

SEQ ID NO: 127997 - DNA, 315 bp, Enterobacter cloacae
atggctcagtacggtgttgaaacctgggacgcctcaggcagggtgaacaactatgggattaagccagtcagtgtaagtggatatcttcagttggctcagaaccagaaaacaggcacttactcagtcgtgcttccgccggggtgtaagcttacttattttcaggtcatgaacggtgatcagtggggaacgagccggaggaagatcactatttcaggtgggaccgcaacggtatcggcagtaggcgataccgactactccgcagggactgagcctgcggccgcggcgtatctcattttccagatagagagggcataa

SEQ ID NO: 127998 - DNA, 672 bp, Enterobacter cloacae
atggcgcagtatggcgttttactgacgacgacggccggagaagtatgggtcaccgctaacagttcgcctatttcgttgcaggcacggaagacagcagaacttcaggggacatcgggtttcaataccaaagtgacgcacacatttccctcaggtcagcccgttgtcgcctttgttcattgcactgttgaggtggaaatcacccagacgataagcgggaacaccatcacagttgatttcctcagaccaaatgcaaccggcacagcgtacgtttattttttctctattttcccacagacaaagccagactacgggctggccgtctgggatgcgtcagggacgcttattttgacaaacgaaacgcgcacactcagtgatgtggtaaccctcggtactgccggagtagatgcaagttcaggttataacatcaataccacgctggcggggaaatgggcctgtatgccttgcatgctgggtctaattactggagttatatcggctggcggccagccgcagccctactcggcgatttacaagagcatggcaaaacttgagggaggcaatacgcgaatattcgcaaggccacaaacagcgcccagaggaaaccttcagaacgtcgcgtattcaaatctgagaaacgtgataatggccatcaactgcgccaactacgattga

SEQ ID NO: 127999 - DNA, 234 bp, Enterobacter cloacae
atgaaaaacatgattttttgcctggcggtggctgtattgctctctggttgcgctggcgttcttcagaagcagcaacccatatgtaccggaacggccctaatcggcggacaggaaaacatcgtccagatttacggagtgcgaaagcaaaataaccagacccaataccgcgccggttacccatttaactggtcatgggttagcgcaaacactttcagtagtaccacgtgccagtaa

SEQ ID NO: 128000 - DNA, 1170 bp, Enterobacter cloacae
atgtctgcaggaactatcaccctgtcacacgggtccgctattgttggcggttccggaacctcattcgcaacagaactcgccgcaggtgactttattgtctctactgtgggcggtgtaccgtatacattacccgtgaaaacagtcgacagtaatacccaactgacgctggtcagcaactttaccgggccaacacaatccggcgcagcctggtctgccgttcctcgcattgcactcaatatggttacggctgcgctggtggcgcaaagtgccgaagcactacgaggcctgaactacgacaaacggaactggcagcaggtcttcagtggagcgggggatatcactgtcacaatgccggatggaacacagtattccggtccatcatggccttcaattgtctcctctgtcagcggaaagctatcctctgacgcaactactctaagaaagctattcacctctgcatttgtgaatccaggggataactggcagtatccaggagttactacatataataacaatttgtggggaagccccagccagtgggggactgtacttacgctctctaatcaggatgtatcaggtaatggttacgatgggcgctggtatagttaccttcagatagatacctctggcaactttgccgttgcggcgaacattaacaacaccttcttcggtgtctacagggtctggactactaaaaacacaactgttgatggctcaggcttcatcaagcgcgcctcgccgattgcaagactggtcgcagacacttcaattatgagcggcgagtttactgactcgtttaaaatctccggcagcggtgcggttaatgaagaggcggaaggtgttgatatcgaaaagctgggtgatggtaggtatcggatttccggttctgacggtctcgcacaggatgggtggcagatcgaagtgccgaaagatattaacggcaatcgactttgctttgttgaggtcacggagggtcttgagggtattcttttaaaagtattcaagccaaaacttgaccttgaaactggagggatcattgccggtgagtcttttgacattccagaggggcgctggattgatgtgaggctgcaaatgccagcaagctcagcatacaatgtcgttcagggaaaaatcgcagggcaacttgaatctcagcaaatggccggataa

SEQ ID NO: 128001 - DNA, 333 bp, Enterobacter cloacae
atggacgaaaagtccctctatgcacatatcctcaacttgtcagctctgtggcaggtaaagtctctttctctcgatgaaaataccgcttctgttaccgttactgtcggaatcgctgaaaaatactcagttgacctgtcgttaaaagtgacgcaaggaagcgtcctgcttatccgcctggctggcgaactgcagtttgcaaaattgatgggtgaatcgtttatcacagaggatggtgaggcgatagaaggcgaatcgttggaggatgtgatcgttgtaggcagggtgacttattttgttaatcgggcaggggaagatgactgcccgatactttag

SEQ ID NO: 128002 - DNA, 294 bp, Enterobacter cloacae
atgtcaccttcagatgcccccataaactggaagcgtaacctcacgattgcgtggcttggctgttttctcaccggcgcggcgtttagcctggtcatgccttttctgccgctttacgtcgaacagctgggcgtgacgggccatagcgcgctcaatatgtggtccggcttggtattcagcatcacgttcctgttctccgcgatagcctcgcccttctgggcggccttgccgaccgcaagggccgtaaaatcatgctgctgcgctcggcgctggggatggccattatcatggcgctga

SEQ ID NO: 128003 - DNA, 1500 bp, Enterobacter cloacae
atgaaaaagcgcattgccgttgcgatcgtttcaacgcttctggtcattctgtctctttatgcggtcaatgcggttatccttggtcagcaaaaaaccaaacagcttgaaatatcccggacccttttacattattccgaagacctgtcccaaaacgtggcgctgggccttaaaagcataacgacgcagggctgtgataaaaccagccttgatagctacagacaaataaagcttaacaacctctatttcggcgatatcggttttattgaaaaaggaaaaattatctgtactgctttttggggtaaactcgcgacgcccgttccacttcctgcggaactgcataaaacgccgagaggttttctcctcgcgcagttttcaagaaaagactttttcacgggcaatgcggccatttataataatattattatcttcacctcccgctatgcttacgataaattcaccccggttaccgcaagctattctctgagtgccaccacaaaggactttggccggatctttttttcggctgcccccgacctgcgagcgcggagctggctgcactccacgttgttcaccctgaccattacacagtgcagcgccgtgtgggatttatgcgtgattgtaaaacatcacgatgcgggactggcctcgttacccccgtttatcttgacgtttctcgcgatcattctctactttatctgggtcgcgataacgttatttgtcttgcgcatccatgaagaccgtttttcgctggaacgtacgctaatcaaagccgtgataacaaataccttcagcgttaactatcagcccattattcgcattcgcgatcaaaaaatcgtgggcgtggaagttctgtcgcgatggcgcgatcaaaaacacggagacgtctcgccggagctgtttatcccattaattaagaaaatcgggctgtataaaagatattatggcaatgttatcggtaaatcgctctcagaaattgccccgctggcgattaagcatcagctgatcgtttcaatcaacgttgggcggaaagaaattgaagacggacagtttattaacattttgcgtcgcgagtgcttagtcaacaaccttcccctttccctgatgaaggtcgagctttctgagaaagccgtttccgcggcgaatatcctagagggattctgccaggaactaaaatcgcttggcgttaaaatttcaatcgatgatttcggcgtacaaaattcaaatctggcgcggctgtcgcagcttgaatatgatgaaatcaaaattgacaaatcgctggtggatggcatcagcgaagattataagcaaaacatctttgttatcttcagcgatgccctcgcgaagttgaataaaacccttgttttcgagggcgtggaaaatgaaactcagtatcgcttcattgcggacagatatcccgacgcgctgatccagggatggtatttttcaaaagcactcacccggagcgagctggcgcagcgactcaccggcgtcgccccgtaa

SEQ ID NO: 128004 - DNA, 1473 bp, Enterobacter cloacae
gtgcatgtgaaaaatactttttacacaacaaccattaccgtcatcattgtctcattgatcatctcgctggcgcttgccgtccaaattgccacgtccagacagcagtcaatccagcaaattaataccagcgtcgctaacctcagccacaccctggatgtttatactgaagggatcatgcgccagagtgaaatgttaattactaccgtttccgacataatcgaaatttatggcatgaccccgcagcaggcggccaatattcagcacatgatccataatcaggataaccttcttacccagattaataatgtggttgtttacgatgctcagggcgatatcttcaccgcgctgcatgaaagtttcacggggccacgcaaaggctcggacagagagttttttatctatcaccaggaaaataaaactcagcaggtctttattggggagccggtggtaagcagaaccaatggcaaatgggttatcaccctcagtcggcgccttgaaacccagtccggggcatttaacggtgtcgtggtggtgacgctcggtattgaaaattttctggcactctacgggcagattaatatcggtcactcgggcgtcatcggcttaacgacgcaatcaggcgtgctgctggtccgttatccctttaaaaatacctatatcggcacgattgtttctgattcaccgctcttcaggaaatatctcaaagtacaaaatacggggatagccagctccatctcacggtttgataaaatcgagcgcatctatgcctatgagaaaaaccgacgctacggactggtcaccacagtggccgtcagcattgatgaagcgcttgcaccctggcgcaagcaggcgattcagctggcggtactcattttcgtgtttacggcgatactcatcgtggcgtcgtacttcctgtattccgacctgtcccgaaaaacacgggataacaaagcgctgaagattatcgcttcagaagatgcgttgaccgggctgtacaaccgccgcgtctttcatgaaaaaatcctctcggaaattgctacgtgcgccgcacatgacgcgccgatttcggtactgatcgtggacgtggactacttcaaaaaatacaacgataactatggtcatcctgaaggggaccggtgtctggcaatgctcggaaacagcctcagggagagccttacccgtgataatcagcttgtggcgcgctacggcggagaggagtttgcgctgatattgccggatacggatattcaggaggcacttcgtctggcccagacgattattcgcaatgtgttctcgctgcaaatcgcgcatgcctttagccccttcggccgggtgacggtaagcgtcggaatttccaccgcccgtgccgtcgacattgcaggcagccagcaaaatatcattattgccgcagaccaggcgctctatcaggcgaaacgcgcgggacgtaaccggtacgcgtttgttggggtatga

SEQ ID NO: 128005 - DNA, 159 bp, Enterobacter cloacae
atgggcgaacttgagcaacatgttgcccagatgccgctggcaaacgcgaaacaggttgtcgagtccgttggccaccaggtgatctctgctgaagccctgaagacctttgcttccagcgtggaaggtggtaagcgcatcagtattccggttaaacggtga

SEQ ID NO: 128006 - DNA, 1485 bp, Enterobacter cloacae
gtggaatcaaacgagctctacgcgcaacagtaccgcgttgtcagtgtgagcgataacaataatggtaccttctcaatcactgcggcatttcatgacccggacaaatacgccagaattgataccggcgcgattatcgaccagcgaccgattagtgttattccgccgggaaaccagtccgcaccagccaacatcgtaatcagctcgttttctgtgattcagcagaatatcagcgtcgaaaccatgcgcgtaagctgggaccaggcaaaaaatgccatcgcctatgaggcacagtggcgccgtaacgacgggaactgggtgaacatgccgcgcagctcgactacgtcattcgatgttccgggaatttatgcagggcgttacctggtgcgcgtgcgcgccatcaatgctgccgaaatatcatcaggatgggggtattcagaagagaaggcgctgacaggtaaagtaggcaaccctccgaagcctgtgggattcatggccactggcattaactggggtattcgtctgaactggggattcccggcaaacaccggcgatacgctaaaaacagaaatccagtacacagccaacagtgacttttcagatccgctacttctgtcagacgtgccttacccatctgctgaatatactcagcttggactgagggcagggcaggaattctggtatcgcgcgcagctggtggacaaaacaggaaatgaatcaggctataccgactggattcgcggcatgtctaacgataacgccgatgattatcttggtgatatagccgatgacttcctgagctctgctgatggcgaacggcttacaagcgatatcgatacagatttggaagcagcactgcaaaacgcactggcgaacaacgctacggttgatcaccagtgggcgcagtatggtgacgttcgtgctgaaatcctcattgtcagaacgacaatagccgaagtcgataaagctatggctgaactctccacgactgtccaggcgcaaattgaggacgtcacggcaacgcttgaagataagcttaccgcagtggttgatgcggacggcgccacagcgatttataccctgaaggcaggggttcgcatcaacgatgtgatgtataacgccgggatgtccattgccgtactggctgaagctggtaaaccggttgtgacacgggtcggttttaacgctaaccagttcgtgctgatgagtggcagtggagatacgcaatattctcctttcgcagtggtgaatggtcaggtgtttatcagctcggcattcattcaggatgggacaataaccaatgcaaaaataggtgcttttatccagtctaataactatgtcgcgggtactcagggatggcgtctggataaaaacggtacttttgaaattaacggtgttgctggcggcgggaggatgattataaataatcagcttatccgtatttacgacagtaacaatgtcctccgtgtccgtatggggttatggtga

SEQ ID NO: 128007 - DNA, 642 bp, Enterobacter cloacae
atgagcggatttgaggtttacaacgagagcggaaaaattacagttgactcagataacaggggaacacttttctatgatcagagagcactcggcacagtacaaagcaaaggtgcttacagaatagacagccctttcggagacggcagtacgttgggctatacaccgcaagagttctggaatgacggtcatttaagatggttacaactctcaccaaataagtatggtatgccaggcgccgaaattcttgaggactatgcggggatgatgatccgcaccagcaggaatgctgcgctggagagtggttatcttgatgttttcaacggtgcgggtgaactcatctggagtgccgtgtcagcgtctaagatgccaagaataatgggtttttttgatgttccacctggttatgatcttcagaacaacacctttatcgtaaccccaggctttaacccgtggattctggtcaataactgccctggaaatttaagtgatgatggaactgttgtcggttattcaggtatcactctgaagtggaccggctcgcaattgcagggccggtacatatcaaaaaatcaaaaaagctgggggcaaacgttacaaaatcaggggatcagaatccctcttgctcagttcgttgggatctga

SEQ ID NO: 128008 - DNA, 303 bp, Enterobacter cloacae
atggattatccggtcgatgctgcccgtttatcactgggtggcgatgttaatgtgcagattaactgcgcaaccagacaaatggatattatttctgatacaagcgatgggcttttcagtcgccatatttataagcgcctcagtaatatctgttataagaaagcagacagcatgaatgtgatttatcatttcaatgcggataaaggcgttaagcaaaatatgatagcaactcagtatccgcgtgttccgccaaagtcagatcccaacgaactgagcaagagggattctgatcccctgattttgtaa

SEQ ID NO: 128009 - DNA, 1980 bp, Enterobacter cloacae
atgtcagctggtacattaacactgacgaatggctctgatatcgtcgccggttctggaaccgtattcaatactgaacttgctgcaggtgattttgtagtcgccataattggcggtatcacttatacgctcccggtaaaatcagttgaaagcccggaatcattaacgctaattcgcgcatttcccggtccgacgcagtcaggtgctgcatggaatgccattccccgcgccacgcaaaaccagttaacggcagagctggtatcgcagacaacggaagctttgcgtggtctgaactatgacaaacagaactggcaggctatcttcagtgacgatggtaacatcactgtcaggctccctgacggttcaacgttctccggcccgtcatggctgaagattgtcgagttacttaacagcatcgatgtggatgctcttcaaatcctggctgctcagattcatgtggacgcgcaacaggtagctttggataagacagaggttgtgcagaataaaaccgcctccgaaagcgcagcaaccacagcaacgcagaaagctgatgctgcggctcagtcggaggcgagcgctgcacagtcaaagactgatgcggcccaatccgctcaggaagcagaagcagatcgtattgctatcggtgatgttgaagccgcgcttgctgccataaatggcgtggccactatcccactcggtctgccaatgtattcgcccacgcgcgcaacaatccccactggtggcgttgcgtatgacgggcagatactgccttatgcgacctacaccagcgttaaggctgcaatgacctcaggatcactacctgtggtcactaatgctcaatggctggcagaccctaagctgcggcaggcattcgcagaggttgatgcggaccacttccgctgccctgattacaatggtgtgcaggcgggctcgattgcgcaggtggcattaaccggtggtacaacagctcaggcaggcattttccatggcgaagcgccaaatgccaaaggtacgatcggcgcgtccggaacgggagtttttgctaatacagcgtcaaccagcggcgtattcgcgcctacgaatacctatccaaacagcgctcaggcgggaagcgcttcaaccacgaccgcgtcacaggtgagtattgacctttccagggcaagtgatgtctataaagacaccgccagcgatattctggctgcgcgtgccgttggtgttatctgggggcaactctttggccgcatcaataaccccggcagcatggacgccgcaacactggcggcaagaattgagcaggtaaacactcgtgtaactgaatcgatcaataagcgctttatccgtgggttagatctgaccgtgtcgacaacgacagtaacggtttctgctggcgcagctgtaatcccctctacaggcgctcccctggaagtatcggcgccagttacggcaaatatcggggcgaccacagcgtcaacctggtatcacgtttacctgtattcaaacaatggaacgcctgcgattgaaatctccacgacggtgccaacaccatatgcttatcctgcgcatacaaagacaggtgatacttcacgccgttatctcggcagtttccgtgttgatgcatcgaacggcgtgcgcggggttaacacggttgacggaagggctttcctgcagggttcatggtactccgtcaaccgcgtattagccggaggaacagcgacaccgcgaacggctgtagacgtaagttctcttaacccagtcacggcacttacctgtttactttctgccaacaacggcgctaccgcaggtgtggctgccatcggaagtactaatgaagcgtcaggcgatatgatcaacgtaccgattaacgggaagtttacagccgagatcccgttccgctcgtaccctaacattttttatcaatacctgtccgccgtgtctggtggtggactctatctcgatattggaggctatacctatgccagataa

SEQ ID NO: 128010 - DNA, 315 bp, Enterobacter cloacae
atgccagataaagaatactgggctgtaacagaaacaagttaccgtgcggtgagtggccctgacagcctggcagagggtgaaacccttgtagaaggggcacgcccggttatcccttatcttgacaacctctacactcaacaagaacagagaacaaaagcggatgccattatcgaatcgctgcaggaagcggtagatgttgatctggccagtgatgatgaaaaatccaggttgctggcctggaagcgttatcgtgtactacttagccgtgtcgatctgcgcgctgcaacaccaggctggccgacacttccagactaa

SEQ ID NO: 128011 - DNA, 315 bp, Enterobacter cloacae
atgctttatagctgcatgaataatacaaaatggaatgagatccgcatggcaatggttagcattgaatcttcccccttatggaaaatcacttttctcaatggctatgaatctgcagttgatggcgagtggttttaccatttctgtgaaggtggctatttggatatcaagtatcttgatattatgacaaactcagttgaacaacataccatggtaggtactattcttcgcgctattcatctcccaggaatcgaggtatcaaccggttatagaatttggggatacgcagattcggtcagctatgtagattatctttaa

SEQ ID NO: 128012 - DNA, 1986 bp, Enterobacter cloacae
atggatccttatcattggatggaaacacacccccaacagactgctcgctggttaaatcaacgctcaaaccagacggttaagacactccacgcccttccatggagaaacgcgctggcgaaaaggttaagcgagctggagaatacggcccccactatttctgatatttatgatgcgggacaaaatcgtttttatctacgctcaacggttgaacacccctacctgcggctgtttgtaagacagaagggaaaaccggaacgggtgctcattgatccgcatgttggctatgggattaatttttttagcccttcacatgatggtcgctacgtggcttttgggctctcaagaaacgggactgaaagcacgagaattaccgttatccgggttgtggataatgtcgtattagattcgcatatccccgacgttcgctatcccagcgttgtctgggccgcggataaccagtccttttattatagcctcaatgccatcactcaggattcaggacgacaaacctgcggcaaggtctacctccatcgtatagggcacgacagagacgttatgacgtttgactggcgcacgctccctgaactcgcacaaaaagcctgtgaaaacgttaatctgtacaccactcctgattctgaatatctgattgttaacgtttcaaaatctatcagtggttatggaggctacctttttgccgccaaaaaagacccggatgacaacggcacactcatctggaacaaaattgttgataccgataaaaatgtttctgcctttgtttattccggggagtggatttatctggcgagctataacgcctcctcaggctacgatatttcacgtatcaatctggccgctcctgcctccaccaaagaacccgtgatgagctggtcgaacggagaattaacacaattaagcctgagtagggattcactttatgtggcttatcatgacgccggaagcagtaaattcatacgtattccgtttgctgatatccgtaaccaccaggcaattccggtccctgcagatgaagacgtgagtgcgatatttgccagcagcgatagtcaggacattctcttcacccgtcagggctggcttcatccccccgtcatttatcattatcaacctgcggataacattatccagaaaacagagttaataccgccgttaagccagccccttacagactatgtgacggaagaaaaatgggtcactacagctgagaatgttcgcgtcccactgactctcatataccgtaaaggcattgcgcgcgatggttcggtccctacctggttgacggcttatggcgcgtacggcgtgagtacgtttccttcattcgatctgacccgtctgctctggctggaacaaggcggtattctcgctatcgcgcatgtacgcggaggcggtgaaatgggccctgaatggcacgaggcaggaagagcggataagaaagaaaattccattaccgattttattcgttgcgcggaatatcttatcgacagtcgctacacctcaccgtcaaaactggcaatcgggggtgaaagcgcggggggaattatcgtgggtatggcgatgacccgtcgcccggaactgttttccgcagtggccatagacgccgggatactgaataccagccgactggataacattccgataggcgtgatgaactatgacgaactgggttcaccgctgacgccgtctggcaggctaaacttattgaaaatagatgcctaccaacatctggtacctgaaaaacgttatcctcccgttctgttaaccgtgggcctgcatgaccagcgcgtttccccgtggcaaacagcaaaattcgccgcccggttagaggaggcaggctcgccgcgaagcgtgctggttctggcttaccgtcagggaggacacagtgcggcaacctatgccgaggccgattcaaaattagtcgacacggtaagtttctttatctggaaaaccggtcttcacgttcaggacaggtga

SEQ ID NO: 128013 - DNA, 654 bp, Enterobacter cloacae
atgcacaccacccaccgcacgttcatgctcgccggccataccgtacaccacgtcaccttcgacccaaccaccttcaccgacgccgatctcctctggctcccccaccacgctgagcttgcaaacgccgggcgcaaacgcaaagccgagcatctggcaggccgcatcgccgccgcgcatgccttacctgaccacaccgtgcccggcatcggccccagcggtgaaccgctctggccggaaggcgtttcagggagcatcacccacagcggcacgcaggcgatggcggttgccgtccgttatccagacgcgcttgtgggtattgattgcgaagccattcttcctgaccgagaagcccgagaaatccaggacggcatcattaatgcacaggaagcgatgtgcctgacgcgctcgggctacccctttgcgctggcgttgacgcttgcattcagcgccaaggaaagtttgtttaaagccctgttccctacggcaaggcgctacatgggattcgatttttcgcgggtcacggcattgaatcagaaaactatcgcattgacgctcagccatccggcgggccgttatcagcagggaaaatgctatagcctcgcctggcaacatgttaatggggaggtatataccttgattgtcgatcaggaataa

SEQ ID NO: 128014 - DNA, 1704 bp, Enterobacter cloacae
atgggcgatctgctgattcacgagggcgcgccgtgcatcgcacagcagcatgcggcgaaggtctttaatgccgataagacctatttcgtgctcaacggcacctcgtcatccaacaaagtggtgcttaacgccctgctcaccccgggcgacctggtgctgttcgatcgtaataaccacaaatccaaccatcacggtgccctccttcaggcaggcgcaacgccggtctatctggaaaccgcgcgcaacccgtacggctttatcggcggcattgacgcccactgttttgaagaaagctatcttcgcgagctggtggcagaagtcgcacccggccgtgcacgcgatgcgcgtccgttccgtctggcggtgatccagctgggcacctacgatggcaccatctacaacgcccgccaggtggtggataagattgggcacctgtgtgattacatcctgtttgactcggcctgggtgggttacgagcagttcattccgatgatggccgactgctcgccgctgctgctggagctgaacgaaaacgacccggggattttggttacccagtccgtgcataaacagcaggccggcttctcccagacctcgcaaattcacaagaaagacagccacatcaaaggtcagcagcgctatgtcccgcataagcggctgaataatgcctttatgatgcacgcctccaccagcccgttctatccgctgtttgccgcgctggacatcaacgcccgtatgcatgaaggccagagcggccgcaacatgtggatggactgcgtggtgaacggtattgaggcgcgaaaactaatcctggagcactgccggtatctgcgccccttcgtgccggagacggtggatggccgtccgtgggaaagctgggacacggcggagattgcgaccgatctgcgcttcttccacttcgtaccgggtgaaaactggcacgcttttgaaggctacgccgagcatcagtattttatcgacccgtgcaagctcctgctgaccacgccgggcattaacgcccgcaccggggagtatgacggcttcggcgtgcccgccaccatcctcgccaacttcctgcgtgaaaacggcatcgtgccggagaaatgcgatctcaactcgatcctgttcctgctcacgcctgcggaagatatgggcaagctgcagcagctggtggcgcagctggtgcgtttcgaaaaactgctcgagagcgatgctccattaaaagaggtgctgccttccatctgcagacaacatccggaacgttacgcggattacaccctgcgccagatctgccaggagatgcatgacctgtacgcccgtcacaatgtcaaacagctgcagaaagagatgttccgcaagtctcacttcccgcgcgtgatgatgaacccgcaggacgcgaactacgcctatctgcgcggagaagtggaactggtctccctgcgcgacgcggaaggccgcatcgccgcggaaggcgccctcccttatccaccgggggtattgtgcgtggttccaggggaggtctggggcggctccgtgctgcgctacttcgccgcgctggaagaaggcatcaacctgctgccgggcttcgcgccggagctgcagggtgtgtacgtcgaagagtgcgagggccgcaaacaggttcgctgtaacgtcatcaaacaacccgccgctcagcccgcgctgctgaaaggagagaaattatga

SEQ ID NO: 128015 - DNA, 2049 bp, Enterobacter cloacae
atgagtcgtaaacaactggccctgttcgaaccgtcattagttcgccaagcgctcatggatgcggtgaaaaagctgagcccgcgcgtgcagtggcacaacccggtgatgtttatcgtctgggcgggaagcgtcctgaccaccgccctggcgattgccatgggaacgggccatatgccgggaaatgcgatgtttaccggcgccatcagcctgtggctgtggtttaccgtgctgttcgccaactttgcagaagcgctggcggaaggccggagcaaagcccaggccaacagcctgaaaggggtgaaaaagaccgccttcgcacgcaagctacgtgagcctaagtacggcgcgcagatggaccacgttccggcagatgaactgcgtaaaggcgatgtggtgctggtggaagccggtgacatcatcccttgcgacggcgaagttattgaagggggcgcatcggtggatgagagcgccatcaccggcgaatccgcgccggtgatccgtgagtccggcggcgatttcgcctccgtgacgggcgggacgcgcattctctccgactggctggtgatccagtgcagcgttaacccgggtgaaaccttcctcgaccggatgatcgccatggtggaaggcgcacagcgtcgtaaaacgccaaacgaaattgccctgaccatcctgctggtggccctgaccattgtcttcctgctggcaaccgcgacgctgtggccgttctctgcctatggcggtaccgcggtcaccgtcacggtgctggtggcgctgctggtttgtctgatccccaccaccatcggcggcctgctgtcggccatcggcgtggccggcatgagccgtatgctcggtgccaacgtcatcgccaccagcgggcgtgcggtagaagccgccggtgacgtggatgtgttgctgctggataaaaccggcaccattaccctcggtaaccgccaggcgtcggatttcttacccgccccgggcgtggatgaaaaaacgctggcggatgccgcccagctctcctcgcttgccgatgaaaccccggaaggccgcagcattgtgatcctcgccaagcagcgctttaacctgcgccagcgcgacgttcagagcctgcacgccacgttcgtgccctttacggcgcaaacccgcatgagtggcattaacattcaggatcgcatgatccgtaaaggctcggttgacgcgatccgccgccacatcgaggctaacaacggccacttcccgccggaagtggacagcctggtcgaaagcgtggcccgtcagggggcgacgccgctagtggtggccgaaggcgcgcgcgtgctcggggtcattgccctgaaggacatcgtcaaaggcggcatcaaagagcgctttgcccagctgcgtaaaatggggatcaaaacggtgatgatcaccggggataaccgtcttaccgccgcggcgattgccgccgaagcgggcgtggatgatttcctttccgaagccacaccggaagccaagctggcactgattcgtcagtatcaggcggaaggccgtctggtggcgatgaccggcgacgggaccaacgatgctcctgccctcgcgcaggccgacgtggcggtggcgatgaactccggtacccaggccgcaaaagaggcaggcaacatggtcgacctcgactctaacccgaccaagctgattgaagtggtgcacatcggcaagcagatgctgatgacgcgcggttcgctgaccacgttcagtatcgccaacgacgtggcgaagtatttcgccatcattccggccgcgtttgctgcgacctatccgcaattaaacgcgttgaacgtgatgcacctgcactctccggcctcggccattctgagcgcagtcatctttaacgccctgattattgtcttcctgatcccgctggcgctgaagggcgtgagctataagccgctcacggcggctgccatgctgcgccgcaacctgtggatttacggcctgggcgggctggtggtgcccttcgtcggtatcaaggttatcgacctgctgttgaccctgttcggcctggtttaa

SEQ ID NO: 128016 - DNA, 1188 bp, Enterobacter cloacae
atgaagttaacggcacgccagataagcacagctaagcctcaggacaagccctacaaactggcggatggcggcggcctgtacctgctagttaacccgaatggttcccgatactggcgcttgaagtaccgcctggcaggaaaagaaaagctcctttcaattggcgttttccctgatgtaaccctcgctgaggcaagagataagcgaaatgaagcgaagcgattactcgctaatggtgaagacccgtctgaggttaagcaggcggagaagcaagccagaatactcgcggtgaataacagttttgagtctcttgcacttgaatggcatgaacataagaaacccaattggtcttccggttatgctgacgatattctcgaatatatgcgaaaagatatattcccttatatcggtagaaaagctattaccgatatcaaaccaatggacatgctttctgttctgaagaagatggaggaacgcggtgtcctggataagctcaagaaaacgagacaggcttgccgccagatattcacttatgctgtcatcactggcagggccgagtacaatccagtcactgatttggcaggagctctgaaatcccccaaacagcaacattttcctcatctctcaccagctcaacttggtcccttcagacaagctgtcgacgcatatagcggcagtaaaattacccgcatcgcgacattacttctcatgtacctcagtgtacgaaccatcgaacttcgtgccgcagagtggtccgagtttgatctcagcaaagatctctggctaatcccaaaagagcgcatgaagatgcgccggccacacctcgttcctattccgagacaagccaaggagctgttgctcgaactcaaagagattacgggaagaggaaaatatgttttcccggggcgtaatgatgcagggaagccaatgagcgaagccagcattaaccaggtgattaaacgtatcggctatgcaggtcaagctactggccatggcttcaggcataccatgagcactgtgttacatgaacagggattcaattctgcctggatagaggcgcaactggcgcattctgatagaaacacgatacgtggtacttacaatcatgctcagtacattgatgggcggcgcgagatgcttcagtggtatgcagactacctagatgggttgactgtaaaagtggtgggttag

SEQ ID NO: 128017 - DNA, 1002 bp, Enterobacter cloacae
atgaaaacccgacatctggtcagtctggtgactggcatacttatcttttccgtgctggtccccatttgcctgagcatctggctggctcatcgtcaggcggaagataaatttgtcgatgcgctggataactatgcctcacgcgtgctgatacgtaccgacaaggtcgtggggcaggcgaaggaagcgctcaatcatctgcaggcctttgagggtgtgccgtgcagccccctgcagttaagggagatgcgacggatcgctttctcgtggcgatatgtgcaggaagtgatttatatcgacaacctcaggccactctgctcctctcttgaacaaaccagccatgccgcccctttccccccgccgatgcgcgttaccgaagatggttacagcgcatggctgaccacgcaaaacgatctggggtttcatcgctacatggccgtactggggcaaggtcattacctggttctggtcgatccggcctcgcttgtggatgtgatccccttcggcgagatagcgattgatgctgccctggtaggaaataccacacgccgcatctttgccagcagcaatacgctcgatccgcatatccgtgacacgatcatgggtcaggagatgaccagcatacagtacgacggttcaatgtacgttatgaagcccgtccctgaactggggtttaccgtcgttgcatgggctacgctcaaaccgctggctgaaacctggcaccggcagctgcttttgtggctgcccttcggcatcctgataagcctgcttgccgcgctctttgtcctgcgaatactgcgtcgcatccagtcgccgcgcaaccgcctgctcgacgccattaacagccgcgattttgtggttcactatcagcccatcgtggcgctctgtagcggaaaaattgtcggcgcagaggcgctgacgcgctggccgcagccggacggaagcagcctctcacctgatattttatccctcttgctgaacaaaccgggcttatctcccagctga

SEQ ID NO: 128018 - DNA, 1206 bp, Enterobacter cloacae
atgttcaaccgtccccatattctgcccgccatcgcaatggcggcgttgttcgctttcccaagtcttgtcaacgcggcgaaccacccgcctctggagcgctggcgaagctacgccggtgtgagctgggataccgctcaagacggaaagattcctgcgacattttccggttcggtcaatgcccctattgcgggcatccactttgatgcaatggaccgggcctttgtcagcacgccccggctgatttccgccacagcacccgccacgttaagcattctggatacgacggcgcagtctggccctgcccgcctgacggcgtttccctcccgcgaggggaatgcggtgaacaccgatcccgctcagagcctgcgcaacgtgctcggtttttatattgaccgtaaaaacggctggctatgggcgctggacatggggtttgttgcaggcgaaacagagtcccccgcgggggcgcagaaactggtcgtactggatctccactctggccgcaccatcaaacgtatcgccctggacggcgtagcggaccgcaaggccagctttcttaatgatgtggtggtcgatgagaaccgccgtgtcgcctatatctccgacagcggctcgcggagtgcgcctgaaaaccaggtgggactaattatcgtcgatttcgctaccggtacggcccggcgcgtgctcgatcgtcaccctgcgctgcagattgagccaggcgttaacgtcgtctcgcacgggactgaagtctggcctggtaaaccattactgattggtatcaatggcattgcgctttcacccgatgcgggcacgctgtactggacagtgacaaccggcacgcacgcctatgcggtaccgaccgcgatactgaggcagcctgcgtcaaccaatgcgcaaattgccgggcagatccgcgatctgggtcgcgtggggggcaacaccgacggaatggtgacagatgtaaaaggtaacctctacattaccgatgtcacacgcaatggtatcgtcagatacgatcctgaaacccattccatgtcgctgattgcgacaagcgaagaggcgcgctggccagacacgccggcaatccgcccgaacggagacctggtatttacctcgagtcgcctcaatgaccacttcgcgggaaccgttaaaccgggagaagaacgctatgatttgtggcgcttgcgtctcgatgctttacaaaaataa

SEQ ID NO: 128019 - DNA, 612 bp, Enterobacter cloacae
atgaaaacccagcaggtcgattttgcttctttatattttggtacaccggtcgccattatctccagccaaaatcctgacggttcaaccaacctgagcccggtttcatcatggtggatccttgaccggaatatcgtgttcgggcttggcacctccggaaaatgttatgaaaatatcacgggtaaccccgatattgttctgaacataccggacagcaggctctggcagaatattgaagctatcgcaaataaaacgggaaaagcatcgccaccggaatggaagaaaaagaggggatatgtttttgaacaggacaaatttagctgcgggaatttccataaggaaaaagcggtgacgattaactcgtggagaattaaagagtgtcctgtacaaatagaggctcaggtttgcgggatatcgcccctgaccggttcgcaggggaacctggtgtccgttgatgccacgataacctgcgtccacatatctgaggctttattaattcgtactcagcgaggggtgaaatttaacgtggagaaatggaaccccctctattatctatttcgccactatttctcgctgggtcaccgactcggtcacaacttccgacacgatgagtaa

SEQ ID NO: 128020 - DNA, 495 bp, Enterobacter cloacae
atgcgattaaccctcctgctgttatgctgtctggtacagagtgtaacctgggctggcgacctgccaaaaccagttggtaaacccattttaacgatttccggtaatatagaaaataccaatgaaaatggaaaagcagtgtttgatctcgccagccttgaaaaactgggtgtcgtgagtttcgagacaacctccccctggtataacggtcgtacgaagtttgagggtgtcccaatgagcaagctcatggattatgtgggtgcaaaaggtacgaacgtgaatgttattgcgctcaatgattactcaaccatcatccctctcagcgactttaaaaaatacaacgccatccttgccttaaaggtcaatggcgaatatatgcgcatccgcgataaaggcccatcgttcattgtatacccctatgacagtcttcctgagttgaataatcagatttattactcacgatcagcatggcaggtaagcaaaatgaagattgagtag

SEQ ID NO: 128021 - DNA, 723 bp, Enterobacter cloacae
atgatgcaacaatcacaaaccctattcgaatcgtcggttttatcggcaacaagttttcgtaccgtctaccatgaacacggacgttacaaaacaattaatggcaactcctttgttcatgatggtcatgcataccggattaacacaagaatcggctctggtgttcgtcatgacatacttatttcaacaatcaacgaactgaacgcaatcctgaagctctacagtcgagtgttccttacccgttttgatctccacctccctgagttcacttctgttgaagcaggtaacaaatacatacgcaacttgttcaaacgattacgtgaccgcctagggtctgggaataacggtttatcggaacctattatcgattttgcttacggttgggtttgcgaacaggaaaaggcttcacaaccccattaccattgctggattgcacttccacatcgttcggtaagatggtttggaacgccagaaagagggatcgctggtattattacggaaatctggatgaaactgacaggtggtaaagcaacgctggtaaacttggctaaagccactaaagactatcccgatcactacgtcattcatcgtgaacatccttcatcactcgaaggtccggtattctggctttcttacctggcaaaagaacgcggtaaagcgcaaacagggaagggaacgcgcatgtactcaacatcaaaattgagtagcaaagtactgaattcgtaa

SEQ ID NO: 128022 - DNA, 2376 bp, Enterobacter cloacae
atgacagctatctataaggacgcgggacgtcccgtgcacgagcgcgtcgccgatttactggcgcgtatgaccccggaagagaagttcgcccagatgcatgcgtactggctgatcctcgatgaaaacggcaaccaccgcgagcgcagcgatctgagcgacgaattcgctggcgtgagcgagcaggctgcactgagcgaacggctgaagctgggcgtcgggcagatcacccgtccgctgggtacccatatcgttgacgcgaaaactggcgtgcgcgccgctaaccgcctgcagcgcatgatgatggaggagacgcgcctcggcattccggccctgttccatgaagagtgcctggtggggctgctgtgcaaagacgccacgctgttcccgtcgtcgctgaactacggttcgacctgggatccggagctggtgcagcgcgcggcacagcagattggcaaagaggcgcgatccgtcggctgccagcaggggctggcgccggtgctggacgtttcccgcgacgtgcgctgggggcgaaccgaagagaccttcggggaagatccgtggctggtgggggtgatggcgaccgcctacgtgaagggcttgcagggcgataagtgcgacctgctggcgacgctcaagcactacgtgggccactcgttcagcgaaggggcgcgcaaccatgcgccggtacatctgggctttagtgagctgaacgacaccttcctgctgccgtttgaaatggcagtgaagctggcaaacgccggttcggtcatgcccgcctaccacgacatcgataaccagccggggcacagcgacagcttcctgctgaccaccgtcctgcgcgaacagtggggcttcgacggcattattgtcgcggattacggcggcgtcagcctgctgcaccagcatcacggcatttcccacgatgcggccgaatccgccgcgctggcgttcaacgccgggctggacgtcgagctgccgaaagatgactgcgcgcggcatctggcagacgccgttgagcgcgggctgatctctatggccaaagtggatgagattgtgggccgtgtgctgaccgaaaaattccgtctcggtctgtttgaacagccgtatgcggatgaaaacggtatcgttctgcaaaatgagacgacccgccaggtcgcgcgggaggtggcgacgaaatcggtcacgctgctggaaaacaacggtattttaccgctcggcggtaagccccgcgtggcggtggtggggccgacggcagacgatccgctggcgttgctcagcggctacagcttcccggtgcatctgatcatcagcgatatggttgaagagacctcgcaggtaacgaccccgcgcgcggtgctggagcagtacctgggtgcatcgaacgtgcgctacgccaaagggtgtcacatcattgagaaacgtatggcgggtgcgccggtcttcccgggcgacagcggcggtaaaccgatgcagcagtctcccgtgtcgcaaagcaccgcccttatccccgaggcggtcaatgccgcgcaggagagtgacgtggtggtggcctgcgtgggcgatctcgccgggctgttccagagcggtaccgtgggggaaggttccgacaccgattccctgaatctgccgggtgttcagcagcagctgctggaggcgatggtggcgacgggcaagccggtgattgtcgtgatgaccggcgggcgtccttacactcttcagggcctggaggacaaggtggccgcgctgatcgtggcgtgggcgccagggcaggaggggggctgggcgatcgcggacgtgttaacgggacgggcagagccgcagggccgtctggtggtgagcgtgccgaaaagcgccggggccatgccgtattactacaatcacaagctcaagagcgggggcacgccgtttgcgttccacttcggttcacgttatccgtttggcttcggcctcggctggacgacgtttcgctggaatgctgcccgcgtcgctgcaagcagcgtgccggtcgacggcgaggtgacgctgagcgtggatatcaccaataccggagagcgcagcggcagcgaggtggtgcaggtttacgtcagggataaggtcgccacccaggttcggccgctccaggagctgaaggccttccagcgcgtcacgctctcgccgggcgaaaccgccacgctcagctttacgctgccggtggagatgttcaacttcacccgtcgcgacgggaaacgcatcgttgagccgggcgagtttgaactgcaggttggcgcatcgtcggcggatatccgccaggtggtgacggtcaatgtgaccggggaaacgcgggtgctgcctgccgagtggcggatgctcagtacctgtgaggttacgcgcgcgtag

SEQ ID NO: 128023 - DNA, 1029 bp, Enterobacter cloacae
atgaatcactacacgcgctggcttgagctgaaagaagacaatccgggtaagtacgcgcgcgacatcgcagggttaatgaatatcagcgaagcagagctgacctttgcccgcgtgggtcacgacgcctggcgactgcgcggtgagatccgcgagatcctgggcgcgctggaggcggtgggcgaaaccaggtgcatctgccgcaacgactacgccgttcacgagcaggtcggaagcttcaccaaccagcacctgaacggccatgccgggctggtgctgaacccgcgcgcgctggatctgcgcctgtttctcaaccagtgggcaagcgcgtttcacatcagtgaagccaccgcccgcggcgagcggcagagcattcagttcttcgaccaccagggcgatgccctgctgaaggtctacgccacggataacaccgacgtttccgcctggggcgacgtgctgactcgctttatcattgccgataatccatcgctggcgttgaagaagcccgatatgcctgctcacacggaaaatgcgcaagctgcgctcgtggacaacgagtggcgcgccatgaccgacgtgcaccagttcttcagcctcctcaaacgccataacctcagccgccagcaggcgtttcgcctggtcggggacgatctggcctgtcgggtagaaaacagcgcgctggcgcaactgctggagacggcgcgtcgtgacggcaatgaaatcatggtcttcgtcggcaaccgcggctgcgtacagattttcaccggcgtggtggaaaagctggcgccgatgaaaggctggctgaacatcttcaactcaacctttaccctgcacctgcttgaagacgccattgcggagacgtgggtcacgcgcaaaccaaccgctgacgggcacgtcaccagcctggagctgtttgccgccgacgggacgcaaatcgcccagctgtacggccagcgcaccgaaggcgagccggagcaaagccagtggcgcagccagattgacgccttaacggcgaaagggctggccgcatga

SEQ ID NO: 128024 - DNA, 321 bp, Enterobacter cloacae
atggggtttccatcgccagctatggattaccaggaacagcggttaaccatagatctgctatgcgaaattgacgggaactgccgggtaatagagacgtcatgtggttgggctgtcattaacgttgccctgagaccagagcagggagatacgctcctggtaagaatggataacaggaatgagtttgcaaagctttacggttctgcgttggtcactgaagatggtgaagcgatagaaggcgacgcgctggatgatgtaactgtatatggcgtactgactcacaccctaaacattataggggaggacaagttacccaccatataa

SEQ ID NO: 128025 - DNA, 999 bp, Enterobacter cloacae
ttgaaatattttccttctgcttcaggaattaggggaattgcagtgcttttggttctgtttgctcactcctttgttctttattatcctgaacattcagattatatgcgaggatctgggaaggtcggcgtttggctgttttttatacttagcgcatttttattaagccataaactgaatgggattgatctcacgccccgctcattagcatcataccttattggtaggtttctaagaatattaccaatgtttattattgccgtttctatttattactttatggggtattacgactttcagaagatgatagacatatctatatttagagatacattttttcatctctggactattccagttgagtttaaattttatttcttcctaccaatagttagttatgcatttttctatgcgcaaagaaaatttgggaatatcgctgtcataatcgcttcaggcatatttatatgggtcattcaattatggtggccgtattacatgaccccaagtaactcgattgatgtgacttggtatgtgccgtgttttttgcttggtgttgttggctctgtaatatatatggacatacagaatcttctgactgttagattagtaaatacgatatctgcaatgtcaatatttatcatattaatgttttacccttcagtcaggaacctgcttactggtggggattcaagggctgatattacaaatatgtttattcctattggtcttgtatggacaatatttgtggttgcatgtatttctggaagagggttgcttggttccttactacaaaacgtaataattagaaaagtgggggagtggagtttttccatctacttattccatttcatagcgctatccacattatcacagtttgaatttggaaaacctgtttctgttttcattactatccttgcatcaatattaattggggcaattgcattttacttgatagaatcgagaatagaaaaagtaagagcaaaaatagccaaattgatgtaa

SEQ ID NO: 128026 - DNA, 612 bp, Enterobacter cloacae
atgaatacatatgcgatggtttcaaagccaggaaatattgtaactaacgtatttcctgctgattataccctccaggaactctccgacatgttcccggactacatcatcgtcaggattacagaagggctgaagtgtgctaacggtgattattataacgttgctgatgggttgttttatatcgatccagatttcacctggctttcagggacaactccaccaccttctctggatgatgcttatgccgcatcattgaaaatgataagagagaatggtagtgctgcgcttatgtctattaaacctccctattcagagcaggaagcatcaacatggtgggcgcaaagcgaagaggcaaatctgtgggcaagtaataatagttttgtgccagaaatgctaaacgcaatagtagcatcatccagtggattatatacgttacaaacattagttagtgagatattatctaatgttacttcctggaaagaagcatctggaaatatcttagggcagataaagtacaagactgaacagttaaatgttattaaagctgaggttataactggggagaaaaatgttatggacattgttaactttaatgctgatataaatattcattaa

SEQ ID NO: 128027 - DNA, 774 bp, Enterobacter cloacae
atggagctctggttaacagtaaacggaaaaaccgtcagtgccagctctcagctcgatccgctcacccgcgcagtggtgatttctttattcactcaccggcgcgccgatcctgatgacaatgttgatgtacctatggggtggtggggggatacagggatttataccaggcctgccaacttaaaatacgcgcttgtgtatgttgtgggggcaggtggtgggtctggttctgcgccagcgacatcatcagcgcagacatcagcatcacctggcggcgccagtggttcgtgggctaaggtcagattgaccgcagcagaaattggcgcaagtcttccttacgtcgttggccctggaggtgcagccggagtcaacggagcgggcggggatggtgggaacacatcgtttggctcattaatcatatgccctggcggtaaaggatcagttatcgggattgccatttcaacgtcctccagcgccctgatccagggagccgcagcgggcggcatcccgaccgtgagtgcaggtattgttcttgaatcgtctaacggaaatcccggcggaaaatcaatgtttgtcactgcgaataccctggctggtgatggcggggcatgccctaaaggtgctggcgggcaggggcagggcgcagcgtcaccggcttcacctggatcgggaaatggtggtggggctagcggtgcggcaaacggtactaataccgcatcttcaaagaacggcgcccctggcgctaatggtggtatctgggtaatggagtttgcgtaa

SEQ ID NO: 128028 - DNA, 543 bp, Enterobacter cloacae
atgggagctatacaaagccttcagcgtcaggttctgagcctgattgggcgtgcggtggtgaagagtatcaacgccgccagcaaatgccagacggttgacgtcgaattactggcaggacagggaaaggcaggcattgaacatcttgagccctatggttttacatcccgagctaaatccggcgcagaggccgttgtgctctttccggatggcgatcgatcccatgctgtagtggtgagtatctccgatcgccggtaccgaattaaaggactgaaaaccggagaggttgctttctacgatgaccaagggcagacagtcaccctcacacgaaacggcatcgttgtcgatggtggtggaaaagtcatcaccttcaaaaatgcccctaaagcccgttttgaaatggacatcgaatcgacaggacagataaaggacttatgtgattcttctggtctgacaatggccgcaatgcgcgtgacctataacgggcacaaacataaggagaacggaaataccactgacacacctgatacggaaatggaggggtaa

SEQ ID NO: 128029 - DNA, 315 bp, Enterobacter cloacae
atgacgctggacggactggttggcctgaatccgatagcctatgccagagaagccatttctctgggactggccactgaagaacatggctccagattgtttagcaatggcgccgttacatcaggcgtcctgcgtacagaccaggaattaagcgatgccgcttacgaccgcttaaaggctgacttcgaagagaaacatcagggtctgggcaacgcccacagaccaatgattcttgaaatggggctggactggaaatcaatggcgctcaacgcagaagatatcttcccgaaccggaagacaggcaaacgaagggtataa

SEQ ID NO: 128030 - DNA, 234 bp, Enterobacter cloacae
atgagccggaaatcgtaccctaacgttaacgccgcgaatcagtacgcccgcaacgttgtgcggggtaaagtcccggcgtgccagtttgtcattcaggcctgtcagcgtcatatcgacgatatggcccaggagaagagccgaaaattccggtaccgctttgacaaggatatggcggagaaagccgcaaagtttattcaactagccaggatgaaatctggcacgttcgcatcatga

SEQ ID NO: 128031 - DNA, 498 bp, Enterobacter cloacae
atggctggaacgacggggcgttccgggcgtcgccccaagccaacggcgcgcaaggagctggctggtaaccccggcaagcgagcccttaataaagaagaaccagttttcacacccattaaaggcgttgaacccccggaatggttttccgaagacgatggtatgccgatggcctccgtcatgtgggaactgaccacgaaggaattatgcgggcagggtcttctctgtgtaaccgatcttgcggtgcttgaacgctggtgtgtggcttacgagttctggcgccgtgctgtcaaaaacatcgcccgtgatggtctttcaatcgttggggctatggggggaaaaattaagaaccctgaacttacagccaaaaaagaacaggaatcggagatgagttctaccggttcaatgctgggacttgatccgagtagccgccagcgtctgatcggtcttgctggtcagaagaaaacctctaacccattcctgaagatgatcaattcatga

SEQ ID NO: 128032 - DNA, 264 bp, Enterobacter cloacae
atgctcgtatcctatatgtccgatggtggttgtggcgataggaagatgcggcttaatgctaacgggaaggatgtgcctgcaacttacacctgtgtatcagtcggagctaacaggattgaacactttgcagtgaatgatgcaggcaaggtcaatgagatggttaactatctcaagtcagatttcactttattgcttcaaaacgatatcaaagtctgggctgcgaatataaagacgccgaaatatggcatagcaccaaaattttaa

SEQ ID NO: 128033 - DNA, 435 bp, Enterobacter cloacae
atggaatggttacttacaacgctaattatattacttgttgtgtttattctatgggcttcattaacccacggtatttcaggaagatttctctatgttaataaaagaaaaaaagatgtaactcttcatatggctatctttggtacaccaagaaacaaaaaaggtgtacacaaactcaaaacatcatttattaacacattgaaaaaattaaagaaaaacggttattcaagcgtatcattggagagtcatctaatcgattcaaagagactggcgatgttacataggctggctctacagaacggctactctatcgtgaatgtgcgtcgctttcctacgccaatgtggcagcggtttttcattcctgtttcaatggctttgttacggtttaagatcgttaatgtgaatccacagtcttgctctttgaccatcattttgtaa

SEQ ID NO: 128034 - DNA, 303 bp, Enterobacter cloacae
atggaaagagagttaactgaacaggaaaaaatccttgcagatattactggttgcattgtcggcgcaatcactgcagctgaacagttacaaggcagcaagaagcagtcggtaatagcccaaggcaatgaggcaatgggcatccttcataaaaaaggatactcattcgcacaggaagatgtggactacaaaaacccggatcttcctacttacatcgttactaacattgaaacaggagtggtgttattcagaatgaagtcggtgcacgcccctgctcacaggtggtacacatacttcacaatttag

SEQ ID NO: 128035 - DNA, 438 bp, Enterobacter cloacae
atgaccttaaaaaaaattggcgatgtatcgtcgcatgtgaaaaactttggtgagcctctaagaaaagatactgagggcttgctaagaagccttaaagaatattggcagaagcgtgacttcttccatgatttcattacagtttcagataagaattcatctttgcgaatagaaatgccagaatttaagttctggtgtgaatctaagcacaggtttgtattttcagaacaagagttggtctgcgaaatagctttttatacaattaaagaagaaaaagaaattgaaatcttcacatgctatttgcgtcccggaggggaattgtcctttgaaactacacaatctgaacaaacatataacatctactatgccagaaatgttgaatcagcaatcattgacatgattatccaaaacgcttcacttaaaaaattcatatcattatag

SEQ ID NO: 128036 - DNA, 462 bp, Enterobacter cloacae
atgagccgattaacagccatcatctgcgctgtcgttatctgcctgctggtttccatggcctgggctatcaaccactaccgcgacaacgccatcacctacaaagaccagcgcgataaagccactgtacagctcagcctggcgaacgccaccatcaaagacatgcagacccggcagcgtgatgctgcggcgctggatgccaaatacacgaaggaattgtccgatgcgaaaaagcagcttgatgatctgcagcgttgtgttcgcgatggcaagtgtgggctgcacgtcaacgccagatgtcccacgaacggaacgaccagcaccagcggcgtgggcgatgcttccggcccccgacttactgacaccgctgaacgggattatttcaccctcagagagcgaatcgtcacagtgacgaagccggtcggctatttgcaggactacatcaaagagcaatgtttaaggtaa

SEQ ID NO: 128037 - DNA, 384 bp, Enterobacter cloacae
gtgacggccgcacaaaacaacgaggtcgatacccttctggcgctggcgaaaacgctgcgtttgcggctggtgaccattaccccggatgccagcgcgctgacgaatcttcttcccgcagtggcgccggcgcagtgcgttgcctggcgggacgatcgtcagtggctctgggcgatgcgccaccagtggggacgccgcttaactaccgaagcagaaaacgtggccgagctggcggcgctgctggcgcttggtccggatgacatcgcgctgtttgattgccaacgtgatccgtgggaaatcctggaacgctgccatgctccgctgccggaatgcggggctgattataccgtcgcgctggcgttggccatgagcgaggtgcccggatga

SEQ ID NO: 128038 - DNA, 972 bp, Enterobacter cloacae
atgagcaagcttaaactgcatgttgtttcccgccctgagtttatcgcgacgaattttgccgattttcaggaactgattgatcagaaaatcaatccggatgatattccgcatcgtttttactgtgggggaagaggcgtctggacatttcagacgatgctcagccttaactattactataacggtcagattgaatgctcatggggcactgagtgccgcccggacgcaattaatctgatgcacaacgatcactatggttcccgcgtaaaaccctgggtcggcgtgaccgttgttgctcgtgccgatcgtccgccggttatcggcgcggattacgtcgtcgaacaaaaccctgaagttgctaacatcccagggcgtatctttattcctaactggccacagccgggcgtaaaaccacgcgaacgcaccgacgagacaatcaaaaccgtcgcattcttcggccgtgtagacagtttcccggacgaataccgcgaagggaattttaagcaacgtcttgccgaacaaggtattgagctccgcatctcgttcgataactggacaaactaccaggacgtggacgtgtgcatcagcttccgcaaatcacacgatcataaactggcgcgtaagcctgccagtaagctcattaacaactggctggggaaaacggtgatggtctgcgatgacgagccgtcttatcgcgcgatccgcgaaagcgagctggactacctgatcgccaaaaaccctgatgaagccttcaatgccatcatgcgtcttaaaaactcccctgaactgtatcgtcagatgcgcgaacagggtgaaaaacgcctacaggtctattcccgcgaagcggtcgctgcacgctggtatgccctgtttgaggatatttggcgaaaaggattgcacaatcgtcctacggtagttcgcgcactgcgctttggctttggtaaagccattcgcccgctgactaaaaagttctga

SEQ ID NO: 128039 - DNA, 6162 bp, Enterobacter cloacae
gtgtccctgggggacttaacgctgcagttgacgaacgcgtttaccagcagaaccgccgtggcggcaggcagaaccctcaccatcaacagcggcggcgacattgataaccgcagcgtgctgcaggggcaggcggtcaacctgaacgcgggcgggcagctcagcaacaacggacaaatcaccaccggcggcggcgcgagtacgctctccggaagcagcgtggcgctgaacgccgcgggctcggtgcagggcggaggtgacatcaccgtggccagccggagcaacattaccgtggacggcttcaccggcacgcgcggctcgctgaccctgagcgcgccgggcgccatcgtcaacaccgcgctgctgtacgcggcgaataacctggcgctgtttgccgacagcatcaccaaccagcgcggcgacatcatggcgggaaacaacctgtggatgcagcgggatgcggcagggaatgcgaacagccaggtggtgaacacgtctgggaatattgagacgcagggtggaagtcttaatattaaaaccatcaacttacgaaatgaacgggaagggcttaaagcttcaactcagagtcaggtacaaccagttgatgactggatgacaggtgagtcaacaatagatgtgcctgttacggctctgccaaatggaagttatggtttttattcgcgagaagtcattactggtccgggtgctggtaactgtggagctaatagtgcatgtaatatccatcgctccacatactattatctggctccttttaaaaatacagtcaggcagcgtttttccggaagatacagcacaactgttatcacagggggcgattctccatcagggcgtatctcttcaggtagtgacctgactattcaggcttccagacttgataataatgccagcaatatattggcaaacggtgatattcacctgtctggaaatcaattaaataaccagagctggcaggcaggtagtgaggttgattacctgatttatgaatataaaccgttatctgcgtctgttggttacgcaacaagtaagttaggcgtggctggtagtaagaatatcaaattccagaatgatactattgagtacaatctggttgggcatgaaacagaattccaaccgggtgaactctaccgcgccgtcatccaggcgggcggtaacgtcaccgcaaacttcaccagtaacatcagcaacaccaataccactgcgaacgcgggcggcgtcagcaacgttatctccacgccgtcgctgaacaccctcagcaaccagagcgtcggcagcggcgtacaaaaacaggggctgaacacgaccggcaccgtggcggtgaactcgccgcagtggaacgatcagctccagggtgcgctgcagcagcttaacggcggcggcgcgctggaaaacggcggcgcgtccggcacgtctctcagcaacattggcaccacgcagaaaggcaacgcgaacctcggccagctgggcgcactggcgaacgccggggtcaccaccgccgatctcagaaccgctcagggcggcgccgtcgggcattaccagggccagcgcgtcgataccagcgcttacccgcttccgtcgggcaacaacggctattttgtcttctccgacaacccgaaaagcccgtacctgatcagcatcaacccgaaactgaacggtctcggacagcttgatcccgccctgtttgccgacctgaacgcaatgctcggggtcaaaccgtcgtccacggcaccgcaggagacgcggctggcgtttaccgacgagaagcagttcctcggctcgtcctatatgctcggccgcctcaacctgaacccggattacgactaccgcttcctcggcgatgcagcgttcgatacccgctatgtctccaacgtggtgctcaaccagaccggtaaccgctacctgaacggcatcggctccgatctggatcagatgcgctatctgatggacaacgccgcggcggcgcagcagtcgctgggcctgcagtttggcgtctcgctgaccgccgatcagattgccgcgctcgaccacagcctgctgtggtgggagaaagccaccgttaacggcgaaaccgtgatggtaccgaaactctacctgtcgccgaaggacgtcaccgtcaataacggcagcgtaatcgcgggcaacaacgtcaccctgaagggcggcgacatcaccaacagcggcagctcgctgctggcgaaaaacagcctgacgctcgacagccagaacagcatcagcaacctcaacaacggcctgatgaaagcgggcggcgacctcaacctgagcgccatcggcgatatcaataacatcagctccaccatcagcggcaaaacggtcgcgctggagagcctggacggcagcatcaacaacctgacccaggttgagcagattgatatcaacgccggagggaagtacggcaagatcggcctgaaagacaccctgctgggcaacacggcgtcgattaccgcgcaggatggcctgtcgcttgaggcggggaaaaacattaccgtcaccggggcgaacctggcctccggcggcgatatgctgctgaacgcgtggggcgatattgccgtcaacgcgaatcagatcaacgacgcattcagctccagccgggcgaaaaccagccgttcgtccgtcacgtatcagggcagtaacgtcaccgcgggcggcaacctgctggtgaacgccgggcacaaccttgacgtgaccgccagcgacgtgaaggcgggcggcagcgcggggctgagcgcgggcaacgatctcaatctgaacgcggcacagatcagcgaaagcagccgtaaaggtaaaagcgagtcccacagcaccgggctcgaccgcaccacgatttccgcaggcgataacctggtcctgaaggccgggcaggatatcaacgcgcaggccgccgcgctggcggcggagaaaagcgtcgggctgcaggcgggtcgcgacgtgaatctggctgcggaagagaccacgcagggcgatagctataagtcaggcaagaaaaccgtcatcaacgaatcggtacgccagcagggaaccgagatcgccagcggggcgaatacccagatcctcgcggggcgcgatgtcaccgccgaagccgcgcaggtaacggcgaagggcgatatcggcgtggcggcaggccgcgacgtcaatctcaataccgcaaccgaaagcgattatcactacaaagagcagaccaaaaccaaaaaagggttcctgagcaagaaaaccacccacaccatcgaggagaacagcgcgacgcgtgaatccggctcattgctgagtggcgataacgtgcaggtcgttgcgggcaacaacctgctggtgaacggatccgccgtggcgggcgacggcgacgtgaagcttaaggcgggcaacaacgtcgatatcgtggcggcgacgaacagcgacacctcctggcgctttaaggaagagaaaaaatccggcctgatgggctcgggcgggattggcttcaccatcggcagcagcaaaagcacgcacgatctccgtgagaaaggcactacccagagtcagagcttcagtacggtgggctcgacgggggggagcgttgatattgccgccggtaatcagctgcgtgtcggcggcgcggacctggtggctggcaaaaatatggcgctcactggcgacagcgtgacgatcgagccgggtcatgacaaacgcgcccgcgatgagaagtttgaacaaaaatccagtggccttacggtggctctgtctggcgtagtgggtggcgcaatcaacagcgctgttaccactgcacaggaggcgtctaaagaaagtgatggacgtctggctgccctgcaggcaacgaaagcgacactctcgggcgtacaggcggcacagggagcggttgttgcccagcagactggcgatccggcgaacggatttggtgtcagcctctctctgactagccagaaatcgaaatctcagcagcatgccgatagcgacacggtagcgggcagcacaatcaatgccggaaacgatctttctattaccgccacgggcaaaggtaagagtacgaatagcggcgatatcctgatcggcggtagccagctgaaagcgggcggtgacgccacgctgaatgctgaaaacgacatcctgctgacgggagcggccaacacgcagaaaaccaccggcaaaaacagcagcagcggtggtggtgtgggcgtaagtattgggggcggcagcggcgggatggggatcagtgttttcgccaatgtgaatgcgtctaaaggtaatgaaaaaggtaacggcaccgcctggaccgaaaccacgctggacagcggcggcacggtctccatgaccagcggtagagatgccattctgaacggggcgcaggtcaacggtgagaagattgtcgctgatattggccgcgatcttttgatgagtagtcagcaggacaataatgattacaaatctaagcagaccagcgtagcggcgggcggcagcttcacgttcggaagtatgactggctccggttacatcagtgccagtcaggataagatgaagagcacgtacgactccgttcaagagcagacggggttgtttgccggtaatggtggatttgacgtcacggttggccgtcacacgcaactggatggcgcggttattgcctccacggcgacggctgacaaaaattcgttagacacgggaacgctgggctttagcgaccttcacaacgaggcggattataaggtcagccaaacgggtgtgagcctgagtgggagtggcagttttggcgatacctttaaaggcaaaatgccgggcggcatgatttcaggcgcaagccacagcggccatgcggaaggtaccacccaagcggcggtggcagacggcaccattatcgttcgcgatcgggataatcagaagcaggatgtggcaaacctgagccgcgataccgaacatgccaacgatagcatcagcccaatcttcgacaaggagaaagagcaaaatcgcctgaaagcggtcgggcttatcagtgatatcggcagccaggctgcggatatcgcgcggacgcagggagagatagcggcacggaatgccatgaccgatccagaggcgctgaaggcggccaaagagaagctgaaatcggaaggtaatgctaacccaagtgataagcaaatcgtgaatcaggctggccagacggcaatggagaagtacggtactggcagcgatattcagcgcggtattcaggcggcaacggcggcacttcagggactggcgggcggtaatattgcgggtgcgttggcaggcgcgtcggcgcctgagctggcgcatctgcttaaatcaaccgaaggcgatcctaccgtcaataccgttgcgcacgctattctgggcggcgcggtggcggttcttcagggtaacagcgccgctgcgggagctgcgggggcggcaacgggcgagctggctgcgcatgcgatagccagcctgctctatccggaggtgaaagacctgtcgaaactgagtgaagatcaaaagcagacgatcgttacgctggcttctgtatcggcgggggtggctggtgggttggcgggagggagtacggcttcggcggctgctggggcgcaaggaggaaagaacgcagctgagaataatgctacctcaaactggggtggattagtgcctccagcaacgcaacaggatgcttcactggctttcgatctcggcggtaaaggtgtatctcccgacaaaattaacaaggctattacagactctcatattggtccatcagtaggggatacggcaaaaatccatggtgatgtaaaaggtcaggtggctgttggttatgtcggcgggggctatctggagggggtcctttcagaagataaattcgcaattaatggcgggataacaaaggtgtttggctggcgcgcggatgcgtcggctggattaactttcgggccttatccaattaaggatttcaatccggcttatgattattccggttccatatccgctggtattttttcaattgaaggatctgtaggtaaagatggtgttggtggtgcttttagaattggcggaggcattggtgccagtatccgacaaagtgaaaatcataacaacctgccggagatcgatggcgctggcagtaccgaactcgtatcttggcccttcaaaaaggattaa

SEQ ID NO: 128040 - DNA, 5853 bp, Enterobacter cloacae
atggatacccgtcacccacccgttcgtttctcgcagcgtctgatcagctggattgtctgcggcctgatggtctggcagccgatggcacctgccgtcgcggcggcgcttacgccgaccgggcagaccacggtcgatcgggcggggaacggggtgccggtcgtcaacatcgccacgcctaacggggcgggtatctcgcataaccagttcggtgagtataacgtcggcaaagaggggcttatcctcaacaacggcacggaccgtttaacccagacccagctgggcgggcttatccagaacaaccccaacctgcaggccgggcgggaagcgaaaggcattatcaacgaagtcacgggcgccagccgctcgcagctgcagggctatacggaagtcgccggtaaagcagcaaacgttatggtggccaacccgtacggcattacctgtaacgggtgcggatttatcaacaccccgaacgtcaccctgaccacggggaaaccgcagttcgacgccagcggtaacctgcaggcgctggaggtgacgaaaggcgccatcacggttgaaggccaggggctggatgccagcaagagcgacgcgctgtcgattattgcgcgcgcaacggaagtgaacgccgcgattcatgcgaacgacctgaaggtgacggcaggagcgaaccgcgtgggcgcagacggcagcgtcaggccgattgccggtgagggtgccgcgcccgtggtggccgtggataccggcgcgctcggcgggatgtatgcgaaccgtatccgcctggtctccagcgagacgggcgtgggggtgaacctcggcaacctcaccgcgcgccagggcgacattcagctggacgcgggcgggaaactgacggtcacgaacagcctggccagcggatcgattaccgcgaacggcgcgggagtggccctcaacggcagccatcaggccggtggcgcgctgaatgtggccagctcgcaggatgtggaactcaataacagcacgctcgccagccagggcgatatgcgcctttccgctgcggggaaagtgcagacgacgggcggcgggacaaacagcgcgggcgcgctgtcggtgagcagcgggcaggggatgacgctcagcaatacctccctggtctcccgcggcgcggcgacgctggacagtaaagctaccctgaccgtcaacggcggcggcgtgtcggctcagggcggggcgctaaccgtcacgagcaaacagggaatggcgcttgcggatgcgacgctgacgggtcaggccgacaccacgctgtccaccgacggcagcctgacgcagcgcggcggcagcgtcaccagcaaaggcgcgctcagcgtggcggccgggaaagatatcacgttggcgaatacccgcagcggtagcgatacccgcgcgaccctcagcagcggcggcacgctgtcatccacggccagcgcggtctcggcaggagagaatctggccctgagcggcggacagctggtgatggacggccagagccgggccgatgccacgggcgatgtccgcctgacgggcagcgccgtcagtaatcaggggcaggtgaatgcggggcgcgacattgccctctccggcgacagggtatccaccagcggccagctggcggcgaaaggccaccttgacgtgaacgcaggagtgctgacaaacggcggcacggtgcagggtaacgacgtcaccctgaaggggcagacggtcactaacagcggtaccctgcagagcgcaggcaacctggcgctgagcgttgataccctggagcagcggggcacgctgagcgcgaaaggcaatgcgaacgtcacggcgcagcagaccctgcgtaacagcggcagcctgctggctgacggcgcgatgagcgtgacggcagacacgcttgaacagaacggcaccctgtccggcgcgacagcgctgacggcgcaggccggcaccctgaccagcggtcaggcgtcccgcaccaccagccagggcaatgtacagatttccgcgacccgcagcgccagcctgaacgggcagacggacgcggcgggggccttaaccgtcagcaccggcgacctgaccaccggccgggatgcgcatctgcagagcgggcaggggcttaccctgcaggcgcagaatgccgcgctgaacggcacgcaggcggcgaagggtgctctgtcggtgacggcgggcacgattgcgcacgccgggaaatccaccggtaacgcgctgagttttaacgcaaccggcgacctgaccagcggcggagagcttaccgccagcgccatcgcgctcagcggacagaacatcctccagtccggcgtcgcaaaagcggatcgcatgaccctgacggctcctgaccgcatcaccagcagcggtacgctggttgccggtacgctggcgctggacgctgcctcggtggagaacagcggactgctgcaggggaccaccctgctcggcctgaagaccgggtcactcacaaacctcgcgggcggatcggtctacagcacgaaggatttaacgctgaacgttccggtgctgtctaacagcgggcttatcaccactgacggcacattgcgcctccggggcgacacgctgacaaaccagggtgaaatcaacggcgtcagcctgagcagcgactacctcagcctgaccaacaccgataccggacgcctgctggcggacgatcggctcaccctgaacggcactgcgtttgctaacgcgggcaatattgcggccagcgacctgcacatcacggcggacagcctgcaaaaccagggctccgtcgagggggactcggcgctgacgctcggcgtggcagacctcactaaccgtggcgcgctgcgcagcagcggaacgctgacgctcggcggcgacacgctggccaacagcggcgagctcagcgccaccgcgctgctgctgaacctgacccgacaggccagcaacgatgccgacgggcgggtgattgcccggaacggcctgacgctgaccaccgccagcctgacgaacagcgggctgatggccggtaccgacgcgcagtttaacagcgcgtcgatgaccaacggcggcacgctgcaggggacacactccctcacggcgaccggggcacagctcagcaaccagcaggcgggcatgctgctctccggcggcgcgctcgacctgcaccacaccaccctgaacaacgccgggctgctgcagggcaacaccctgaacctcgccaccggtgagtggatgaacgccggcaacgcgctgggggaagcgggcgtgacggcggcggtgaccggcacgctgaccaacagcggtaaggtgctcagccagcaggcgctggacgtccaggccgacaggaccgataaccggggccagctgctggcgaaagtgctgaccctgcggggcgacctgcagaacagcggcctgcttcagggcagcagcacgctggcctggtccgggaacaccttcacgaaccagcctcaggggcaggtgacgggcggcgagaccctgacgctgagcggacaaaccctcagcaacgcgggcagccttcaggggcgcagcgcgacgcttgacgccaggagcctgaataacaagggcagcgttcagacgctggatgccctgaccctttccacgaccggcaggctagataacacgggcgccctgctcagccagaatctcttcacgctgacggcggcgcagctgttcaacgacggccagctggccgggaaagccctcacggtgaaggctgcgcagctgaacaacaccgggatccttcagggcaacgacacgctggcgctgaccacccgcgcgctgagcaacggcgccaccgggcagctggtgagcggcagtcctctggacttatccctcgacacgctcgataacgccggcctgctgctggtgaagggcgggttcaccctgcggggcagcgacctgacgaaccggggcgatattcaggcgcagagcctggatttgggcatgagcaatgccctgaccaacacggggaacatcattgctaccgacgatgccgtgcttaacgcgacgacgctgaccagcagcggcacggtggcgggcaaaacgctgacagcaggcggtactgagctgcgcaacagcggcctgatgcagggcagcaacgcggttaacgccaccgccgaccgctttatcaacgagctgaacggtaaatggctctccggcggcggcttcacgctggcgggcggacagctgacgaacgccggtacgctgcagggcgccacgctgggcatgaccggcaccaccctcaccaacagcggcacggtgaacgggcagacgggactcagcggcacgctcagcggggcgttaacgaataccgggctgctgcagagcggcggcgcgaccgccttcaccgcggataccctggcgaacccggggcgcatcacgggcggtacgctgtccctcaccgcccgcgatatgaacaacggcgggctgatgcagggaacgaacggcctggcgctcaccggcaccacgctgaccacgggcgcgacctcgcgcaccctctccggcggcatgctgacgctggatgcaggccagctgaccacgcagggcacgctgcaggggaacggcgcggacatccgcgccagcgactggacgcacggcgggtctctgctcagccagggaccgctgacggccacgaccggcggcacgctgacctcaaccggctcgctgatgagccagggccgggcggatatcaccgcacagacgctggataaccgcgggcagctcctcagcgagggcgatgtgacgctcggcggcagcacgcttaaaaacagcggcaccgtgcaggggaacaccctcgcgctgcatcagaacagcattaacaaccagggcaccttaaccggtctgcagagcctgaccgttcaggggcagcagcggctgatggcacgcatggcgatggccgcgccgcagcaggagctgatcaacggcgcaggcggcaagcttcttacccagggcgcgctgacgattgcgtccggggcagtgaccaacgccggcagctggcaggcacagaacatcctgcttaacgcccggtcgctcaccaacagcggcgcggtgcagagcgccggtgcgctgcagatgacgctggccgacacgctcaccggaaccgcaggcagcaggatcaccgcgctgggtgcggcgacgctgcaggccgcgacgctggcgaaccagggccagtgggcggcgaaaaacctgacgctgacgggcggcgcgctcagcaacagcggcgccatcagcggcgtgaatggcctgaccctcagccagaccggcgcggtcagccagcagtctggcggcaccctgctgtccggcggggcgctgaacgtcacggcggcctccgtcaccagcgacggcaaaatgcaggggggcacgctcggcatcaccaccggggcgctcaccaacaacggacgtctgcagggcgataacggcgcgacgctggccctcagcgggacgctgaccaacaacagcggaggcgaaatcgtcagccgcgatgcgctgacgctgaccacgcccgcgttgtttaactacggcctgatccagggcggcggcgagacgcgcgtgaccgcctcctcgcaggcgcgtaacgacggcaggctgctctccggcgcgcgcctgacgctcggcacgccgcagttcaccggcaccggctggctgcaggccaccgacctgatactcaatgcggcaaacgccaccaacggcggcacgtgggtggccgatcgcgccaccctgaccggcaccaatttcgccagccagggcaccacccaggcgggacagctgacggttaactacagccagctgaacaacagcggcacgctgctcggcaacacgcagctgaatattggcgcggactag

SEQ ID NO: 128041 - DNA, 579 bp, Enterobacter cloacae
atgtcgctagtcaacgtcgcgattgtcgcggtagacgggttcagcccgttccactactccgttccctgcattttgtttggcgactcggtctccggagaaaagcgctttaacgtgacgatctgcgccgaaacgccagggttcctcacctcaaaagacggattttccctcaacgccacgcaggattttaccgccattgggcaggccgatattgttgtcgttccctactggcagcacgttcctgaacgcccgccccagacgctgctcgacagcctggtacaggcgagagaccgcggcgcagaaatcgtcgggctgtgtctggggtcgtttgtgctggcctgggcggggatcctcgacggcaaacgtgcggccacccactgggagttcgaacgtcagtttcagtcgctcttcccgaacgttcggctggatattaatgccctttacgtggatgacggcaatatcatcacttctgccggaaccgccgctgcgctggactgctgcctgtatatcattcgtcagcgctttggcagcgtggttgctaaccagattgcccgccggatgattgttccgccccaccgctag

SEQ ID NO: 128042 - DNA, 1230 bp, Enterobacter cloacae
atggcactttcagataccaaactacgcacacttgcccccagaaaccgcccttggcaacttgccgatcatgacgggctggtgattgaagttcttcccaccggacgaaaaatctggcgtttccgctaccgctttgacaacaaatcgcaaaagatcacgctgggcgaatacccggctttctcacttgcagaagcgcggctttggcgtgaaaagtgccgctcaatggttgcccatggcatcaatcccgcgcagaaaaagcaggaagaaaagcttaaacagaaagacccaacgacagtcaaaacattcgccaaacgctggctgaccgatatcgttgaaaaaagtaaccgcgatccgcgcaacatcactcgcgttatcgagaaggacatcattcccatcatcgggaagctggaactcgaagaactcacaactgcccatattcaggtcgtgctcgaccgcatcaagcaacgaggttcggatcacgtcgcgctactgacgcgaaacgtgcttaaacgcatgctggcctatgcgatttccaggggaatcatattcaacaacccggcagccgctatcgaggcccgttatatcgcacaagcaacaagccgcgacgtggcgctaaccgcagaagagatcggaatcctattacgggggatctacacctctaacatgaaccgacgccacaagctggctttgcacctgctgatcatctgcatggtgcgtaaatcggagatgattgaagcgacatggagcgaagttaacttcaacgcgctggaatggcgtatccccggcgaaagaatgaagatggataacccgcatattgttccgctgtcaaagcaggcgctggcgatgttcgaagagctaaaatttctggccggagattctccatacgtcttccccagccgaaacgaccaccgacgcccaatctccaaaacaacgcttaactgcgcagtgcgtacactggatctgaacgtcagggattttgttattcatgacttccggcgtactgccagcacattgctccatgagcaaggctacaactcagactgggtggagaaatgcctggcgcataagatcggcggcgttcgcggtgtttacaatcgtgcggagtacctgaatcagcgccgggagatgcttcagtcctgggcggattttgttgatgcgcagattgaggaggggcggaaagtggttatcgggaagtttgggaaggcttatgagataaacattagaaacagatag

SEQ ID NO: 128043 - DNA, 1050 bp, Enterobacter cloacae
ttgaaaaagcagagcaagaaaaatattaatgagtatcttagcgttacagatcgtaaccccctcctattgcagggagatgccctttctgttctgaagttaattcctgatagctcagttaattgcgtcattacttcgcctccgtattggttacaaagagaatatgagagtggaggtcttggccaagaaaggaagaaagaagattatattgcaagccttcttctaattttctctgaaattaagagagtgttaactaatgacggttctttttggctcaacataaacgacacttataataagaaaagtttatcaggaattccctggcgtgtcgccattgctatgatggatgagcaagactggattttgcgcaatgatatcatctggaacaaacttaagggtggtatggatagttcaaaagacagattaaataatatccatgaaaatatttttcattttgtgaaaaatgcaaaatattactacaacattgatgctatcagaacaacttcacggaaagcatccataaaaaatggcgctgtagtatcagcaactggcatcactggtgtgaattataagagaagaattgaactatcaaccacactatctgacgaagaaaaaaacctagcatttacagctcttgaaaatatccttgaagaaatagccaaaaataaaatatctgatttccgaatggttattagaggacagcatagaattacacattcagatagtgagaagatttctggtcgagctcgagaactgcgagataaaggattttatttccttaaatatcatccaaaaggaagtaaacctagcgacgtatgggaaatcccccctgaggatgctcaaaagcgaggagctcattttgctccatatcctgaagaggtttgtataattcctatattatcaacatgtcctcctaatggcatagttcttgatccttttgttggaacaggcacaacaacggctgttgcttgtaagttaggttatagatcaatcggtattgatatttctaaaagctatttaaacattgctgaaaaacgagttaaaaatacataa

SEQ ID NO: 128044 - DNA, 978 bp, Enterobacter cloacae
atgtctgacaatgattatgatgttaatagttatacatttagtttgatcacccaaggtcgacataaattctattctttaacactatattctgatgttctagctgaaacttgttttgtgacaacaagatatgaagatcccttagaaggttttcaacgccgactagatcaaagacgggcccaagaaattgcggactatattgatagtggttttggtacaatccctaatgctgtcgtgctatctgcacagccagaagcagaattaactgtcaaaaaaggtgggcgtgcattaacgataaaaatgcatccaaaagcatttctagttttggatggccaacaccgagtgtggggttataaattagcgaaaagtaaactacgtatcccagtagtaatttatacaggattaacaaaagcagaagaaacaaggttatttattgatataaatacaaaacaaagacctgttccaagtgagttactgctcgatattaaacaactcgctgaattagaaggcgatacagaaagtcttcttagagatttatttaatcagtttcagaaagacaagtttagtgtattaaatggattattaagccctaatgagaaacttaaaggtaaaataagcagaactacttttaacaccagtttttcaaatataattggcgttcttggaaacaaagatacaacagaattatactctatatttaactcttatctgggagccgttatggatatttttgaaaaatcaggagttaaagatgaaataacaacgccaaatatttttaaagcaattatttcatttttcccagaagtcgcatccagagttaaatataaatttaatgcagaatacagcattgataacttttctgaaataattcaacctgttatgcccgcactaaacaaaggcataatatcgaaatctaaacgctcttacaaagtactccttgatacactaaacaactcattgacaaaaaatttccaactttaa

SEQ ID NO: 128045 - DNA, 975 bp, Enterobacter cloacae
atgtcagcggcatctgatgtattaagaccatattacattgatggtttagcaaacatgagtggtgttacagacaccacctttaaaacatggatagaattagagcctcaaattcttgatagttatgatgagactattaaaaaatttacattttatataggtgataaagagaaattactacgctcaattgcttttgatatttccagaatgtcaattgccacatttgaatccatatattacatatcttcggaacacgaattaccacgatccactgcgtggccattaataagatcttattatgcggctttttttgcagctcatactattttaagaatatttggttatgctgtcattcaattagaaaaaggtcagtctgataagttaggaaatgcattaaaatatcatgcaattccaccgaagagtagcatcggtgacggccttcatttagtcattttccataaagatctgacatcattctccatacaaaagttaaataacggctctcatgaagacacttggttagttctttccgaattattaacaaaaatctctacagattttttaatagacaaaaatcctgtaagcaatcaaaaaaaacaagatctttttggaaagattgacaccctagtaaaaataatgaagtcacatccttgtcatcatcgtgcaaattggttgtccagacttcggaatgagattaactaccagcacaaacatggaacctggtatccacatgaaaaatctaagaatttcagagaaaatgtgttcaacaatttaaattcatggtgtaaagaaccaagaatccaacttaatgaaaaagctcaccaactagataagtatactcaagcttgtacatttctcgtatcattaacacgagaacttatatacgatatattagatagaaacccctcagatgaatcatttttgaaatcatcaacagttaaagcattaaaacaagctgaaaataaaaaaatcgaatag

SEQ ID NO: 128046 - DNA, 876 bp, Enterobacter cloacae
atgtcgaaacttacaaaacgcatggaaaaactcgccctgctggctggcggcagttttaaaacagtccatgatcgcctccgtatcgccgggcgtttaagccagcatctgcacaagctgaatatccagattcaggatctccagcatatgaaatcgtcacatatcgaaagctacgtgatggcacgacgggaagcaggaattacgccacgcacgctacaaaacgagatggccgccctgcgcaccatccttgctcagtctggacgtcaaaaatttgcccaatcggagcgcatcagcaataaagcgctcgggctgggtaacgccagccgggcaggaacgcatctgccattaacctcagaacgctggttgtcggcgctgtctgcttttcatgaaaaggatgaagggctggctctgacgctggagcttgccagagcaatgggtttgcgttcacaggaagcggtgcagtgttgtcagtctctgaagacatgggccgctgcgttagagcgtggagaaaatcgattgcaggtggtttttggcaccaaaggatcacgttcccgtcagacggtggtgctcgaacctgaaaggctacgcagcatcatgaaccaggctatccccctgatgacacaacgcgggggacgtttgctcaataaacccgatctgcgcaccgcaatgaattactggcgtggcagcgcagttcgcgcaggactgactggcccctatgcaccacacagtctgcgctattcatgggcgcaagaggcgatggcgcactaccagcgacaggggctgagtataaaggaagccagggcgatggttgcgatggatctcggtcatggcgatggtcgagggcgctacatccagcaggtgtatgggaggcaatcatga

SEQ ID NO: 128047 - DNA, 984 bp, Enterobacter cloacae
atgagctattacgtttctgccgtatccgatcgggcacgcaataactggccgaaaatatttgaacaacttggcattttcattccaccaaatcatcggcatggcccgtgtccctgttgtgggggtaaggatcgcttcaggatggatgatctggaggggcgcggcacatggttctgcaatcagtgcggcgcaggtgacggactggatctggtttcccgcttcttcggttgcgcactggttgcggccgccggaatggtgcaggacatggatcctgtaccgctggttccgccagccagggaaaaatcacaggctttgaatatggaatcgcgtattaagacactgcttcgtcattgcgaatccggagaagcgccgtatctgacaacgcgaggctggcgacgagcccagtggcttctgactgagcgtagtagccggacaatctgcggcgtgcatttcggggcgggtacgctggtattgccaattcgaaatacaggcgcgcagctgacaggtgcgcagttcattcatccaggagggaaaaagtacctgctgcccggtagccatctgaaggattgtttttgcccggtacatcaggcgagccgcaacggtagacaggaaccctgggcaccggacaacaaaccactggaaggcatcatcattaccgaaggatatgcaaccgcgcttgcggtctcatgccttcatcattttccggtcgttgctgccctgtcggcacacaacctgaaaaatgtggccatcgctttccgggcgcagtggcctgaatgccaccttatcctggctggcgataatgattgcagtcaggagaaaaataccgggttgctgaatgcaaccgccgctgccgaggtagtgaagggctgtgtggttctccctgcagacaccacattgagcgactgggatgaattttaccgtcactacggtgaatccatttcccggattgtgttcaaccagcagcttcctgcaaatctcaggtcgtaa

SEQ ID NO: 128048 - DNA, 1053 bp, Enterobacter cloacae
atgacagcatcagaccgtactctcaccaccacccttccgctgcgccggggctcggaaggttttaacacgagtcaggattatctggttaaaggactcattcccgccggggcgctgtgcagtatttacggccccggcggctcttttaaatcctttctggcggtatcgctggcgtgccatattgccagcggtacgtcatggggcggaaggcgagtcaatcaaggggctgtgctgtttatcgccggagaaggaggaaccggtgtatcgcggcggatccgcgcctgggaactcagcgttaatgacgagatggcgctcgataacctgtttcgcgtcgactgcccgatctttccagccgctccgggaagcatcgagcaggagatcctggcggcaaaggacattcagaacatgaccggaatgccggtacggctgatcatcctcgatacgctggcccgctgttttggtaactcagatgaaaacaccgcgcgggatatgggcgcatttatccagggttgcgacgccattcggtatcatacgcgcgcagcgatgatgatcgttcatcactcgggtaaggatcaggaacggggcgcacgcggttcaagtgcttttcaggccgcgctagatgccgagtttaacgtcaggcgcgagggacgtcgcaacgctatcaccctgagttgtacaaagatgaaagatgcggagatgccggaggtcaccgcctacgatcttgaggaagtcgttatctataccgatagcgatggcgaaccagtgacctcactggtgctgaatgacgagcccaggcaacctgacgatgacttactgagtagtggcataccacccgacgttcctcatatcacccgcaaccatacggcgttatggcgctgtattaaccaacgcatcagccagaataagccttgtacccgcgcgctcttgcgcgacgatctacgcgcaaagggaattaacgtcgagaagaaattttcgcgctggctggagaaactgctgcgcgagcaactgattgtgctcgatggaaaacagatccggctcccggatacgggggaatga

SEQ ID NO: 128049 - DNA, 204 bp, Enterobacter cloacae
atgaaaatcaccgtagaacaaccctcagccagagaactggtcgatcgctcgcgagtcctggtgcatgtgatgcttgagcatcctgacgatatcggcccgaattatgcgttgcttctcatccttgccgaccagctacaactattaagggatgcttttgaagaggatgagatcagacggcttagagacgagaaattacctcagtaa

SEQ ID NO: 128050 - DNA, 468 bp, Enterobacter cloacae
atgagtcacgtttttgtccgtaccggaattgagtttgaaacctgccagcaggcgctggcgcatattggcgaggagatgctggctaacggtgttgtacacgccacctaccctgccgcccttctggaaagggagatgaactaccccaccggcattgcctttgaacgccatgcggtcgctattccgcactgcgaagccgtacatgcgaaacgccccgcgatttacctgattcgtccggacaaaccggtgcattttcagcaggccgatgatgatggcgaggtcgccgtctcactcatcatcgcgttaatcgttgaaaaccctgcggcgcaaatgaaattgctgcgccgccttttcagtgagctacaaaacccggacgtgctggacatgctgctggctgcgcccgcagagcacctggccgatcgtttacgggagacgatccttgagcctgtcgcctgtgcccgggcttcataa

SEQ ID NO: 128051 - DNA, 1227 bp, Enterobacter cloacae
atgcctaattttttcatcggcattcgtttgagcatggacagaaaaaacaaactaaaaaaactaatccaaaatcataaaaatatacttaaaaatcaccgatatcagcctgatttggcaggtgcagacctgcgatttatggatctcagggggctctatttacgcaatattaatttatcgggatgcgatatttcgttttgtgatcttcgaggagccgatttctcctgtgccaaccttgcaggcgctaatcttagctactgtaaaacggaaggtacaatttttagtcacgctaattgtacttgcgtggattttactggaagtgatatccatgatgtcaggttattgacggaacatgaacaaaatgaaagtgatacgccactatcccgaccactcatctccatctacatgccaacctggaaccgccaggcattgacgatcagagccatacaatcggtactgaatcaagactatgtgaactgggaactcattatcattgacgatttctcatcctcatttgaccaactcttgacgtatatctccgaactgaatgacccacgcattacctatatccgcaatgaatttaactctggcgcttgtgcagtccgaaatcaggctataagaatggcccgtggtgaccttattacgggtctggatgatgatgatgaatggctgccgacacgcctgtcctcttttcttacctggcaacataaacttcagttgcacagttttttgtacgcaaatgattatctctgtgacggtaccggatatcatcatcctgatgaattacaggtgtatccgaaaccggcttataaaaaaagcctgtttgataaacggaatattataggcaaccaaatgctgaccttaaccagtagaatgcagcagatcctgttcgacgacgccttgcctgccgctcaggattatgatgctttttatcggcttgcagaaaccttcggtgaacctttcaaactggatgacatcacacaggtgctttatgtcaatcacggcgaagcccgcattacctgctcaggacgaaagttttcaggttatctacgtttttaccggaaacacaaagccaaattagacgtatcgagtaaaaaatatcagctcttcactctatactacattcgcaacaaaaagatgcgcccgcaaaccctgatgaaactgatgacgctacgcaatctgaaacgctatctgatgatgtatacccgcttccggaacaaaaagttctga

SEQ ID NO: 128052 - DNA, 972 bp, Enterobacter cloacae
atggaactcagttatatcgaaaaatggctgccggaagcatcggttaaatacaaggacggcagcccggcggtcaacctcgggctgattatcaccgtgttctttaaaaacggccatacgccggaggttcgccgaaaaatggtggagtgtgtggatcgttattacggtgaatttaagccgtttctcaggaaaacgctgccggtaaagaaatggaccagaatcaccgaaaacaattatgccagacagcggcaggcaatccttgactcaacgcctgaagaaattattgactgggtactgagttccgctcaggagtcctatcttgcgccgggttacagcatcttaattatgggaactcgcatttttcataatgatacggaccgttcagttattaaacttgtctttcctctttccctgctgaaagagccggacggtaaggaacggtatgaaaactggctgctgtggctgtgcaataccttcgaagtggaaagcggctatgccgggctgtcgttcgttctgccctacgcgcgtgaacgcatgttcccgtatgaatatgccctggcgcagcgtttttccggcgtgatggtggactctctgggtaccctggaaggcggggaagcggtcgaaggcctcaaaggtgcctgctggtacaccatcctggctacgccctggctggaaaggctcggcggagaagatgccgtctctcggcgtcttgcgaaaacaccggaaatcagcctgctctcctataacaacggggtgattatgaaagccggtgagctacctccaccacttggcgaaaagcaaacggaaggtcttcctcaattactggtaaaaataaaccagattattctccctgttcgttatgacggccataaaggacttcatttctattccgaatacgaaaaccaccagtttgatgaagaatcctccatgaagtggtttgcccgcttcgatgaggccagcgccctgctggaatga

SEQ ID NO: 128053 - DNA, 411 bp, Enterobacter cloacae
atgaaaaaagaaggccttcctccgttacttgtgaagattaatcaaatcatcaggccggttcgctatgatgaaccccgctcgctacatttttactcgtcctatgagaaccaccagtttaataaagaatcgaccatgaagtggtaccggcgcttcgatgaggccagcgccctgctggacagcgaggagcctgaaacctcatctgaaccggtacgcattacccgctggaccgatgaaaacgccccgcacgccgggcagtgggccgccatcgttaacggcacaacggagtatattcagacccgggaagggcagaagatgcccgcctttgaggataaacacggcaaaaaacaccgcgcccgctggtcactgcttaagcgtgacgaccagggcagcgtatttgttattccggaataa

SEQ ID NO: 128054 - DNA, 135 bp, Enterobacter cloacae
atggctatatacccgtcatacttcaagctgcaggtgcgttggctgcactcactcaccccagtcacgtacttatgtacgctcccggggattcgttcccttgccgccttcccgcaactcgaattatttagggtataa

SEQ ID NO: 128055 - DNA, 663 bp, Enterobacter cloacae
atgtcggactcgtcgctcgtcaaggctaaagtgtctttaacggcggggacgtcctctcaggacagtcgttaccacagtaccgacacgcagggcaccaccattaatgccggcgagaatgtctctgttcgtgccggaaatgacattgccggtatgggggtacagatcgcgggtaaacacgtggcgctggatgcggggcgcgatattctgttgtctgcctcccagaacacaaccctctctgagagtaaaaacagcgttagccagttcagcgttggtgtcggtgtgagcctgattggtgcacaaaacggcatctcggtggagctgggagcgtcacagtataagggtaaggaaaacagccagtcacagcgcaatacgaacagcgttgtccatgctgatgaacagcttacggtgaacagcggacgcgatctcaccatcagcagcgtgcaggatacagccagttatgacagcaagcagtcttcgtcaggcgcgtccctcagtctgtgcataccgccactgtgttatggtgccttttccggtagcgtcagtgcatcggtgagaatatcacccagaatggtaagagcgtcgctgaacagagcgggatattcgcaggcaagggcggctttgccgtcaccaccggaaatcatacccagcttgacggcgcggtga

SEQ ID NO: 128056 - DNA, 498 bp, Enterobacter cloacae
atggcgggatcaggttttttattaccaatggtggcgggtgtcgcgcttagttgcgtcagctatggatttgttgctcgcattgtttcaaaacgtcagatcagcacgctacgcgcagtttcatggggaattcttggaaccctctcattggtgctaggcgtatgtgcattttccgctgtaagcgcagaacacccggcagcgaaacacaagaccttgtgcttaggtagcgccccggaatgctatgcaaaagcgcaccacaaccccgtcaaagagtgcaagcaggtaatggacaagaaagcagcgtttcgccatgtgtggcaggaaagtgaagcgcggccagttttcgacacttacctttggcacaacgagcaaaagaaaacgattcaagcatttggacaacaggctaaggccattaacagcatgaatatgctgataccattgcaatacttttgtgtttttaacgccaacactggggaagtcatcgcggcttcatttgaatga

SEQ ID NO: 128057 - DNA, 2595 bp, Enterobacter cloacae
atggatgtcttacaggaaatattgaaatggtctagttccgagctacccctctgggcaagagactgcttaaggagacaattggcttctccctcattggaggatagtgattatgaagaattattggaattgataaagattgaaaataaaatattgccctccgataaattagaatctctccccttaaataaggatcatattccggtttcagcggttaatgatcaagtcattaagattaaagaactaagtagtcttgttcacgtgaacaggattgcgcctgaccaaaaaattgcattctgtgataatgggattaccatcatttatggtatgaatggtgcgggaaaatcaggatacgggcgagttctcaagcatgcatgtagagcacgagataaaggtggtgcgatactccctaatgtaaacctgcctggctattcatccaatatacctaacgggaaatttaaaatttctctgaatgggaaagaacacgatttacaatggtcttataattcaccatccccagaattgttgtcctcaattagtgtttttgatactctttgtgcatcatcatatctgaaagaaggcgaggctgcttatttacctcgcggtctcgatattcttgaagaatttgcaaatataataattcctaaattagcagaaaaagttttagccgaggctaaggctatagatgtgaataaagagataactcaaatttttacagatggcactagtgtatctgatatatgtaaagtattggaccataaaacagatgtcgtaaaattaagagatttagccactttaagtgattccgagctaagtagagataaagagctagatagagttctggcagaaaaaaatcctgaggaaaagtataaagaattactaagaagtgtatcgcacataaaagagctttgcgttaggatcaataatcaaagtaagtttataaataacgcggccatgacaaagcttaagtcgttgatcgaaggcgttactaatgcagaaaaggcattaaatgagtcagcgcaaaaacttgcggccggagatgatttattgcctaacactggtgaaggtatctggagagatttgtttctgtctgccaaaaaatactcgctcagttgtgcttacccaggccatgattttccctccgttggtcgtgatgcaaaatgcgttttatgccagcaacctatatctgaagcaactgacagaatgttacgcttcaatgagtttattaatgatgatatatctaaattattagatgaaagaaaatcttctctaaaaacagctagagaaaaaatatatactgctacccttgattttagttttaatgctgcaatacatattgaaattggcaatgagcatagcgaattaattgaaagagttaataagtatcaagaagatattatcaatacaaagactgcgatgctttcaatgattgatagtaagaacttcgcgaatatcgaatttgattataatccaatttcagagctaagacttctggctgctagcaagttacgtgaagcaaggttatataagcaagcatccaaaaaaagaaagattgacgctctaataaaggaaagtaaagaactcaaagcacgaattatgcttgcggaaaaattagaaggcttaatttctttagttggtaggttgaagttatataacactcttaactcaattagcttttcagcattatcaaaaaaagtatcagataaatctaagttgtttgcaaattcaataataagtaatgcgttaaaaaaagatttggatgaagaattttctaaattgggtgtttctcatataaaaacagttctcaaaccaagagtttctaaggggaaggttttttatagtttgcttttggatatacctgtctcaaataaggtggatttaattttgagtgaaggggaacagagggctgtatcgttagcatcttttttagctgaattaaaacttgccaaccattcatgtgggatcatttttgatgatccagtatcttctcttgatcatcatagaagaagacgggtagcaacaagattggttgaagaagcaaaaaatcggcaggtaataatcctcacgcatgatatcgcttttttgagcgagttaatatttgctaccgagaaaaataatgtcgatagcttaatacaccacctgcaatggactggagatttttcaggctgcgtttatgatggtttaccttgggacaaggtcagctataaaaccagagttgaaaagttaaaacaagaatctcggcaattagatccttggcctgtatatcccagtgctgagcaagataactcgatgcgaagattatatagccgtatgagatcaacggttgagaaaatggttgaagatgtgatattcgctgggattgtggttagattcagtgaaattataggagttggcaatttacataaattaagtgggcttgagcgagaatgttgtattgcgatttctgaactctggtcaaaatgccatcgtattactgatgctcatgatcaacctgcatacaaacagacagcgttaccaagccctgatgaatttcgagcagatttagagcttattttagatttagcaaaaaaagcagcagcgactcagattaaaaaatag

SEQ ID NO: 128058 - DNA, 558 bp, Enterobacter cloacae
atggcgattttcggctacgggcgtgtctctaccgctcagcaagatacggagaaccagaggttggagcttgagcaagctggttggatgtttgacttttggtttgccgatattgttagcgggaaagttcaggcaattcagcgtaaggcgtttgctgaaatgcttggcaaaattcgaaccggtgaaacgctggtagtggcaaaactcgaccgtttggggcgtgatgctattgacgtgctccagacagtccgattgttatctgatcgcggcatcaaggtgatcgtccaccagcttggaacaactgacctcacttctgctgccggtaagcttctattgtcgatgttggcagcggttgcggagatggagcgtgatctactgattgaacgcactcaggcgggtttgtcgcgagcaaaagccgaaggcaagaaattgggtagaccttctaaaatcgcaccagaagcccgtagagcgattatagagaaaaagagtagcggaatcagtgtcagtgcgttagcgcgtgaatacggcgtttccagagcaactatagccgcgttgctttaa

SEQ ID NO: 128059 - DNA, 921 bp, Enterobacter cloacae
atgattgctctcaacacagtcaagggaatcattgagatcagcagttggcatgatatcgttgagcgcccgcattttcgctcaaacatcaaccctacaaacgttgaccttaaagagatcatcggtagttaccaatttccagaagatgttccgtgtggactcacaacatgtcatcaaccgcataaacgtggttatatcgtagtgacaaaagaaggttacgaaaccaacatcggaaaagattgtggcaaaaactacttttccgtagatttcgtcgaaatgaagacgcggtttgatcgagatgttaaaacctcactacaacgcgacaatatccgcaaggcaaaagaaacagcaccacaactccttgagcatgtagagggattacggaaacagcctaaaggggctgattggatctactctcgtattgagaaactccgcaatcgaggtgtaattggtgaggcagcggctaacgaaattcgtaaaatgcttaaggagagacgtaaagagctactctcatctcgtcttgcaactaaagaagaaagagagcgggatttttccatgaatccgtctttggaggataaataccatggccaaccttattacgttactatcgttacaggctcgattaaccacctcgaagcaatgtctaaagacaatgatctcaaagaactactgatccgtggcgttacacaaacactaaggcaattaatagattgtgatgtcgataatttgaagtctcgtgaacttgcacaactgtccaaagatgcaagcaacattcaagcaaaaattaacatggcccaagagatcataccgcttgcacaaaaattactgacagcttcaaatcttgaaccgcttgccttttgggtggaagagcatcatggagagcgagcagcgacaccctttaaacgctttattgaacaactctaa

SEQ ID NO: 128060 - DNA, 1929 bp, Enterobacter cloacae
atggcgcaacgtggtaatctctatcgacgttccagtgggatctatgttctgcggatcaccgttccggttcgttatcgcgccctgatagggcagcgtgaaattcatgcatctacccgcacaacccaccttgcaaatgccagagctattgccgcgcgtttgctggagaagtggtatgcgtctctggaagagttcaggcaagtggataaagagaagattcggggtaatgcgccgctgttggctggcgctggcaaaatcagtttagcgctgttttgcgagtcatttgggattgcgcttgaaacggttgttcagcatcttttggcgcacaatgttccggtttattgcttcgcggaaggcctaaccgctttccagattgcagactttaccgaagctgaacgggaagataatggcggttttgtgcttaataaccttgagcagaaagggttagaaagcgtgatgcatggctatgtccgattgttccagacgagctatgcgtttaaacaacttctggagcaaggctacaccgaggaagtggcattcagaacgaatggcgacaaccgtctttctatctggttgatggattttccagggatcagattggatggcagttctttgtttatcaacaaggtgcaggctgagaatttgcgcaatatttgggataacgcgtttgcgaaatcagagcctgaattgcctccggctcctgttgtgatttcagccccgctacctccaccagttgtcatcactaatccgtattgcaatcctctatccgcttcgaaaagggtttcagaagtgctggaggagtttctggcttataaacactcaggggatatcaaacttgccagcgaggagaaaattcggtcacgaatatctcattttatcgacattgtgggcgacataacactcgctgagttagatcgtaatgttgttaaaaattacgtttccagaatgcagaggatgcccagtaacttgtatttaatgcggcgtcgatatgctgctgaaagcttagatcagctcatcgaaaaagccctcgatgctggtgagccgctcatgacgaaagatgccattgaacgccatatggcatcactgggttcaatgctggaatgggcgcgtaaagaaaattacttaattgcgaatccagttgagaacgttctggcgaaacgtaagaaaatcgtcagatctcaggataaccggcatcaatttagtgatgatgaactggaactcatattctccgcatactggtttaaaacaggtgcaggtgtgccgaataagtttgggcgttacatcgactttcgtccttaccgctactggctgccattgttggcattgtataccggcgggcgaatgaatgagttatgccagctttatctttctgatatccgtgtaagtgaaaatggcgtcgcatatttagatttcaatttggatgcaccggataaagtaatggactcagaagcagataagtcgctaaaaacacttaatgctttacgacagatgccgatccacccagagttaattcggcttggatttctcaaatatgtagaggcgttaaaatccgacggacaagaacgccttttccctgagttaaagtttaataaaactaaaggttatcgtggctatgcatcaaaatggtttaatgagctttattgtggcaaccagcttggcttagagcgcaatgggaagatagtatttcactcattccgccataattatgtgaacagcctcgacaggctggagctaagtgagcggatgatcgcgcagcttgttggacatgttcgcggcaacactactgccatgacaacctatcgtaaggacagggcggttgaggatcagttccacgccatttccgggctgacatacaatttgcctgagatagccccatttaatgcagaggcggggctgaaagcgatgaaagatggggttcgcaagcataagtag

SEQ ID NO: 128061 - DNA, 1671 bp, Enterobacter cloacae
atgggcattatgatacagccaacaaaaaaccgtttcggcgtttacctcgtccgtaaggccgtccccaaacacctgcaaggcatcctcaataaacgtgagatcaagtttacccttgataccaaagacgtgagggaggccagagaacgagcacccgcaaaaatcattcagatcgacctgatgctaagacgggctgaagaactgctaaaggcagagcaatcgttaaccgatgcggatattgagctgattgcgggtgtatgggcttcgaaaatcatgcagcaggaccaactaatccgtgagcgatatctcgtggaggagctgctcgacggtaaagtagggctggttcactcaccagaaaacgcgataattcacgactggctggaagaccgcgaacgtaagccccgctataagtcacaaacatggcaggaagaacgtgacgtatctatctgcaaactgatgtccatagagctggatgaagctctggaatactcgccagtcgttctcactccagcctggcgaaatcgtctggcatggcggctggcagaacgacgtaatgaaatcacaaacacgtaccttctgaaccttcgcccaaggctctacgccataagcaaagggctggattcgctgccggaagcaaaaacaacccaaaaaaccttcacccaattatttgaggcatacaaagagttcaagtgcccttccgacgccgaatctattgataaaaaagcgctggcacatgtcaaagactatgccgcagcagcggaccgctttgttgagataatcggcaacctcgccattgacgacattactgccgatcatattgttaaattccgggataccatggcgaagtaccccaagaatctgaccaagaaagagaaagctttatcgttagcccaaaagctgtccctgcaaaacaaagaccaccttaccccagacagggtgcggaacatgctcaaccatctgtcgtcattctttgagcatgctatctacgttaactggcttaagcacaacatcgtgagggatgtacgcaaaccttcccggacagcacgtgacagcagcgataagcccttcactcaacaagagttggcgagaattttctccggtcctgttttcactggacaagaagagccttacgaagccatggattactggatcccgattatcctttactacactggctgccgtgttgaggaaatcgcacagttgcacaaacgtgatattcagcaacgtgatggcgttttgtgtatgaaattgcaggagaacgaaacgcagtccattaagacaggtaaaacgcgttatgttcccgtgcctcttcatgtcacagagttgggcttcaccaatttcgttgccagcaggagtgcctttctgttctctgatgaagcccttgctgagaagaaatactcaactaatttccgtaagcgattcggccgctacataagaaacaacggtattgagcgtgatgaaatatcaccgacacacagtttccgtcatacattcgtaacgaactgccggagaaacggggttgcaatggatattcgcgacagcatcacgggtcacatcgactcgaacagaaacgaaagcgaaaactatggtgacaaacctgtagaaacaaaattggaagccatcgagaccatcccaaagttaaatctacgccgaatcaaggactggggccgttaa

SEQ ID NO: 128062 - DNA, 936 bp, Enterobacter cloacae
atgttgaaaattcctgattcagactggcagaccgttgacggggtccccaagctttccgttgctttcttgcggaaaatgacgcctcaggctgccagatttactcaatggatagagagggcacatgccaaattgcttaagggtccggaaaatgtcctttcgtgctgcacaagcgggctaatcaaaggggatattcccgacaaaaacggctggcttaccgctggtgatgcccttgccctgctgacttacagtatccactccagccagaatgggcttctcatagatgccattgagcaaaaatctggtctgaaactcccggtgaagcccggcgaaagccgccttgaggggcaatttggcgtcaaattacacgatttgatcgtcgaactaagacaacaaccacaattcagaagctatgaactcgaacggcaaaagcaggtcggcccctatagagtggatttcttccttaccgagcagtggtataccgatatggcaaaaggggaaactgctaaacgccagttcatcattgaatttgacgaggaggctcacagaacgacgcgttatcaattcaatgataaacggcgggatcgctggttacggaaaaatcagcccgatgtaaagttaatcagggtcagacatgcagaacaggaggtatggctggaagcggtccgccagctaaagcggttcgtcagtctggaagattgctatgctcactgcctgcggaaagcatgtattgctcgtccgggttccgaaatgcgaataaacagcacgtccgtgcgaaatgcttacaacaccgagcaaaacatgtgtagttttctgcttaaacgccctaaacaacccctccgcgaaatggaaaacctgcttctacggcttggcattccttatgagaaacggcgtgatgtccacttccggcgggcgtatctcagagcgtacggaatttaa

SEQ ID NO: 128063 - DNA, 159 bp, Enterobacter cloacae
atgttctgcggcagcaaaggcaccagcgaaaccaggcggtttgcgatgaatttcttctcaatgaaggcgttcccgcgcaggcaaatactggcgaccaccatcaacataaagcgtgatggtgtcatttctgaattgggtcggcggcacagtatcgaatag

SEQ ID NO: 128064 - DNA, 591 bp, Enterobacter cloacae
atggtggaaacacaagtgaagtttgcggttatcgggcaccattcccgatataagcaggcatcgcgtcttgctggacttctcggggatgtactgctgattgatagcggagaccatggcgcaaattggaatcatcgccgcgcgcttgaatgggcttcatggcaggattgccgggtagtgataatcgaagatgacgcattgcctgtcccagattttattgagcaggttagcgaatggcttaaccgcttcccagaatcgctggtgagtttctacctggggacggggcgaccacctcagtatcaaatgcagatagctgagcggctgattgttgctgataagactcaggctgattacatcacgctgcagcggcttatacacggcgtttgttatagcgtaccccatcagaatattgaacgagtcctttctcgatgggacagcagcaagccagctgattatgccgttggtgatgcctatggcggcgctgtggtttatccgtgttactcgctggtggatcatgctgacggcgaaccggttgagcgtcaccctgactcagcgccacgaacagaacgccgccgggcgtggaggttagcctga

SEQ ID NO: 128065 - DNA, 297 bp, Enterobacter cloacae
atgagcaagacgccgcgtttaacgttagaaaagacattcctctatgaccagaacgatgtctgtattagatatgaggtctatcaaaatgatgagcatcctaaaattgtggctttgattttagtcacccaggaagatgaaaagggccgaatcattgttgaaagaatacaccccaactcccagacgcagcctggcttgagttctccacagaaagcgggagcaatgctcaaccctggcccgctacaggtggctagtgctggagggtattgcgctaaacatttcgatgaaagttattcatag

SEQ ID NO: 128066 - DNA, 195 bp, Enterobacter cloacae
atgttgatcgcgagctgcgtgactcgtggcagcgccccggtggtagttgataccgcctgtgactgggtgaagccaatctacctgaccgatcatgatattgatgtgctggataaacagactaagaaagacatcctggcgcataacaaagcgtggcaggcgaactgccagaaacaaaatattcagaggactaattag

SEQ ID NO: 128067 - DNA, 276 bp, Enterobacter cloacae
atgacgcttgagatgattaccgggctagttgtcgctgtatttgctgttatcgccgccgcgtttggcttgggccatattcgcggcaccagcaaagctgaagtgaaagccgaccagcagcgcaccgaagataacgcagcggcaacggtcgcagcagccgaacgccgggtagaagcaacgaaagaggccagcaatgtacagcagactgttaaccatatgcctggcgacgatgttgatcgcgagctgcgtgactcgtggcagcgccccggtggtagttga

SEQ ID NO: 128068 - DNA, 279 bp, Enterobacter cloacae
atggtaattgacccgtcagctgtctttaacgcgtttatctgctcggtgatcgtcgtcgttctgatgttctaccagcgccatggtgcccggcaccgtccttttatctcaatcctggcgtatataaccatcctggtttacgcagtaatcccatggcaattcatcttcggcctctatcgtgactccagttggctggtggtgatgtcgaacctcctgatatgcgcagctgttatgaaggtccggggaaatctggcacgtctggttgatcttctgaggcactaa

SEQ ID NO: 128069 - DNA, 390 bp, Enterobacter cloacae
atgtccgatccattaaccggcactggtgcagttctcggcggaggcctgctgggttcagtcctgtatggtgtctttactcatacagatttcggcgtggtgtttggagcgtttggtggtgcggtgttttacgtcgcgacagctgcaaaccttacgcgtgctcgcctggctgcatatttccttacatcattcattgttggagtgcttggcgccgggtttgttggttcatggctaaatgctgcctcgagttatgaaaaaccactggatgcactcggtgcagtgattttgtctgcactgtgtataaaaatcctaacttttcttaataaccaggacctgaacaccctgttcggttttttctcacggttacgcggaggagggggaaatggtaattga

SEQ ID NO: 128070 - DNA, 882 bp, Enterobacter cloacae
atgctgagtatcaaacaacgcgaagaaagggaagctctggtggcaaagcgcgaagggcttcgtgaagagctggcgtttgctgtggaacacaaaaaaccgtggcagtggggaagctgggagtcagggaacgtccacgccgccgcctgtgaaaaacatggtgattatcagcgtatttccctcactggaaaagcctatcgaggcgttgaaaatgttaagcactcccaatgcccggagtgtgtgaaagcggaactcgctggcattgaatccagtctgcgtacattgcgagtagccgacctgatagacaatgccgggattgcacgacggttcgaagcatgtgaattcgataactaccaggccatcaatcaggatgccgccaaaaatctcgcggcttgtcagcgttatgccagcagctggcctgagcgacttaatgccggtaccgggcttgttatgaccggcaattgcggcaccggcaaaaaccacctggcagtggctatggtaaagagtatcatccgcgatcaccttgcgaatgtggaaatcaccgatgtcatgcgcctcacccgagcggtaaaaagcacatggcgccacaataccgaaatgaccgaggaagacgtcattgaacgctttgcttcactggatcttctgattatcgacgaagttggtgttcagttcggcagcccgactgaaatgaccatcctgcaggaaattatcaatgcccggtacgaaagcattttgccaaccatcctgatcagcaatctcacatttgaccagctgaaagaggctattggtgagcgaatcgtggatcgggttacagatggtggacgcaaccgtctggcatttggctggggaagtttccgcgctattgcgtcaggagtagtagcatga

SEQ ID NO: 128071 - DNA, 912 bp, Enterobacter cloacae
atgagtagcaaaattctcggtaacgtctgggacgcatgcgccgcgcatgacattaagggggccaaactggtgattatggctcgtctggctgactacgcgaatgatgatggtgtttgctatccgagcgttgtgaccatttgccgccagctgggtttgggtgaaagtacggtcagaaccgccattgcagaactggaatctgccggttggctgcgtcgtgaatcacgccgtaaaggtaatcgcaacacatccaatctttattatttgaatgctgatcgtctcgaggctctggcacgcattgagaaggacaaagtggcagcgctgaaacggcagcacaggactaacggttttcacccttcagattctgacccttcaaaatctgaaccgtcagattctggatgttcaaacggttttcacccttcagattctgacaaaaatggcgttttcacccgtcagaatctgaccccagatccacaagtaaattcaaaacatgatccacaagtaaattcaaaacaagaatcacaagatattggcgcatgtgggaaagtccattctgaaaatcgctcttccaaagagaactattccaacgagttcgagcaggcatggcaggcataccctaaacgtgctggcggtaattctaaagctgccgcctggaaagcctggaaagctcgaatcaaagacggtgttaacactgaggcaatgctggctggtgtaaaccgttatgcaggttatgtccgtgctacaggtagcgccggaacgcagtacgtgaaacaggcggcgacgttctttggtcccgatcggcatttcgaagagtcatggcgggcgccatctggttcggtaagcggtagacctggtggactgccggtttcggggtttagtgaacaagactatggccaatcagactgcaactggtaa

SEQ ID NO: 128072 - DNA, 297 bp, Enterobacter cloacae
atgaatcactctgacttcgtacgtaaatattcattcgataacccacttcagcggttggtcatgcttcgcattttgatgggcggatctatggatggagaaggggagcgagtaatcgatcatcaggtcctggctgaattctgttgctgctcaaaacaagccatgtttaaggagatcaaggcacttgaacgcgcagcttgcctgaaagtgagaaaaattggtgcccacgatacaggccttaaaactcggattgagccagctcgcggctacacaatcacgccagttcaggagtttgtatga

SEQ ID NO: 128073 - DNA, 258 bp, Enterobacter cloacae
atggaaacgttaaagagatacatggctagcctttcaccagaacagaaaaaggcatttgcggaaagttgcgggacaacaatcaactacttgcgcaaggttatgagcactggctcagtgattggcccagaaatttgcgtacaaattgagatccagagtgaaggggctgtaagccgtcaatcactcaaccctgaaaactggcaacgcatctggccagaactcaagggtacagagtgcacgcctgaacgtaatgagctgtga

SEQ ID NO: 128074 - DNA, 678 bp, Enterobacter cloacae
atgaaagctatggacaaatacgagaaacgccgcttaaggctcatccagttgcgggatgaatactgcaatggcaacgcatcagaactcgccaggaaactggagcgagagccttcctacgtatcgcgaatgctgtggccagaaggtaaggcaggcaaaaaacgaatcgctgacgggatgatagaagttattgagagggcctttaatttaccaaggggttggatggatgaaattggcctagaaaatgcaaatgttagctacgtaggtccatacaaacccagcagatcttatcctgttataagtaatgttcaggccggcgcatggtgtgaagctgtggaagcctatagcttaaaagacatagatatgtggcttgaatctgatgctcatgtacaaggtgatgcattttggctgaggatagagggtgactcgatgacttcacccacaggccttagcatacccgaaggtacgtatgttctttttgacactggcagggaaccaataaatgggagtctagttatagctaagctttacgactccaatgaggcaacctttaaaaaacttgtgctcgacggtggaaaatcctatctgaaaggtttgaacccacagtggcctgtagtgcctatcaatggtaattgccgcatcataggggttgctatagaaacgaaaatgcgactcgtttag

SEQ ID NO: 128075 - DNA, 306 bp, Enterobacter cloacae
atgaagaaatcttaccatcaaaatacaggcagtaatgaatttaatatctacgacaagctcagagctaataatactcactggtcacatcgtttttcagcccaacctcatgatgaaggttttaattaccagtttagaacaacatgtgtagatggggtagagtttgcggtttacgagcgcattgatgattatttcgtgttggttgatttcttcaagaactatgatgaagcatgtgatgttgcaaaaaagataatcgatgaacacccggacatcaagcggatgttttccgcaaatcaattaagatattaa

SEQ ID NO: 128076 - DNA, 795 bp, Enterobacter cloacae
atgagcgttatcaatccaataagttctaatatatttaatgctgaattattaaactctccagcagcggcacttgcagcgtggatatccatctttggagctgttataaccttgctcacaatcgttgccagagcattattcaaatatcggaggtctcatgatttaatacttaaaaaatccggaatcccagcttttttactaaatttcttctttattcgaatatcattaaaaaaactgcctactatcacatgggttgaaaaaaccgtaaccattcttttttcgcttctttttttgtattctatttatctttttggaccagcgctcatccaagccattaagactccgccaaatagtacgatactttactggaaaagttcaggcgagtcattttacatatcaaataaaatcgcgactgcggctacaattttctccgttcctgactgggaaatttcaaaggatgattgcacgcaaccattcccttcttatacagagaaatacaagtcattaacaattgaacaaaaagaagatctttgtaaattgctaaacactgatgaaggaaaggctttcattgataaatcgattaagaagttcatcaaagacaaaatttttatttactccattactccaatgggcatgtttattttattatggctatccatgggcttaatgctcaccattcactattctaaaaaagttagaaaatacattctaacggaacaaaaaaatgcaattctttgggtaaatggcgaattcaaggcagaaggtatttatgcaatatatcaagagttagaacgataa

SEQ ID NO: 128077 - DNA, 177 bp, Enterobacter cloacae
atgtgctttctcaaacgctggctcaaatctcagaaccagtttttcttctggacctatatacccatcatcctcacgttcatttttggctatgtccttgacatttatttccctgagattagccagggattcaccctcctgttttacttggttacactggggctggcttattggatatga

SEQ ID NO: 128078 - DNA, 270 bp, Enterobacter cloacae
atgagctgtagtagccgtcgtaggccgtacggttgtgtagccaaagccgcgcacaaaaccgctccactggtccgagaatgcgtgatccagtgcaccgtagagcgttttattcataaagccatcgcgatcggtctgggcaaggccaccattgttgccgtccgcaaccacatcaaaccctttggtataggtgtaatcacccgcaagcgtgacgcgcgtgctgtcgcccagtgtttgctgagtactgccgccataattctgatagccgtgtga

SEQ ID NO: 128079 - DNA, 798 bp, Enterobacter cloacae
atgaataggcgtgattttttaattctatcagcaggagttgctttatctggttgcgatttctttggtggcgctaacaaagctaacagcgataaaaaacttcgatttgctatcgcgtcagatggtcattatggtgaaaaaatcactgattataagaaaaactacagcgtttttgttagcgcggttaatgaatttagcaaaaacaataacgtcgatttttgcgtcattaatggcgatattgtgcatgatgataaaaaatactttcaacccgcaaaaaaacagttagatttgctttcaatgaaatattttgtaagtaaaggaaatcatgaccccgccactccagaagaatgggtgaatatatggggctatcctatggactttgatttcacgattgatagaaatgcctttttaatcatgtctacgtcagatttagctggcacgtatctttgtcccgatctctcttggctaactaacaaactaaaagagcacaaagcaaaagaaaatgtatttatatttatgcatattaatcctgtagcgcaaactcactttgccgttgaatgcgatcaactcctttctctactatcagaatacaaaaatgttaaagctgtattcaatggtcacgaccatgaccatgacgaagtgttaataaaaaatgatatcccatttgtatttgatggtcactttggtggaagttggggaactgattatcatggatttaggatagtagaagtagatcaggataatactataaccacatatatgatggatccttcaaaaaaaatcaaaagctcatccttataa

SEQ ID NO: 128080 - DNA, 249 bp, Enterobacter cloacae
atgttcagatgtccattctgcggcgctatggcccgcacccgtaccagccgtaaaataaccgatatgacaatccgtcaatatcaccagtgtcagaatctggaatgtagccggtcattcaccacgcttaacagcgtggaaagggaagtaacaaaacgcgcaggtacagcgccgttaccgcctgactttatcccccgcgatgccttcccggcgtctcactatggaaaggatcagctaaatctagccctctaa

SEQ ID NO: 128081 - DNA, 2967 bp, Enterobacter cloacae
gtgaaaagccttaatatccgcgtcgcgttcagcgcgatcgataaacttacccgcccggtcaatgccgcccgccagagagcgggcggtttgtcagaatccctcaaaaaaacgcaatccagcattaaagatctggacagccagtcccgcacgttcaaccgtctgcgcgacagcgtgcaaaagacctcccgcaaaattgacgaagccagccggacgcttgaagggctgaatcaggcgcagcgggaaggtacacagcttacagacaagcaaaaagcacatatggcagcgctggccgcaaagctggagcgccttaactctgcacgcacgcaggaaatggttaagctgcgtgctgcctcacaggcgctgcgcagccacggcgtttcgctggtcggcagcgatcgcaccattcagagcgcgatacgtcgaaccgaacagtacaaccagacgctggagcgggaacggcgacagcttgccgctgtcacacaggcacgggcgcgctatgaccagatgcagcaaacagcgggtaaacttcgcggcggtggcacgatggccgttgccggggccactgctgccggttacgcagcgggacgcttcttatcccccgcagttgggtttgaccgggaaatgtcccgcgtgcaggcgctgacccgtatagacaaaagctccgttgacttttccgcacttcgtgaacaggccaaaaagctgggcgctgaaacgcagttcaccacgactgacgccgccagcgggcaggcgtttctcgctatggccggtttcactccgcaggccattcaggccgcactgcccggcgtgctcaatatggcgctggccggtggtatggatttaggcgaaagcgccgatatcagctcaaatattctgtctcagttccgtctcgatcccaaagaaatggatcgcgtcagtgacgtactaacgggggcgttcacccgcaccaacaccgatctgcaaaatatcggtgaggcgatgaagtacgccgggacaggtctttccagtcttggcgtcagcgtcgaacagacaacagccatgatcggcgtaatggcgaacgtaggcctgcgcggtagtatcgccggtacaggattacaggccgcgttttcacgccttgccgcgccaaccggcagggcaaaaaccgccctcaaggaactgggcgtagacgttgctgacgccacggggaaaatgcgccctgctgaagaggttctcactgaactctataaaaagatcagcaagtacggcgataccgacaagctctctttctttaaagatatcgccggtgaagaggcgtcaaagtcattgcaggcactggttatgtcagccgggagtggggaactccagaagttgctggaagcactgaaaaacgccaaaggtgaggcgcagaaggccgccaaaataatggcggataaccttgatggcgatctcaaaaatctggacagcgcctgggaaggcttccgcatccagattaacgatctcgtcgataatcagctccgcgccctgactcagggactgagtgacgttgtggggaatatgacgcagtgggcgaaggaaaatccgaagctcacccaatctctgctggttgtcggtggtagtgttctggcactgaccgccgccattggtggcacatcgctggcggtcggcctgctgatggggccgctggctaaacttcagctaggttttaccctactgacggggggcagaggcataaccggaacggttgccgctctgcgaacactcggcacggcttccggcccggcaatggcaagcgtgcgcggatgggggccagttctcggctcattagcagggaaaatgcggggagtttcaaccatcatacccgctatgcgtggcgcacttatgggggtatttcttgcgcctggtgccgcgctgggcgcactgaccaaaaacctcggaatgcttgcacttcgccttacgggttttacgaccatatggagcattatcacaactgctgtgtctatgctgggtactgcgctgtcactgctgttgagtccgattggcctgatagtagcggcgtttgttgctgccggggttcttatctggcgttattgggagcctcttaaagcattttttgcgggtgtatttaccggcatcatggaaagactggccccgttacgtgagaccttcgcgcagtttagccctatctttgatgcgataagcagcgctgttagccaggtctttaactggttcaaatctctgctttccccgatggagtccagcaaagaaacactggataaatgcgccagcgccggtgaggtgttcggcaatgtcctgggcggtgcgctccagcttgtcctggctcccgcaaaaatgctgctggatacattagcctggatccttgaaaagctcggtgttctgcctgatgaggccgaaaaagccagaaagaagatcgaagacgcacagcgcatggctgttcttcaggacaaagtcgcccttcttcagggagatatcgcgaaggttgcaccgaaaaaagttgaggtgaataacgttccgcctggcgcaccgcaacccacatcaccgctaaccggcgataacggcactatgcgcaggttgcagagtatcgacagcaacaccaaaacgacagccgacaacacgaagaagatcggccccggcgatatcgtgtttaaaaacctgcctcgtgcgctggccgttcgtggggaatggaaggaatcgcagctggccagcacagtcaggaacaacgggttaagcgcacgccccgcagtggtagcggcatcgcttcccgttaaacaggctgaacttctgccagtcagccgcagctccagcaatataccggttgccactggcggctttacgggagaaatccacgtacatcttcacggcattgaccggcaggacgcgcgcgaaattggccggattgccgccgacgcagtgaatgccgaaatggcccgccttgcgcggctcaatcgcggcagcttcaaagacagagattaa

SEQ ID NO: 128082 - DNA, 597 bp, Enterobacter cloacae
atgtcagaggcaaaattaaacagcaattttattgcgatagtggccggtgatattaccgtgtttaattacgatggcgaaacgcgcgagtatctttcctcatccgttgaatacctggccgttggggttggaattcccgctaactcatgcactgatgcgccgggtgaaagtaaagaagatttcactatttgccggtcagcggattttaccgcctgggaatacgtagctgatcaccgtggagaaacggtatatagcactgaaacaggtgaagcggtgattatttccgcccccggtgattacccagatgacaccactacgcttgcaccgccaacgccttacgacacatggaacggcagcgagtgggtgacggatacgaaagcgcagcacgcagcggatgtggaagcggcggagcaacagaaggctgcgttacttgcagaggcacaaacaacgatcagcctatggcagaccgaactacagttaggcattatcagcgatgaagacaaagccagcttgatagcatggatgaaatacatcaaagctgtgcaggctgttgatacgtcgaaagcgccggacattacctggccggataagccagaataa

SEQ ID NO: 128083 - DNA, 1053 bp, Enterobacter cloacae
gtggcgactaaatattttgccctgttaaccaatatcggggcggcaaaactggcaaacgccacggcattgggtgcgcaggttgagatcacccagatggccgtaggcgatggtaacggcgcgctgccgacaccgaacccggcacagaccgcgctgacgcatgagctgcgccgtgcgcaactgaatatgctgactattgacccggttaacaccaatcagatcattgcggaacaggtcataccggaagatgtgggcggatggtggatccgtgagatcggcctgtttgataaagacggcgatatgattgcggttgccaactgtgcagagacttataaaccacagttgcaggaaggcagcgggcgcgtgcaggtgattcgcgtgatcctgattgtcagcagcaccgaagctataacgctgaaaatcgatccgtccgtggtactggcaacccgtaaatatgttgatgatgccgttattgaggttaaggcttatgtagatcagaaattggccgcgcatgtagctgccagtgatccccatacgcagtatttgcttgagacggatattgatacatatatcccagttggattcccacttccgtggccgcaggcgacgcctccgggcggctggcttaaatgtaatggtgcaacgtttgataccgccaaatatccgaaactggcgaaagtctattccaccgggaaattgccggatctgcgaggtgagtttgttcgtggctgggatgatgggcgcggcactgacagcgggcgcattttattgacggctcagaacgatgctattcgcaatatcacgggagagcagtcgcttgatgttccctataacggtaagtcaacaggagcattctataataatggcaaaaatgccaatgagggaatttatgaggatggctctttcatattagatgcaccgagtgttggcggaacaggtggcttgaatccttctcagggtgaaaaaatattttttgatgcctctcgcattgttcctgtggcgtctgaaaacaggccgcgcaacgttgcatttaactacatcgtgagggctgcataa

SEQ ID NO: 128084 - DNA, 615 bp, Enterobacter cloacae
atgaataacaacatgctgccgccttcggccagcagttttatgcgcagtacggagaaggtgacggaacggcttaccgatattcctgttgacctgcgcaagctgtggaacccggacgaatgccccgctgatcttctgccttatctcgcctgggcgctgtcagttgaccgctgggataagaactggtcagaacagaccaagcggcaggtgattaaagcctcctggctggttcaccgtcagaagggcactatttccgctttgcgtcgcgtcgttgaaccgttcggctttctgctgcgcgtgatcgagtggtggcagagcggtgaagagccgggaacattcaaacttgaaatcggcattcaggagcaggggattacggaggaaacctatcttgagcttgagcgccttattgacgacgccaagccgagaagccgccacctgactggcctgtctctttcgcttcagtcgcagggggatatcgtggccggggcaggatgttatatcggcgatacgctgaccgtttacccctattttcctgaaaccatatccgtgggcggtggcgactacaccggcgcggcagtccatttaattgataccgtggagatcgcaagtggcgactaa

SEQ ID NO: 128085 - DNA, 897 bp, Enterobacter cloacae
atggcaacagttgatttatcgcagctaccgcagccgcaaattatcgaagtgctggactttgaagtcattctcagcgaggtcaaagccgtcatgctggcggcattcccgcaggaacagcaggcttctgttgccgccgctctggagctggaatccgaaccgctgaacgtgatcgcccaagtggttgcctaccgtgaaatgatgctcaggcagcggattaatgatggcgctgcggcgtgcatgttgagccatgccgtatcgtccgatcttgataatctcgcgggaaacctgaacaccgaacgtctgatcatcaccccagagacggcaaccactgacgcggtaacggaaagtgataccgcactgcgtttgcgcgcgcaggctgcatttgaagggctgagcgtggcggggccaaccggtgcatacgaatattttgctaaaagtgccagcggcaaagtggcagacgccaaagcgataagcccgtcgcctgccgtggtggtggtctctgtgctatccaccgagggcgacggcactgccagtgcggaactgctggcgacggtggataaggcgctgtctgctgacgataagcgccccgttgccgatcgtctgaccgttcaggcagcggagatagtgaattatcagatcaatgcgctgctgtatttctaccccggaccggagtctgaaccaatccataccgccgcgcaggacgcgcttcagtcctggctgaatcagcagggcaagattggccgtgacgttgcccgctcagccattatggcggcgctgcatgttcagggtgtgcagagggtggagctgctggagcctgccagcgatattgtgatcgccgatacgcaggcggcgcggtgtgagtcctttacgatcgagaccgggggcacagatgaataa

SEQ ID NO: 128086 - DNA, 1059 bp, Enterobacter cloacae
atgaagaagcgcacctacaaaaacaaacacactgccagcagtggcagtgccggacagcctgatatttccgacgcgctcagaagcgatccggcgctcagcgcctttacgtttgacgggccatattcagtaacagacggctatgatctgctggacagcatgtgctgcgtcgataatggccggtacttcgagacgccaatagactggaaaggactaacccgtgcgttcgcacagtccccgctgcatcagtcggcgctttacttcaagcgtaatgtgctgaccgggtgctatatccctcacccgttactctcacgtcaggccttctctgcgtttgcgctggactggtttgtcttcggcaatgcctatcttgagcgtcggtctaatcgcctgggagagccgctaaaacttaagcatgttccggcgctgaacacgcggcggggaagcgatcttgatacctactggtttatccggcagtggaaagatgaatacgagtttaaggcgggcgaggtctgccacatcatgaacccggacattcatcaggaaatctacggtatgcctgaatatatgggggcgctgttgtccgccagcctgtcacattccgccgataagttccgcaaactctattacgacaacggctcacatgccggatgtattctctatgtcggttcggagaaggtggatcaggaaagcataaaggtggtgcaaaagactctgtcacaggccagagggaaaggctccttcaaaaacgtgctgatccatgcgcctggcggcggcaaagacggcgtgcaactattgccgttcagccagatatcggcaaaggacgagtttcttaacatcaaatcagccacgcgcaacgatttgcgcgacgctcaccgcatcccgccgcagttgatgggcgcaatgccggaaggcaacggctcgctgggtgatgttgagaaggccgcgcgcgtcttcgccatcaacgaaatgttgcccgtgatggaagccatgaagggcgtcaatgactggctcggccaggaagtgatccgctttaatccctacgctctgcttaaagacgagtga

SEQ ID NO: 128087 - DNA, 2226 bp, Enterobacter cloacae
atggcgaaaactaattttctgatcggacgaggtgaattgttaaccagtgatattcctagtcctaaaagagtcccaggaaaagctgaggtttactctctttatgaatcgaaacaacgcttattgccacaaattgcatctactatcgaaaactttgcaaagttacccagtcgggcgtgtcctaatgattatgccgtagcaaagttgacggtaaatccaagctatatcgcgcgctcttttttccctgcgaaaatgcttaagtctaccggattgacgtcaattggcagcaggacggttagaattacgcctcaaagctggaagcgcaaagttgctgtgtcagaagtcactacgacacaaatgtttattgccggtaaaagagaatccttcgaagagttacctcactgggtgtccggactcaaagagttaacagacgaagcgattgattttgctcgtatagaacagtttgaagcctatttacctgaagagcgtattgttaccgcaggtgatatggattcttcgtattttgaagttggtgtacatttgctggcagatgatggacaagacttgattcagcaacaatttgttcggttcgcgtcaactctgaatatcaaggtacatacttcattagcttttaccgctggcacgttgtggttcgtgccaatccaagctgatcgaattgccattgataagcttgcgaaatttacattcgtacgcgtaattagacctgtgccaaaattacgcggaattaggccgatacaaagaacttctggccctttagctcagtgtaaattacctacggaaggccctatatcttcagaaataaaagtcgccattcttgatggtggcttaccatcggagcacgctatatctccttggttaaagtcttatagagttttggacgatcatgcggaagatgaccctgatggtttagatcatggtttagctgtatcttcggcttttttattcgggccaattagtaacaaatcagaggtgcaaaggccatactcttatattgataacttgagggttttagacaataaaacctgccaggaagatcctctggagttatatcgaactttgggctttattgaagaggtgcttctgtctcgtcagtatcagtttattaatctaagtttaggcccggatctaccaattgaagatacggaagttcatgcttggacttccgtcatagatgatttattaagtgatggcgagacgctaatgactgttgctgttgggaacaatggcgaaatggatcgagagtctggtaatgcaagaattcaagtaccatctgattgcgttaatgccttggctgttggtgcttgtgatactgtcaatgaaacggaatggaaacgagcgccgtatagtgctattgggccgggtagaagtcccggcgtgatgaaacctgatttagttgcgtttggcggtgatatagacgaatactttcatgttttgggaaaaggtaaaaaacctgtaatcacaccgcaacggggaacaagttttgcctcaccttacgctttacgtgcagccgttggcgttcgggctattttaggcagtgatttgagccaactggcgatcaaagctttgttgattcatgcctcaaaaccgcttgatcacccatgcgctgaagtgggctgggggaaactgcctgaagacttgaacgacattattgtcagcccggatggtgtcgcacgtatcgtctaccaaggtgaattgaaacctggaaaatacctacgcgcttctcttcccatccctgaaggtggcttgaaaggtaaaataaatttatcggcaactttctgctatgcaacaacaactgatccgcaagattcggcttcatatacaaaggctggcctagaagttacattccgtccaaatgattcaagaattaaggacggaaaacagaatgctgaaactaagggattttttgagctagccaaatattcaactgaaagtgaacggcgttctgatatgggcaaatgggagaccgtgttgcatagctcgaagaacatgctgggatctactctaaaaaatcctgtgtttgatattcactataacgcccgtgaagcaggtgccagcatagctagtcacaaggcggaaaagataaagtacgctcttatcatcaccgtgaaggcagcgaagcaccaagacctgtataacgaaattttacgtgcttacaatcaggtactggttccaattcaacctcaaacctccatcccaattcggtcataa

SEQ ID NO: 128088 - DNA, 1134 bp, Enterobacter cloacae
atgggcgacttaagtggtattcagtcagatttagcccagctagttagactggtaatagctgaacagtatgacgatgttcggttgtatgtcgctcgcttggtgcgcaaatatcgggaaactatgcctgctctatcagagcagcttgatctttatttacggaataaaccgcagaagcctgcacaagggttgcgtaaggttacgacgccaaaaacaacacagtctcaggtcatgcctgtggacgaggattcaaggttaaccttacttaaagcaccaagtgaaaagattaccagtaagccattgctttccagccagatagaagactcattggatcagattattcttgaacggaagcatatcgaccgtcttaaggcccttggcttacaaccaacacgttccgccatttttgttggcccacctggtgtgggtaaaacgcttacggcaagctggttagctcagaaattaggtgttcctttttacgttctggatttaactgctgtgatgagtagttatctggggaaaagcggaaataaccttcgtgcggctctggatttcgcaaagaaagggccatgtgttcttctgttagatgaaattgactctattgcaaaaaagagaagtgatgattctgatgttggagaattaaagaggcttgttactgtgattcttcaggaagttgatgaatggccttcttcaagtctgttacttgctgcaactaactttgctgagctgattgatccggcactatggagacgttttgatttggtactcaattttgagaagccgaatagtgaaagcattaaggaagctattaaacgctttttaggccctgactacgcaatttttgcacgttggatggatttgcttgtcattatgttcaaagatgaatctttcagtaatattgagcgttctataaacaaattccgtcgctcagttgcgttaggcatttcttcagatgaagagttaattgaatcgttcattaaagatggtttatcagaattagataggaatgagcgtaaggaaatagctgttaatttaaaaagaaactctaaattatcccagcatgccatatcagacttaactggagtcagtagggatacaattagaaaatatagtccaaaaaaatctaacgcagcatag

SEQ ID NO: 128089 - DNA, 2415 bp, Enterobacter cloacae
atgaccacggaaacccgtggccgtcgcgccccttctccacctccaccgtatccgggtagcactgacaatgctatcccttacgtttatgggggaaacaaaccataccagcctattggcgttgatgtagcgccggggctggatggtttcgactatctcacgccggacggcacgcgtaagcatattgcgttcagtgaactggtagcggaagacgaaaagccggagcgcagcaagctgctgcgtcgccgtctggcttcacttccgcagtatatccgccgccactttgccgcgaagctggatgcactggacgcgaaagaccgcaaagcggcagatcactggctggttaatacctttgagcgccacgtattaacgcgaattgatagcgtgaacagtgtttaccagcctgacactatgatgcccggcattctgctgccaattcgcgatcagcttttccgtatgctctgggcagggaagaaagagttaaaaagactggcttatacgcttgccgatatctttacgagcgagtttatacgcgagtccgatcaccaattggcacgcaccggagatcctgagttcgcggcgctttctggctatggccgtattgcgtcgctggcggtgcatctgaaaacgccgatccccggctggacggcgtattgcaatgaagaactggaagcggaggacgcgttacgcgcggttcttcgccttgagtcaccgcagtggtggttaaaccgcctgcgccgtatccatgcccggtggcgtgagcatttgatgatcgcagcgggatacgtccagaaaaaatcttccccatacagtagcgccccgtgccttacggaatggctggcccagaaaaaggctaaccgtgaatacctcaaggctatggaactggaagatcaggacacgggcgagcgcatttcactgatcgataaagtcgctggcagtgttgccaatccggccaaccgtcgccgcgaactcatgacgagaatgcgcggctttgaagatctggcgaagctggaagggctggccggtgacttctacacgctgacagcaccttctcgttaccactccatgcagcataacgggcgccgcaataataaatactgtggcgcgtcgccgcgcgagacgcagcaatatctttgcaaagtctgggcgagaacccgcgcagcgtggaagagaaaagggatccgcgtctttggttttcgcgtggtcgaaccgcaccacgatgcaacgccacactggcatttacttctttttatgcgcccggaatgcgtcgagcaggcgcgcgaaatcttccgtaaatatgccctgaaagaagacggcaacgaaccgggagcgcaggaaaaccgctttcaggttgtgccgatcgacgatgcccacggcagcgcaaccggctacatagcgaaatacatttcgaagaatatcgacggcttcgcgctggatggtgagaaagacgacgaaaccggggaagacctgaaagaaatgtcactccgcgttagcgcgtgggcatcgcgctgggctattcgtcagtttcagcagatcggcggtgcgccggtcacggtatatcgcgaacttcgccgcctgggcgatcgcgaactggtgttacaccctgaactggaaaccgcccggcaggccgctaacggtggcgaatgggataactacgtattagcccagggtggcccattggttgagcgcgataagctgcgcatccgtctgaattatgaaaccactgaaaacggcaacgcctacggcgataacgtccagcgaatcacaggtatttactgccctattacgggcaatgactctttgatcttcacccgcaccactcaatacaaaatcgtgccgaagcgccagagcgctgacggtgtggccgttgacgttggtttttcaggcggcaccgccgcccctcggagttctgtcaataactgtacgcgggatcccgcggcaggtgctgacggtcttgaacatgccgatcatgaagtgagtgagacggtgaattttgatgctctttcacggcaagaaaagcgggaactggcgcagcggttaagtgacgatgtacgcgctaagcggaaaacgcggccaccggaacgggaagagagagcagggctatcagtcaaagagcagcagattagtgaactgctggcgctgcgtgggattgacgccagcaccggaatggtcagatcgataatggccggagcatcaatcgcgtgcggtgacctcgttttgaccgtacaggacgggcggttagtagcccgtaaccgcgcaggttcagggctaacagtaactctaactgacgaaggacttaacacaagcaggcgagccagcagtgaattgccgtcgcagattatggcaatgcagcaacaagcaagcaatctcatcaatcgtatgaaggtagcgtttagacatgggaagtgtgatttatga

SEQ ID NO: 128090 - DNA, 180 bp, Enterobacter cloacae
atgaatcttacagacgcctggatcgttgaaatcataagcgtgagtcgtggcgagattgcgccgtattggttggttgaggcgaaagtaacagcttatggaagggagtcaataaccacaattctgaagaaatcagaagaggaagccaaagccgttaaagtaggggatgtagttcaaatatga

SEQ ID NO: 128091 - DNA, 972 bp, Enterobacter cloacae
atgatccgcccgttcatcaaatgggcagggggtaaaacccgtgtcctccctgacctgctgccgcatcttcctaaagccgactgcctgatcgaaccgttcgtaggcggcgcatcggtatttctggcgactgaataccgccgctatgtgctggctgatatcaacccggatcttattaacctgtatcgggaagtcacacgttacccggacttagtgatcgatgcggcccgcgaactgttcaacagtaagaacagcccgcagggatacaacgaagttcgcgccgcgttcaataagcaggtgggtacggtcaaaagcggtgggttgcgttatggcgctgaaatggcgtgcattatgcgcgctgctcaattcctgtatctgaatcgccacggttataacggcttatgccgatacagccggaagactggctttaacgtgccgtttggcaagtataagagtgtctactttcctgaaaatgaaatccgcctgtttgccgaaaaggccaacgatacaaaggcaatatttctttgcgcgccgttccatcgttctctacaggtcgtcacgggtggcgatgttctcgtttactgcgatccgccttacctgcctgaaagcaaaacagccgattttacccaataccacaccgaaccattcacggaagacaaccaccgccagttagtccaggcactgctggaagttaaccgtaagcatggcgtgaaggtcgtcatttccaacagcgacaccgaagccacccgcgcgatttatcagcccttcaagatgcacgaaatcagcgtgcaacgttccgtcagcactgacaaagacaaccgacagaaggccaaagaagtgatcggcgtgctgcctgtctgcgactgctgcgggcgttacggcggcggttgccctgattgtggcgccgtgatgggtgatgcgacttacaacgcgatggttgcggcgggcacgtttgacgatctggaggctttttaa

SEQ ID NO: 128092 - DNA, 213 bp, Enterobacter cloacae
atgaccagacgcgatcaatatagcttcattttgcatgttcttttacctgctatcgaaaatgaaggattaactattaaaacccgccgtgatggtgagttaaccctttctgccagtgggtcagttgccaccaattttataagcaatctgcgccagcactgcattgaagaattgcagcgcccttctattccagcttcccattacggagtcctgtaa

SEQ ID NO: 128093 - DNA, 231 bp, Enterobacter cloacae
atgcacgatgaaggcccatcactggcgagcctgcttaagcatgggtgccaggtcacacacttcaagaactcacgcggctggctggaaacgccggacggaagattttttaagcccgaaccggcgaaggttcaatttatcaaaggtaaaaataaaccgtttatttatacccaaagaataaataaaggcttcctgcttactctggctgagttatttaaaaagctaactaagtaa

SEQ ID NO: 128094 - DNA, 204 bp, Enterobacter cloacae
atgagccagaaaacagccaaccgcgaaaaccgggtgcgtgaatgcaacgacattctggacacccatttaaaagatatgcatacgggcttcatgattcgcaccaatagcggcgagttcatgatcagggataaaaagctgattaagaaaataaccaaagatgtggcctgccatgttgatggtgaattacttaaattgggaatgtga

SEQ ID NO: 128095 - DNA, 282 bp, Enterobacter cloacae
atgacagacaaagagttagaggggttcattgaagtgcgtcacgctgttgacgcggttccatacccaaaatttgccgaattgatcggtaagaagcccgccacggttaagagcatgattgaagacggtaagttgccgatcatcccgtggaagaacccggaaagtctgggcgcccgcgctgagaactggatctatatccctgagttcaaccgcgcaatgcgtgacgcctattacaaccgtccgagagagcagcgtgacgcgtggttgttgtggatcggtctttga

SEQ ID NO: 128096 - DNA, 237 bp, Enterobacter cloacae
atgtctcagaaagaagtacctatctacattcctgcggaacttgaatacctcgttgctaatgacctagcttgcttacgcttccactaccacttagctacacctacaaaactgcccgaagctggtgaactgtttactggtttaaccgttgagcaagcaaaagacaccgtaaccttccttcagcaatacattgctaaagctgaacttgccgcctcactgtccccgaagcggagccactag

SEQ ID NO: 128097 - DNA, 981 bp, Enterobacter cloacae
atgtcaattaagaagctcgaaggtggtcaatatgaagtagacgtatggccgcgcggacgtaacggaaaacgtatccgcaggcgatttgagaagaaacaagaggcggttctttttgagcgttatgtattagccaacgccgacaaaaaagaatggctgggcgcgagcgttgaccgccgcaccttaagcgagttgttagatacctggtggctgctgtacggacagactcaggaaaatggcgagattgaaaagcggcacctgaataaaacaatcagggcgcttggcgatccagccgttaaccgactgaacaagcgaatgattgctcagcaccgaggccaacggctggaagacggtatcagcgcagcaacgatcaaccgggatatttaccgcttatccgggatgttcagcacgttgataaaactggaagagttcaggaaggacaacccctgcaagggtctggaaccactgaaagaagcgccgccagctatgacctatctagcaaaatcagagataagcagattgctggaaactctgtccggtgacgatcgacgcgtagcactgctatgcctcagcactggcgcacgctggggcgaaggcagcacgctacgaggtgagcaggttaatcacgggcgcgtgactttccttaagaccaaaaacggaaaaaagcgcaccgttccgatatcggaagaactggagaaagagatcaagaccagcgacaccgggccactgttcaaagttgactatgaaaacttctgcgaacggctcaaacaggttaagcccgatttaccacgcgggcaggccacgcatgtgcttcggcacacatttgcaagctggttcatgatgaacggggggaacattattgcgttacagcaaattctgggacacgccagcatacaacagacgatggtttatgctcaccttgcccccgattacctgcaacacgcggttacgttaaaccctctcggcggcgggctggcggtatga

SEQ ID NO: 128098 - DNA, 1122 bp, Enterobacter cloacae
atgatggaattttcgactgcgctgggtgaagagatttcagaccctcatgatttctgcaagaaacttaacccccaggtagcccggctaggcgcagataatattaaaaatgtgtttctctgtggtgcgttaaggggagtttatcgccaggctcccgcactctgtcatgccgttctggatgcttggatgcacatgcctgagatggagaagcactttgcagtaatacaggcgcacataccgatggatgcaaacagcattgagcgagttatgcgccatcttgaggacccgggaaaagatgtgagtggctaccgaatattaaccagtggcatgcggcatgccatgatccccgacagttcactcatcgaactcctacaactgatgtggtgccatcacaatggcccttccactgcgttcgatatcctttcgatgcgagttcatgatgacggtcgcgacggctatgtctgcagtgagcctctgcttgagctcgcgcgtgggtggatctgcgccatcatctatgggcatccggtaccgaccagagatattcccacagataacatctctgcgatcgcgaaacgtgcatttcaggcgtgttctgctgagcaggctcgcgacctgctggcagccattgtccggtcatcagaacgctatactctgcatgattatgactttaccgaggtactcggcctcatctgtcactaccaaccgcaagttattcttgaccgcttatgtcctgcacccggcgtcattgatgaagccttccatgacgttgtttcacagcggtcttacagcaaagcccagcctctgacggtactgccactggcagtcacaatggcttggtgtcagcaggatcctcggacccgctatccatgcctggcaacactgatttctccgtatgaaaaatccggagagcatctcgtgtggaccgccctggccaacgccctgattgcaggagctccttcacccgaaccggtgctatcgggcttggtgcataatgtctctgcagatgacgacttaggctccagagcagtctgtgcagaggataaattggcattactcgctgagcttcgcaacagcggaaatccggagcttgcgcttgcagcctcgcggataagcccgctgaagtga

SEQ ID NO: 128099 - DNA, 681 bp, Enterobacter cloacae
atggtgaagccccggctgttcgagcagtcagggcttcggttttgccaaatccccagcaaggaattcagacatgcacaatgtatcaaagaaggaactgactttccacgaaccccccttgccgctattaatcggaacggtcaattctggtttacatcctctgatatagcaaaagcattgggatacagcagcgctgattcggtgagtcggatttaccggaggaacatagacgaattttcagcggttatgtctcagacggtcaaattgaccgcctcaggaaattaccagaagacggcgcgaatatttaccttgcacggcgcatatctgctggctatgttagccagaacgctagttgcgaaagggttccgccgttgggtgctggatattcttgatcgtgaatgccatccgcgaagactgcttataccggaaaaattgactgctatttttccgtgctgtggaaggtcagcaaccattattgacagcagatacattacccggcatcgcacagaaattactgcgcggtgtgatcaaccggattgtccagaccagcaatttaaatctgaggttactttctcacattacattgaggaaatgggtaacgaccagactctgaggggcatgattcattcgttatcaatgcatcacaagcagaccctaatccgaatgctgtctgaaactgcctga

SEQ ID NO: 128100 - DNA, 450 bp, Enterobacter cloacae
atgaatagtggtttctttatatctcgctccgacttccaaaaaatgtcggaacgaacccaagatgaaattttgagtgcagtaacaggcgaggatagctctcaacaaccaacccctgactatagcggtctggctgctgatctttcttctttacaggcaacccaatttgttaaagggttaagtggtaaatccagaagtgttttgaaagcgatacttgaaattaaaggtgttgaatcagggttttggatgtccacactcaccgtatccttaatggttagcgctgactccttaacaggtgtttggtcggggctgactcgcagaagcaggactgtgactggagatgaaaacgcctatctgattgattgggtgtggcatgaggctgaaagtgattactttggcacccttaacacggtgacgatcaagaaccttaaaaaagcgatgaatattcgatga

SEQ ID NO: 128101 - DNA, 222 bp, Enterobacter cloacae
atgcgtcctaacattacaatcaccatccccacaccatacctgccattagatgagtattgccgcctaactggaacagccacgagtatagcacgggatatgatccgtgatggtcgtcttcctattcgtggtaaaggagataagccacggggtcgtgttgaaatcaacatggcggctctcaccgtaaaagccttaaccgaatgcagtatttcgcttaatgcgtaa

SEQ ID NO: 128102 - DNA, 591 bp, Enterobacter cloacae
atgtcaaagtttccttttacacaatccggaagcagtgctgaggtactggatctcataattgatgcttacgggttcggctccaaactagcgttagcagaccatttcaaaatggcatccagcagcctttctggaaggtaccgccgtgacaacttccctgcggatatgcttgtccagtgctgtgctgaaactggcgtatcactcgaatggctggccactgggcaggataaaaagttcgatgacgagcagttagacatcatgaagtttacaaaaaagaaacttgtagatggtcagctttataattccggctttgtcatgtttgacaaggttttctttaaagctggaaacccactcccctcagaccccatctgtgtgcaggatgaaaaggctcaatacatcctcgatcagaaattcgcagaagtatttgatggcgaatggttggtaaatgtcgaaggaaaatccagcataagaacgctgacacgcatcccggtaaaaaaggttcgagtaagcggagtaggcatggcatttgattgtgatctagaagatattaatgtattaggccgtgtagttttgattatctcggaaggaaattga

SEQ ID NO: 128103 - DNA, 813 bp, Enterobacter cloacae
atgagtgccacaaagcaaaacaccactgaagtaaactcagcagctagtgaagaagaatctattaaagaaaaaaaatgctttgccattatgcctatcgccgatcatccagattatgataatggccattttggtcgggtgtatgagcatctaatcaaacccgcatgtgaaagagcgggttttaaagtggtcagggctgatgatgccaaagcatcacatatgatcatgtttgacattctgaaaaacatcgttgaatgcgacatggctatttgtgacttaagttctaagaatgcaaatgtcttttatgaattaggacttcgacaggcatttaataagaaaacaatacttattacagatggcaaaaccaacacgccattcgatatagctggttttagatatgtaaaatatgatcattctttacgtgttgatagtgttaagagtgatattgatgaaatttcagccatgcttgatgaaacagataaagcccctgatgatgatgtcaattccatagttaaattgctaaaaatccagcctgctcagattgacaaagttcagctaaatcaacaggattcattgatatttagcatgataaaacaacttgatgaaaaaatgtcaagaatggagaggatgcaaaaatcaaaaacaagctggcgttctttttataattccaataatgaaagtttaaatgacgccattcttgaaaatatcgctgcgcgcgcatcccttaatgaattaattcgggatgatgaaaaccaacgattatttgtccacatgccaaaagttacactatctaaggaagatgatgacaaagagtag

SEQ ID NO: 128104 - DNA, 891 bp, Enterobacter cloacae
atggaaaacatccacgttaaaccctggctgtacggaaaagaggaacgtcgtaaattgcgcgaccttgtaaaccagtggtttgatgaacacggcgttacgctggacgatggcgaaaagcgtaaatcaacaatggaatttgcctgtgacagcatgggtgatccactcgctcatgaattcgacgcaaccatgttttccctgtatcggaaaaagcgcctttctggtgaaatatcccggacatctcacgtcaaacaagtttcccccagaacgatgaatcttgagctggcctacttccgcgcggtgtttaatgagttgaagcgcctggggcactggaagcttgataatccgcaaataaatgtccgtgctttcaaatcagaggaagccgaactggcttaccttgaagatgaagaaattacgcggctgttagaagagtgcatgaaaagccgtaatgacagcacatactgggtagcctgcctttgcctggtaactggcgcacggtgggatgaagctgaatctgtaacaacgaagcaaataaaaaatctgaaagtcagctttttcaaaacgaaagggaacagaaacaggactgtgcctatcagtcaggaattctatgacgcactaccaaaaccggaaaagccagggcgttacttcaaatcgtgttattcggcatttcgcaaagcagtcgaacgagctgaacttaacctgcctgacggccagctttcgcatgttttacgccatacttttgccagtcattttatgatgaacggaggaaacattttggttcttaaagaaatcttaggacatacagatattaaaatgactatgcgctatgctcatttctcacctaaccatcttgaagatgcaataagactaaacccattagaggcaaaaaaatga

SEQ ID NO: 128105 - DNA, 711 bp, Enterobacter cloacae
atgaaaataaaaacagtcttacttgttattttttttataatattaacagtgatatctctatatccagcatacaaattttacataacattccatgagaatggtttttcaaataagaatcaagactgggcaaatgcaggctcattttttggcgggatttatagcgctatattttcctttgcaagcgtaataatcctatcaataacattaactctaacaaagaaatataacaatcaacaacttcaaatactgctcactgcacaaaggagagaaactttttgctccctatttgataagctaacacaaaagatgaacgatattaattactatgacatggggctgcaaaatgaagagtcctatttttactactgtgagcgccaattattcaacgatttggaaagtataaagaaacataaacaggatgaatatgatgcaggtgatgttattgatttgagcaccaatcttgtacaagatgagtggtttataacaaacaggccatattattatgtggttttaattactggagaaattctgagtatacttgatcagtctcctgaagatgacaagcgcttcttccttgcatatatggaagcgaatgcttcaacacgtcgcctctactggttattttgctttatgtatagttatgacaataaatattctgacattcttattcgcaacacaagaactcttcgtattccaaaaggatatgtttga

SEQ ID NO: 128106 - DNA, 165 bp, Enterobacter cloacae
atggataactggctggcgctttttgacggacagacccgttactttctggatatcaatgacagtccagtgaagccggatgttttgcgctttcgcggcagggaagccctgagcgagcccttccggtgggatattgagttcacctggcgcagcgtttttccggcgtga

SEQ ID NO: 128107 - DNA, 159 bp, Enterobacter cloacae
atggtggactccattggaacgcttgaagggggcgcagccgtcattggcctgaaaggtgcctgctggtacaccattctgggcaatccgtggctggaaaagctcgtcggagaaaatgacgtcgcacgacgtctggcgaatacaccggaaatcagccggtaa

SEQ ID NO: 128108 - DNA, 492 bp, Enterobacter cloacae
atgcctattcctccctacatgtggctaaaagacgacggtggagcacatattaaaggttctgtagatgttcaggatcgtgaaggtagcattgagatcataggactgagtcatggcctaaacctcccggtagacagcgctaacggcaagatcaccggcacgcgtcaacactcatctatgcggattgaaaaggaagttgatagcgccacgccctacctttacaaagaagcatctaccggtcaggcactcaaaagcgctgaaattaagttctatcatattaatgatgccggacagggagtctgttattacactgtactaatggagaacgtaaaggttacgggtgttaactgcagcgtgccgaacgtgaaaatcgctgccaacgataaaatgaaccatgttgaaagcgtaagtctgcagtacgaaaaaattacctggcgcatcgttgatgggaacataatgcacagtgacgcctggaacgaacgccctacagcataa

SEQ ID NO: 128109 - DNA, 687 bp, Enterobacter cloacae
gtggagccgtccggtgcgatccgcattaacggaccggtgtttttcggccagaagcacatagctccaggacttcccggcctgtcggcacgctatcctcgcctgagcgtagagctgacgctgaccgatgattttatcgacccccaccgggatgcggcagaccttatcttccgcattggcgtgctgacggactcgtcgtttcgcgcgcgggtgtttgggcagcaggtgtaccatctggccgcgtcgccagactacgtgcgtaaacacggtgcgccagaagtgccggacgatctgaaccgccatcattgcctggtgtatcgcggatcgtcagggcctaaccgctggctgttgcgcagggcgggtgaggcgtggacacactatcccgtgacgccattgatgacctcgaataatgcggaagcgttgctggctgcggcgcggggagggatggggattgtgctatttccggactggctggtgagcgagccgctccagcgcggtgagctgattccgctcctgcccgcgctggagtgcgccatcactacggaacaacaggctatcgcggcgatctaccctgatgcccgacatccgcccctgaacgtcagggcggtgattgattattacgtcgagcgctttggtacgccgccgtactggcagcgtaaggggattacgcgccaagctcctggcggataa

SEQ ID NO: 128110 - DNA, 138 bp, Enterobacter cloacae
atgcagttggttttgattttactggtgatcgctggcgggatgggcctctccgtcgaggcgggactgctgggccccctgggggaaaagtcggggatttatgggcgacgttcagcatttttggcgtcggcgccgcgttga

SEQ ID NO: 128111 - DNA, 438 bp, Enterobacter cloacae
gtgctggcttatatcacgatagggacaaatgactttcagcgcgccgtgaacttttatgacgctatttttaacgtgctgggctattcacgtctgcccgcctggactgatagctgggcaatgtggggaaacgaaaatcatccggatgacgaatttagcttctgcatttgtcctccttttgaccagcaacccgcgacggcgggaaacgggacaatgttcgcattcagagccgatagcgcggaaattgtcagacgcttccatgcagtgggcctccgtgcgggaggaaaggatgaaggcgtgcccggtacacgaaccgcctacggccccgatttttatgttgcctatctgcgcgatcctgacgggcataaactggcatgcgtttaccagcattattctcctgatgcagataagctatcaggcgaagaagagtcacttcaataa

SEQ ID NO: 128112 - DNA, 171 bp, Enterobacter cloacae
atgaccgcgttttcaaaaatgggcactggatttttgatgatgcaccagatgaattacgtactgtccattacgttgctggcggacagttttacgccattggcaaagggacaaaatttaattatgggccgggaaaagactaatccttacttctgcataaatgtagccatataa

SEQ ID NO: 128113 - DNA, 459 bp, Enterobacter cloacae
atgtctgcacatgttacaatcttaagaaatacagtacttccagtgaaattcaataccatgaatcgtccacgcttatattcatatatccgttactccagcgaacgacaaggtaaaggtagttcgattgagcgtcagaagagctacattgctgaaatggcaaaacagattgctactgagtacgatctggagattttcgaggaataccaagatttaggggtatccgcgtacaagggtaaaaacgttcaggaaggagctttatcggatttcatagaccaagttgaatccggtttgatcccaaaggggtctttcctcttgattgaatcccttgatcgcttctcacgccagaacgccatgcaagcggttaaccttttcaccagcttattacttaatggcatcacggtaattaccgggattgataaacaggtttacagacagactgaatcgccacggataatctag

SEQ ID NO: 128114 - DNA, 1359 bp, Enterobacter cloacae
atgatctccgcgcgtaaactggccgaacgcgagcacgtgagccttccgacggcgctggaggcccttcgctgccttgaggctgaagggctgatcgttgcgcgaccgcgttcaggttattacatccgccagatcggcctccctccgcgcgcggagcccgcgcgttccacgccgggcccggtgcccgtgactatgtccgccgtggcccggtcgctgttcagcagtgcagaagcccggctgatcccgctgggcgccgccctgcccgatcccgcgtggctgcccggggaggcgctacagcgggcgttacactccgtgggccgtcgtctggacgcgcatgggcagagctacagcctgccgccgggaaggcgtgatttacgaagcaagattgcggcgcgtgctgcgcagtggggagcccgcttcggcgcggacgatctgattattaccgcaggcgcgacgcaggcgctgcgcctggccctgcgggccgtgtgtcagccaggtgatgtggtggcggtggagcagcccgcctactttggcacgctcctgctgctggaggatttaggcctgaaggcgttagaaatccccaccgatcctgctgaaggtctgttactggaaccgctggctgacgccatccgctgccaccgtcccgcggccgtcctggcctcgcccaccgtgcaaaacccattgggtgccagcatgcccgtcgcgcgcaagcaggaactggttgctctgcttgaagaagccggtattcctctgattgaggacgacgtttacggtgacctggtcggtgacgggcaacgtcctccagcctgcaaagccttcgaccagaacgggaatgtgatttactgcagctccctgtctaaaacgcttgcgccggggtggcgaatcggctggattgccgccggacgctattacccgcaggtcttgcaggcccgcatggccggagactgggccggcgcgccgctgctggaagccgcgacgagcgagatgctggcaaacggcgactacgaccgtcacctgcggcggctaaagcggcggatcgcagagggaatcgccgccgtcgtggcgcgggtcaaggccagttttccccccggtacccgcgtaaacgtccccgcagctggctttctgctgtgggtcgaacttcctccgcaggtcaacgcgctggaggtgcatcgccgcgcgctggcgcggggtattggcgtcagccccggccccctgttttcccctggcgcagaactcacgcactttctgcggctaaactgtgcaaacgaaccgacgccccgcctgctcaatgccgtggagcagattggtgcgctatgccatgagctggccgctttcacaccagactctccagccactcggtaa

SEQ ID NO: 128115 - DNA, 1149 bp, Enterobacter cloacae
atgtcagacgaattttttctctccctccgccactgcctgcatcatttgtacggcgtggcgcgcaccctttcctggctgcattttcttcccctggccctgcttgcgctggcgatttttccgctggccggctgcggtgataaacacgaaaacaaacctgacccagtgcgtaaggtacgctacgtcgtcgttggctccgcccaatcccttcccgcgctggaaagaaccggtgagatccatgcccacgatgaaacgaccctgagctttcgcaccggaggccggatactaacgcgtagcgttgatattggcgaccgggtcactgccggacagctgctggccacgcttgataatacgaccgggcaaaaccagttggacagcgccgcggccgactatgaaggcgccaaagcctctgcccaggtcgccgcgcttaacgtcagtcgcatgcaaaagcttatgccaacgggcgcgatagcccgcacgcagctcgacaacgcccgggctgactggcttgtcgcccgcgcgcgcttaaaaagcagcgaggccgcatggcgtaacgcgcgggaaagcctgggctggacgcgacttatcgctccacaagcgggcgtcatcacggccgtgagcgcctctgcgggacaggttgtcagcgacggccagtccgtgctgacgctggcgaccggggaagcccgcgacgtggcgtttgatattgccgcgcccgatgcgatcccgcctctggataaggcggttttgcaggtttccctgctcggcgacccgtcggtgcaggcgtctgccgcactgcgggatatcaccccgcaggccgatcctcagacccgcacgtggcgcgtcagagccaccctgcaaaacccgccggaggccatggcgctgggcgccagcgtcaccgtgacgttgccctccgccgccccgcacgggtacgcgcttcccgcgtcggcgctgacccgagccggcgacaaacctgcggtttttgtgattaccccgcagtcgcgggcgcagctgcgcgtggtggtgcccgtcggctatacggccacctccgtcatgattgcctccggccttgagcccggcgacagggtgattacggcgggcgtgagcacattacgatccggcgagccggtgatggccggagaggttcagccatga

SEQ ID NO: 128116 - DNA, 1119 bp, Enterobacter cloacae
atgaccctgtgcgtatttgtcttgattgcctcggaatttatgcccgtcagcctgcttactccccttgccagagatttgggcgttacggagggtctcgctggccaggggatcgcgatttccggcgcgctggcggtgctgaccagcctcttcctttcccggcttgccgggaatataaaccgcaaacaccttcttctgggcatgacgctcctgatggcgctctcggggatgattatcgctttcgccccaaactatctggtttacatgacaggccgcgcgctgatcggtatcgctataggcgggttctggtccatgtctgccgcaacggccattcgccttgttccgccgcataaggttgcgcgcgcgctggccattttcaacggcggtaacgcgctggcaacggtggtggccgccccgcttggcagctatcttggggccactattggctggcgcggcgcatttctttgtctggtgcccgtggcgatagtcgcgttcatctggcagtgtttaagcctgcctgacatgaacgcgcgtaaaaacggtacatcacgaggaagtgtttttcggttattccgccagcctgccgtttccgttggtctgctggcctgcggcctgttctttatggggcagtttgcgctgtttacctatctgcgcccgttccttgaaaccgtcacccgggtgagcggagccgggctgtcgctaattttgctcaccataggcgttgcgggttttgtgggcacccttttcgttgccctggtgcttaatgccgcgttttacataacgctgatcgcgatccctctactgatggcggccatcgcagtcgcgttgattctcgccgggcataacgtgtggattgtggctctgctgtcaggcctatggggaatgctggcaacatcagcgccgacggggtggtggacgtggattgcgcgaacgctgccgaaggatgctgaagccggcggtggactgatggtcgcggtgatccagctcgccattgcgctcggctcaacggcgggcggtatagccttcgatcgttatagctggcagagcacgtttgcattgagtggcatagtgctcctctttgcggcagcgctaacgtttctgctttcgcgtcttcacaaataa

SEQ ID NO: 128117 - DNA, 237 bp, Enterobacter cloacae
atgcccttcgtaaatgtgcaaaccattaaaggaatgatgaattcggagcaaaaaaaagaactgctacgtcgtatgactgaccttattgttgaaattgagggaaacggcgatcctgaattccggcgttcagtatggatccgtattgacgagcatgaaccggaacagtggagtcttgggggaatacagcccacatctgaaatgattgctgcaaaatttgcctcaccacagcggtcctga

SEQ ID NO: 128118 - DNA, 504 bp, Enterobacter cloacae
atgtcaaaaaataaatcattaccgtacttattacctgagctttgtgggttagcggcggccgctgagcttcttggcgatcaatgggttttgttgattctgagagaggcgttttatggggtaacacgctttgaaacgatacgggatcatacaaaaatcacccggcagacgctggcgaaccggttaaaaaaaatgactgaactcggcctgctttgcaaaatcccttatcaggaagaaggggcgcgtgaacggtatgagtatgttcttaccgccaaaagccgcagccttgcgccgattcttttctctttgatggagtggggtcataaaaacatactgcacgacgcaccgcatattgccttaacagacaaagaaagtggagaagtggtgaatagcgcctatgttaccgtcgacggtaagttcgttgatcctaaaaacgttcggttaacgtttcacgacagccaatactccgccgccatgccccaggcgcctgaccatactgacgcttaa

SEQ ID NO: 128119 - DNA, 711 bp, Enterobacter cloacae
atgaaagcaggtgtttttttaaatctattattattgacgttatcatttgatgtcgcggcatttactcaattcaaaccggcggtcttaaatgctgctcttttattcgatcatgatgcaacaaccgggaacgtaaaacatagcctccagtggatgcgggatgttacaggtaaacttcaggttatgacagaagttagatatgatcgcagcggatgctttacgagtatcaacatggttgacaaggcaaatgatcgagagtttcatttggtcaataaagatggcttactgacgtcacttaaaggccagcgtattaccggaaaaataaatgaacgctgcgaaattactgagcttgagaatgaaaaaggtaattacttactcagttataatatacgtggcttgctggaaaaaataatcgacaaagatacgggcgaagttgtagagcgatatgaatatcacaacagccaattccccgttcgcataataaactacaaagatccaaaagatgaacgcatcgtttacccatccgggagtgcgcaattccttgactcagaattagtgtcgaaaagagaggacatcactttcatggtgaagcaaagctgtgcttacaccgctgatggtaatgcagataaatgctcgctgatagcatccactaacgacgactatcgtgactcaagcctcgtatggatttctaatcacaaaaatgaatatttctaa

SEQ ID NO: 128120 - DNA, 678 bp, Enterobacter cloacae
gtgaaaattctacttatcgaagacgacctggatctcggcaatggcgtacgtatcgccctctcagatcaaggatttgacgtcatatgggttcgccgtaaagaggatgcgttgcatcagcttgacgtctgcgtgccggaacttattttgctcgacctggggctgcccgacggcgatggcatgagcctgatgacgcgtttgcgccagcagctcaaggggatccccgtcatcatcctgacggcgcgagggacattgcaggatcgcctgtgcggcctggatgccggtgcagacgactatctcgtcaaaccctttattctcgccgagctgctggcgcgagtgcgagcccttgcgcggcgcagctacggttttgagaatgaggtgatagaaattcgcgggctatcccttcatgtcccgacgcgccgcgtgacggtgagtgcgcgccatatcgatttaacggccagtgaatacgcgctgctggaaacgttgatgctgcgcgcggaccgcgtgctgacccggcggtttctggaggaaaggatattcggcaacaaagagaacctcagcaacgcgctcgacgtgcatatgggaaatttgcggcggaaaatcggcgacggctatgtgcgaacggtccggggcgtcgggtacgtcattgataccgtctccattcaaaaggtgagcggttaa

SEQ ID NO: 128121 - DNA, 225 bp, Enterobacter cloacae
gtggataatcccatatttcagaaaaccatcattatctttattctcatcctgtgggtaatagacggagtcaggagaaagaaaaaaaagcgttatgactccgctatagcagaggctaatgccagagaacgctatgaatggcgctatctcagatggggctggcaggcaatacgagtggcggcggcagtgtatatctttgttcagctgattcaggttttactgagatag

SEQ ID NO: 128122 - DNA, 480 bp, Enterobacter cloacae
atgtcatggacaacaagcatctccaattataccattttgcaaaaatcgattcctgaattgaccacgtatatttctgttggagtcgtgattggcgcgcttttggttatacgtgctttttttgtgcacgcctttaaccaaactttaaaatactttgccaatactttcttttgcggtttttgccttgggtttgtattgagcgtaaatggttatgatatttatgtctatctcttcccggacaaaataattggctatgaatctgaatatgaagtcgtctttccggggccttcgagaggtaagcatggccattgtgaagcgggtctctggttaaaagatcagaacaccaacagatggattcagctttgtacaaacaaagaatatctgcacagccaccgtaagcagggaatgactggggtgtgggtaacggcccgtgtgaataatattggaagttacattgtgaattatgagtttatttatttgtag

SEQ ID NO: 128123 - DNA, 930 bp, Enterobacter cloacae
gtggtcatcgataacttcatgacgtcgtcagcgaagtatgccgatatcgtgttgccagacctgatgaccgtcgaacaggaagacatcattcctaacgattatgcgggtaacatgggctacctgatattccttcaacccgtgaccgcgccgaaatttgaacgcaagcccatctactggatcatgagcgaagtggcgaaacgcctcgggccggatatccatcagaaattcaccgaaggacggacgcaggaacagtggctgcagtatctgtatgccaaaatgctcgaaaaaggccctcaactgccgtcctatgacgagctgaaaaaaatgggtatttacaagcgtaaagatccgaacggccattttgtggcctataaaaaattccgcgaaaacccggaagccaacccgctgaaaacgccatcgggtaagattgaaatatactccagcaagctggcggagattgcggccacctgggagctggaaaaagatgagaccatcagtccgctgcccgtctacgcatcaaccttcgacggctgggatgcgcccgagcgcgcgcagttcccgctgcagctgtttggtttccactttaaggcccgtacccactcgagctacggtaacgttgacgtgctgaaagccgcctgtcgccaggaggtctggcttaatcctgtcgatgccgaaaaacgcggcattaagaacggcgatacggtgcgcgtctttaacgaacgcggcgaggtgcgaattgaagcaaaagtgacgccgcgcatcatgcccggcgtgagcgctatgggccagggtgcctggcacgacgccaatatgagtggcgatcgcatcgaccacggctcatgcatcaacaccctgaccacgcaccgcccttcaccactggcaaaaggcaacccgcaacacaccaatctggtgcagatcgagaaggtgtag

SEQ ID NO: 128124 - DNA, 465 bp, Enterobacter cloacae
atgactatttgggaaatcagcgaaaaagcggaatacatcgcgcagcgtcatcagcagttacaggaccagtggcacctttactgcaactctctggttcagggcattaccttgtcgaaagcgcgtcttcaccacgcgatgagctgtgcggcgcagggcgatatgcgctttgtcctcttcggccatttcatcatcaacgtcaccctggcggataacttcaatagccacaccatcgagtaccacctcgagacaaaagacggtgaaaaacagtgtattgcaaaggcgcagctgatggctgacggcatggtggacggccacgtcagcaaccgcgatcgccagcaggtactggagcactatctggaaaaaatcgccccggtttataacggcctgtacaccgccgttgaacacgatctcccggtcaacctgaagcagctgatggacggaaatacctcagcgaacgtggcctga

SEQ ID NO: 128125 - DNA, 279 bp, Enterobacter cloacae
atgatgatctcatatcaggaacttgttcgcaccttccttagtttgatggaaggatactttgaggttgtaaaggtagatcgctgcttctttaatgagcaggtgcagaatccaaccttgtacccgctgattgcttccattcaaaaacactgcgacaaaattattattgaagggattgagaatagagaacatatggggttactgcgtgaggtggggatttggggattacaggggtatctttttaaatctgtcccttttaaaaatgtggattcattgctttag

SEQ ID NO: 128126 - DNA, 1209 bp, Enterobacter cloacae
atggacgacaaacaattgcaggctctggctaacgaactggccaaaaatctcaaaacccctgaagatctcagtcagttcgatcgcctgctcaagaaaatcagtgttgaggctgctctcaacgctgaactgactcaccatctgggacatgataaaaatcagcccaaatcgggaaccaactcccgtaatggctattccacgaaaaccgtcaccactaccgacgggccgatggaattacgtactccacgtgatcgtgatggttccttcgaaccacaactggtgaagaaaaatcagacccgcattaccggcatggacaaccagatcctggcgctgtatgccagagggatgactacccgcgaaattacctcagtcttcaaagaaatgtacgatgcagacgtctctccggcgctgatatcgaaagtcaccgatgccgcaatcgaccaggttgtagaatggcaaaaccgtcctctggatgcgatttatcccattgtttatcttgaatgtattgtcctgaaagtacggcaggacagccgggttatcaacagagcggtgttcctggctctgggtattaaccttgatggtcagaaagagctgccaggtatgtggctggccgaaaatgaaggtgcaaagttctggctgaatgtactgacggaactgaaaaatcgcgggctgaacgatatccttatcgcctgtgtggacggcctgaaaggcttcccggaagcgattaatgccgtctacccggagacgcagatccagttgtgcatagtacacatggcacgcaacagcctgcggttcttggcgtggaaagactataaagcggtaacccgtgacctgaaacaggtttaccgcgcagccacggaagaaggcgcgttgcaggcgctggatgcgttcgggaaggaatgggatgcacggtacccgcagataagtcgcagctggcgggcaaactggccgaatgttgccaccttcttcgtgtattcggaggcgatccgcaaggttatctacaccactaacgcaatcgaatcgctgaatagcgtcatcagacatgcgataaagaaacggaaagtgttcccgatagatgaatcggtgaaaaaagtgatgaggctggctatccagtcagcctcacagaaatggacgatgccacttcaggactggcggatagccatgagtcgctttattatcgagttcggtgaccgccttgacggtcacttctga

SEQ ID NO: 128127 - DNA, 570 bp, Enterobacter cloacae
atggacatcgatttcaagaagttggctccctggaactggttcaagaacgagcagcaagagcagcagaccgcctcttccctgccggtgcagcgcaatgacctgccagcggcgagcgggccagtcaacccgatcctgcaactgcatcgggaaatcgaccggctgttcgatgacgcattccggggcttcggttttccggcgttgaacatgccgcagtggccatccgattggtcgggcatgctgaagccggccctggacatccaggaaaccgacaagcagtacaagattgccctggaagtgcccggtgtcgaggagaaggacatccagatcaccctcgacaacgacgtgctgatggtgcgtggcgagaagcgccaggaacaggagaagaaggaaggtggcttccaccgtgtggagcgctcctacggcagctttcagcgtgccttgaacctgcctgacgacgccaaccaggattcgatcaaggcatcgttcaagaacggggtgctcacggtcacgatcgacaagcgcgaggtcagtgcgccgaagcagggacgctcgatcccgatcaacggctga

SEQ ID NO: 128128 - DNA, 486 bp, Enterobacter cloacae
atggggctggcggattccgacagtcgcctcacgagcctactggccctgatgggacagatcgcgatcctgctcagcctgcccgcgcagctggttggcgcggcggaggtctattggcctggtctattgttattggccgcatcgccccagctggccctgctcgcacagctcggcttgtctcgcgtgcgtgagttcgacgctgaccgccttgcggcggaactgactggcgacccgcaggggctggcgtccgcgctggcgaaaatcgagcgggtcagccgctcctggcgtgcctggctatggccgggatggggcaatcccgagccctcctgcttgcgcacgcgtccggcaacgcaagagcgcatcgcacgcctgctgacgttggcgcctgggccagcatcagcgttgccactccgcgcgccccattttttgccggaatccgctttggcgacgcgcccaccgcgctggcgcccgagcgggctgtggcgctga

SEQ ID NO: 128129 - DNA, 864 bp, Enterobacter cloacae
atgaacaattctgaaggtttgaagtcgtttcagcaatcgcttgctggcctgccacagtgggtgtctgaacgtatattgcagcagataaatcagttaacccattacgagccagtaatcggcattatgggtaagagcggtgccggtaaatcctcactctgcaatgccctgtttgccagtgaggtatcaccggtcagcgatgtggcggcctgtacacgtgagccactgcgctttcgcctgcaggttggcgaccgctatataacgctgatggatctgcccggcgtgggcgaaagtggcgctcgcgataccgagtatgctgcgctgtaccgcgaacagcttcctcgcctcgacctggtactgtggctgattaaggccgatgaccgggcgctgacggtggatgaacatttttatcatcaggtgattggagaggtataccggcataaggtgctgtttgttatcagccagtcggataaggccgaacccaccagcggtgggggacagttgtccacggcgcagaagcagaatatcagccgcaaaatctgcctgctgcatgagctgttccagcccgtccatccggtgtgtgctgtgtcggtccgtctacaatgggggcttaaggtgatggccgagcggatgattaagtgcctgccacgtgaggccaccagcccggtggtgtcgcaactccatccttcctttcgcacgacggtagtccgggaacaggctcgtagcgattttggtgaaaccgtcggggccgtactcgatagcatcagtgcctttcccctgatacccgccccggtgcgggccgtcattcaggccgtgcgcaccacggtggtgtcagtggcccgcgccgtctgggatttcttcttctga

SEQ ID NO: 128130 - DNA, 171 bp, Enterobacter cloacae
atgaggacgctcgctgttgtattcattcagccagcgttcagtgatttcccgtgcttcattcagcgttcagaacaggtaaaaatccaggatttctgtccggtacgtccggttgaaccgttcgataaacgcattctgcgtcggcttacccggcttgacttgctgatcggataa

SEQ ID NO: 128131 - DNA, 3096 bp, Enterobacter cloacae
atgcctcatttttttattgaccgccctattttcgcctgggtcgtggcgctgtttatcgtcctgacgggtctcctgtctattcctcgtttgccggttgcgcagtatccggcggtggcaccgccgggcatcattatttccgtcagttacccgggggccagccccgatatcatgaatacgtcggtggtatcgttaatcgagcgcgaaatctctggcgtagataatttgctctacttcgaatcatccagcgacacaaccggttcggcgtctattaccgtcacgtttaaacccggcacggacatcaagctggcacagatggatctgcagaaccagattaagatcgtcgagcctcgtcttcctcaggcggtaagacaaaacggcattaacgtcgaggccgctaattctggatttttaatgatggtggggctgaagtccaccagcggtcaattcgaggaagccgacttaagcgactattttgcccgaaacgtcagtgacgagcttcgtcgcgtgcccggcgtagggaaagttcagctgtttggcggcgaaaaagcgctgcgtatctggttggatccgatgaagctccacagctacggcctctcggtgagcgacgtacttgctgctgttggccagcaaaatgccctggtttcgcccggcaaaacgggagatgaaccagcatctgcgggacaaggcgtaacgtatcccatcaccgtgaaggggcaactcacttcggtagaggcgttcagaaacatcaccctgaaatcagatgcatcgggcgcgaggctgaaactgtccgacgtcgcgcgcgttgagtccggcctgcaaagttacgctttcggtatccgcgaaaatggcgtgcccgcaacggctgcggcaatccagctctcgccgggtgccaacgcaatgagtacagcttcaggcgtacgcgcgcgcatcgacgagctttcccaggtgttaccggaaggaatggcgtttacggttcccttcgataccgcgccgtttgtgaaactgtctatcatgaaggtggttcagacctttgtagaagcaatggtcctggtcttcctggtgatgcttctgtttctgcacaagatacgctgtacgcttatcccggcgattgttgctcccgtcgcacttcttggcaccctcacggtgatgttattgagcggatactccatcaatattctgacgatgtttggcatggtgctggcaatagggattatcgttgatgatgccattgtggttgtggagaacgtcgaacgactgatggcggaaaaaagcctctccccacgggacgctacccggcaggccatgcaggagatcgccccggcgattatcgggatcacgctggtgctcactgccgtctttatccccatggggtttgctgagggttcggtcgggattatctatcgacaattttgtatttctatggcggtctccatactgctgtccgcgtttctggccctgacgctaacgccagccctgtgcgcaacgttactcaagccgcacaaggcaggaaagagtggaagtggaaggttcgcggccaggtttaacgcgcgcttccgtttgctcaccgtctgttacgaagccgggctgggtgccgttctgaagcgaaccgggcgtatgctgctcctgtacgttgcgctctgcacggcgctgtttgttggattgtcttcgttaccgtcgtcctttctgccggatgaagatcagggctactttatgtcctctatccaactgccttctgatgccacgatgcagcgcaccctcgacgtggtcaaaaaatttgaagcggaaattgcggcccggccggacattgaaagcaacattatgatcctggggtttggcttttcaggttcaggaccgaattcggctatggccttcaccacgctgaaggactggaaaaatcggcagggctcgacggctcaggatgaagccgaccacatacaggccagcatggcgaacgtctctgatgccgtcacgatgagcctgctcccgccggccatttcggatatgggcacctcctcgggcttcacatggtacgttcaggacagagcgggagcgggctatgacgctctaaagagggccgccgacgcgctggttctgcaggctaatcaacgccctgaactcagcgatgtctatatagacggtctgccggaaggaaccagccttgcgctccaggttgaccgggaaaaggcggaagcgatgggcgtctcattcgatgatatcaaccagacgctctccgtcaccctgggctcaaattacgtcaacgactatacgaacaacggccgcgttcaacaggtgattattcaggccgatgccccttaccgaatgcagcccgagcagatactgaaactatcagtgaaaaaccggatgggtgagatggtgccggtatcatcgtttgcgacgatctcctggagcgttgcgccgcagcagttgacgcgctaccagggttattctgctatacggattaccggaagtgcggcgtcaggcgtatccagcggcaccgcaatgaaggccatggagggcttgtccaggagcctgcctcagggcatggcgggtgagtgggccgggagttcgttgcaggagaaaaaatcggaatcgcagcttccgggcctgatcgccctgtcgatactggtcgtgtttatggtgctcgccgccctgtatgagagctggtctattccttttgcggtcatgctggttgttccactgggccttatcggcgcggtgatagcggtgtttgttgccggtatgaccaatgacgtgttctttaaggtcggtctgattacgctcatcggcctgtcggccaagaacgccattctgattgtggagtttgccaggcagctgcatcgcgaagggcaacccctgctggcggcgaccattcatgccgccagtcagcgtctgcgccccattctgatgacatcgttagcctttaccttaggagttgttcctctgatgctggccagtggtgcaagcgacagtacgcagcatgccatcggtaccggcgtatttggcggcatgattagcggtacgcttctcgcgatcttcttcgtaccggttttctttatcgttattgcgcgcttcatcggcagcatcaggaaagcatga

SEQ ID NO: 128132 - DNA, 1866 bp, Enterobacter cloacae
atggctggccagtatgaaaaagcaataacgataaaacaagcgatagattcaattaatttacgccactatcttctgcctgcaattcagaggaagttcgtctggagcagcagtcagatatgtttgctgtttgattccatcatgcgagaatacccgataaactctttcatgatgtgggatatccgtagtgccagtattaaaaatgattacaaattctatgagttcctgaaagaatactgtcagcgatttaatgaagaaaacccctgcgtagcaacaaatgctgggtttcatgatttcaaggccgtgattgatggtcagcagcgtctcacatcattatatattggattgtgtggaacgtatgcgtataaacagccccggatgtggtggccttcggcacaggatgatcgcatcctgccgccaagaaagctttacgtcgatttaacagcgccacttaattcagacgatgagctcatgatgaagtataacttcaggttcctgaccgacaagcaatacgctgattcacttacagacaacaaacatcactggttctgcctgcacgaaatattcaaatacgagcaacatgattcgcctgatgatattttatttaacgttgtcgtaccagaacttgaaaaaagagatctcatttccagtgaattttccagaaaaactctgcttaaactttataccaagataagaactgagaatcttatccactacttcaatgagagcagtcaggacattgatcatgtgctggatgttttcatccgcacgaacagcggggggacaaaacttgagttttcagacttactgatgtcaatagcggtagcgcactggcagggggatttcagaagagaactggatgaactgacaaaaaatatttatcagaacaacgagatggggttttatattgaaagagactggttcttaaaaaccagcctgatgcttattgactctgacgtccggttcaaagtaaaaaacttcacttcagaggaggtcggtaagatacaacaacaatggtctgaaataaaatcctgtatcaaggagacctttattcttatcagacgattcggcatcaatccacagtctttgatatctaaaaatgcagtcattcctgtggcctactggctttacaaaaagcaaaccagtggacatccattatatacaacgattaacctcctgaataaaaaccacaatgaacgctcagtaattagccagtggttttacatggtacttctgaaagggatctttggaagccaggcagatgcgctactcacgagtatcagagaggtaatgaaaaatagtctttcagatattcactttcctcttgaaaagattattgacagatataaaggttcgaataaagacctcagatttgacgacgaatacatcgaaagccttctcaatatcagatatggcgaaggtcgttgccgcgcactattgcatcttctgttccctgaaatgaatccgaccgaggtgtttcatattgatcaccttcacccaagaaatcacttctcaaagaaatatcttgaaagattagattatgttgcgaactcaccagagaacctcagcttttatgaaagcccggaacactgggacaccataccgaatcttcatttactgaatcattctcagaatataagtaaacaggatacttccctgaaacaatggctatctcattcatcaaacaactatacgccatcaatgttgttagtttcagatgacaatattgagttcagtcgcttcccggaattctacaatgagcgaagaaacgccctgaagcaaagactgctgaatcgggtatttcttacaacaaaaatagattcatcaccatccacaatggatacggatgaagaaattttcaccgactga

SEQ ID NO: 128133 - DNA, 195 bp, Enterobacter cloacae
atggctacgcgagcgataaataacaaatcagcaacgaaggggattcgcttcccacataaaattattgaagagatagaaacttgtgttgaacaggagaaattaggaaatctaaatgctaacttctccgcatgggttttagatgcatgtgaacaaaaattaagaaaagaaaaacgccgtaaaattacgaaagattaa

SEQ ID NO: 128134 - DNA, 297 bp, Enterobacter cloacae
atgaacaattcttcaattcagaatcttctgcaacaggctattgacgctggcagcgaaaaaaacgatttgcttctcatcaaatctgatgccgatggaatcaggtcggctttgcttggtggtatctcatttctggggcaggagcttgatgaaagcggcgctcagtcaaaaacaggcagaagttatggcccttctgatttggccgaccttggcagatttctgagcagttcggtgaggttaattcagatgatggatgcggtgattgatgactgtgacgattttaaaagagaaggtaactga

SEQ ID NO: 128135 - DNA, 906 bp, Enterobacter cloacae
atgatagtcaatcaaaaagtactcaataatattttcctgaatgttaaagccgtgtttaatcagcggactgaaaaaacaaaaccgctttaccctcagatttcaacaaaagtgccatccacaacaaaaaccaacgtctatccgttccttggttcattccctagtttacgtgagtgggttggtgagcgggtgattaaaagcctggctgcgcataatttttctatttcaaaccgaaaattcgaatcaactatcagtatctcacgtgaagatattgaagatgataatatcggtatggtttcaagtatggtttccgacatggcggatgctgcagcccatcatccagatgaattgctctttgagttaatcaagcagggattcaaccagaaatgttatgacggacagccatttttctccgcaacccatgttgtaaatattggcggtgatgaaactaccgtttcaaacgtacaggttcccgcaactggggcggatgaaaagccattgtggttattactggataccactcgtccgattaatccctttatctggcaggagcgtattccttacgaaattcagcaaatcactgaaggcaaagaatcgctttcctttatgaccgacgaatatttttacggtgttcgtggtcgtggaaatatgggatatggattctggcagatggcttttgcaagcaagaaagatttaaccaccgagaacttcaatgatttgtatgatcgcatgtgttctcaaaaaaatgatgcaggccgaccattacgaatcaaaccaaccattttgttggtgggaatgaaaaaccgtgaggctgcattcaatattgccaaagctcaaactctcgacaacatgaagcccaatccaaactacggtcttgttgaagtcattgtaacgccattcctggactaa

SEQ ID NO: 128136 - DNA, 324 bp, Enterobacter cloacae
atgcctgtggtcagagacacaatagaagcgcttcgccttacgcatgacagatttggcacaacggaaggctcagcggcttcaatgttcttccgtgttgcggtaatggctcaggttattaccgtgctcggcgatctacctgaagatgaaatctcaactgatactttgctgaacgggcttcatgatgaagattttgacctggttgatgcacaaattgaatccattaaaaaaaagcggatgcttttgaacagcagctcaccggttatcgaaccctcgtccttgccctcggacgatacggaatcagtgagcaacaaatcctcggaatga

SEQ ID NO: 128137 - DNA, 2160 bp, Enterobacter cloacae
atgtcccgcaatttagcacttacgttaaacctgatggccaaggacagtggttcgaaagtactccgcgccgctatgcaggaagccagcaagcaagtccagcagcttgaaaaggcgcagcagaggtcaagcgaaacaggtatccgtgcatcgaaaacactcacggatgaatatcgccgggcttcacaagcccgttcaacactaggaattcgttcagaacgtcaaattcagcgtgagatccagcaaaccactgctgcatacaatcgactgacacgcaccggacttttgtcagcaaacgagcaggcaagggcttttgatgcaatgcgacaaagagttaccctacttaggggggagttatcccgcacctcagaaacaatgtcacgaatgagtaaagctcgattacttggcgggaacctcacagctgttgcaggtggtgtggcagctgctggggcggtactcgctcagccagttcgtgagcagatgaactatagtcagcgtctcgcaaatataactaacacggcttataaccagttacccgcagatgaacgtatagtcgcaaaagagcaattgagtggtgcaataaaaggtgcagtaagaaaaggtggtgggacagccgatacggcggcaaatgcgcttggcgttttaatgtcaaaaggcggtgttgatgataaaacggctatgtctgttcttggtgatgttatgtacacatctactgccaccaactctaacccagaggaaattgcacaactcgcggtaacagcacttaataacttcaaaataaagaaagaagaactgccattattctttgacaagcttacccgctctggtgagcttgggggctttgaactctcaaacatggcgaaagagctaccaaccataatgactaactattctaaattaggtatgggagggcttaaagatattgacttgcttcttggcaatttacaggctaactctgaaacctcaggtaataatgacaccgccgccaataacctcaatcagcttttattaaagataaccagcgcagacaccattaacaacatgaagaatagaaggtttcgtgtttctggtggtaaggaaatgtcctacgctgattttattgtgtcccaaagagctaacggtaaaaacaccttcgaatcttttattaacgctattgactccactgtatcaaatgacaagcgttataagcgatactcctctgacattgagcgttataaggggacagacaaagagaaagaccttcgcgcggccagggatgttctggtttcaacaattatcgcctccatagttcctgatgctcaggcgcaaatggcactaaccacgtcatttctgaaaaaagattatattaatgaccagatggcaggaaccaataaggcaaacggagcggttacgtcatcatttcaggttatggcgagtgagccactttttaaatttaatcaactggctaatgaaaagttttttgctgatggtgatgtattcattaaatttaataaaaatcttggtgatgctgcgcttaccatagctgattatgcaaaagaatatccggctttgacagttgctgtagatggtgcaactgagggaataaaggccatgactgctgctgcgtatgtatttgctggaatcaggttattacagggcggggttggcttgccaccaagtccggaaggtgcagcgggaacggggggtaaacttgcaagggcattgtcaataacaacacctgcgattgcgattactgccgggtcagtcgctttaggtgcaatcagggataaaatgcgtgatgactttgataaaaaaacgatgccggagaagattgaatctattaaaaatgatacttccggttatagttttgtcgatattgcgtgggcggtattgaaaagcagatttggtgatgaaaagcgccagtcatcaatcaatgctccccgtcagccggatggaggcattgacatagcaccggggctggatcatgatggcgtaaattttggattgccttcttatttgcaacacaataataagcttggttttacaaacgattatcaggcagaaagtaaacagccacttattgtaaaaaaccaaataatccttgatgaaaaagtccttgcagaagcagtaaacaactttaatggtgagcaagctaacaggggctctggaactccaaatttctaa

SEQ ID NO: 128138 - DNA, 729 bp, Enterobacter cloacae
atgacagacatccttgatgagcagataaaaaaggctgagtttctgaaccgggttgcggatattacagctaaaattggttcagctgtggatgacctgataatgttaactgattgcaacactaaatactttaatgatggtgatgcagttgctattcgtaatgctattgatggtattacaaatgccacatcacttgttttgattgatgctatcagcgtggttgctccagaggaacttgataatatcaagcccagatgttctttccccaaaacacggcatgaaaatgtagttgataaagcccttgaaccggagattctaagtaaccttccagaagcggcggccgatattgttgaattaattggtattagccaggctatgaggctatttaaatcttttggcggaaccactttcccgataggaaaaggtgtcagattccttggtggggcacgtgcaaacgcattacgtacaatacttaccgaggatgaaatcagactactgcaaaaacatttttcaggtgaggtgttgtatttaccacgatgcgatcgcctgttgcgcgatgtaagaaatcgccagtttcttaatgaattctcagaaatgcgagaggcgggagcaacctccgttgcctgtatgtcagttcttcccctgaagtacgggttcacagaccgctacggttggcaattactcaaaaatgaaaaggaatctcaatcagcaaagagttctaaaattcgctaa

SEQ ID NO: 128139 - DNA, 1719 bp, Enterobacter cloacae
atgaaacaccacttccttttttcgctgacggggctggttgtgctgagcatggcccgcgccgatactctgccctctattattaaccccgataacccggcgcaagtttctcgtaacgttgcccccgaacagactgaggccgcgccgcagccgaacgtcaaaatagaaaaaccgaagtcaacgctgacgcctgaaacgcctattaccattcatcacattcagtttattggcggcacgcgttatcccttgaaggaattacttcagcccttcaggccttacgctggaaaaaccgtgccgctaaaaacgcttacggggctggtaaatgatattacggaacgctataaggccgacggttttccactctcttatgcctggctgcccgataataatttccagcagggcaatattaaaattgttctggttgaaggctatgtcgctcatagcgacatcaccagtaataacccgcacatcgccgaacgtcttaaacgtttgtctgaaaaaatcatggcggaaaaaccgctgtctcaggatacgttcgatcgctacagccagctgatgacgcgcaccccgaacgttccggttacggctaacgcgcagctgccaaccaatatctatggcgcggcggcgatgcaaatcaccggtaatcaggagcggagctggaatatcgcttccaccatcgatacccgtaaagggcaagatttaatgatgctgaacggcacgctcagcaacatgacaagctatggcgatcagcttggcgtggccacgcttgtaccgttagatagcaacacgcgaaaaaattatgtcgggctcaactggcagcagtttttaaacgatgaagggctgaccatgcagctaaaaggcagctattaccgtgaagatccgcgagatttttcgcccctgctctctttgccgaataatatcagcgtcgattcgaagcaaaaaacaacgcaatacaacggcggcgtgacgtttggctaccccctgctgctgaagcaaaaatcacaaattaatctgaccagcggttttgattacaccgaccgccaggatgattatgccctgcaggcaagactgctgggcaaaacctatagcctggactccgtcaaccagcacgcgcgttatcccgcgctggaagtgggcatcaacggtgcacatcagttcacaaccgccagcctcagcggccgactcaacgtgcgtcagggtatggatgcgatgggagccgatatcgtctcggctcccaggcccgatattaattttacgctcacgaaaagctatctggacgcagcctggctgtttgccgataagtggcggctatcaacgtcctgggagggggactggtcaaacaacacgttgccagagcccgaacgcgttagcttcggtgcccagcggtttggccgtggataccaggacagtgaagcaagcggtgattacggctatggcgggcaggtagaactgcgctatatccagatgcgaaaagagagcacatggcttgccacaatccagccctacatgctggccgataccgcgcaaacctggtttaacacctccggcttgcctcatcagcggctcgggtcagtggcggccggcgtgatggtaggcgatacccgccactatagcatcacggttgaggcggcaagacccgtcggggatgttccgacagacagtcgcaacagagactggcgctacagtctgacgtttacttggaatttcaataaaatgcagtaa

SEQ ID NO: 128140 - DNA, 1542 bp, Enterobacter cloacae
atgccttatttacttgaaatgaaaagcatcaccaagcgcttcggcacggtgaaagccgtcgacaacgtcagtctccggttgaatcccggcgaagtggtttcgctgtgtggcgagaacggttcaggcaagtcaacgctgatgaaagtgctgtgtgggatctacccgcacggtagctacgaaggcgaaatcgtctttgccggcgaagtgatccaggcaactcatattcgcgataccgaacgcaaaggtatcgccatcatccaccaggaactggcgctggtgaaacatctcaccgtgctggagaacattttcctcggagccgaaatctcccgccacggcgtgctggattacgacaccatgacgctccgctgtgaaaagctgctggcgcaggtgagcctccacatttcaccggatacccgcgtgggcgacctgggcctggggcaacagcagctggttgaaatcgctaaagcgctcaataagcaggtcaggctgctgatcctcgatgagccaacggcctcgctcaccgaacaggaaaccgcggttctgctcaatatcatccgcgatctgcaaaaccacggcatcgcctgtatctacatttcgcacaagcttaacgaggtcaaagccatttcggacaccatctgcgtgatccgcgatgggcaacacatcggcacgcgtgaagccgcgggcatgagcgaagatgacatcatcaccatgatggtggggcgcgagctgacggcgctctacccgaatgagcctcacaccaaaggtgatgaagtgttgcgcgtggaaaatctgaccgcgtggcaccccgttaaccgccacatcaagcgcgtcaataacgtctcgttttctctgcacagcggcgaaattctcggtattgccgggttagtcggcgccgggcgcacggaggccgtacagtgtctgtttggcgtatggccggggcgctgggagggcacgatttatatcgacggccagccggtgaaaatcgacaactgccagcaggcgattgcccacggcattgctatggtgccggaagaccgcaaaaaggacggcatcgtgccggtcatggccgtggggaaaaacattacgcttgcggcactcgatcgcttctccggcgcgctgagcagcctggacgatgccgccgagcagcagtgcatcctccagtcgcttgcccgtctgaaggtcaaaacctcctcaccggaactggccattggccgcctgagcggcggcaaccagcagaaggcgattctggcgcgctgcctgcttctcaacccgcgcatattaatcctcgatgagcccacgcgcgggattgatatcggcgccaaatatgaaatctacaaactgattaatcagcttgtacagcaagggattgccgtcattgttatttcgtctgagttacccgaagtgctcggcctgagcgaccgtgtgctggtcatgcacgagggaaaactgaaagccaacctgattaaccagaacctgacgcaggagcaggtgatggaagccgctttaaggagcgaacgtcatgtcgaaaagcaatccgtctga

SEQ ID NO: 128141 - DNA, 1548 bp, Enterobacter cloacae
atgaatatgctccgtaatttcacgatccgtttcgtcatgctggcgattctcgggatcttttgtttaatgtgggcgggtgttgggctgtacagcacctggtctctgtctcgcgtttcagatggcaacgaggtggaccgccagctggtcaagcagatgacggtgctcagccagggcaacgatcagtatttccgctttgtgacccgtctgagccgcgcaatggaagtcaaagccgcaggcggcacgccggatctggcctctgcccagcaggcgctggataacatgggcaagaagctcgccgagatgaaggcgatctccccaggcccaatggatccccaggtctcttcccgggtgatcggtgcctggcaggcgctgctcgaacagggcgtgacgccgcaaatgcagcaggcgaaactgggcgcgctggacggctatcgtcagcaggccaataacgtcacgccaacgctgagccgcgcgttcggcgcggcggctgaagagttcaacaatgctgccgcgaagtcgctcgaaagcacccgcgtggtggtggacggcctgaccagcatgacccgtacggtgattatcgtcgccacgatcgtcggtctgctgatcctgctcttcaccgaccgttacctggtcgcgatgctggtcaaaccgctggaccgcattcgccagcagttccgccagattgctcagggcgatctcagccagcccattgaaccgttcggccgcaactgcgtgggacagctggtgccgctgctgagcgccatgcaggacagcctgcgcgaggcggtcagcacgatccgctccggcagtgaaaatatctggcgcggggcgacggagatttccagcggtaacaacgatctctcctcccgtaccgaagagcaggcggcggcgctggaagagacggcagccagcatggaacagctgaccgctacggtgaaactgaacgcggagagcgcccgccaggcaagccagctggccgatgtggcctcaaccaccgccagccgcggcggttcgctggtggaagaggtggtaagcaccatgagcggtatttcggaaagctcgaagaaaattgctgaaatcaccaacgtcattaacagcattgccttccagaccaatattctggcacttaacgcggcggttgaagcagcacgcgcgggcgaacaggggcgcggcttcgccgtcgtcgcgggcgaagtccgcaacctggcaagccgcagcgccaacgcggcgaaagagattgaggggctgattaccgattccgtttcccgcgtcgagcagggtgcaaagctggtaagcgacacgggtacgaccatggatgcgattttgcgggacgtgacggaagtgacgaccattatgaagcaaatcgcctctgcctctgaggagcagagtaaaggcatttcgcaggtcggtatcgccattacgcagatggacggcgtcacccagcaaaacgcctcgctggtggaggaggtttccgcggcggcttcggcgctggagcgtcagaccgaagatcttcagcgctcggtgcagaagttccgcctgacggcataa

SEQ ID NO: 128142 - DNA, 744 bp, Enterobacter cloacae
atgctgagaggaaaacgcgctgttatcacgggtggcggtgggggatttggtcaggcgctttgcgtctggctggcgcgagagggcgttgacgtggattttagcgcccgtcgggtcgaggatattgaaaaaacctgcgccctcatcgcggctgaagggggtgtggcaagagggtatctctgcgatttagcccagccggaatccatttctcagttctcttcacaggtcttacgttcagaaaagccaatcgatattttaatactgaatgctgctcagtggctgtcagggacgatagacgaacaatcgagcacagaaatcgtcagtaccgtcagttcaggcctgactggttcaatcctgctcacccaggcgctgcttccaggattgcgacgctcagagagcgctgacatcattgcgattatttccgcatgcggtattccgaattttacagattccattgcccatcccgctttttttgccagcaaacacgggctcagcggctttacaacgaaactgtcagaacacttatccaaagaaaatattcgggtaaccgggttatatccgcctgattttgaactgaccggtttagatgcgcatgtcgataatcaaacaagaatggggcagcgtctgatgaatggatggtcaatctgggaaacgatgcgttttgtactgactcagcctcgaagttgccatattagtaccatctactttcaggggccgactcgtgaagatctggcacatcaggcctga

SEQ ID NO: 128143 - DNA, 123 bp, Enterobacter cloacae
atgctcctggagaagcttattggacttgaatgttctctacatggcgagatgcgaaaagacagggaatggctcgaacagatacttcataaagaattcagagaaataacgcgtacaggtgtgtaa

SEQ ID NO: 128144 - DNA, 324 bp, Enterobacter cloacae
atgtcggaacaattcgagttgtcattaaccccaccgattctacctgccgtatgctattttattgtatctattgtcgtttttttcttgttgtacctcgggaaactcaaggtcaacaggcttcataaatatcctctgttcattgcctatacgctatttgtgatagccatcgcagccattcaaattaacgtttttgccaacggctatgagtttgttagcggttttttacatattgattttgatccctggcggtacgactcggtgtattgggggtcattgatattcgccatgctttacctgctggcaatgccacggaataggtattaa

SEQ ID NO: 128145 - DNA, 756 bp, Enterobacter cloacae
atgtacaaccataatcgggataaaagtcatttcgaagagaaagtcttagagattgaaaatcttgcgcagcgaattgccacaaagcatttgctttatggtaccgctggtatgttttttgaaactcaacaacttgttgctcacctgagaagggagatcgagtcgcattgcttgacctggtcaggcgggattcaattacttgatgaacagatacatcatcttaaggaacaggatgatttactcaccttcaataaagctaagttatttattgttgttgaaaaaaaccgaacaacaacgacgactttagcgcttaaacagatcggtttcgttgccggtggggcgcaagtgtatgggggcgctagtttatgcgtcggttcgctgggtctggcctgtgctgcgtatggtgcacctatgattactcatgggctaaacaacatgtatgaaaatggatactatcttctttatcgtgaagatcggtctggcacgctaagagatgcttatcgttacgtagcagcgaaactcggctatgggaataatgaagctgatattgtctatggagtagttgatatctctttatcagcctatggcgcgggcaggagagtactggctccccgagaaaaatcctggagtctgtttcgcaacattgaatctgattatatcagaggatggcaagaggcttctaaaacagcgatggctctggatttaaccagtggaagcgtcacaggttggcagatgtaccagatagctaaagagaattaa

SEQ ID NO: 128146 - DNA, 435 bp, Enterobacter cloacae
atgtacaacaccattttggttcccattgacatttccgaggatagcctgacgcacatggttatcccgttcgttcaggcacacaccgcacttaacacggccaaggtccactttcttactgttattccatcgcttccctattattcatcgttaggtttggcctactccgtggaagtgccgaagataaaagaattccagcacgctgctttagcgaaactggatgagattgttaagcaattcaaaatccctgcagacaagatacagacccacgccgtgacggggtctccgaaggatcagatccttaagctcgctgacacgatcggcgccgacctgatcatcattgcctcccacaaacctgacatctcgacctatctgttgggttcgaacgctgcggcagtggtgcggcatgcgaaatgccctgtgctggttgtaagataa

SEQ ID NO: 128147 - DNA, 486 bp, Enterobacter cloacae
atgaacgcaatcaataaaaaaacaggaatatcggccgtaattttactcctcatcctggcgttatcggtgtggttctacgttcacatgcgtcataaacagagtgcgttgagtgttaactgttccacaattgtacgttacaaccatcacgaacctgatttcgtcgctacgctggagtttattttccgtttagataaaaaccacgatggccaggctgtcctgtctgggaatatccagtcagcgcgaggtgttaatgtcatctcacgcacaattctctttagctatgagatgaacaggccgggtgagattgccctaaccgatacgcgctacgttaaaaatccgcgtgatacagctgatgatgacagttttaaaagcagcttcttttatgttcccgagggaaccgttcgccagctgaagattgaacctacaggtaatggctggctgattggaaatctgcagtcgccatttgcgctttgcgtgaacaggtaa

SEQ ID NO: 128148 - DNA, 810 bp, Enterobacter cloacae
atggtttttgtgattgataatagggttttttatcgctctgaagatggtgccatatggccatccggagacgagggctctactgtcattctgaccctgacaatgaacaggctactcacatgccttctcgaaaggcatggtcaagtcctgacacggaatgaactcctggataacgtctgggatgctcatgggttgcgctcatcgagtcacacattaaataaatacatctcagaactgagaaaacacttcgtccagtttggtattacggatgaatgtattaccacagtgcctcgggtcggctttatgtttaacagtgatattgatgtcagggatataactgaatctacgattgctgatggacgactcaaagaagatgaagagtcggagataataaaggtagtacaccgtacggcggtagcgggtaagaacaaggttcttcattatacgctggcactgattgtacttttaatcagcgctaccttagttgtgtcaggtctcgtaattccgtcgaaagacgtaaaggaaataaaacagattaagcctcattttttgtttaactacgacacctgtcctgtctatacagtccagagcaactctgcatccctgtcagagcaaaaaaaagaactgtttttagaactggctaactcaaatcatattcagtgtctggaaggcacttcttttctctatcaggtttcagagtcctatctgtacggcaataaggggagggcgtttatcagtcgatgcacgcaaaagaataataattacatctcctgtctgaataactactggagtggttatgaacgcaatcaataa

SEQ ID NO: 128149 - DNA, 798 bp, Enterobacter cloacae
atgataagcaccaaaatgctcatgaaggcagaacgtttcttcatcaaagcccgtacagtgattagagaaacaatcttatcagcggaactgaccaatgctgaatttgtaccgtttatccagcccgtatgtaagggagataagatcgtaggcggagaggtattactcagagttctcaaagatgggatttaccaatctcccgaaaaatacctttcggcaatagaatcatgtgaggtgattaatgatgtcacttgcagtctgatgtctgatgttaaaacatttttcgaaggctatgaaggtactctacctgatgacttttatctctccttcaacatctgtgcgagacagttgaactcttcaagagttattgaagcagtgacggactttaagaaaacattcgacggacgcatttctgtcacgctggaaattgtcgaacgcggaacaatgaacctggacgactttgcactcgaggctatgcagcaacttactgagtcaggtgtgcgatttgcgattgatgatttcggcagcgggagttcatgccttaaatatattgaacatgcaggtttctcaactatcaagattgataaatgcctcacaattgccagcaatggatcattaatctattccgcggtgattgattcaattatcactctcgcagagcggctgcaaattcatgtcattgctgaaggtatagaaaataaagaacaactatcgcttttgaaagatagaggggtggatatttttcagggttatctattttcaaaacctgtaagcatgcacgagttttgcacgcacatataa

SEQ ID NO: 128150 - DNA, 321 bp, Enterobacter cloacae
atgagcaacgcaacgatatgcaccaatcagggcaacagcttttccccttcttcaattgtggaaatgctttcaggttatggctgccagaaagtatggctataccgtacgataaatacgcatggggaaactcttcttgtgcttctcgatgaggagaacgggatatacgaggaaatggccagccgcctcgatgctccggatatgaaagagtggtccattcagtattctgacggcggttataaatcccgtacgcttcctaaaggagcgtttgagatcgatttgagcagtcctgacgaagctgcctggtatatggaccttttatag

SEQ ID NO: 128151 - DNA, 591 bp, Enterobacter cloacae
atgggtagcaccaaagaatggctatgtgaagttcaggaggagcgggcccatgaatgggtaatcactaattatcctgaagcagaagaaggaactcctgaatgggaccacgctttgcaggaatatggctggtttcaggactggatggaagaagccgccgagcagcaagattttgaggcatcccttgagcggattcccgatcgtcttcgtgaagctctggacgaacttcgagaattggaaggcctgatcattaacgaccagcccaacatcactttaaggatggcctttgctcacactgtaaccgtgctggacagcttccttatgtacagcgcacgcgcgcttcttaatcatctacctcaccttcaacttttccttcagaatgcagattccttggtccgtaataaggaagacagaaaagtcctacgtgaccctttgtggagcgagcaggaacctgatgttaatacacccgataaggcttatatctggcgagctcaggctctggtgtcgaagatgacatttcagaacccgaaaatcataacaagatacttttcaacctggactgaccccgccccggtagacgatcctgccctatag

SEQ ID NO: 128152 - DNA, 267 bp, Enterobacter cloacae
atgaaagctgaaaaaagaaaagaagatacagcgcgtaaaataaaaattggtgctgagttaataaggatagttagagagaatagcaaagaagtatctgacgagttagattttactaatgatttatcgctattggtcggggctttaactaatcatatggtattaaaaagaatatacgatcagcgcgagtttttgagagcggaaggggataagaggcttaacgaatggaaactaaaaaataataaaaaaaggagtaaaacggatgaataa

SEQ ID NO: 128153 - DNA, 411 bp, Enterobacter cloacae
atgaataacttaagacctaacccgaaccctccacgcgagggaacggcggacatgattaaccgcctgaacttctatgatacgtcttttacttgcttacattttttaatgatagattttgataatgacatgcaagaaatgaaaagaaaaaaagattttcacccgctccagcttttaaacaagcacgatagagaaagtttagatttagagatattaaatattattagaatatcacttgctagcaaaatgttagatattcaaagtgaagaactattgagtgctgatttatattttaataaaaaagatgagttagacatgggggaggatgcgagaataataggttttgtgtttagagactttgtaaaacaaagaatagaaacagcaattaaaactattgaggagaaaaatatatga

SEQ ID NO: 128154 - DNA, 237 bp, Enterobacter cloacae
atgaatatattaggtttaatagcaaaagcaaaacctgcggtagacgatggcggcggtagtctcattcctgccgcgatgggtttttttatttgtgcttttttagttgctatcattgcctctgttgtttctagtgcttttcgttctgctaaaaattcagcagacgtgagtataaacaatgcaaaaaaatatcacatagcactaataaaagagcagtatagaaagaaagtcgggggctga

SEQ ID NO: 128155 - DNA, 465 bp, Enterobacter cloacae
atgttttatttaatatgtatggtttttatggtcatgttttttattgcttgtatgttgtcggttatatatgcgtctgaaatatatcagtggcagcattataacagctataagtttaagcaatggttaaaaagtgggagtatgaaaaaagatgcgcatgaagaaaaaataaaaaaggaagtgaaaaaaatgactatagattatatattaaaacttcttaaaaaatacaatatagattttgatgctaacgagtttgtaaaagcaagttttaatattaagatgaaatactacaagttaatattaaatgaaaaggagaggctgaaagaaaataaaatattagatgaagcagttaaacaaaaaataaaaatagaaactgacacatttgacgctgaaaaatttcaaaaagaagctgatgaacgttataagttattcatggaacgccgcaatctctccaatagagaaaaataa

SEQ ID NO: 128156 - DNA, 1740 bp, Enterobacter cloacae
atggtaaaagatgaacttgaggagttcagtaaacttgcggatcaatacatcattacatgtgatcacgcttctttagctgcgttagtcgaaagttatacaaaacaggatttcaccttttctcaccccttgtacgaagcccattatctctactgtctaggaaattgttattccaaactctatgaaacacgtaaaacagagtggtattcagatgatttgatgaaatcggtcatcttctacagaaaagccatacatactctccctaaagcaaactggcaggaacacgtaaataacattcatgcatatgatagtcttagatctatgattgagacaaatttagctaaccgtctttcatcacagggaagagcactatgctgtatccctcactatgacaaagctatttctatagataacaatcccgtagcaattatatcaaaagccaataatgaattatttcttggcaattcactatacgatgaaggacattctgaatatcattatttcattgcttacaatctattaaaaaagggactcgataatttcaaaaaacaatatccagaacaaaaagaatcacttgaagatggggggcgattacacaatttccaaaaatggtttgaggataattttgagatatcatctttcgattatttcatgaaatacactgaaaaactcacatcaataaaacagaaaaagtattttgaatggtgtgcaaaaaacaagcttttccttaatgatttaaatgatgtttgcgattaccagattacttaccaagatattttttcattaccatcatttatccaatctcttaatggtgcgcttacaatgcatgaagaattatcataccatggtaattatgatgaattaaaaaatgattactgctatgcgcggtatttaatatactcctcaaaggatataccggacgatgcgcctcatatattcaactcaacttttcaacacgttgaagatatgacttactcaattaacaatttaaaggttgcccaatacaaatcagcattcagaataatatattcactttttgacaaaatagcatacctaattagccatttttttgatttaaatgacttaaagcatgacagaaaaataagcatcgacaatttatttcgcgacttcacaggcaagaataatgaatggaagccccataaaaaacttaaggatagtgataatccttttatccatgctttattctatatattaaaagatattcgcaaagttggtagctctgattcagtatcaaaatggttagatccaaatgctgtagcatttgctgaaatcagaaatgctatggaacatcgttcattgaaaattgttgatgattttggctatgaactcgcaacatcacataatacttacaatgatgaagaatttacaaaattgcaaagagaggtcaatacgataccagatgaaattagagaaattgaattaaagataaaaaaaacaaatgaagaccatgaccctcatttatctaaacagcttaaagaaaagattaacaaactaaatactaagcattcagacttaaaagcaaaaatccatgaaaaagaaaaactatcatcacattgtcttttagtgccaataagccaattcgaatcaagaattatgcaactcattggcttagctcgtaactcaataatgtatctatcattagctatccattttgaagagcgaaaacgcccaaacgacggtatttacatgcaaagagaagtaccactcaagcataatttatga

SEQ ID NO: 128157 - DNA, 1221 bp, Enterobacter cloacae
atgccgaaggtagcaacaaaactcactgacacagagatcaaaaaggccaagcccacagagaaagagttcacgctatgggatggagatggcttgttcctgcgtatcaaaccaagtggcaaaaaaatctggcacctcggctataccgttcctttaaccaagaaacgggccaaaatgagccttgggttctatccctacctgactcttgcacaggcaagagcgctccgggatgaatacctctctttgcttgcacagggtatcgatccccaatcccacaatgagcaaaaagctaaagcgctcaaagatgccactgaacacacattccagacagtggcgaaaaaatggcttgatgaaaaaattaaaacatcaggcatatcgcaagatcatgctaaggatatctggcgtagccttgagcggaacatctttcctactttaggggaggttcccattaaagagatccgccctaagatgttgaaacaacatcttgaccctatcgagcaaagaggtgtccttgaaactctacgccgtataatttcacgactgaacgaaattttccgttatgcggccacagaagagcttattgagttcaaccctgcagataacctcacacagcgtttcagcaagccaaagaagcaaaacatgccagccctccccccaagtgagctacctcgtttcatatcagcattagcaaacgcttctatacgtttagaaacacgtatgcttatcgagtggcagttattgacttgggttcggcccggtgaagccgttcgggcgcgttggactgacatcgacgaagagaaccgattctggaacatccccgctgagttcatgaagatgaaacggccccacaaggttccattgagtaaggaagctatgcgtattcttgaatccatgaaaccaatcagcggtcatcgtgagtgggttttccccagcatcaaagctcctcttagccatatgcacgagcaaacagctaacgcagcgataatccgcatgggttttggcggtgaaatggtggcacatggtatgcgttctattgccagaactgccgccgaggaatccagtaagttcagaacagaagttcttgaagcagccctcgctcactctaaaaaagatgaaatcattgcggcatacaaccgtgcagaatatttagccgagcgtgccgagttaatgcaatggtggagtgattacgtccaaatacaaaaatataagtctattgccgcatga

SEQ ID NO: 128158 - DNA, 534 bp, Enterobacter cloacae
atgttttttgcttgctggctacgacacgcctcaataagcctgacaaactcctccctggataacgccggtgatgattctccaggtggtgcaatcaacgttatcggtcgcctgatgattcgtagccagtggaacgatgacaaggccaagcagattgagtctgtcgtcatgcgcctgtacgaagaagatgggctgcgtggagatgcgctctataagaaagctcgcgaactggtcatccctcaatcatcgttcagcaacatcatcgctctcgccaaagaatccgatgatgctgctttcgttgaacgtttgatggtcaagacgtttcaccgtgaaagccccgtccgcgatgtagctattaagcgatattgcaatcgcaattgcacgcaagatatcgccaggctgatgaatgcggttaccggaatggatatccaatattgcaggaagcgagttatctggtgcgagaatgttctcgactcggaaattttctacgcaatgaagcgggagatagagaaagaaattccattaatagctgcgtga

SEQ ID NO: 128159 - DNA, 171 bp, Enterobacter cloacae
atgaaaattacactaaggctgccatatggcggccttttttattgcacgacctttctgaaagcgcatcccaccaaataccagacagacaatgccctcaccttatccgctgtggctacggtgccggtgcgctttgcaaaaaagaaaacccagcactatggctgggcttcgtga

SEQ ID NO: 128160 - DNA, 267 bp, Enterobacter cloacae
atggatgagagatacagcaatgcttcctacggtagcgctggtcttgcagctttcttcgccagcctgtctttgcaggattggggcttcattatcggcgtcgcattcagtatcaccctcggcgtgcttacctaccggctcaataaacgtgagcagatgaagcgaacgaagatcctgcaggacatccttaacaaaacagacacagacaatccctccgccactgccagagtgattgctgagctcggacaaaaagctccgaaggaactctga

SEQ ID NO: 128161 - DNA, 495 bp, Enterobacter cloacae
atggatagtgcgctcagaaataaaatagctggcgcaattggtgctggcgcaatcgctattgccaccgcaatgctttccggtaagggaggtcttgagggtagggaatacgtcgcctacaaagatgtcgttggcgttctcaccgtttgtgatggccacaccggcaaagacatcatccccggcaagcgatacacagacaaagaatgcgatgcgcttacgaagagcgatctgactcgcatagcaagacaagtagacccggccatcaaagttccaaccactgaaacacaacgcgccgccatttactcctttgcctataacgtaggagcaagcgccgccattaactcaacgctcatgaaaaagctcaacgccaaagactactctggcgcttgtgatgagctgaagcgctgggtgtttgccggaggtcagaagtggaaaggcttgattaatcgccgcgatgttgaataccaggtttgcacatggagccagaagaatgcttaa

SEQ ID NO: 128162 - DNA, 417 bp, Enterobacter cloacae
atgcttaagaagtggcctataggcgagatcatcaccatagcagcgatagtcatcgtcattcttctgacgcttcgccttgcctcagataacaaaaagctcagtgaagataacgggcgactgtccgagcagattaaagatatcggacagaagaacgaagggctggctaactcgattgatggtctcgtagaacagatcggcgtaatgaacaagattgtggcaactgaagcgcgtcgacgtgctgcagctgaaatgaaagcccagaaactgcaagaagaggtgaaggatgcgctcaaaggcaatgcatgtgctgttgagtatatccctgctaatgctgttatcggggtgcgcaaggcagcagatagtgcgcgaggccataaaggtaaaaaatccgccgatacccgcaaatctactgattga

SEQ ID NO: 128163 - DNA, 504 bp, Enterobacter cloacae
atgtcgctttatccgtttggtagtgtgccgggaccgcaaggcataccaggtcctgcatcatcaacaaggcagaaatcagaatgctacttttcagggctcagcctggtaattccaacaacaccgaccaatctgattaacctgattaaagctctctcgcatacaggcaacctttcgccattcttcaacacgacaacaaacaagttcaacgtttacaacgtgaatgccacctgtacgtttaaggtaaacgttattggcgcatggagcggatcctctactaaccgcagcatgaccatcgacttcccacagacgaacggtaacacgctgagtaaaacgcgtgacgctcaggtaacggtggatgcattgtcatttccgacattcttcagcgttgataaagacggcaatctggcaactaacggtagtgacatcacaatcgtgtcgaacggtgcgacattcaccgccacagcgattctccttgtcgctgaacagatgtttcctaacccttaa

SEQ ID NO: 128164 - DNA, 495 bp, Enterobacter cloacae
gtggcaacgcttggtcaactcgattctgagtttgaccgcctgagacaagaccttgcgattgcttttgctcctgaggttaccaaactcctctccataatcgacacattcaatcaggcaatcagcctggatgactttaccgacgaattcataacaaaggtgtgggacttgaccacaaatgaaacctttggacttgatatatggggaaagattgtaggtataggcaggtatataaccgcgccaatcgacagcgactcattcggtttctccgaggcagacaatggcgcatctgactatcccttaccctttaatgactcaccattttacgcgggagtacaggaaacaacttcagtcaggctggcagacgatgcgtatcgaaccctgattctctgcaaggcattttcaaacatcagcattgcaacaatcccggaaatcaacaaattcctttcgatgctttttttccggaaggggaagggcttattgcacaaattatcgtga

SEQ ID NO: 128165 - DNA, 1332 bp, Enterobacter cloacae
atgaatcgatctgacgcaccatcgaaaaaatcagtgccgttcggcgttaacggtcctcgcgaagctattcttgataccaccccagcaggtaataaccaggcatcatacgatagcggattcccgccgatcacaatgattctgaaatccgctggcggcctccctccgaagggagaggactttaaccagatcctgtatgaactggctctcaacgcccgctggaatcaggcaggtgccggatatcagtttgacagcaccttctcgaccgggattagcgggtatccaatcggcgcaactgttcagaactctaccggtgatggcacgtggatcaacactacggacgggaatacaaataacccagaagtggcgactgctactcctcttactggctggattcccctggacagcaatggtttcactaccaagtcaggcctgacaaacaccaatatcacattgacgaccctggaagcatcgcgcgagcgcattattctttcaggcacgctgactgccaacatcaaccttattgttccagcctggcgtaagaaatggacggtcgtaaataactgcaccggagcattcagcgttacgatcaagactacctctggaactgggattgctgttccggcaggactgacagcatatgtcattggcgatggcacgaacattacacaggatacaaatattcttggaatatctggacgcctgcttggcgcacctcagattttcacatcttctggcacttatacaccgtcaacaggtacaaagtttgtttatgttgagcttattggggccggtggtgcaggaggcggtgcggttgttaccaactcatctcaggtaagtacaggaacaggcggtacagctggcagctatggtgcagctgtattttcttcaggtttctccggcgtatccgtgaccgttggaactggcggtgttggcgtcactggtgcaacaggtggtaatggtggaacctcatcattcggtgcgcttctgtcatgccctggcggcaatggcggaacggttggcacagccggggcaccaagttcggcagcgggagggctttctcctgcgctggctccaactggagccacagtaattgagcgcggtgaaggtggttggggtggtgtagcaaatagtctcacaaacccgcttggcggaagaggtggtcgcggatggtttggttgcggtgctcagccatcaggtccggcgacgacaggcacttcatcagttaactatggtgctggaggtggcggggcatgcaatgcaaactctgctggagccacatttgcagggggtagtggtggtaatgggctttgtatcatttgggagtatgcataa

SEQ ID NO: 128166 - DNA, 393 bp, Enterobacter cloacae
atgtcagatgaatatgcgatcatacgtgatggtgtggtggtaaacagaattaaatatgatggcgtaagtgattatgcagttgatgacgacgcaactcttgagccatgcgatgagtcagttctgattggttatttttacaaggacggtgttttctcaagccctccatcagtaaaaatttcatctgaagaaatgatttcacttaattccgcagagaaggaatttagaatcgagcaggcgaaagcgaaaatcatggtgccacagacaaaacttctgcttgggagggatgtctcagatgctgaaaaggattatctgaacaagtggattgattatattgataaagttcagtctcttgacgtcactgagtcgatggtatggcctcctattcctgagtaa

SEQ ID NO: 128167 - DNA, 351 bp, Enterobacter cloacae
atgttcattaatcgcaggaagtttttatgtggtgtggcgatggcaccggtcgccacagctttagcaagcacagacaaagagagcacgagtaagccttttacaccgggagacgatatgcgtgtaaatgtagaagattttggttgctcaccatcaaaaacaccgcaggaaaatgctaactgccttaattccgctattgatagctgtattagtaatggtattaaaaacctgtatgttaacagtgattttgttgttgatgatgttacagttccggtaagaaataaaacaagaatttttctgcatggcaatgatatccatgacctgcccccacgattagatacaacactcagttag

SEQ ID NO: 128168 - DNA, 231 bp, Enterobacter cloacae
atgagaaataacccctgcaagacggagctgaaagtcgcccgcagccagcgtaacaagctccgtaccatgtcggcaaagctgaaagagatgtgctgcgagtgggacggactcagtggctggctggaaaccgaaaccgagcagctggctgagagtatagacaggcatcttgaggcgctcgaagaccagatccgcgagtggtcagaaggtacggataaccgggagggatattga

SEQ ID NO: 128169 - DNA, 633 bp, Enterobacter cloacae
ttgaaccacaaagtggttcaacgtctgatgaatgtgcttcgtctcaaagctgcgataagagttaagcgttacagttcatggcggggtgaacatgggcgcgctgctgacaatatcctgcaacgaaacttcaaagccagccggcccaatgaaaaatgggtcaccgatgtcactgaattcgctgtaaatggccggaaactctatctttctcccatcatcgacctcttcaataacgaagttatttcctacagtatttcagaacgcccaaccatgccgatgattgatgagatgttgattaaggcatttgccagaatggatccaaacagcaagccagttcttcattcagatcagggctggcagtaccgtcatcgatggtaccagtatcagctccgcgattttggcgtcacgcaaagtatgtcccgcaaaggtaactgcctggataacgcctgtgcagaatgctttttcgggactttaaaatcagaatgcttttacctcggtaaatttaaggatatagatgaacttaaggatgctattgaggattacattcggtactacaacacccggcgaatcagccttaaatttaacggtctcagcccagttgaataccgtctgaaattccatccattgcgcatttaa

SEQ ID NO: 128170 - DNA, 363 bp, Enterobacter cloacae
atgaaaacgttaacggtgtttgacccggcaatgtgctgcagtaccggcgtatgtggctcagatgtcgatcaggttctggttgatttttctgctgatgtgcagtggctgaaaggacgtggcgtacaggttgaacgttacaacctggcgcagcagcccatgagttttgttcagaatgagaaagcgaaagcattcctcgaagcatctggtgcagaagggcttccgttactgctgttggacggtgaaacggtgatggcagggcgatacccaaaacgcgccgagctggctcgctggttcggtattccgctggagaaggtagggctagctcccatcagttgctgtggtggtaatacttcctgttgctga

SEQ ID NO: 128171 - DNA, 426 bp, Enterobacter cloacae
atgagcaacatcaccatttatcacaacccggcctgcggcacgtcgcgtaatacgctggagatgatccgcaacagtggtaatgaaccgaccgttattcattaccttgaaaatccaccttcacgcgatgagctggtcaaactcattgcagatatgggcatttcagtccgggctttgctgcgcaaaaacgtcgagccttatgaagaactggggcttgctgaagataagtttactgacggtgagttaatcgattttatgcttcagtatccgatcctgattaaccgtccgattgtggtgacaccgctgggaacgcgcctttgccgcccttccgaagtggtgctggatattcttccggatgcgcaaaaaggcgcatttgctaaggaagacggcgagaaagtcgttgatgaaacaggtaagcgattgaaataa

SEQ ID NO: 128172 - DNA, 537 bp, Enterobacter cloacae
atgcacattattaatgctgaagaacagcacattaccgcgatacgcaatatctatgctcaccatgttctgcatggtacaggtagcttcgaaaccgaacctccggatacgcaggaaatgcttaaccgactgaggagcattcagtctcgaggatttccttggtatgtcgctctgcatggcgatacggtcatcggctactgttatatttcccgttaccgcgaacgccatgcctatcggtttacagttgaaaattcgatatatattgatccgacttatcagcgccagggcgtcggaaaagcactgctcaatcatgcattaaaatgggccgagtcccagggatatcgtcagatgattgctgtcgtaggtgacagcgctaacgtcgcttctgttgcgcttcatatccgcacaggatttactgaaataggcacattaaaagacattggtttcaaacatggccgctggcttgacacggttttgctgcaaatgaaacttggtgaagggaatcgtactctgccagaagattcagatcttatgctctga

SEQ ID NO: 128173 - DNA, 1758 bp, Enterobacter cloacae
atgaatattccatttttaaaagacattcccccgttcatcttcttcactggcaaaggtggtgtgggtaaaacatccctggcatgtgctactgcggtatggctggccgatcagggtaaaagaacgcttctggtgagtaccgatccggcttccaatgtcggccaggtatttagccagactatcggccaccgaatcacagatatcagtaccgtagaaaatcttgccgctatggaagttgatccgatggctgcagcacaggcttatcgtgaccgcgtgctcgacccggttcgcgggctgatgccagccgatgtggtcagcagtattgaagagcagctctccggctcatgcaccacagaaatcgctgcgtttgatgagtttactggtctgctgaccaatcatgagctgcgggaaaaatatgaccatatcgtatttgataccgcgccaaccggtcacaccatccgcatgcttgaattgccgggagcctggagcggttatctcgaagcgaaccctgatgccgctgcaaaccttggacctctggtagggcttgagaaacaacagcaccagtactccgatgcggttaaagcgctgtccgacgcagctctcacacgcttagtgctggttgcccgagctcaggcttcaacgctgaaagaggtttctcatacgcacgatgagctttctgttattggtttgcagcatcaacaccttgccatcaatggtgtgctgccgccgtttgctggtgaggatgacccactggcgcaaagtattctggttcgggaagaaaaagcattacaggcaatgcctgataatctggctaatcttccccgctcgcagctgtatctgaagccatttaacctggtcggcctggaagccctgcgggagctatttacccagagcaaagccgcaccggctctccctgataccacgttgaatgttctggatttaccgaaactgtcttcactggttgatgaactgagccaaactggcaatgggctggtcatgacgatgggtaaaggcggtgtaggtaaaacgaccattgcagcgtcagtcgcggtatcgctggcgaaacgtggtcataaggtccacctgactacatccgatccggcagcacatctgtcttacacactggatggctcgctgcccaatcttcaggtcagccgtatcgacccgaaggtagagacagaacgttatcgccgctttgtcctggaaaatcagggcaaaggattagatgcagaagggctggcggtgcttgaggaagacctccgctcaccatgcactgaagagatcgccgtcttccaggcattctctcggatcatcaaagaagcagacgaccattttgtcattatggatacagccccaacaggtcacacgcttctgctactggatgcaacaggagcctatcaccgggaaatggtgcgccagatggggcaaacgcatgacaatttgttgacaccaatgatgctattgcaggacccggagaagacgaaggtgattatcgtgacgcttgccgaaacgacacctgtactggaagcagcaaacctgcagcaggatttgcgtcgtgctgaaattgaaccatgggcatgggtaatcaatagcagtctggctgctgcgaaaccgtcctcaccgttcctcgtaacccgagccaatcgcgaactgcctctgataaatgacgttacagagcagtttgcagagcgtattgcattaacaccgctgcagaatgaagaaccagtgggtgcagctctgctggcaaaaatggcaggctaa

SEQ ID NO: 128174 - DNA, 363 bp, Enterobacter cloacae
atgtcaaatattgagatctttgaagcagcaggctgctgcgcaaccagtagcgttgtggtcagcgacgaagccatcaaatggaacgccagcgccgaatgggcgaaaaaaaatggcgttgatattcagcgctacagccttgcaaagaacccgcaacagttcctgaatacgcctgtcattaaagagtttctgaacacatcagggatggagtcccttcctgtcaccttgctcgacggcaagctagtgatggcaggcaaactgccaactcgtgaagatatcgcccgttgggcaggtattccgcttactcaggactggagtgaaggcagcacgcaaccacgctgctgcagcattccacgcatgccttaa

SEQ ID NO: 128175 - DNA, 546 bp, Enterobacter cloacae
atgagtgatgtaacggcattcaacaactgcatgagcgtgttctggcggcaacatgaagccgaactcgctcgatttctgacatcgaagacaggcgatagcgaaaaagcagcagatcttctgcaagagctattcctgcgtgcccgcgctcattcagacagtttttgtgagatggagaatccacgagcctggctgtaccgggctgcgaggaacctgctgattgatgagtaccgcaccaccagggatttcgttgagctggaagaagatgccccattaactgacgcatcccctgaggcaatctcaacgctgggtatttgcctgcctgaaacattacaggcattacctgaggatgagcggtggttgattgaagaatccgaccttaaccggcgtccccagcagtctctggccgatgaactgggaatcacgcttacggcgtttaaatctcgactacttcgggccagaaagcacctgaaagaagcgatgacagaactttgccaaattgaggcggatgacacttcttccgtctgctgccacaaaaaaatgaattaa

SEQ ID NO: 128176 - DNA, 714 bp, Enterobacter cloacae
atgcccactgaacttaaaaatgttgatgcaggcctgttcgatacctccatcacagaggcaaaattccacgtacctgcaattccccaccctccccgtatcctgatgctgtatggctctgtacgtgaacgctcatacagtcgactggcaacagaggaagcagcaaggttgctgactgccatgggcgcagaggtgcggatcttcaatccatctggcttgcctcttcctgacgatgcacctgaaacgcatcctaaagttatggaactgcgcgagctggttcgttggtccgaagggatggtttggtgttcacctgaacgccatggtgcgatgaccggcatcatgaaggcccagattgactggataccactttcggaaggcgctgttcgcccttctcagggtaagacgctggccgttatgcaggtctgcggtggctctcagtctttcaatgccgtaaaccagatgcgtattcttggccgatggatgcggatgatcaccatcccgaatcagtcctctgtggcaaaagcctggcaggagtttgatgaagatgaacgaatgaaaccgtcgtcttattacgaccgcatcgtagatgtaatggaagaactggtgaaatttactctgctgacccgaggtaactcagcctatctcgttaatcgctacagcgaacgaaaagagtcggcagaagaactttcccggcgagttaatcagagcaaaatttga

SEQ ID NO: 128177 - DNA, 324 bp, Enterobacter cloacae
atggaacttatcagtgcgtcgacggtgctgaaagaacttgggcatgctacaaggctagggatttacaaaaaattggtcaaagcagggcctcagggcctgcccgtgggcgatctacagaagcaacttgagatcccagcatcgacactgagtcatcatatttcatccctgatatcagtatcgctggttcgtcaggaacgtcagggaagaactctgtattgccatgcctgctatgaaaaacttagtgcgctgattgcctttctgacggaagaatgttgcacaggcgcagatggactgcacaataccaataacgacgtcggagaataa

SEQ ID NO: 128178 - DNA, 267 bp, Enterobacter cloacae
atgaaatcagatgttcaacttaatcttagagcaaaggaatcacagcgggcgctcattgatactgctgcggaaattcttcacaaatcacgaacagacttcatcctggaaatggcctgtcaggccgctgagaacgtgatcctcgatcgccgggtctttaattttaacgatgaacaatatgccgaattcatcgacatgcttgatgcccctgttgcagatgatcctgccatagataaactgctggcaaggaaacctcagtgggacgtgtaa

SEQ ID NO: 128179 - DNA, 486 bp, Enterobacter cloacae
gtgggacgtgtaacagttccagaacctttatccagctttcatcaggtggcggaattcgtttgcggtgaaactgttctggatgactggttaaagcagaaaggcctcaaaaaccaggctctcggatcggccagaacgtttgtagtgtgtaaaaaagacacgaaacaagtagccggtttttactctctggccaccgggagcgtcaaccatacagaagcgacaggcaatcttcggcgtaacatgcccgatcccatccctgttattatacttgcccgtcttgctgtcgatctctctttccgcggaaaagggcttggcgctgatttacttcatgatgcagtgcttcgttgctatcgggttgccgagaatattggtgtacgtgcaatcatggttcatgcactcaccgaagaagctaaaaatttctacattcaccatggtttcaaaccatcacaaactcagcaacggacattatttcttaaactccctcaatag

SEQ ID NO: 128180 - DNA, 729 bp, Enterobacter cloacae
atggccaacaaacctgaaaacgaactaaagagtgaaattggtactcgtattcgaactcagagagaggctttaaaactttcgaggagttatgttgcggataagcttggggtcgcgctatcaacgctccaagcatgggagaatgaagacagggaacctagtgctactcatatactcaagctttctgagtgcctgaatgcatctgtagcatggctagtcgcaggtgatgaagtggcagagccctccagttctttgccagtagtaacatctgggtcaactgctattgatgttaagggcaacgaagtggacctagaagagtttgtctttgtacctagatacaatgtctctgcatcggctggttacggggctttaaatgacgatgaaagcccgatgtttactgtcagcttccgccgatattgggttgtgaatcatcttaaggctgaccctaggaaattatcagttatcagtgtcataggtgactcaatgatgggggtcctaaatgataaagacgtcatccttgttaaccatggggatagagatcctcatgagggcatttatgtcattcgcttggatagtcaattacttgtcaaacgtgtgcagcgcttaccgggtgctcagctcaggattagcagcacaaatccagcctttgagcctttcctgattgatttggataacatcccaagtgatttcgacgtgattggtaaagtagtctggtacggaagagtaatttag

SEQ ID NO: 128181 - DNA, 723 bp, Enterobacter cloacae
atggatactcaagcactcttgccagctactaaaacgtttaaaaaacgcgccagtataaagcaatctaacgaattgaccgaagccgcatattacttgcctcttcaggcaaaacgtgtgctgtggttatgccttatgcaggcctatttcaacgacagtcaggatgatgattctgacgtattacctcttttcaaaattagcgtttccgattacgtcaaatacttcaatgtcgctacgtctgtcgccagtcgtgatgtaaaggctggagtaaatgctttgggcgaatcaacggttaccttctatccaaaagaaggtgagtttgaagaggttaaacgtccgtggctggctgaagcaggaatgaagagaggccggggttcctggcagattgagtttaactacaaggtcatgccattccttgttggcttgacgtcccagttcacgacctattctctgtatgactgtggtcagcttaatagtgttcgtgtcatccgcctttatgagagcctgtgccagttccggagcactggtgtctggatcaccacacatgactggttatgtgaaaggtttatgcttccaacctcgcagaagaacaatattgcggaaatgaaacgtaccttcctggaacctgcgctgaagaaaattaatgagaagacgcccttaaaggtaagttatacaaccgaagaagatggtcgcttattgtttaattttcttgataaaaaacaataa

SEQ ID NO: 128182 - DNA, 153 bp, Enterobacter cloacae
atggccagcagggagtgtgggaaacacgtcaacttcgcggacagtcatgactgtgggaaacaggtcaacttaattgccggccgggactgtgggaaagaagtcaacttagagggcagcccgaactgtaggaaacaggtcaagttcggcatgtga

SEQ ID NO: 128183 - DNA, 228 bp, Enterobacter cloacae
atgaaagccccaggaaagtcaataaaactagcgcctcctaaggaggatgagccaactctggatgttaccggaaagggagctgcgcctgattcgtcggttaaacctatccaaatcaaagtgccggtatctaagcataaagagatgaaagcttacgcggcagaacagggaatatcgatgacagatatgctccttgcaggatatgaaatgtatcgcaataaaatgaaataa

SEQ ID NO: 128184 - DNA, 627 bp, Enterobacter cloacae
atgggaaaggttatatcgatcgttggtcagaaaggcggaggttcaaaaagtaccaaagccagaacacttgctgttgggtttactgaagctggatggaagactcatctggcggatatagacacgaagcaacaaacctctctgaagtggacagaacgacgcgagaacaatggtctaagtcaaattgactgcgctctttaccgccgggtagatacagctgtcaaaatgaaagatagctgccatttgcttatcattgatggtcgtcctgcagcagagacaacatcactggatgtggctgatgaatctgatctcgtgatcataaccactgggaccacaattgatgatctggaaccttctctggaacttgcccgcgaattgattaaaaagggcattgagaaaaacaaaatcgtattcattgtcgctaagtcaccatctcagtcgcagggcgaaaaagctcaggaaacaatcaaagcgtggggcttcaaagttctcaatacaatcattccattcaaaaccagttacggcgaggctctggatgcggggcgtgccctccatgaaactcctttcaaatccttaaacgaaacggcaaaacaaatgattgaagagattcatgatatcattaactcatga

SEQ ID NO: 128185 - DNA, 1284 bp, Enterobacter cloacae
atgaaacagtacacattgaaaatctactttggagataaatctgagcctgctttttttggtggcgacaggcaggatgattcatcgaatacgacaccgttccaggtggctcttaaaaagtcgcgagactgtaattcatatgccgcttgcttatgtacgggtaaagaattgccactctctgtgaggctccgagtggagaaacatcatttagctcgcttcccactcacgggtataaaacacagagaggactgcagattctatagtagcctcagtcctgaagggccgcaggggtgttatacacaggacgcattgaaagagaagccagatggaacaatcaatattaagcttgattacccattgcaggtaaccggtccgtcaactcccatagatagttctctgcgttctggtgatgcttcacggaacaataaacgcgacacagtttctattcttggtcttctgcattttatctgggagacaaccagctataacacatgggtacctaaaatgaacggtatgcgttcatccaccaaactgggttatcacttgtttaagcaggcagaaaagatagaagcaggcaaaacaaaattatctgacgttctgctcactccggcctacacgaactccagcgatagcagaagaaacagcatgactgtcgaacgtgcgaaagttaataaacaacgtcttgtagttattgctgagcttgctaagttctctgaaaattacatggatggattaaatcgacttcctgtacgtgacttttccggcatgccttttctggggcttgatgatgacagatggaagtctgcgttaagcagattcccaaatgctgtgaatggctggatgaaagggatgaaggtatttgtaatcgctgttacggatgttcctggtgcaaaatcagcccaggtgagacagctggccctgatgatggtaagtgatcgctacataccacttgattcattgaatgaaggggcgtttgaacaaaagctattcgagctggagcgatcgttttacaaacccctacgttatgattcatccactcatgaatacctcgcggatttttgcctcactgatgtttctacagataaccatttaccaattcctgtggaaatatgggggatgaacactcctgattatcaagaacatcggatggtaaaggaaagatggtacaacgcaaattatggcgcaactggttggttagcatgggatgcaactcgaacatctgtagacagtatagaatcgcttttgccaaagaaaatgaaatcattatatcatgatatcatcaaataa

SEQ ID NO: 128186 - DNA, 171 bp, Enterobacter cloacae
atgatttgcgcgttgccgctatctaaagggatcaccttcctgcaaaactgctttagcgggaaggtgattctgtccagcggccacaaaaaagccgcccagaaggacggctataaacttttatgttttaccagttggtactggctgagcaccttaacggaaactcttgattag

SEQ ID NO: 128187 - DNA, 783 bp, Enterobacter cloacae
atgatgccggcaatacctggccagggcgtttccttttctgccgcgcagctgccggtggccatcgactaccccgccgcgctggccctgcgccagatggcactcgttcaggacgaactaccgaaatacctgctggcgccggaagtgagcgccctgctccactacgtccccgatcttcaccgtaagatgctgctggccaccctgtggaacaccggcgcccgtattaacgaagcgctggccctgacacggagtgatttttcgctggcaccgccctggccgttcgtgcagctggccacgctcaaacagcggaccgaaaaagccaccagaacggccggccgcgctccggccggtagtctgccccatcgtatcgttccactttccgatccgcagtatgcccgccagctggaaatgatggtggccaccctgaaaattccgctggagcgccgtaataaacgcaccggcagaaccgagaaggcacgcatctgggaaatcaccgacaggacggttcggacctggataaatgaagctgttgatgcggctgccgccgacggggtaacgttttcggtaccggttaccccgcacacgttccgtcacagctacgggatgcacatgctgtatgccggcattccgctgaaggtgctgcagagcctgatgggacacaagtcagtcagctctacggaggtctacacgaaagtgtttgcgctcgatgtcgcggcacggcaccgggtgcagttccagatgccaggcgatgaagcggtggcgctgctgaagggaaatggcaggtga

SEQ ID NO: 128188 - DNA, 330 bp, Enterobacter cloacae
atgtgtgatttatgcagggcggagggaaattacttccatacgccggaatgtgtgtatgaccagctggtcagtgagtatcccgtgatgtggctgcgggactcgacccggatcggcgcctgctacaccctccgtgaactgctgtcgccggaagggatggtactggccatacagaacgcaccaccgatgaaggggtggcggcttcgcatgcgttacaacgaagccattgacgaagaaattaacccacagcacggtgactgtatcgagctggcctccagggcggacgccctgcttgccttccggtctttgcaggatgacaccgcgtcagcttaa

SEQ ID NO: 128189 - DNA, 996 bp, Enterobacter cloacae
atggcgaccacagtaatagctgcctttaacgaatttatgaaagatatcgtgaatctcaaaaaggcagataccgatgacgcgcgtgcaagtcgcgactggcttatcggtaagatgaatgattttgagaaggacgataaatttccggtgagttatccagcgatccatattgcctttggatcctttgccagaagaaccaaaatccgtcctctggacgatatcgatctgatgttcggcttatccgcgcagagtgccacctataacgttctgagtgaccggatcactctgacctcttccggcgaggggtcgcgcctgcacggatatcggcattccggagttgacactatctgctccgtcagaattctgaatgcctttaaaaaccgcctgcaggacattgcccagtacgcccaggctgatatcaggcgtaaccaggaagccgtcacgctgaaactggccagcaaggactggaattttgacatcgtaccctgctttattaccagcgaagatgcctttggacggacttactatctgatccccgacggtaaaggccactggaagtttaccgacccccgcaaagacagggacagagtcacaactgtcaatgtgcagaatgacggcaatgtgctgaatgtcatcagagcagtcaagtactggcagcggcgaccgacgatgccctccatgagttcctacctgctggagacgctgattctggactattacgccggcagggcaacctgctcatcgtttgtcgatatggagctggaagcgcttttccgccatctcggtctgtacgtacagttctccgtcaacgatcccaaaggcatacagggagatatcaactctctttcagccgaggcgcgtaaggcgatttctgacagatgttatctcgatgcgcagaaggtatcggaggcgagatggtttgaggagaacaaagagtatgaaaaatccatcaataaatggcgcgatgtgttcgggccgttctttcctgtttacgggtga

SEQ ID NO: 128190 - DNA, 933 bp, Enterobacter cloacae
atgaatgccatttacacgaaccagtcgaccagagaaaacctggatttactgtatgcgcaggcccgtgtttacgacagggtaaaaaactggaacaggctgaattttatcttcagcatcatcgtgccgcttctgctttcgctcgttaccgtatacaaccggagccgaggctttgtcgattcagagctactgtcttcactgctggggttgtatggactcctggtgcttacttttaacattatcatcagcggacacatcgcagcactgcgcaggaaggcagcctcaatccaggaaatgtatgactgtcgggtactgggcatccggcgcaatgacctgaaggtggaggagatccctcgcgatgacatcatccgggaagctgcctatttcagggacagtccggataaagcacgaaagcgatttggcgaagaggggtggtacgtcagtaaggtgtatgacgcgccgctggccgtaatggcgctcctgtgccacggaaaaaacctcggctgggacaaatcgctcagggaggtgctgcacgtgttttatctttcagcttttattgtctcgcctgtcgcgatgcttgtttacggcatcgccatgaaatccggactgaatgagatcctcttctatgtggtgttcacactgccggtcatccgctatttcttgcttcagtttctggataatcgcagcagtatgaaaagaagcgagaagctgaaaaagtacgttgagaaggaattatccggcatcagggtgtccggaagggcagaagaagagcaactgggttatacgctccggaatatccaggatgagatgttcgcctaccgggcctcatgtccgcccgttcccaacggtattcagctgataatgaagcccaaaaatgagcgaatttatgttgattactttgaaacgaatctgaaggagctgcaccttcaggagtaa

SEQ ID NO: 128191 - DNA, 2463 bp, Enterobacter cloacae
atgttaagtatgcgtcgacatgccaacttcattaaacgttttaagtctgtaagctgtttatttacggcaagcattcttttcccgatgccaatctctgcggcggtatcagattatgacgctttggttattgaagcgcggggaggtaatagcgcaccgctattacgtttccttgaggatcagggaaagaaaagcgcgctaacgccaaatcaggttgccgactggctgcaagtttccagttgggtcgataacaacgataaaaccacaattgaaatctggcagcagtatcgtggacagatgaatgtacctgcccggggcaaagtcgccgctgcacgagcatatcgcaaccagaagaactggaatgattctttagccatctgggaaagcgttttacaggaagagcctgataacgtagatgtacgtaccggctgggtaatgacgttggcggatgctcgctacaatcagcaagcccttactgaagcgaataaatgggcgcaggcgcatcccggggctgattctgatgcgctacttgcctatgtctaccattcgcagggaaaaaactgggatgcattgttagttgccagcctggcggatgacgtcgatccaggcaaaaaaaatgcaaaatccacattgctgtctgcgctgtcagcaaaccgcgtttccgggcccgccttaaatatggcagaggtggtaccaactgccgatccggtgaagcgtcgccttgagcttgatgcggcggctgaaatggtacgttcctcttatacctctgcgcgtaatgaagaagagcgttttatcgtggctgataaagcgctagcccgttatgaccagttgctgactgcctggaaagatgagccttctgcgcagaatgatgtccgtcgggccagaattgaccgcatgggcgccttgctggtccgtaaacgcacttctgaagtgattagtgaatacgaatcgctgtctgcgagcggcgaggtgccaaactacgcaaaacgctgggtagcatcggcatggttaagcgaacggcagccggaaaaaaccgaagcgatgctgatgagcatctactatccgaacggaccgattccggttacgccgctcggtcctgaggatcaacaggatctgttctacgcgcacatcgataatgaaaactttgatgcagctaaaaaacaggtcgatgcgttaattaaagacagcccatatctgcgacgcatctatggttcgccaacgccgcagccaaactataactggctgctgggacagtcgttgctgacgcaatatcatatcgctgccaatgaactgccggaggcagaaaaactcgcagagcatctggcgcgaacaggctcgggtaaccaagggctgcgcatatcctatgcttctgttcttgaagcccgtggactgccgcatgcggcggagaaagagcttaaactggcggaagtgattgagcccagtaacctggaactggagcgtcagcaggcctatgtggcgctggatctccaggagtggaagcaggccgatgaactgacggatgacgttattgctcgcagtccggatgatgaagcgacgctgcgcctcgcacgcatgcgtgatgtgcataaaatgtcggaagtacgtattagcggcacgcaggggatctcgtccgatagcccggtcagcggtaagaatgatttcaacatcaacacggccatttacagcccgccaattaatgacaactggcgactgtttaccggattcaacttcgcaaccggcgagtttgaggaagggaaagggattagccgcgatctggcggctggtgcggaatggacttcccgtgattactgggccgaaatggaagtgtctggccgaaactatggcgatgggcagaaaataggcggtcgtctttccgcctggcatgatttcaacgataactggcgcgtgggcggttcggccgagcgtctttcgcgcaacacgccactgcgcgcgctgcgtagcggcatatatgccaacagcggcgatttgtttgttcgctggtatcaaaacgaacgacgtgaataccaattgtcgtttgccgcatcacatttctcggatggtaacgatcgcatcgaatatgggctgagcggaaaagagcgcatgtggaccacgccgcgctttacgctggactttaccccgggtatcggtgggagcaccaacactaaagagaatgtgccgtattacaaccctaagagtgatttttccgttgtgccaggcctgagcgcggaacaggttctttaccgccattatgacaccgtgtggacccagcaaggcatagccggagtgggtggctactggcagcaaggtgaagacgttggcgctatcgttcaggtgggatatggacaacggctcaaatggaacaacgtcgtagatggcggggtgatgctggtttgggataaacgcccctatgacggtaaacgtgagcggaatatctccctcgctttcgatttaaatgtcaggttttaa

SEQ ID NO: 128192 - DNA, 2022 bp, Enterobacter cloacae
atgctgaaaagatgcctgtggcttagcgcattaatcgctggctggttgatgattaccgcgtgcagtagcgcgcacaatacaacgcctcgctatgttcctcccgcagagagaacgccgttgacggcagatcatccatggccgaaaaacagcttcctggtgctcggctatcatgatgttgaggatggcgccgccgaccagcgctacctctccgtgcgcaccagcgcgttgagcgaccaaatggcctggttgcgtgataatggctataacccgattagcgtgcagcaaattctggacgctcatgacggtaaaattgtgttgccggaaaaagcggtcttactcacctttgacgacggatacagcagtttttatacccgcgtctggccgctgctgaaagcctacaactggcctgcgctctgggctccagtgggcagttgggttgattctccagccaataaaaaagtcgattttggcggcttaatgacggcgcgagataaatttgccacctggaagatggtcgaggaaatgggcaaatcgccgttggtggaagtgggggcgcacacctggaactcgcatttcggcgctgaggcgaacccgcaaggaagcaaagaacctgcggtggcgaatcgccttttcgataagaaaacagggacttacgaaaccgacgaacagtacaatcgtcgcattaacactgatatctcgctgatcaccaataagattaaatcggtaaccgggaaatcgccgcgcgcgtgggtgtggccttatggtgcggctaacggcaccaccttaaagctggccaaagaacatggctataagatggcctttacgctcaatgaagggctggcgaacgctgcgtttcttgatgatatcccgcgcgtactgatctctgataacccgtctctcaagcgctttgccagtcaggttgctcaggtacgtgaaccacaaacgatgcgtgtgatgcacgtcgatctggattacgtgtatgacaaagatcctgcccagcagaagcgaaacatcgacaagctgatccagcgtgtttatgacatgcgcatttctcatgtcttcctgcaggcgtacgccgatcctaaaggcgacgggaatattcgcgaactctatttccctaaccgctggctgccgatgcgtgccgatctctttaactatatctcctggcagttacaaacgcgggccggggtgacggtatatgcctggatgccggtactggctttcgacctcgatgcttccattccacgcgtgacggcatgggatccgaaaacaggacgcactgcgatcaatcacgagaactatgtgcgtctgtctccctgggacagcgaagcgcgtaaacgtatcactgaaatctatgaagacctggcgaagcatgccagcttcaaagggattttgttccacgacgatgctttcctgacggactttgaagatgcgtcaccggaggcgttagccgcctaccgcgccgcagggcttccgggaagtattgagcaaatccgtagcaaccctcaaaccttcgaacgctggacgcgcctgaaaagtaagatgctgatcgactttactaagcaactgacgcaatcggtacgcaatattcgcggtccgcaggtgcaaactgcccgcaatatatacgccatgccggtactggagcctgaaagcgaagcctggtttgcgcaaaacctgaatgatttcctcaatacctatgactggacggcacccatggcgatgccattcatggagcagatcccggctaatgatgccaatgcctggctcgacagattagtcaatgccgttgcacaaacgcccggcgcgctggacaaaaccgtgtttgaactgcaggcacgagactggcgtaaatccggggacgaggcagaaatcagtggaaaacaaatagccgaatggatgcgccaactgaaactaagtggtgcaggtaactacggctattatccggatgatttcatcagcgacaaacctgagatgtcagagattcgctcgacgttctcctcatactggtacccgcaaaaatga

SEQ ID NO: 128193 - DNA, 1335 bp, Enterobacter cloacae
atgaccgatcgcattattgctttcctgatactttgcctgatgttcagcctgccgtttggcgtggctgtcatctttacaggtgaagtcatgttgaacttcgtcttcttctggcctttattcatgtctgcattatggataagcggcggggtctatttctggttttatcgtgagcgtcactggaaatggggagacgatacaccgccaccgacgctggagggaaatccgctggtttccattttgatcccctgctttaacgaagggatcaacgcgcgggaaaccatcggcgctgcgatggcacagcgctacaagaatatcgaagtgattgccattaatgacggttcaacggacgatacgcacgatgttctggaacagttggcgattgagtaccccagcctgcgcgtcattcatctggctgaaaaccagggcaaagcgctggcgctcaaaacgggcgcggccgctgcgcgcagcgattacctggtgtgtattgatggcgatgcgttactggatcgcgatgccgtggcgtatctggtcgctccgctgatccagttcccacgcgttggggcggtaaccggcaacccgcgtattcgcacccgttccacgctaatcggtcgtgtgcaggtcggtgagttctcttccattatcggcttaattaagcgtactcaacgagtctatggtcagatctttagcgtctctggcgtagttgcggcgtttcgtcgtcgcgcgctggccgaggtggggtactggagcccggacatgatcaccgaagacatcgatatcagttggaagctgcaattgcgccattggtcgatattctttgagccgcgcgcgctgtgctggatcctgatgcctgaaacgttaagagggctgtggaagcagcgcctgcgctgggcgcaaggcggggcggaggtgtttattgttaacatgcgccgtctgtggtcgtgggagttccgccgcatgtggccgctatttttcgagttctgcttttctaccacgtgggcatttgcctatgcgatcagtatcgtgctgttcctgctgggactgatgatcccgatgccggactcgctgtatgttcaacatctgttcccgccagcctttaccggacttattctcggcgtggtctgcttaatacagtttgcgataagcctgatgattgaacgacgctatgaaaaaggcattggcgcctcattgttctggataatctggttcccggtggtgtactggctgttgagcctgtttaccacgttggtgtcattcccgaaagtgatgctcaaacgcaaacgcggcagggcgcgctgggtgagtcctgaccgtggaatagggaggatcgaatcatga

SEQ ID NO: 128194 - DNA, 507 bp, Enterobacter cloacae
atgagtcagccgctgatctttacggagcggcgtctgctgccgcgcatcattgacgttctgttaacgatttttgcctgggttggatttttatacttaatctacaaagggctgattacggccctggcgcattcaccgtatatgggcgtgcgtccctttttcaccacgctggatacggtcacgttttacatccttgtcgcgctggtcaacggactggtgctgatcggctgggcgaaatacaaccagtttcgttttcgggtggagcgtcgcagtcgcagaccaggactggaagaccatgagctggcggaaagtttacgtattacccgtgaactggttacagagttgaacaaagcgagggtgctgacggtccatcaccatgagaatggcgaaatcagtcatatcgatgtggacaagcacatcgccgataaccgcctgccgccgccgacgcctgcaatgctggaatatttgccgccggagcgggagccattgttacagaaaaggcccgagtga

SEQ ID NO: 128195 - DNA, 999 bp, Enterobacter cloacae
gtgaaaaaaattttatgggtgaaattcggctggtcagaatattatcggggtggaccggttaatggtaattttggttggctaaatgaaaataaaaaatacgagcgacggggtcacgaggcgttcaactttgaacctgcacctgatggcacttattattgttatgttccgccacaagcaaaacattatgcccctttaaacgaagacccgcacggatggacagttatttgtcttgcgaaaaatcctcgacgcgccgggatccacattgttggatggtatgaagatgcaacgttgcacggaaaatggcttgttccgcctgacaatgagataaaaaaagcgggggatattaacgtatcttatagtgacaggtcatactgtatttcagcccagaaagcctattttattcctcccgacaaacgaaacgctccgttctccgatccctccataaaacaagggaaatattcctttctcgaaggacctggggtggaaatcaacgacaataagatacgcgtacttaacttgctgaatcaacggatggaaaaaatctctccctttgccatccttaatccaaacgatattaactctcccgaccctgaacttaatacaatcgatcccttaacgggattcggtactccagaacataggaaacgtgtcgaaaagcgcgccgaagatatcgtcattacacattacgagaaaaaaggttttacctgcaaacgtatgacgcatctgccctgcggctatgatttctcattcacgaaaggtgaagaggagagacatattgaagttaaaggcacatcaagctcaaccccgcaatttttccttacacggaatgaacatttgaagggaatgcaatctaattcaaaatggcgtctggcaatggtgacttctgccctttctgaatcgccgaacttaattgaatatactgcccgcgacctgaaacgcgtatttgagcttgaaccttatgtttatattggaagatttcttcccacagtaaaggaataa

SEQ ID NO: 128196 - DNA, 690 bp, Enterobacter cloacae; identical to SEQ ID NO: 103905

SEQ ID NO: 128197 - DNA, 582 bp, Enterobacter cloacae
atgaacgaaaatttacgtaatgctcttcctcacaaaaacacaccatttctacgtgtgctgcatatcatcgtagctgtattgattttattgcagattattaattcaaaccttaccgaaagcgatgcgcttagtgactatactctcactgggttcgtaacatggttccatgttatcactgggttatcactgattgtccttgggtttgtcatgcttgcatggatgctgacacaacgaggatttcgttactattttgcctgggtggtccttgattttcgaggtgtggttgaagatatcaaaatgctgatatcattccgtcttcctgaagctcatgctggtgggattgctgctctggttgaggggcttggtgtacttgcactattgggcgttgcattatgtggtggattctggtttgctctcaatactgctcttggcacgtcacctgtgctgacagaaaccgtcctgcatgtgcataagtttctgactgtatttattgaaacctatttctgggcacatggtgcgatggggttgctgcatatcttcctcaccgttcgtagccaaaggaaaaatcccgttaccgaatag

SEQ ID NO: 128198 - DNA, 375 bp, Enterobacter cloacae; identical to SEQ ID NO: 103903

SEQ ID NO: 128199 - DNA, 939 bp, Enterobacter cloacae; identical to SEQ ID NO: 103902

SEQ ID NO: 128200 - DNA, 615 bp, Enterobacter cloacae
atgaatgtccgtatctattgccgtgcatctaccgaaggccaacatgctgatcgtgcattagttagcctgcgcgaatttgcgcaaagcaaaaactggcaagtagccggagaatacattgagaatgccagcggtgcgaagctggaacgtgtggaactgatgcacctacttgccgaagcacggcctggcgatttgcttctaattgaagcgattgaccgtctcagtcgtcttcaacatgaagaatgggctgaactcaaagctacgctgaacagtaaaggactggttattgtttcgatggatttgccaacaagctggcagatggttgaaatgtctggtaacgaccttactagcggcattcttcgggcagtcaatgctatgctgatcgatatccttgcgacaatggcacgacaagattatgaaacccgccgtaaacgccaggcacaggggatcgagagagcaaaactggcaggtttgtatacggggaaagaaaaagatatggaagcccgtgaaactgttcgcgaaatgctggcgcagaatgttaaaccagcccacatcatgaaagcggcaggtatcagccgcgccaccttttaccgaatcaagaaagagcttttgtgttaa

SEQ ID NO: 128201 - DNA, 246 bp, Enterobacter cloacae
gtgcagagcctgcggccgctgattgaatcgctcacgcgtccgggggctattgtccttgatccgttcgccggcagcggctccacctgcgtagccgccgccgaagccagccgccgctatatcgggatcgagatgcttgagcagtaccacgccgccggcgttcgacgtctggcacaggttgaacgggcgagaaggatgccggcggccaatgacggtgcgttttaccccgactatccggaggcggcatga

SEQ ID NO: 128202 - DNA, 222 bp, Enterobacter cloacae
atgaactacccgggccttgaacacctgcgcgcggacgtggccgcgctcagcaatgccatgtgtgacgtgcggatgctgctgaaccgcctcgaatcgcagcatcggcacgacgcggcaacgcttaccgaacgtatggctgcgcagactctgcgccggatcaacaccctgcttcttgaagcctaccgcgaagccctggtgctggacgaaacctttcaggactga

SEQ ID NO: 128203 - DNA, 423 bp, Enterobacter cloacae
atgtacggaacccgcgaagaactttgtgtacagcttgaaaacatgttcacgtttgacgaacccctggtcctgctggtctggacggaagaggggattagcgtggcctgccgtgaagcccagccagaaccggacgggactgaaatccggaatctgatgaaggcgatcggcgaaatgaaaatgactcaataccgccaggagggggtaaataatctgactgtcagcgatctcctgacccgtcagcgggaagtggcaaaccgtcaggtgagtgttccggcggtactcctgtcccgcgtcctgcgtaactatgaatgcgagctggaaaaccggatcggtatggcctgggaagccgggcggcaggagccggaatccgtcaggaatgagctgaaggacgttcacgcattacaggagacgctggccgcgtga

SEQ ID NO: 128204 - DNA, 1977 bp, Enterobacter cloacae
atgtcagaactagaaattagaagccctcttttgcaccttgcactgcttgagaccctgaagtctgatgaaatacaagatgaaattgacctgtttcttccgtttattgctgttactgcgtcggaagtaggtaaacaagttattaatgaaaccgatatccaggagcgtcttctgcaaagtttcggtttcaaaccaccgatgtctgctgtaaaggtactgatgaccagagctagaaagcgcgggttattaataaaagagaatcatgcttttataccttgtcatgaaaaaattaatgattggaagaatggttttgagcataagcaagaagatgttagaatatctctaaatagtcttaaagttgaatttgttaattttacgcaagaaaagtttcgtaaaaaaataacagaggatgaagcggaaaaactaattcttcgtttcatagaaattaatgtgagcagcgttatcagtgagcgggcttatcgtaagagtgaattaaatgacaccatcaagaacactgatcatctaattgcttcgtttataagtaatatacatcgaagtcaaccagtattgcttgaacatttcagccgttgtgttaaggggatgttgcttgctaactatttattttatgcagataaagctacaactaaaaaatcttacgcaggtataactatatatctggattcgccaatagtattaggtcttcttggatatagcggaaaacaatccaaggaaacttaccatgactttcttaatcttttgcagtctctccatattcgagtttgtatattcgataggactttcgatgagatcgagggccttcttcaggcttggaaaagtgatctgagccgtaaatattacggaagattcaacactaaaacacttgaatggctcaggggggaagggtatgacactgagcgtcttgatacagagataaaactgctagactcaagtatagcccgatttggtattaatgttattcaagggtttagagctaaaaaacaattccagtgtgatgaagaagcattgcagaatgctatttcacaaagatttagtccaaacaaaaattatgaacatgatacaatctgtatttcgcgaattcataacctccgtgaaggtcagattattaataacctgaaccagagtttcagcgtgtttgtgacgcataacatcccccttcaaaagctcgcttatgaattttttaaagaagagataggtcgcaacgctattccgctagttgtctccgaacagtggatgacagcaatgttttggcttaaaagacctgatatttacggtaatctaccacaggagcagcttttatctaccgcttatagccttctttatacagacgacaagttctggaatgcgtttcttgtaagatttgaggggcttcagaagcggggaggtatcagcgaagatgatttcttacgtattcgttgggatagtgatctgctgcgtgtagttcatcgtgtgtctgttgatgtaggggaagacttttcggaggaagatatttttgatgtcgtagctacgattaataaaaaacatactgaaaagcatgatgctgagatggaagtgttacgcatagaacatcaggaaatgctcagactaattaaacatgaagcagaagaacaagtaaggcttgctgctgaggggaaggctgatgctcaaatacagttaggcaagcttgaacaacgagtaaaaaaaatctccaatgtaatttcaaaagttgtagcatggggtataaccatgctttttgttatggcgttgacgtttaccggtcttaaaggaattcctgaagaaatccagccagattttttaaagagtgaatttttgcagggttcagtactttacgttgcaggtgtcctgacgttagttcttggtctgttaggtagtgcttttggaaaagacttgtcctttttccataaaaaaatatcaacaacacttgagcaatgctttcttaactggatatacggaaagcgataa

SEQ ID NO: 128205 - DNA, 411 bp, Enterobacter cloacae
atgattggtacagcaagagaaattgcccttgaaatgttcagacattccgacctcgatggcgagaaatacgttttcgccagctggagccggaacgatattcgcggtctttgcattgactgggatctcagtgatgaagagatagacgtggtgatggaaagactggaggcagagctgtatccctccgggtgtgtccctctcatctacaacattgttgaggtgatggtggaagaaaaacggaaacaccgtaatgtcaccattccggctgcggcgcttgcggtggtgatgcagcttgcaaggaaggaaatggagcgtatcgccgtatgcgctgaggatggcggcggatcggcagaagaaaccctgaaagaagaaaacgacgtcatgttgaacctgcgcgcagcgctcgatgcctga

SEQ ID NO: 128206 - DNA, 198 bp, Enterobacter cloacae
atgcaactgtcaccggaaacccgcagcatcctgcgccagtataaaacgctcatcaacgagcgacgtcgcgaatccggactcaaccccgtaaccacggcgaaagtgctggaagagatctgcgaatcggctacccgccagtgcgccgtctatctttgcggccacttcattctccagggcggtcagggcgacggacaataa

SEQ ID NO: 128207 - DNA, 1557 bp, Enterobacter cloacae
atgagaattaaaaagcctcaccttcgtccgatagtcataaccttgtccgttggtgggattttgttaacttctatttttatgattgccgttattatggtttttcagcgcgaaaatatagaaaaagatttgctttatgctaattcatcgtacgctatgaaaatgtcagatgtaatgagtggttatattgaaatggctcaaggtgaattagcatatggagcaaaaaaaataaaatcaactaatgatattgactcacttaaagatgaggcggataggttaagattgcagtctggtatgtttaattcagttcttgttgttagtaatgatgctgttgttctggcgacttcgccagaatctcttgatttagttggtacccgcttgaattcaagtgccagcaaattggcgattgaggaaaagaaaccattcatatcttcaccgttaaaatcagttactgggaatttgattattttgttgtcacatcctatttatgataagggtggcaattacatagggtatgtcggtgggtctatatatctaaaaaaacataatttatttggcgatgttttgagcaggcattttttcaagaacaacactgaaattagcattgttagtgatgatgggaatgtgatctttaataacgataaaagtgctgttgatcggcctatggttatgtctgatgatttgaaatcaaagttaactgcgtctgatagaggtgagggggcatttttttcttcggggcatagatatcttcttggttatgctagtatgaaaaatactgcttggaatgtgttggtttatagtcgtgctgacagtgtgactactattcttattgcttatgctaaaagtgtacttgttctgctaattataataattattgtgttttcacttatttcatatttcattgcctccagtatttcacttcctttagaaaagcttgctatatctaccaatgctaaagatatcggagcttcgctagtttatattaaagctatcaatgcttggtatgccgaagctgataggcttaaaaaggcgctttttacgtatattaaggtaatgatggaaagagttgattttctaaatgaggtggcgcttaaagatccccttaccggcgtgaacaatagattggggtttttaagtaaaatacagaatcataagcgggattcagggtattcagttattgtaattgatgttgatttttttaaagagataaatgacagtttcgggcatggggtcggagatgaggtgcttgtttctttggctcatattattaattcctgttgccgtagtgaagatgttgtttgtcggtttggtggcgaagagtttgttgttttcctgccgaatacatctgtggtaacagctaagtgtgttgcggagcgtattaggagtgttattgaaagtactgtcttccctaataacttgcgggtcaccatatctgctggtgtggcaacacaagatgatcctcttggtaggatcgattttttgctgaaaaatgctgacgatgctctttatcaagccaaaagggaggggcgtaataaagtgattgtatatagcgctatttga

SEQ ID NO: 128208 - DNA, 1101 bp, Enterobacter cloacae
atgacaacaatcattacaccagaaattaaaagcgaaaaaatccatttgcggattactccatctcaaaaagaaaactggagggctttagctgaagctcaaggtgttagtttagccgcatggattgagaataagatatcgatggcattagcatcgaataacgatactttcgtgaaagaaaaatataaacttgtttctcttttctctggctgcggtggtatggatttaggattttgtggaggattttcttttttaaatgaagaatataagaaaacaaaattcgagatcacttgggctaatgaattcaaccccaatgcagtaaaaacatacaagaaaaacttttctcacaatattattgaaggtgatatttgggggcttatagatttagttcccactgagtgtgatgttttaataggaggatttccgtgccaagatatatccataaatggtaaaagagctggagttgacggaaagcgtagtggtttatatcttgctatggtagaggctgttaaacggtctagaccaaagatttttattgccgaaaatgttaaagggcttcttatgaaatataatgaagagtctttagcccgcgttataaatgattttagtgagttaggttataatgttagttataaactttataactccgctaattttggcgtacctcaaacaagagagcgtgtcttcatagttggaactttacacggtaatcctctttttaaagagccggttgatatattgcataaaaatgaatggcttacttgctatgatgcaattcatgatttagagaagtctgatgaggatcgtacccgtaatcacatttggagtaaggcaaaaaaaagcccagaccaaggaagcaggcgcttaaaagaagataagccatctcaaactataagggctgaatgtcatggtaatattcagttccattataagctagatcgacgtatctccatgagagaggctgcgcgtcttcagtccttcccagataattttgtatttgagtcaaacttgagagaaactgagagacaggttggaaatgccgttcctccggttttggcttggcatttagctcaagcggttcaggaatatttagataaactatga

SEQ ID NO: 128209 - DNA, 1008 bp, Enterobacter cloacae
atgatcgagcgcaatctttttgaaaccttgctaacaaaagctacagaaaagctctctcatgacctgacctcatcaaatgaatatcataactcaaagagattcgagcaacgagttagagaggttttaggtgaaatattagatgatatgggtttgtctgtagacatgagtcctccagctcaagaattccctgatatcatcattggaaattacggtgttgaagttaaatattcagataataatacatggagatccatagctaacagcgtctttgaagggagccgtaaacaaggcgttgattacgtatatctgttgtttggcaaaacggggggcgtgcctgaaactaaatgggggcgttatgaagaatgtatcatgcatgtaagaacatcacatgtgccaagattcgaagtagaaatcaatgctaaagagccattatttaaaaaactaaatattagttataacgactttaggattcttagtcctgaagaaaagatgcccttcatcagaaaatatgctaaaaacagacttaaacccggtgaaagactttggtggattgacgatcaaccagacgaaaggactcttcctttagaagttaggttatatacaaaactatctcaaccagaaaagagaaagtatcgtgctgaatcagccgtcctctgtcctcaaatagtgaagtctagtcgggcatcaggaaagtatgatgacgtgactatgtttcttctcacatactatggcattttatgtaatcaagctagagatttattttctgctggaagtgttgctatgcgagcatcacaaaccagaggcggtaattatattgaaagggcattgttagatatagaagaagaaatgctttgtgcgtttaatgaattagaagatgccctatttgaagagtattggggattaaatatacccagagaagaaagagttaattattggttaaataaagctgacacttacgctgtagattggacaccatcaaagatattatttactactatcaaaaagtga

SEQ ID NO: 128210 - DNA, 204 bp, Enterobacter cloacae
atgaaagtaaaaaacaactttatacgtctacaagaagttctggaaagaacaggattttgtaaagcttggatttatcgtttgattagtcgtgacgaattcccttcacctataaaaatcggtgatcgtgcgattgggttcgtagaaagtgaaatagatgcgtggattgatgaaaagatctatttatcaagaaataaagccgcctga

SEQ ID NO: 128211 - DNA, 1293 bp, Enterobacter cloacae
atgtctctttatggttacccatatcaaacgactccttacttagattcatcaaatggtatttttattgatggaatgacatcagctgccccaaatacagaacaatcacttggcagagctttgtttaaaacatatcctgatcaaaataaaatagaccatggcataaatatcatctcattagcaaaaaaagctgggtatttaacgtactgggttagtaatcaaggtagatcatcaaatggtgatagtaagctttataaattatcaaaattaggcaatgaatcatactttatgaaaaaaggagattttctttcaagctatgaaggcgatgaagacatgctcccaataatagaaaaaatagtcagaagcaatgatagtaaaaaggtaatcataatacatatgatggggtcacatgaaccagtatgctcaaggctaacaaattttacgcctcagttcaaaataaataatgaagcaggatgctatgtagcctcaattgagaagcttgatggattcatcaaaaatataataagtattgttaatgggaaaagttataaattaatgtatttctcagatcatggtttgtatgtggacaaggataaaatatttcacgatgtagacctatatgatgagtaccaagttcctttcttttatttatcttcaaatatgaaaagtagagttcttcttaataagaaagtgagtggtttgaatatattggatttttacgcatcatttataaatgtaaaaagcaattatacagacagcatttataatattgaagattataataaaataccagaatcaaaagatcctatcatttattgggttaattacaaaaaactatcagcactacataaaaaacaaagacctttaaacccaagttatatacttggacaagatggcattaatgagcatattttaaatataaataaaccgatttctgcgacaaataattgcattggctacattgataactattcatatctatacccatcaaacaaatcaattactcttactcaaggatggattgcatcagtgcaagataagaaacccgttatcggtagagtgggcttgattattaatcataatggtaattattcttttatagaaggctcaagagtaaaaagaatcgatgtttataatgcgttgaataaccgagacccatcaaacatagagtatggtattagtgttaaagctaaaaaaagagaaaatattgaaatgtatctaggttatataaataacgaaaataaagcttatatatgtactaatcatgcgccactgatacgcgaattcggacaataa

SEQ ID NO: 128212 - DNA, 135 bp, Enterobacter cloacae
atgaaccgtctcttgctgatgtggattctgtgtctgctgcagaaacgaatttctctgaagccagtgggcctgacaatggtttttttctgtccgggaatgacttcatgcgagcagaagaagaatctcaaagagtag

SEQ ID NO: 128213 - DNA, 552 bp, Enterobacter cloacae
atggctacagtcggctacgcccgcgtgtccactaccgggcaaagtctggatacacagctcgaggccctgtccggttgcgagaaagtattcagggaaaaaattagtggggctaaggatgaccgtccagagctacaggcgatgctcgaatttgttcgtgaaggcgacatagtacaggtaacgaaacttgaccgcctcgcacgtaacacccgccatttgttggaggtatcggaataccttcaaggcaaaggcgtggcgttgaatatccttaatatcggcatcaatacggccacaccgactggaaagctcatgctgaccatgattggggctattgccacattcgagcgtgaaatgatgctggaacgtcaggccgagggtatagcactggcgaagctcaaaggtaagtataaaggcagaaaggccacagcccgcagcaaatcgcaggaagtaatcgagatgctggacaaggggctaagcaaacccgaaatctctcgtcagctagggatcggtatcaccagcatttaccggattgtgcgtacgcaatctgaagactaa

SEQ ID NO: 128214 - DNA, 339 bp, Enterobacter cloacae
atgagaaaaacaatcggcctaatcgccatactgttcgcaagcctctccaccaccgcaaaagccgccgacaacgtatatgtaaagctctcatgcgaaaacaacaccactgtagacatcacgctcaagcaacaggaacaagttggttgggccgacctgtctaccccaaatggaacgcggcgggccaagttcttcatgggtgcagaggataatgagggggtgaacagcctgacattctccagtctgggcattgcgttcaacatcgactatacagcggataaaaaattcacactcaaaatgatcagtggaggcagtggcgaatactcctgcaaggtgatgtga

SEQ ID NO: 128215 - DNA, 1071 bp, Enterobacter cloacae
atggttactttatctctttttaataacaaaggcggtgtgggtaaaactacacttacgtggaaccttagcgttgctttggcagccaaaggcaaatccgttctactgattgactttgatccgcagtgcaacctttctatagccactttgggtgatgagaactttgctcggcttttagaaaaaaatgcccaagtaccttttggacagaccatacgagcattcgggcagccttacattcagcaaaatcgacaacccgaagttattatcagccatcccaaataccccatgccgcaaggctcgggacaatttgatatcgttgcaggggatttttggcttaacaacctttcagacacactcaatgttggtaccgatctcattgcaggtacaagcatctatcgtttcttgatgccccacctgatttcacaagcagcagagcaagcaaccgacatcaagtatgattatgtactgattgatttaccgccatcattcaatacattggttcgttcagccctctactgttccgattactttattgttccttgtaccgcagatatgttctcagcgtattgcattggcttgattggtgaaatgctacctaagtttgcaacagactgggatcaaggtacttcacgctatcttagtggaaacgcggcagacagccttttaccaactaaaggtaaaccaaagtttgctggatgggttttcaatggtttcgacatgagaaaacctcagggatctagtgtctcggctgaagttggagcagatttagcccacagaaatgtaattagtgatgctgttgaaaacaacttgatcccaagcctacgtactattggttcttataatgctgtacctgacttcgttactaaagaaccagttgcaaaggttgaagatatgaacgtcatggcacctgacagcatcatacaaagtgttcctctgaagtatcttcagactgtacgtccaacaaacttagttctcacagcaggaagatgggccaaaaaccaacgagacttgatggataaaatgattgctgaacatgacaagttagcagaccacgttatcagtaattgcgtctaa

SEQ ID NO: 128216 - DNA, 285 bp, Enterobacter cloacae
atggatgcagcattgcttaacatgatgcaatcaggtggaagaaataaagcctgggcggaaacgatggtgaatatggaagccaggaaactggtaaatacagccaacactctgtcggcttttcatctcagcgatggtctgactcgaatgaagttcattcaggaaattcgggacctcatagaacaacagtttacgctagctcgtcaggctaaatcagataaagaatgcatggactgcgttaaaatacttcgagaagaaaacggtaatggtgccaacttactgatttag

SEQ ID NO: 128217 - DNA, 972 bp, Enterobacter cloacae
atgactgtttatcttggtatcgatatcgccagcaagaaatttgatgttgcagaactctgtgacggaaattaccgatgcagagcttttgcaaacacttctgccggtttcttggctttttacaagtggctcaatacagagaacaagcaggacattcacgcatgcctggaggcaactggtgactacggcacggggctcgcaacctttctgtatgaaaggaacttaaaggtcagtgttgtgaatcctgctcgtattaagggatacggcgcatccgagctttcgcgcactaaaactgacagggcagactcaaaactgattgcccgtttctgcaaagcagccaatcctgagagatggaaaccgatgcctgcaccagtgagaaagttgcaggccctcgttcgtcgtatcagcgcgctcaatggcatgttaagaatggagtgcaaccgtcgtgagaatgctgacgcaaatattcaggcttctctcgatcgcatcattaaccaattgaaaaaggaaatcgagtccgtccgtcaggagttacacgctcatgtaaggagccatgacgagctgaaaaaacaggacgagctaatacagtcagttccaggtataggagctatatcgagccacctcatcctatcgttcatatctggtaaagaattcaggaaagctaaggaagtaactgcttatttaggtctaaatcctcgtcatcatcaatcaggtagctctgtcagaggtaagacgcgcatgtcaaaaatgggggacgcgcgactaagaagtgccctatatatgccagctctgactgcattgaagcataaccccgacattaaggcattcgggcaacgtttgttgcttgcaggcaaaccgagaatgctcgtcgtcggagccgtcatgcggaaactaatccatatagtcttcggggtactaaagtcaaatatagcgttcagttcacgtatagctctagattctgttactacaagctga

SEQ ID NO: 128218 - DNA, 429 bp, Enterobacter cloacae
atgaaccagaccgtgacctgtgatgctgttcgtcttgagggtgcgcagcgcctgactttcctgcctgatttgtttgggggcgattttatgacgtccgaggcatccgtgtacgcctacgcccagcgttattgccctgagtatcaggggggattctggcagttttaccggctgccggaaggcggcggatatatggcgcctgacgtggagagcctgaccctgtgcaatcgggaaaactggtttgagcagactgtcagcggggaagtggcggggatcatcctcacggcgctggtactgaatcaccggagctggcaccacagtaaccatgaccatgaggagctgtgccgccacttctgccgccgttatgagcagcttatggcatttgctgatacccatcctgaaagcgccacgatctggcgtgcccttgactga

SEQ ID NO: 128219 - DNA, 2850 bp, Enterobacter cloacae
atggctactattcatttaatagcaggtactgaaagggcaaaacgcaatgttgttctgatacacggtctgggtggccattaccgtaaaacctggactgccggaatggataaacgtcagttctggcctgaatggttacagcaggatgatccggatctgcgaatctgggctgtcgaatatgaaaccagtctcctgacctggttgcaacccgacattggcttgaaggatcgggctcagaacatatttaaattgctacttctgcagaatgacatcactcgcggagaagttattttcatcggtcacagtcagggcggattgctgattaaacaaataatccggcttgcctgtgaccgaaaggatgagcctgaggtcagcgtactgctgaatagtatcaccgccgttgcctttcttggcaccccccatcagggttctgatgtctcgagtttaggtaattccttacccgcaagattgctggcatttgcctgcctcggaggacgaccgtcagccatgacggcctatctttaccgtaacaaccccgatttgcgcgcactcaacgtctggtatcgcaactgggaccgcacctttaccggtaagcgtctggtcctcggcgaaagccgaaaattatacgggcttgctaagattgtcaaaccagacagtgccgacccgggaatccaagcagagatggttatggtcgatgctgatcataacgggatctgcaaacctgattcgaggcagaatgaggtgtatcagcatgtgctgaactttgttaagtcggcgaaaatcaccccacagcacttctggctaatgaagcattttggcagtcaggtcagtggctggcgcggataccagaactggtcaggcgctacgcaagacgttgacggacgttatattattgatgataaggtcaagttcagcgatgcgagtatcgatgctggcaggaaaatcacggctgaagagatgctggactcgatcagacaaaagctcgctgtgcccggtgcggtactccgcttggtcggactgtctggggtcgggaagacccgctttgtacaggccctctttgaaacaaacatcggtcgggcagctctctcccccgacactgttttttataccgatgccggaggccaagcgtttccagctccagatgttctactggaaaaactcaaatccacggcacaggaggcggtggttgtcgtcgacaactgtgccccggccttgcataactcactgaacagtgtgttaaacgccgatcctgggcctgcgcgttcccgtcttctgaccgtggagtatgatgttcgggatgatattcctgataacaccgatgttatctcgatggaggccggctccggagaactgattgaggccttaatatctggctatttccctgacatcagccaggctagtcgaagtaccattgcagaattctcgggagggaatgcccgtgttgcactggcgctagctgccaccatcggccggggagagaatatttccagactgaggagcagcgagctgttcagcaggctctttaatcagcggcacgatactagcccggagttgatgcaagctggttcacttctctcgatagtgtattcattccgctttgctaacggggacggatacagtgaagaactgaccgatctggcctgcattgcccaccttcatcatgacagactttatgcctgcgcgcgtgaaattcaacggcggggactggctcaagttaggggagactggatggccattcttccgcaccccattgcaaacggactcgcacagcgagcactggaagacattccagccacacagatcctatcggttctggcccctgataaaaatgaacgtctgttcagatcgtttacacgtcggctgggttatctttcggattcccaggaagcggcagccatggctggtaagatgctggcttctgacggcatatttgacaggatgctcgcccaaggaaaggaccactacactgaaaccttttccctgattgccaatgtcgccccggtagcccaagagcaaacactggagtttattacacgaacaggtgacctggagccagacggctggttctttacgcgtgacaacctggcatttaccgtgattactcgtctgttacgctccctggcttatgaggctcgctattttgagcagtgtgtctggctgctgtgccgctttgccgaaaatgagaagacaaacaaaaacaatgcctccagtaccgaccttctgtgcaccctgtttcatatccatctgtccggcacccatgcaccgttagcaatgcgtcttaacatcatcgaaacactgcttctcgagcaacgcacgggtctggcattgcgtctgttaaatagtctgctgaaaacatcgcattttacctcatttcagggcttcgactttggggctcaggttcgtgactttggatatcttcctcagacgaggagcgactacgagggctggttctgcagggtactggactttctcatcgctacctataccaggcatccggagctatcccgcgatacgtgcgggatagtgcatagctggttcagatcgttatggaaaatcaaacccgcacagcccctacttgtcacgttgattaaaatgctcgtcggcacgccgggtgatgaggcattgtggacgaccatcaaacaggccattcatttcgacgccgagaaacagaccgaagcagaacgggagactctgcagctgctcgaacaactgacccggccggacaccctagcacagaaactcaacatctttattttttcacaacaacagagtttttatggcctcggggaaaaggatgtggacggggaaaatcacacttccggatatgacgttgctctaagagaggcagcctga

SEQ ID NO: 128220 - DNA, 1047 bp, Enterobacter cloacae
atggacgacgacagcggtaatattcttttcagctgtgattcagaaggcggctgggtcaccagtattaaaaaatattacgtccgcttccgcattcaggtattccaccagggatcggcgagcccgatcctggatgaaacgctggatatgaaggacaagcccgtcgtcatctttttcccgacggggacgctgggcgacatgcttgggtggttccattatgcagagcgttttcgccagctgcaccgctgtcagcttgagtgcgtcatggggcaggaaatcattgaactgctcagcgcgcagtatcccgagatcacattctccactaaggacaatcttcagacggtaaatccctacgcgtcctggtatgtaggccttttctttaagggtgataccacacatcagcctatagatttcaggaaggtcggcttccaccgtaatgctggctacatcctgggagttgacccgcgtgaatgccctccccgcctgaagctggatgcagaacggaaaattgctgagccatatgtctgcatcgccgcgcagtccaccaaccaggcgaagtactggaacaacggccatggctgggcagaagtggttgcccaccttaaatctctgggataccgggtgctgtgcattgaccgccatgcgcattacggccagggcttcgtctggaaccacatcccccagggcgctgaagactttacagggaatattccgctccaggagcgtgtggacctgttaaagcatgcgagcttctttatcggacttggcagtgggctgtcatggctagcctgggcgtccggtatccctgtggtgttaatcagcggattcagtctccccaacagcgaattttacaccccctggcgggtgttcagcagccatggctgtaacggctgctgggatgatacgtccgttgattttgaccatgtggattatttgtggtgtccgcatcacaagaacaccccccgacaatacgagtgcacgagtctgataaccggtcggcaggttatcggcatggtggaccgtctgcattcaggattagttgataagtaa

SEQ ID NO: 128221 - DNA, 360 bp, Enterobacter cloacae
atgagtaagtttttatgtttcctcgtattattcctggtgggatgtcaggggccaaaacaacaaacattaacaccaaagcagagacaggagttccccataatcaatcaatgggctgtaaaatttaaagaggcagttgaaagtagatttccatatgccagtagatatgtcggagatacatgcactatccgtgttcatcagccgaaaggaacaaataaaatcaccaatatgcatgtagtagaagggaacccggaattgtgtaaagcggcagttaaagctatacagaccgccagtgatgatggtttattaccccttacgccggagcttatcggtgaggagtttccgttggatttcaaaccatag

SEQ ID NO: 128222 - DNA, 279 bp, Enterobacter cloacae
atggttgatgtaatgcattacgttgttatcaagaagcatgcgattgaccacgcacatttagtcgtttatctcttcgagagcgacggaggcaggtatttttctgcggcacgcgcaccagaggatgttgcgtttgagatcggcgatatcctcaaacatgatgttgcgaatatctgggttcgtagcgatgggacaaaactaaaatttgagggtaatatttcttgctctaccctccaagaggctgaggcccgatttacacaactaattgccgaaattggatga

SEQ ID NO: 128223 - DNA, 1302 bp, Enterobacter cloacae
atggcaatatttcatatgagcgctcaaacaataacacgcagcaaggggcatagtagcgtagctgcggcagcttatcgccacggcgaaaagttaatggacgaacactcaggagagatccacgactacagcaaaaagaaaggtatttcagacagtatgatattaatacctgaaagcgcagaccgtaattttttaaagcctgcgtatttatggaacacgatagaaaaaagcgaaaaaagaaaagatgcgcagttagcacgcgagtttaatattgcgcttcctgtcgaaatgacagacgaacaaaaaaaggtgttagcaatagatttttgccaagagcattttgtaaaaaatggaatgattgctgatatagccttccacaaactcgatagcgacaacccgcattttcacgtaatgctaactactcgccgccttactcctgacggcgcggggttcggtcagaaggaaaggaaatggaacgataaagaactgttagagcaatggcgcaagagttgggcagacacagcaaacgagcacatgcaaaaggctggcatcgatgcgcatatcgatcacagatcactgaaagaacaaaaagcagagtttgacgctatcctgccccctctcagaacggttgagcaagaggcgcaggcaatcagcttagacagaccgccgactatccatagaggccatagccgcaatccagagcgacaagcacgctttgacgtgctccaagaagtgaaagtatcacaagaggcaaaagcacttaaccacattgaacagaaacagcttaagccctcgccgctggctccagcttcctcccctgccgcatctttgcaagatgctacacagggaggcaatgaaaacaacccgcaaaatagactcggcgaagttggcgaatatcttcaatctaaactcaataaagaagataaagcagatcttaatgctgataatgaaatcaaagttcacaccactaaaaataatagtaaaagcagttcagcagcggctatagtttcaacatcaaatattaatttaaccgatgagaaagtagataagaatctacacttaacagaagcacaaaaagaagagttagaggatttagaaaataaagaagcagcagcaaagaaaaaagcttatctgatgggcggcgctgccgttcctgaactttctcaagataacaaaacacagtcaaaaagtgagtttaaaaataaacttcatacagctaaacaatcaatatcattaactgaacagagatttaatgaagaacgtgaaacatatgagaacagaagaaaccgaccaataccgcgctag

SEQ ID NO: 128224 - DNA, 495 bp, Enterobacter cloacae
atgaaaaccgaaaacattatttttcttttttgggcagtgatttttatcctgattctctgccaactgttttactttggccctaaaaaaagaagatatctcaatacttacacagaggtattagatggtgatgtcctctcatatgaatgtcaaaacaccggtgtagtcattgatactaaaaaacacacagtacgtattttcaatacagataaggacagcactttcaaatacgacaacatcagggaaataaattatacgctatccgaagccggaaaaatttacagcacaggtaataatctaaactctatgataaagtccgctggagctaacagtaatgaacaaatgttagctaatcagcgttccggtatttttatactgacagatgatataaaaaatccttcatggaaaatcaatctaccaatgaaaaacaaaacatcatcgaccaatcaggagatctgcgatcgctggcttctcatttttaataaatacgttttataa

SEQ ID NO: 128225 - DNA, 378 bp, Enterobacter cloacae
atgaaaagattgattgcggcagcatttattattcttcctttggcgagttgtaccgtttatggaaacaaatctattaaagacgaaacacagcagaatatagcctctaagattatcaagggtaaaactactcaacaagatatccttcgtttttatggggagcctcagactaaagaaactaacgatggtaaagaaatgtgggggtattccgttatgtccggtgaatcccagacttcaaattacataccgggattagcattattaaagaacagcagcacagctcacatgaaagatcttgagatctggtttaaaggtgatgttgttgaacgctatacctttagacaaacggcaagtaaaacttctcgcggtttgttagattaa

SEQ ID NO: 128226 - DNA, 336 bp, Enterobacter cloacae
atgaaccatgacaaggtggctgcccggggggcagaagagataattgaactgctgacgctgtgccagcaactgcagtcggaaaaggacggccgcgaacggccggcgccgggagcatattcccgagatgaggatgaattttccgatcgcatccgttccgcatgcgggcacgccctgcagctgcgccggctgcttccggtaatgaccaccctcagcgccatcggcaccgagatggaacgccggggagaaatcattgtgctcccgggtgaggattatgcacagaaggcgctggaatgcctgaaggcggaatacctgccggaagagggagacgctccgtga

SEQ ID NO: 128227 - DNA, 780 bp, Enterobacter cloacae
atgccgtcggttccctctcttggggtttcgttttccgccgcgcagctgccggtggccatagactacccggccgcactggccctgcgccagatggcgctcgttcaggacgagctgccgaaatatctgctggcgcccgaagtgagtgccctgctccactatgtacccgacctccaccgtaagatgctgctggccaccctgtggaataccggcgcgcgcattaacgaggctctggcgctgacccggagtgatttttctctggcgccgccctacccgttcgtgcaattggccacactcaagcagcgggcggaaaaagcggcccgaacggccggccgttcgcctgccggcagtcagacgcatcgcctggttccgctttctgatgcgaactatgtcagccagctggagatgatggtggccacgctgaaaatacctcttgaacgtcgtaacaagcgaagcggcagaaccgagaaggcacgtatctgggagattaccgatcggacggtccgcacctggctaagcgaagcggttgaaacggctgcggccgatggggtgacgttctccgtgccggtgaccccgcacacactccgccattcctacgcgatgcacatgctgtacgcaggcataccgctgaaggtgctgcagagtttaatgggacataagagcatcagctcgacggaggtgtatacgaaggtgtttgcgctggatgtggcagcacggcaccgggtgcagttccagatgccgggcgatgaggcggtggcgttgcttaaaaaaacaggtgactaa

SEQ ID NO: 128228 - DNA, 666 bp, Enterobacter cloacae
gtgggcggcgcgaaattccggcgtggcttcgcgatactctgcctcgcagtaaatgtcatcgatctgctgctgaagctcgtattcgtcatcgcaggtttcagtggcgtccctttgttcttccagctcgctgacgcgcttctgttcttcttccgtcaggacagctttcggcatggcaaaacggtaaagttcaccgtcctcaccgctgaagctgagttccgtcatacgatactcagcccagccccagccctgctcctgcttaacgcgggcggcgagcacggtgagcttgccagccagcagagatttcaccagcgccgcatcggcaaaggtgctgtccttgtcgctgaacaggtcggcggtaagcgtaccgccagcggcggtataagcttcctcgcccacatactcaaacatagggtgactgatggccatcttgtcgtcagtcaccattttgcgcagagtctgtacggcaggatcgcgccacttttcaacagcctctttccagacctgctcctgacgctcatgggtatcagcaagtgtcaggacttcacactgttcaagggagatttcatcccgcgccagcgcgtccagcagggagggggcaagattcgccagcttcaggcagcgctgaacgtggcgcgggtggtagcccatcagggcgccaatctgtga

SEQ ID NO: 128229 - DNA, 366 bp, Enterobacter cloacae
atgcagaaccttaacacccgtccggcgacccgtaaggtcgggcagagcaccgaaatcgtgaagctgctgcgcattcaggccagcgacacccacgtggtcgagtttgacaacgtggacacccgatttaatgactgcaacaactggcaggtgatggcaggagggaaacgtgtcctgttcagcaaccgcatgtatgagcgtttttcagatgtgaaatcggggatcgtggcaacgatcaacgtgtgtgaaaacagcggcagcgtaacggataaagcgatgctggaaggggcaaaagtcatgatgcaggttcttgatggctatccgtcctttgcagcactggcagcacacccgaaacgcattactgattaa

SEQ ID NO: 128230 - DNA, 897 bp, Enterobacter cloacae
ttgcgtaacgcagcactcgaactttttaacgaccgcttaccacacaagccgtacttctcggatgatttgtactttggtgtgcgcatcgcagggaaagaacgcgctattctggcgaaatacatccagttcaatcagcctcaggccatgttctggctgggatttgacgttgaccgtatcggcgctgccattgactggagcgaccgcaacgctcccgcacctacactgaccatcaccaatccagaaaacggacacgcgcacctgctttacgcgctggaaagatcgatacgtaccgcgccagacggaaaaatgaagccattacgctacgcagctgctgttgagaatgcgctacgtaaaaaattgggtgctgacacgggctattcggagctaattttcaagaatccgaaccacagtcactggaaaattgctgtatggaagcctgaactctacacactagactggttagccgacttactcgacctgaacgccacgaacgacaaagaaattgttgctgactatggcttaggcaggaactgcactctgttcgataagacccgtaagtgggcgtatcgcgcaatccgtcagggctggcctgagtatgatcagtggctgaaagcctgttacgaacgtacctgtgcttataatctgcaatttctaaccccattagatgaaaatgaggtggctggaatagctaaaagcattgctaagtggactcataaaaatttttcagaggaatcattttcagattttgtactgaaaactcatacctccgagttgcaatcaaaacgaggtcgtattggaggagctattggaggtaaaatatctaaaggaggtagacgaccatcactgggagaaccatggatttcattaggcattagtaggcataagttttttttatga

SEQ ID NO: 128231 - DNA, 468 bp, Enterobacter cloacae
atgttcagactgacctgtattgaactgaataacggcgaatttgccgtgtatatcaacaaccactacctggggagcgaggatgccagcagtgaacgactgtgcctgggtgaaatccgggagcagctttcccagctcccgggcgtggaattacagaccctgcatgaagcggtgccggaggaggatgactggtgctggaatgacatcgccgatcgcgtgctgccgcctgtttcagcctgccgggatgatgtgacggtggcaggactcatggccaggctgaagcagtacccaccggatgcactgtgtctggggacattctggctggcagatgattttctttcacttgatgacagtctgtctgaagagaaaattgcagaagcaatgcgtatctgcgaccgaagccatgatgccggaatcggatttaactgggacacgctgcagattgccattgacggagtgaaggggcgctga

SEQ ID NO: 128232 - DNA, 159 bp, Enterobacter cloacae
atgccagcggagagcgactttctctggggggaggttctggagcagctctcccagctgccgggcgtggaattacagaccctgctggaacccgtaccggagtgcgatgactggtgctggaacgacatcgccgatcgcgtcctgcatgtcgtgatgatgtga

SEQ ID NO: 128233 - DNA, 264 bp, Enterobacter cloacae
atgtcagtgattaaacaaaaagcagagcagtgcattcataactttctgcgcgcccggaacgtgcctgaatctcagtggccggaacgggtcaaaaagaccggcaggggaatgatactggcaggcgtggccgtcgtggttcccggcgttctggttgataatatctccctgccggtgacaattgcgatgcaggtctgctacgcctcgttgatcggccttggggttttcctggcgtttgacgagaaaaaaccagaggggcgaggataa

SEQ ID NO: 128234 - DNA, 1446 bp, Enterobacter cloacae
atgatgggcgactctcttagtggttattccgtttcagactgtacgcctcctgattcaatgtatggatgcattgttcagcacatcaaagaaaagaatccggacactcaaataagcttttataatcgtggcatcggtggtcaggtatgggggaacgccaacaatcttccaggagctttccctgcatggtatgtagatcgccagaagccatggcttgactatgttaaggatttatctcctgatttattatttcttgcgttcgggatgaatgatgcgcagggttttgatgccccatccatgcatgctgttattgccaaaataaaatcatggagtaaggttccaagcattgtcttcgtaacaacgcctaacccttcaatgtccacactttacggtaatggatcgggtttctatgattatgccagtcaggaaggaagggattacgttgctgggtatgtaaggtcatatgcaaaaaggaatggttacggtttgcttgatatcaacaggcagacaaacctgctgagagacggaagggatattctgtcgtgcccaatgaccgtgcaggaagttaaatctggatcgtacgcagcgccttctgatacgtgccatgagtactattttaatggcagtgcctcatcatggggagacaacaggccagtcagatttattgtgggtgcagggtctcaggattgggttaccatcaataaaaatgggaatcaaatcaatattgtcgcccagacaaatgccggtgtttatgaaaacataaattatacaatgccggtatcttccatcggaagtatcagcctttccgtaacctcaataaatattgtcatttcactggatggtgaaagtgagattgcaagattcaactgcattcggcatggtggagaatttcatccaagaattagctacccaaacacagatgatggcccattcagtagttattatctgtccatgggataccctgaaagggtgcagcaaagcttgtttgatgatgatatttttggcacgcctggcattgacgcaaaatctaaaaaaccatggggtggtaatggagttaaccattattcgtctcagggtgttgcagctatagtcagaccagttgttgaatctgcaaatattcagagaagaagctacaccataaaatatcatgatctgcttcctacagttccaaacatcattgtggttgacccaatatcagccgttctgaggtctggtgtcgtaaccctgcaaggttcctttggagtaggtggaagttcgccgtctactaaaatcacaaccctgccagcgtggtgcagaccgaaaaaacaagtcatggtgagtggaatgaagatgattggaactgcatggtctccggcaatcatcctcattggagcggatgggtctgttacattttatgaaacagcgcctgctgaccgggtgcagataaacgtcacgtactctgttttgtaa

SEQ ID NO: 128235 - DNA, 291 bp, Enterobacter cloacae
ttggctgcgcttgccgtgggtgcgttcaaagagcgcaagacacagcgtccacgtcaggagcgccaccgatacgtcggggcgacccgccagttccgcctgaacggcaagagtgcgctctgcagacatggccttaaccagcgttgccggataggcgtcagcgggaatgtcaggcgtggtgtgtctgatcacattgctttcacgttcctgacgcgcctgttcttcagctgcccggtcttcgtcggtcagcttgcggatacctggctgaacccgaaaattgttaccatcccatga

SEQ ID NO: 128236 - DNA, 300 bp, Enterobacter cloacae
gtgggcggcgcgaaattccggcgtggcttcgcggtactgcgcctcgcagtaaatgtcatcgatatcctgctgaagctcgtattcgtcatcgtagctttcagtcgcttccatttgttcttccagctcactgacgcgcttctgttcttcttccgtcaggacagctttcggcatggaaaaacggtacagttcaccgtcctcaccgctgaagctgagttccgtcatacggaactcagcccagccccagccctgctcctgcttaatacgggcggcgagcacggtgagcttgccagccagcagtga

SEQ ID NO: 128237 - DNA, 1134 bp, Enterobacter cloacae; identical to SEQ ID NO: 26635

SEQ ID NO: 128238 - DNA, 204 bp, Enterobacter cloacae
atgagtaaggttaattttaagtgtcctggctgcggccataacttgactgtacgcagcggtgttgaaatcaagagcgtagacgatattgaaggcaccacatgtactaactgcgggaggaccattcacaaaaacgatatcactaagcaggctcgagatcatgcagagaagctggtcagggatatgctcgggaaacatttcaagtaa

SEQ ID NO: 128239 - DNA, 618 bp, Enterobacter cloacae
atgccgtatgtccgtacctttctgcgccttctcacgggtagcggacgtctcaacgccacggtggccaataaaatacccggcctgcactgggtgccaaataaccgtcattcaaacctgaaacaggtcgaggaggcacttaacacgatgatcgccaccagtggcgaagcctgcccgctgccgctcacgattgacgtacaggccgaactgtttcctgaagtcatgcacacccgcacgggtcgacggctgcacaggtccggcattaagaccacgcgccagctgcgccgccagtcccgcgagtacgaacagcgctggaaactgcgccagaacctgctggagcaggcgaaaatcgacctgaattttcagtcaccggaaaccgtctgcgcctggtacacccggtggagcgacgagtttgacgcggcagagcttgccggaccgttctggcgctggcagtcgcggttcgcgtcgctgaaggaacttgactggcttcgcatcagcggtgagccgctgtatacagtgatgtacgaaatcccgtttatcgtgcgggaaacacctgggcatgttcgtgttgctgaacgctggcaggtgccaaataagctggctgatcggagcggtgtatga

SEQ ID NO: 128240 - DNA, 750 bp, Enterobacter cloacae
atgaactttgcagaacgccactatcagcatgtgcctcttcttatcgccaacgtctgggatgccgccagtgctgtcgctgcgcaaaaagcaggctatcaggtactgggaacgtccagcgcggcaatcgcgtccacactgggatatgacgacgggcagggagtaccgtttgatgagctattttatatggtcacccggatccaggctgtgagcaacctgccagtgagcgttgacatggaagcagggtatggtgattcagccaaacagatagcagacaatttgcggcgccttgctcagacaggcgtcgcaggcgttaaccttgaagacagccgagtcataaacggggttcgtcagcttgacgatgcctctgatttttcccgtaacttgagaacagtgtgcgatacgctgagaagcgaaaattatagcctgttcgtgaacatccggactgatacgtacctgctcgggcatgaagacgcgttgcaggagacaatattacggggtcaacgctataaagctgcaggtgctgacggcctttttgttccctgcctcacgtcagagaaagacatcagcctcattgcagaggcaacgggattgcctttgaatgtcatgtgtatgcccgatcttccgtcattcgacaggctgaaacgggcaggggtaagccgcatttcaatgggcaattttgttcattcagcgatgcagtcaacgctgactgatgtcatgcatgcgatccgatctcgtcagacgtttgggtaa

SEQ ID NO: 128241 - DNA, 849 bp, Enterobacter cloacae
atgagtaaaaaacaacttccggtagcaccggcgggtcgcccctgcgcgcgcgttacctgtgaaacattaccgtccgcactggaccgctgggacggcgggatcaaagcggcggccaccgacgataacagcatttctgtttttgatgttatcgggcaggactactggggcgaaggggtaacagctaaacgtattgccggtgcgcttcgggctatgaacggctccgacgtcacggtgaatatcaactcaccgggcggcgacatgttcgaaggtctggctatttataacctgctccgcgaatacgaaggccgtgtaacggtgaaggtgctgggcattgccgccagcgccgcctcgataattgcgatggccggggatgatattcagattggccgcggtgccttcctgatgatccacaactgctgggtatacgcgatgggaaaccgtcatgattttgcagaactggcacagtcactggaacccttcgataccgctatggctgacatctacgcggcgcgctccggccttgatatggccgccgtgcagaagctgatggacgcggaaagctatatcggtggcagtgatgctgtggcgaagggactggcagacagcttgctttctgctgatgcggtcagcgacggcgacgaatcgcctgcagccgcgcttcgcaaacttgatgcattgctggccaagacaaacaccccgcgctctgagcgcagaaaactcattaaagccttatccggtggcatgcctggcgctgtcaccaccaacgacggtacgccgggcgctgccgaagatatcaaacctgaaaccatcaattcacttgaaatcgccctggcggcgttagtcaaataa

SEQ ID NO: 128242 - DNA, 810 bp, Enterobacter cloacae; identical to SEQ ID NO: 26634

SEQ ID NO: 128243 - DNA, 285 bp, Enterobacter cloacae; identical to SEQ ID NO: 26633

SEQ ID NO: 128244 - DNA, 705 bp, Enterobacter cloacae; identical to SEQ ID NO: 8686

SEQ ID NO: 128245 - DNA, 576 bp, Enterobacter cloacae
atgctcagggctggctgcctgactggatggtgcgcacagcgccagccgctggggctgaagaagccaccgaaaccgacgctaacactactgaccacgctgcttaatacaggaggccgccgccttcgggcggcgggaacagacatgaccatgcaatatgatctgaaccgaatcaacacactgaccgccacagacctggagtttatccgtcagcagggcgaggacgcgcgccgcgccctcagcgatgccgtgaccggccttctgtcgacacctgaaggatggtgcgtctgcgccgagttccgcaccgagttcggcggcttcttccccgtccagtgccgcttcagcgaggacggcagtgatgactggcatctgtgcgtgtgcagccccggcgaagtctcgccgtactggcttctggtgctgctctcctccggcggtgaagtggtgcgtaccctttaccagagcgacaagctccagcctgaccggataaaccagctgatcgcgcagctggcaggtatgcgccgctttaactgcacagccagcaccgtggtgaacctgatgagcgtggaggtgacagcatga

SEQ ID NO: 128246 - DNA, 366 bp, Enterobacter cloacae
atgcagaaccttaacacccgtccggcgacccgtaaggtcgggcagagcactgaaatcgtgaagctgctgcgcattcaggccagcgacacccacgtggtcgagtttgacaacgtggacacccgatttaatgactgcaacaactggcaggtgatggcaggagggaaacgtgtcctgttcagcaaccgcatgtatgagcgtttttcagatgtgaaatcggggatcgtggcaacgatcaacgtgtgtgaaaacagcggcagcgtaacggataaagcgatgctggaaggggcaaaagtcatgatgcaggttcttgatggctatccgtcctttgcagcactggcagcacacccgaaacgcattaccggttaa

SEQ ID NO: 128247 - DNA, 291 bp, Enterobacter cloacae; identical to SEQ ID NO: 128235

SEQ ID NO: 128248 - DNA, 654 bp, Enterobacter cloacae
atgagcgaagaaagaagaaattatgagcatattgaaaaatgggaagaattaataaatcataactttcatcgttccatggtggatgctgcaagttcaggagtgatagagactcatagtgtttttgataaatttagctcttggatgttagtaggttgtggagctacagcagcattaatgattgtaaatattgataaaattattccctatatttcaactaatggtctaaggtatgctatagtttttcttacattatcagcgtgttgtggttttgttgcgaaatattttgaaataaacgcatccatttctgaagccgctggtcaaaagactgctgctatcatgaaagcaagagtttcagaatatgaagaggcaatgaaagaatttgatgatttaattaaggatacaggttatcaggcaaaggaaagtccaacgtacgaacaattcgcggaaagttttattggcttatttccttacaaatatcttaggaaaaagttgcgtcaacaagttattcaaaaatcggctctcccagagccaggtaatcgtaaggccatacatgcggtagtacaccaatcaataattgtttgcttccaggccgctttctatgttgtgttcttgttgacaatagcatattcaatcaatctaggatctttgcaatag

SEQ ID NO: 128249 - DNA, 420 bp, Enterobacter cloacae
atggaatttatcaggcctactgaactgcgagaaattatcgccatcccactatacagcgatttggtgcaatgtggttttcccagccccgcagctgattatgtagagcagcgtattgatcttaatgagttgcttgtttcccatcctagctcaacttatttcgttaaagccgcaggggattcgatgatagaagcggggatcagcgacggtgatctgctggtggttgatagctcacggactgctgaacacggagacattgtgattgcggctgtggatggggaatttactgttaaacgccttcaactgcgtccaactgttcagctcaatccgatgaacggtgcttacagtccgattttggtaggcagcgaagatacgctggacgttttcggcgtagttactttcattgttaaatcggccagctga

SEQ ID NO: 128250 - DNA, 921 bp, Enterobacter cloacae
atggagatcacggcgggcctgcggtgcccgtcatttggggccaactttgacagtggctaccagaaagccaagtacgctgatgttgccggttatgtttccggggcgcaggtgctgtttatccctcacgcgacggcttatcttgattcagggctgcttcataaaatgaactcggtcaccatatccggtggacgcgtgacgcagaactccacgatgaaggatgtaagcatcagtgagcgtgaaagtacgtacacgttccccggaagtctctggcagatatttccgtcaggccagcgtagtggggtggggctgctaatcagcaacagcactgacttcacctcaataaccaatgccacgcagtcagggcagtgtatctggaaggggaccgtcaatgtccccacaggcggctgggcagttcccacgatagcggggtacgacaagtccaaatatattgtctttgggcgctgcaatagcggtaacaccgtcgatttcgatggcaacacggtcaggttcttcagccctccatccaccaacgatgacgctccgacgaccggcacgatagatattgtcatcttcgccagtggtgtggcgccgcagccgggcaccgggctaaacatcttcaatgcagccggggcttgcacgttttcgacgacaaggcggcctttcgtttacctcaatcaactctggacgccttcgaaaaataccgtgagcatcggcagcggctatgttccgctgggcagattcgggctgatggctcacgaagtaaatggcatgtacgtgtatcgaatgttcggaataaaaatacagaacggcagtgcttcagttcagggtgggaaatatctggggcgcgagcggtatgcaatttttggtaatgacacggtaactccactgaaccttcccgttcttcccgatatgtacgtctga

SEQ ID NO: 128251 - DNA, 3588 bp, Enterobacter cloacae
atggcaactgcaatcactataaaaggccgcaagggcggcagctcaagttcccgaacccctaccgaacagcctgatgatctgcaatctgttgcaaaggcaaaaatcctcgttgcactaggagagggggaattcgcagggcagctgacggcgaaagatatctacctggacggaacggcgctggagaatgctgacgggtctcaaaacttcagcggcgttacgtgggagtttcgcccaggaacgcaggctcaggattacattcagggaatacctggcacagaaaatgaaatcagcgtcggtaccgaagtatccagcgaaactgcctggacgcataccttcaccaatacgcagctttcggcggttcgcctgcgtctgaagtggccaactcttttcaaacagcaggataacggggatttggtagggtattccatcaactatgtggtagagcttcagacggacggtggtagctggcaaaaggtccttgatactaatgtgaccgggaaaaccacatccggttatgaacgcagccatcgcatcgatttaccgaaagctggcagcacctggaccatcagactacgcaaaattaccgctgacgcaaacagtgccaaaattggcgacacgatgacgctccaaagttatacagaggtcatcgatgccaaactgcgctatccaaatacagctctgttgtacatcgagtttgattccagccagttcaatggctctattcctcaaattgcctgtgaaccacgtggacgtgtcatccgcgtaccggatacttacgatccggaaacaagaacttatagcggtacgtggcttgggacattcaaatgggcctggacagataaccctgcgtggatattctacgacctggtggttagcgaccgtttcgggcttggggagcgtctcacaacagcgaacatagacaaatggacactttaccaggttgcacagtattgtgatcagatggtgccggatggcaaaggtggaagtggtaccgaaccgcgttatacatgcaatgtgtacattcaggaacgcaacgacgcttatactgtcctgcgtgatttcgctgctatattccgcgggatgacctactggggcgacgaccagattgttgcgttggcggacatgccgagggatgttgattttacatacacgcatgcgaacgttatcgatggccggtttacctattccagcagcaccacaaagaaccgttataccaatgcgctcgtatcctggtctgatcctgataacgcctattctgatgcgatggaacctgtttttgaacaggcgctggtttcgcgttatggttttaatcaacttgagataacagctattggttgtacccggcaatcggaggcgaaccgaaaggggcgatgggggatcctcaccaataataaagatcgcgttgttactttcaatgtaggggaagacggtaacattccacagcctggctatgtaattgctgtagccgaccgaaatctttccggacgtgaccttggcggccgtgtttctgcggtgaatggtcgtgttttgacgctggacagggcaccggatgcatcttcgggcgacaggatgattgtcaatctgccatcaggggtttcgcagtcacgcaccatccagtcgataacgggcaataaagtaaccgttacgactgcttacagcgaaacgcctgtggctcaggccgtgtgggtcatagagtctgatgaactctatgcacagcagtatcgcgttatcacggtaacagataataatgacggcacgttcacaatcgtcggtgcaaatcatgatccggataaatatgcccgaatcgataccggagccatcattgaccagcggccggtgagcgtgatcccgccgggtaatcagtcaccgccagacaacatcgtaatcagttcgttttcggtggtgcagcagaatatcagcgtcgaaaccatgcgggtgagctggaaccaggcgcagaacgctatcgcctatgaagcgcaatggcgccgcaacgacgggaactgggttaacgtgccgcgcagctccaccacgtcattcgacgttccggggatttatgccggccgctacctggtacgtgtacgcgccatcaatgccgcagaaatttcttccgggtggggctattccgaagagaaaacgctgaccggtaaagtgggcaatccgccgaaaccggtcggcttcatcgcttccgataatgtggtattcggtatcgagctgagctggggattcccggcgaataccgacgatacgctgaagacggaaattcagtacagcctgaccggtaccgaggacgatgcgatgctgctggccgatgtgccttacccgcagcgcaaatatcagcagatgggccttaaggctgggcagattttctggtaccgcgcgcaactggtggaccgcagcggcaacgaatcagggtacacagaatgggggcgaggacaggccagcatcgatgtttccgacatcaccgatgtgatcctggaggaaattaaagactctgataccttcaaagacctgatcgagaacgcggtggacagcaatgaaaaaattgctggcatggctgaccatatcaaacaggccaacgacgaactggagcagcaggcgaaggatatcgccaaaaatgcccaggacgtcgggaagattcagaccagcgttaatgagctttccagcacggtcgggaatgtttcgtcttcactcagtcagcttgagcagaccgttgcgacggctgataccgccctgggccagcgaatcgacaacatcagcgtttctatggacggcatgacgggcggggtgaagaactctgcaattgcaataatccaggccaacctcgctcaggtcgccacgcgcaaaacgctgtcggcatcggtcgccggtaacagcgcgcagctggaccgcattgatgaggtgatcgtcaacgagaaggaggcaacggcgcgttcgctgctgagtttgcaaactgacgtgaacggcaacaaggcatccatcaacagcctgaaccagacgttctccgattaccagcaggccacggccacgcagataaacggcatcacagcgaccatcaacggacatacctcagccattaccactaacgctcaggccattgcgaacgtcaacggcgacctgaaggcgatgtacagcatcaaggtcgggttatccagcaacggccagtactacgccgcagggatggggataggcgtggagaatacgccgtccggcatgcagtcgcaggttatcttcctggctgaccgcttcgccgttactcaccaggccggagcgaccgttacgcttcctttcgttatccagaatgggcagaccataattcgggacacggtcattggagacgggacgattggaaacgccaagatcggcagctatatccaatcttcaacctgggacggcaccgggaacgttggctggcacatcaacaaatctggctacgcgacgtttaacaacgtgaccgttcgcggctcgatttacgccacaaacggtaatttttctttcaatggctccggcaacacaacggtgattaatggtaatggcgtaaccattaatattccgggtggaggtcgcatcgtactggggacatggacataa

SEQ ID NO: 128252 - DNA, 630 bp, Enterobacter cloacae
atggcaatttcactcgatatggaccagctcagaaccgtccggctttatggtgtccttggtgcaaccttcgggcgtgaatatcgtttatctgtggcttcaccaaaagaggccatccgcgccctgagcgttatcgtgccgggttttgagcgtttcatgaataccagcaaacaacgtgggttaacgtatgcggttttcagcggaaagcggaatctttgtgatgaagaactcagtatggacaggagcacagaggaaatccgcatcgcgccggtgatcatcggcagtaagagagccggggtgtttcagacaatcctcggggttgcccttgtcgctgttgctgcgttcgttacgggaggggccgcgatagggattggaggtacagctttcgttggtggctggggcgctgtggcggggattggggtatcaatggcaatcggcggcgtagtccagatgctttctccacagacaaccgggctcgccagtaagcaatctgcggataaccaagccagctacgcctttggtggagtaacaaacacgacagcccaggggaatccggtaccacttctttatggccgccggcgaatcggtggcgcgattatttctgccgggatttatgtcgaagatcagcaataa

SEQ ID NO: 128253 - DNA, 354 bp, Enterobacter cloacae
atgaaaagaaattgggaccttattagagagattttagttaaaggtgaggcgctcagtgaaaaagaaatgtttggtgagacctctttcaaggaatatgatgttaatgaggtcgcctatcatttggttatgctcgacaaagctggatttattgaagctataaacaatggtggtttgaatcatcaaactaggatttgtaccggcttaacttgggaaggttatgattttcttgacaaaattagggacaaggctgtttggaataggacaaaaacaattttgaaagacaaaggattggaactaacctttgcgacgataaaagttgcagcaactaaggccataacggacctccttacttaa

SEQ ID NO: 128254 - DNA, 705 bp, Enterobacter cloacae
atgactaaacaaactctagcaaatgctcgatctaatgtcactaagatgtcgagccgtgagattgcgaaactgaccggtaagcgtcatgacaacgttatggcggattgtcgcaagatgttcgaatcgctcaatcttcaatctcctaacttctcaggagattaccaagatgaaagagggcgcacgtatcaggaatattggctggatcaggatctaactatgactctgatgatggggtatagcatcccgctccgacacaaggtagccactcgttggcgtcaactcgagtctggtgaagttttaccgactaaatcatcatcgcaccttcctgagtatcgccgggccagagcgattaagatggaagttgaagcaatgagtctcgcattgtcgtttatgccgaagctcagcgatatcgcgaagcaaaccgctatggctcgcgctgttaacgatgctgcaggaattgagcttcttcctttgccaaaggttgaagaacatctccatacggctagagatatcgctgatatgttaggagtgactccgcaaaagatcggtcgccttgctaacaagcatgaactcaaaaccgagcagtacggaatgtatgtttgggataaagcaaaacactctgacaagcaggtagaagcgtttcgttataacgctgaaggcgtgcaggtgttgcggcatttaattcatgatgttgatgttgcttag

SEQ ID NO: 128255 - DNA, 624 bp, Enterobacter cloacae
atgaatattgtagcaaaatcagatcttaacttccaaggtaaagcgctagtcccggtgtcaaacattactggaacctggctgacatcttcagatctcgctaaggctctccagtactccaacagtcgcgccgtaacgatgatttataacaaatatgctgatgagttcaccaatggtatgactcaggtactcgaagtgagtacctcaggaaactaccgtaaaaaggtacgtgttttctcacttcgtggcgctcacctgatcgccatgtttgctagaactccagtggccaaagattttcgtcggtgggttctggatatccttgaccgtgaggttcaacgctcaccgatcgccaagcagttcacagcccaagaactctgtgacttagcttggttgtggcgggcgggagcggtgatgattactgcttgtcgagacatttacccccttcttaagatagctgaacaccgccaagctggacatttttactcaatcggccacgaatttaccaggacattgaacaaaggtcgtgaagtcatcaaaagagaaacggcgcatatagaatttcaaccatggaaggatgacaactggagcagggtattgcctcacctgcgtcaggagatgttgcagtga

SEQ ID NO: 128256 - DNA, 177 bp, Enterobacter cloacae
atgaaagagtctgaagttaaagcatgcaataacatgctggttcgtatgccaacagagatgaaggaaaaaattactgagggggcaaagcgctcatttcgttctgcaaataatgaagttctttatcgcctgcaactggccgatgagattttaagcaaggcgagcatcaatgtttactga

SEQ ID NO: 128257 - DNA, 714 bp, Enterobacter cloacae
atgaaaaagattaaaattaaatctggtttttgggaaagagtctctaaggctagagcgcttaactctctgacacaaaaggagttagccgaactcgttggtgtgtctcaaaggcaaatagctgcatacgaaaatgtcgaatccgaaccacgagagcgaactttgatgaagttagcagaagctcttggtacaacgccagaatggctagcatctggggagggagaaagcaggattaaggccaggatatccccagccgatacagccagaaagattccaatcatcgatttggaagatgttttttatcatctgatgacgccagaacgagagcgcagcggcctaaaatatcatccaactgccctcgaactatctgaactagcgtttgcactgataatggctgacgaatcaatgcagcctttgtttcctttgggctcgatagtgatttttgaaccatgtatttacgcaaagggtggtgactttgtggttgccgctcaactggacaaaccttccatattccgacagcttttgacgggtgtagattctgcaatactgtcaccattggatacgcgctatcccacggacacctttgaaaagacaaatactgcattaatacctgctgtagctgttgaaacataccttccagccagagaaagaatgtgggaccgtgatgggtacgagccttttttgggcattggtagagaaaattttcagacgaaatag

SEQ ID NO: 128258 - DNA, 315 bp, Enterobacter cloacae
atgaagtatatctttgcggctgtagtgctaatttcattatcctctcccgccaatgctttggatgtggatgatttcaatgatcttgaaggctataccgtcacaactgttactcatgtagatggagagtttgaggggtgtgaatacaataaaaaaatcaaacttcaaaatggttgggttctcacttgccaaacctataactatcattacgcttattcaccgtcggcagctattttgacgaaagatgtgggccaaggttacgtcattaaaatgatcattgatgatgatatttatgacatgcaaccagtcacaaaatga

SEQ ID NO: 128259 - DNA, 756 bp, Enterobacter cloacae
atgatcacagcagactatcaaagccttgagcccggtaataaagtccggcttatcgaagttgatggctctacgttcggcgtggatgatgtactgcgatttcacgcatacaacctcccgcacacagaagaagaaatcgctgccgctggtggcgatgaatcaaagctgaaggcgaaaagtatctggtggcagggggaggaatatgccgcttggccgtatcaaatagaagggcttgaagcctccacagacggcaacagtgcccagccaacactcacggttgcagatatcgatagcaagattacagcgctgtgccttgcttatgacgatatgctacaggcgaaagtcactatccatgacacttattcgcattatctcgatgcgaagaacttcccagcaggtaacgcaacagctgatccgcaacaggtcagaaaacgagttttttacattgatggtaaaagcagcgaaattccgggcgaaagtatcgaattcgtactcgatagcccgatgtcgttgcagggtaagatgatccccacgcgccagcttcattccctgtgtacctggtgcatgcgcaataagtaccgaaccggtgacggttgcgattatgccggaaccagatacttcgataacaataataatcctgtcgatgttccctcgcttgatgtctgtaacggcacgctcacggcgtgcaaacttcgcttcggagagaatgaagaactgccgtttggtggtttcccgggaacgtctttaatcaggagctga

SEQ ID NO: 128260 - DNA, 438 bp, Enterobacter cloacae
atgaaaaacgtaattgcgttagctcttggggttatgttgttgtctggttgtgctggtcaggaaccattaaagaagcaaaccgcatcaggtaagcctgaagctgaataccctgggaaaaccaaagcccaggtaaaggatgcattagttgtattctgtaacagtaaaggacttaatgttttcgaggccaccgatacgaatgttgtttgcgggaaaccgactgatagcgttcttgcgcagatgatggttggcaacgcttattccacgccagctatggctaaactgcggtttactatcgcatcggtgaacgagacaccaaaagtttggagcgatatgtggatagaaagccaaatgccaggggggcaagtaaatcaggtggcttccaccagtaacaaggataagaactcagttcaggctattctggacaacctcaaaccatag

SEQ ID NO: 128261 - DNA, 297 bp, Enterobacter cloacae
atggataagaataagtatgttaaccacttattattttgcctttctttttatgcagtagtatgcatcatcgttatatattcatcttcattaacattttttgaatccagcatcttaattacttactgcataataagtagcctgtttttcccattagtagcaaactggtttgaactaaagaataaaaaaacagcaacattaacggcatggtattgcggtatttttagtttatgcctgattctttccattccatttgggcttattttgcttttgctaaaacttaaaaaaaggtggcattaa

SEQ ID NO: 128262 - DNA, 1443 bp, Enterobacter cloacae
atggcttggacaggatttggtggtagttggtctaatggagttcattctggtggtgatgattctggtagcatcggtggtagtagtgttgtgatgcgagctccaacttcatcggaagtagcttctcaattcaatagttatggcggggttcagattaccgcttcaatggtttcgaatattcgaacgaatgacctgggtggatacagtgccgatattgcaggcgctaacaatacggtatcatcaggagggtctagccatacctcaaatacagtcagcggtttctctggtgttttagcgtcaaacgctaaaggaaataatggtggggcgggagggagtgccgctaatgtttctggaagccaaggtagttggaatgttgaacctggtaactggagtaaacttccaaacggttatgatacgactatccaagggtttaaatatcatgtcactcttgatctgcttgggaaagtggtctctgttaaacagacagccccccgaccatatactaaagcagaaaatctgaaagtggcagtagccaaagcaaataataaaaaacctggggaaatgttcccagaattagattttagtaaaggtgaacctgagcgacaagctttagcaaaatcagaagctctgactgcttggaaaacgctagcacctaacgtaaggaaatatgatattactgtcgatgattttaagtatgaagttaacttagataatttcggcaatgttacttcctctcgtaaaacacaagacagaccttatacgaaagccgaaaacttaaaggtggcagtagcaaaagcaaacaataaaaagcccggtgagatgtttcctgagttagacttttctaaaagcgaaccagccagaaaaagtcaagctgaaaaaaatgctcaggatatctttagttcattcccaactaatgcaattagtattgcctccgattttcacaaggccgttgcagacaaattcggagaaaaatttagtaaagaagcaaaagctttagctgaggcatcaaagggtaaaaaaattagaaatgcagcagaagctattaaagcctttgataaatataaaggtgctttgaataaaaaatatggagtggcagacaggcaagcaattgcaaatgctctagagtcgttagataaaaaacagatggcagcacagttatctaagtttgggaaaatgtttttcgcagtcagcgaaacattgcaatggagcgggtttattaatggaatcgttaaaggcttcagaacaggtgactggaatgatgctattatcaatggcgaaaagatagcagcaagcaagttagcaagctatatggtggttgtagcatttggtgctattgcaacaactccaatcggaattattggttttgccgccattttggcaattacatctgcattgattaccgatgatttgatgaagaagatgaacgatctcattttaagtctgtag

SEQ ID NO: 128263 - DNA, 597 bp, Enterobacter cloacae
atggcttggcaaggcgtacccttcgtgtgtcaaaaaacaactggcgtgataactttggctttagagaatctcccgccaattacgattaactcacctttcccggttgaaacacttattactgcaatcgcaggcgtggtagctgctgcaattacaggctgggtggcatttaaggccatcaaggaaaacttctctctggctaggtatcaaactcagctaaacactaataaagaattgtctcagcaaattcggtctgctggcgcggagctggtaactgatgtcatcatgttggctagtacttttgaacaatggcatcttgtcgggaaaaaggataattctttattatctcaaggagtcttaccggttgagtttcaagcaccattgaaagcagcggaaatcagtaagaataaatttctcctccttattcgacctgatgaagaaggatgtaaactcgttgcgctgacggctgaattacaacaaactttaaaaaattgcctatcaaaaggctatttcactgatgaagaaaaagctaggttcattgatgcgcaaaatgctttcatctttggatgtcatgaatatataaatcaaaatctttcttaa

SEQ ID NO: 128264 - DNA, 258 bp, Enterobacter cloacae
gtggatcctttactccaatacgcttgcagacgggttaccgaactggaaacccttctgctggtggacgtgcaggataccgtctggcctgccgaggtcggaatggtatacagccagattgaaaacgccggggatctcccggcacaccaccagcgtcgcctgaaacatcacatcaaccggatgtggcttgagaaaatgccagtaccgtcgattgtcgttgctgcccgttcgctggccgccgccatggaggaatacgcgtga

SEQ ID NO: 128265 - DNA, 228 bp, Enterobacter cloacae
atgaccaaatcaatcaaacagcgagtatgcgatgtcatgactcaaacagagatcgccaagaatcttggcacaacttctcaagctgtaagtctatggctgaaccatgaggttcccgcgcatcgagtgctcccgatttgcaagttattgggatggaaaatcactccacatgaagtacgtagtgacatttatcccaatcctacagacgggctgccaaaacaggagtcctga

SEQ ID NO: 128266 - DNA, 207 bp, Enterobacter cloacae
atgccgcctgatgcaggtgacgatgacctgagcatgcatgaacctccacggcaactggatgaaaaagaaatcgctttgctctcactatttaaccagatgcctgaagcagaaaagcttcgcctcatcgttcacgcaaaagccacccttaaagagctagatctcctcaaggatgatgtttccaacatcatccaaagcattcagaagtaa

SEQ ID NO: 128267 - DNA, 186 bp, Enterobacter cloacae
atgaacactttattcgcactggttctgactgttatctcccttaacggtgaatcgcaggatgtcgttatcgatgtctatgacaaccagcaacagtgccaggcagctgctgttgagcaaaacgtgaatggtgagtgctggcctgtcgagggaattattcgtaacggcgagatcccggcaagcctgtaa

SEQ ID NO: 128268 - DNA, 159 bp, Enterobacter cloacae
atgaagaaagaatgcggatactgccgcaagccttttgaagcggggaaagaagttaaacgcaccttgctttatttgtgtggcaataatcttgcccgtaaagaaaaagagtattgctcaaaagagtgtgctgaaaaagaccagatggcacacgaagcgtaa

SEQ ID NO: 128269 - DNA, 288 bp, Enterobacter cloacae
atggaaatcgtaaaagtcgaattaaatctgaaagcaattaacaaaagcatcgctttattcaactgcgacaagaaagtatctggcctgattcataccactgaaaacggcgaaaccaccgtcgtacttgatgggggttatgttcttgactcgttcgactgtccgcactgcgctattgaggctatcagcctgctggccgtgaaaattagagatggggaaatgagcgggcacggcagctatcgccagcacaagcgcaatatcatggatcgtgcattcatcactgtccattaa

SEQ ID NO: 128270 - DNA, 2994 bp, Enterobacter cloacae
atgaataacacaaaccctgtatttcttgttcgaagagcaaaaaaacaatctggtcagcctgatgcagttttatggtgcagcgaggactttgaaaccgctaatgccaccctggattatttactgcttaagtccggccgcaaatttaaagactattacaaagcggtcgcaactaatttccctgttgttaacgaacttccaccggaaggcgaaatcagttttaccttctgtgattattatcagcttgataaaagcaaaatgaactgggagcagatccctggagtttctctgcccgagcatccttcaacacaaaaagcggaaacggccgaagccacggtcattaatggcgttgatacgtcaactggtgaaatcgtcgacgaacaggcttttaacgaggctgatgcagttcctccggccaattctgatctgaagattgacgaaggcgacgacgaaaacacgcgctaccctatcgtgcagatgtcgttccgtaagcagctgctgtcgcagcttacttcggatgaacttcgctaccacctcacgcaggcggagtatcaggaaataagcacgctggaaatggacactgatgacgggtacgtccagaacctgctgctggcagccgcaagcgtagaaaaaatccagactctggatatgccattcctgtggaaatacaccagagccgtcagagacgtttttgatatggagaaacgtcacgaactctctctgattttgaagtttacgcaagtatgggctgaaacgtcccacctggatcgcggcctgctggttaaagagtggtgcaaaggtaatcgtgtatcagctattcagcgtacagaaagcggcacgaacgctggtggcggtaataaaaccgatcgtaacgagtcactcaagcacgatatggactctctggatattgagatcgcacttgccaccctgccaatggacttcaacatttatgaattacccggcagcgtttatcgtcgcgcaaaagaaatcgttaagaaaaaagaaagtccattcaaagaatggtccgcagcacttcgggcaacaccgggtattctggactattcccgtgccgctatttttgcgcttattcgtgaagctggtgaacatttagcgcatttccctgaccgtttgcgcggctatatcaacaccaatctgacagaaagcgatcacgcaaacccgacagcggaaaccctaaccgctgcacgccacataccagaaaaagatgctgttgaagaaattaaccgccagcttgcagcagagcgcggcgaatatgtcgaaggcatcagtgacccaaccgatccgaaatgggtaaacacccagacccagccagaagttgaaaatctcggtggaggtatttattccattgatggcctgctcaaccagagcgcctcaaatgaagtagaaaaaacggaagtggagaccaccagcaatgtgcaggttcaagagaataacagtaatgaagaaccgacttgtgatgcgctgtcaccgggtaaagtcgtattgcagtcaggtgaaagcagtgctgacactggtgaggaaccagctaccgtagagccgtctgccgctgagattctggccaccagcgcgccgagtctcgccaaccgggatcgggatgatgcaacccaaattactgattcagtagaccagaacgagccagaatcggcacaaaacgaaccagaagtgcatcaggaagaaccagctgttgagtatcctgcttatttcgagccaggccgctatgaaggtcttccgaacgaggtttaccacgccgctaacggcatcagctccacccaggtaaaagatgcgcgcgtcagcctgatgtacttcaatgcgcgtcacgttgcaaaaaacatttcccagcaggataacccggctttcatttttggacgcgccacacacagttttgtgctggaaccagaaaaatttgccgatgactacgttcttccagaaaaaatgccggaaggcgtcgtatccacgactggtgaaatggttgcactcatcaaagaatacaacgcaactctgcctgctttaatgaccccggacgaacttaaggcatggattgaagaatacaacggcaacctcacgcctccgcttacagtgagtgcaggtgccgacgagatcgctaattcatacatgtctcttcctgaagaatttcagcggataccagcggaaaccaaaccaaccgcgacagcaatgaaagcatgtatcaaagaatacaatgccagcctggaaccgatgcttaaaaccagcggcactcgtgaccagttgctggatcagatagcaactgtagcacctgagttcgctgaacaggagcgcgcaaagtttatcccttacaacgtcagtggcgctaaagagcaactgactgagatcgttcgcacgatccgtcctgacgtagtctttgctgatgattggtataaacagcaggaagaggcaaatgctggtaaagagacgataagcttagagatgtacgagcagataaaaaatatcaatgatgctcttcaggccaataaagatgccagccgcctgttaaaccatccagccagacaatccgaggtcagttatttcgggttcgatgaagagaccgggcttgaggtgcgcgtacgtcctgacatagagatccgcctcccttacgaaagcatttgcgctgacctgaaaacggtaagtctagggtatgtgcgccaggacaaactgaaagatcggcttcatcgtgaaattatcgaccgcgattaccacctaagcgcagcgatgtattgcgatattgcaggactggataaattcacttggatcttcgtgaacaaagaccctggttaccactgggtagctgtggtggacgcttcccccatgctgctggaacttggtcgcaaagaatatcgcagggcactgcgccagattgaagaagcgatggaaacaggctactggcctgcgccaatcactgaagcctacaccgacgacctgaatgattatgacactcgtcgtcttgaagcactggatgcggaataa

SEQ ID NO: 128271 - DNA, 216 bp, Enterobacter cloacae
atgtcgcaggtaatttacgattctgaatggggcgttgcttcaaaactaaaagagaagacaggcctcacagatcgtcagattaaaagctatcgccaaaccctctgggtcgaaggtgttcattttaagagaatcccattggatggaagcagctccgaagagcgaggacttgtttggtacaacatcccaaacattaacaggtttgtgaaggaggcataa

SEQ ID NO: 128272 - DNA, 1281 bp, Enterobacter cloacae
atggctgcaatgccaacgggtgttgagatccacaacaataaaatacgaataagcttcaagtttcagggtgtgagatgtcgagaaacattgaagggatggatcgtaaatgcttcaaatattaaaaaagctgggaatctaagaactaaaattgtgagcgagattcagctgggcacttttgactaccggacagtgtttccggagtcaaaggtagcagcaaagttttatacatctaaaaatattacgacgttcgctgaccttgcatcaacctggtatgaaaaccatacaattgatctctcacccaatgcgacaagaagctatgggatagctgtaagaacgttaacaaaactaattggtcctgaaacgctggttgcatccatcaccaacagcgacattctgggctggagaaaggaattactgactggcgagactaactatgctccagaaaagaggaaaaataaaaccggccgcgccgtaagaacagtagattattatttagccatcctgcgacaaatcctcgactatgctgttaaaaataaagtcatttcatatcaaccatatgtcgggataaaaaggcttcgcaaagggcaaacaaaaccagatccgcttctgagacatgagtttgagcagttgaaagagactgctccggctcagcagaaaaacatgtggcaattttttgcttacaccggcgttcggcccggggagctttgcgctcttgcctgggaggatatcgatcttaattccggcgaagccaatattgcgcgcaatctaactcaggaaggcttgtttggaccacccaaaaccgaagctggataccggacgataaagttactggagccggctctggaagctttgcgagctcaaaaagaacttaccgggagtgcccctaaggtaccaatcacttttcaccaccgggagttcggaaaaacggaaacgcagaaactgcactttgtatttatgccccgacctcagaaaggaaggcaagctgcctattattcagtcagctcaattgtgtcactatgggatattactgtaagacgatcgggcattcgccgcagacgcccctatcaattgcgtcatacatacgcgtgctggatgttgtcggcaggtgctaatcctgcttttatagcgaatcagatgggtcatgagaatgcagagatggtcttccatgtatactctgcgtggataaatgctctcgatagcgatcaggtatcatttttgaatcagcgctttggcggatatgctaatgcccccatagtgcccctgaagctaaaaacaaaatag

SEQ ID NO: 128273 - DNA, 612 bp, Enterobacter cloacae
atggataaggtggtctggctcattgatgacgatgagtccatcagggaatcattgacgtttttactctccggaatgggctggcaggttaaggcattcgagagcgtcgatgcctttacgctggcgcacggcggcgaaacggcgcttgtcggctgtctgcttctggatatgcgcatgccgggcaagagcgggcttgcctggctggaagagggtgaatggccctggccgctgctgccagtcgttatcatgaccgggcacggaacggtcgacgcctgccgtcgcgcgtttcgcaacggcgtgtttgagttcttcaccaaacccctggatgccgacaggcttatcgaaacggttggcatggctttcgaagagagcctgcggcgatctgccgcctggcaggatatctcgcggattaaagcgcgattcgaacagctaaccgcgcgggagcacgaggtgttgaccgtgctgatggaaggatgcagcaataaagaggcggctgcgcgtcttaacctctccccgaggaccgtggaagcgcaccgcgcggcggcgtttgccaagcttggcgtcagcagcctggttcaggcgagccgggattatgacaaattgcaatccgtataa

SEQ ID NO: 128274 - DNA, 1311 bp, Enterobacter cloacae
atgataaagcgcagcatcgctgcatgggtggcggtctgcctgataagcggtatgctgctttatgcggaacagatacgtcgccagtactgggagcgcgatcgcgagtttacggcacgctattcggcgatcggcgcggtgctgacgcaaaacgaatcggtgcttccgcttctgagcggcgatgaagatattaccgcgttacgcaaaaagtttccttctgtcctggccctggaaaaaaccgcggggcgtgcgctggacgccccgcgtgtggagccgtttcgcggggtgcagtactggttatataatccctggcggcagatacgcgtgctggtcgacctaagcgcgctgattcccgcgcgccatagctttgcgcagctgcatcttaacgtcacgaacggcgatggtccgccatcctccggcgctttctggcgctggcagcgcgctttcccgcagcatacacagcccttcgttcttacagccgaggcagagcctgactggttcagcgtttccctgctgccttacctgctgctctttctgacgtggggggtagcgattgcgggcgtgggaagcgtgctctggcagcgcaaacagcggcagcaggccgagcagcgcgcccgctattatcagcatgccaggcttaacacgctgggggagatcaccgcgggcattgtccatgaaattaaccagcctcttaccgccgtgcaaacctggatccagggggcgcagcgacagctcgaggctaatccgcaggccgtgccgcaggcgcttgcggccgcgctgctgcaaacgcaacgcatcagcgccctgctgacgcgctttcgcgagcatgtggtacaggagaaggtgactctgcgcgaaaccgatctggtgcagtgctggcagcaggttgagagcctgctggagcacgagcgcaaatcgaaccgtatcgcggtcatccacgcgtttgcagcggatgccacgaccgtgctggcagacaggctctggctggagcagatactgcacaacctgctcagcaatgcgattcaggctcagcaggagagcacgcacggctgggtgcgaatcgacagccagaaaaacgagaagggcattctggtcacgcttactgacggcgggccgggatttagcccggaggccctgcaaaacgcttttatgcccttctttagcggacgccccggcggaacggggctggggatgacgttaaccgaaacgctaataacccgcatgaccggctcgattgccctgggcaacgccccgcagggtggggcgcagatccggttgcagctcgcagaaggtaaggagacaaagcatggataa

SEQ ID NO: 128275 - DNA, 603 bp, Enterobacter cloacae
atgaaaccactcattatgagtaccccggttaaaatgctggcaattttcctgctggccatactgatgccactaaaaggtgccatcagtaaagagaagagcgccataaggacgcttgtaatcgtgtctcatccgtatccggaacggcctgtgatgataaaggggcttcagcaggcggctgagagcgtacagggagtgactgttcgtaaccttgaaacgctctatggtttcgatacacgcaagataaacggtgatgaggagaggcgtatcacgcgccagaatgaccggatagtatttatctttccaactcactggttcaacatcacacccatgatgaaagcgtatatgaatgatacctggggtagcgttggtcctgatttatggaagggtaaagaaatgcttatcgttactactgctgccggtgacgaatcaacatacggaaaaaatggcagaacaggtatcgagcttgccgatgtattcacaccaatgaaagccagtgcattacatgcaggcataacatggctaccacctctggttttccagggcgtaagtgccagccatttgcctgaataccagcgccagctcattgagcgcctgactaaataa

SEQ ID NO: 128276 - DNA, 357 bp, Enterobacter cloacae
atgtcctggaatcccgaacttttaacacaaattgatgcggcggacgacctgaaaattgctccgtatcaccccgacatgataacgaccgggacgccaacatggatttgggaggtgacggtggataaccgccttttcgtccgtgcatttagtggtaccagttcaaaatggtatcaggcggcattgtctcaacaagcaggtaggattctggctatcggacagaaaatcgaagtgctgttcgcaaaaccatcagaccctgagcttgaaagaaaaatcgatcaggcttatcagaaaaaaatactccggcagcagctatgtttccgcaatgacaggtacacgtgcaagagcggccacggttga

SEQ ID NO: 128277 - DNA, 258 bp, Enterobacter cloacae
atggatagtaaacgaacgttttcactcagctatgaagacctgaccagtgagtgtgtgaagatgataaaagaacttcagaccagcgcggccagtctcgatggtattggttatgcgctcgtacagacaaaaatacaggctgtactggttctctggagcagactggcaacggctggtaacgcatgccagctcaattttgttatggaccgacaataccttatacaaatgatcgccggtaattccgtcatcgaaatgcactga

SEQ ID NO: 128278 - DNA, 1173 bp, Enterobacter cloacae
atggatgaagaaaaaaatcttacccgtcgcgaatttgttgttcgttctggcgtggtcataggtgccggtatgttgctgagtagtcctcttggttcactggccgctgatggaagtttgtcaggagtgagaactcgcggatacgcagcgtttgacacctccggtaaactcataccgtggtcctttgaacgcagaaccgtaggggacaacgatattctgattgaaactaaatatgccagcatttgccattctgatatccatcagataaaagaacactggggtgttcaaaaatatcctcaggttcccggacatgaaattgcaggtgttgttacagcagttggaaagaatgtcacgcggtttaaagtcggtgatcgggcgggcgttggatgtatggtcaacagcacacttcctgactcagagttgatgaagcttgagaatacggaacaatacagttcaggtactgtcttcacatatggtttccctgaaaaggattctccgacagggatttctcagggcggctattcaacaaatatcgtggtgcgcgaacattttgctgttcatattcccgataacatcacattccaggaagcggctccactgctttgtgcaggcataaccacttattctccgcttatgaaggcaggtatcgtcaagggtatgaaggttggagtggctggcatcggtggtctgggccacatggccgtaaagcttgccgtgtctaaaggcgctgaggtgtatgcctttactacaacgccttccaaagctgacgacattctttcattcggggccaaagaagttatcgtggtcgatagtccggagaaactgaaggctcatcagggaacactggattttatgatatccactatcccctaccagtacgatgtcgcggcctatgcctcagttgtgaagccatacggaacattcactcaggttggcatgcctgtaggttccgagataacacttaacgcgcttggtcttgctgcatcaagagttaattttaatgcgtcattgattggcggcatgaaggaaacgcaggaagtggttgattactgttctcaaaataaaatattacccatgatccagatcatcaaggcggagcaaattaatgaagcatgggataatgtgttcaataagaaagcccgatatcgctatgttatagatgcatcgacaatttaa

SEQ ID NO: 128279 - DNA, 1050 bp, Enterobacter cloacae
atgaaaacagtcggatatgctgcattctcttccagcgcgacattagcgccttatcaatttacccgacgtgagctgaaggaaaatgatattgccatcgaaatcctttattgtggtgtgtgtcattctgacctgcatacggtgaacggcgactggggcccgcagtcgtatccgctggtacccggacatgaaattgttggcgtggtgaaagcgacgggtagcggtgtcacgaaatatcagattggcgataatgtcgcggtcggttgtatggtcgacagctgcatgcagtgcgaccagtgtacccacggtgaggagcagttctgccgccagggcatgacacccacttacggggttcctgatcgagtaaccggcgaaatcacgcaaggcggctattcaaagcatattgttgtccgtgaagaatttgtgctcaaaattccggacggcatggatctgtcccgcactgcgcctatcctttgcgctggtatcactacttactcccctttaaaaacatggaatgtgaagtcaggaagccgtgtcggggtgattggtctcggggggctcggtcatatggctgtaaaaatcgctgtcgccatgggggctgacgttacggtcatcagccggagccgtaataaagaaaaagaggcgattactctgggtgcgaaaggcattcttgcctccaccgatcaggctgaacttgaaaaagcagccagttcttttgatgtgattatcgatactgctcctgtcaaacatgacgtgaataccttcactcctctgctggatgtcgacggtacgttaatcattgtcggacaggttggtccgctggaagaacccgtaacggtcccgctgattatgggacgacgtcgcattgcaggatcgttaattggtggcattgccgaaacgcaggagcttcttaatttctgcgcggcacatgatgtctatccggattgtgaaatgatcaacatagagcacatcaatgatgctttctcccgtcttgaaaaaggagacatggctcatcgctttgtcattgatatggctacgttaagtgcagaataa

SEQ ID NO: 128280 - DNA, 900 bp, Enterobacter cloacae
atgtcaggcgaaatattccgggatctaactgcatttattaccattgcccggcacagaagctttaccagagcggccgcagagctcggcgtttcgcaatcagcattaagccatgccatccgcaatctggaagagcggatcgggctgcgtcttttgattcgtaccacacgcagcgtttccccgaccgaggcgggtaaaagattgctggaacgcgtttcccccaggctggatacgattgcccgtgagctgacctccgtcagggatttgagcagtactattgcgggtacggtaagaatgactgtctctgattttgcctataagacttttgtatggccacgcctcagcgaaacgctacgccattatccggacgtcaggcttgagctctctctggatgcagcactgaccgatataattacggagagatttgatgccggtatcagggacggtgattcgcttggcaaaaatatggcctctgtgcgcatcagcccggacttacgttattcagcagttgcctctcccggttatgttcaggataaagggctaccgcttatacccggtgatttaggccagtattcctgtattaatacccgctttacgccagggggaagcacaacgccatggatagtgaaggaaaatgaaacggggcagattttacggcctgcgggccatctgatctttaattcatattatgctgcgatggatgcagcgctggcgggttacggcattgcctttttaccggagatactcagccagccatggctggattcaggaaaacttgtgccgatcctgcctggatggtgggcagaacgaccgggtttttatatttactatccgggagaacgtcagatgctgcctgcgctctccatgattgttgaaacgctgcgatatgagccgccagtataa

SEQ ID NO: 128281 - DNA, 900 bp, Enterobacter cloacae
atggcaagagaagggttcagtgaattaatcgcactcattgcagttgcccagacgggcagttttacccgagcagcggctcagctgggcgtcacacaacctgcactcagctcgagcatacgcggtcttgaggaacggctgggagtgcgccttgtccaacgcagcacacgaagcgttgcgatgacaatggcgggccagcatctcgtcgagcgtctggtaccggagtttgagcagatcacaaatgaactggaatccctcaatgacttacgcgacagacctaccggaacgctgcgcattaccgccattgactacgtcatacgctcggttctgtggccccggttaaccccttttctgagacagtatccggacattaccgttgagcttatcagcgagtatgaaagcgtagatattgctgcccgggggtatgatgccggcgtccggtttggggccgacctggcccaggacatgatttccgtccgcatcagtgcagacgtgaaaaatgcggttgttgcttcagcagagtattttacgcgcaacccgatcccgcaacatccggacgaactgagtcagcacagcggggttcgtttacgtatgtccacctacggtgggttgtatgactgggaatttattgaggacaaccgcgagttcagcgtcaaaatcgacgggccggtaatatgtaataacgtttacgacatactggaggcagtcaggcggggcttcggtctggcttatcttccgctggatatggttcagcctttgattgatagcggagagctgatttctgtgctccaggactggtgccctctctggccagggctacacctttattatccaaaccggcgacagcattccagagccatgagtctgatggtggaggcactccgctttcatgtgaatgactga

SEQ ID NO: 128282 - DNA, 1023 bp, Enterobacter cloacae
atgtccttaattaaggtttctcttttgtgtgcttcaatgctggcggcaggctctgttatggctgcacaaaaaattccttcgactgtcgccgagggcgtcaatgtttcaggttcgcaaaaagttacgtttaaaaatggcagcttaaccatggcgggtaatttatatctcccgcctgattatgacagcgcccgtaaatatccggctatcgtagtctctcatccctgggggggcgttaaggagcagacatccgggctttacgcacaacagctggcaaagcgtgggtttattactctggcttatgatgcgtcgcattatggtgaaagcggtgggttgcctcgtgacctggagaatccgtccgaccgtgtacaggacatccgcagtgctattggctatcttgccagcctgccgcaggttgatccgggccgcattggtactctcggcatttgtgctggcggaggctatacgctgcacgaagcgcaaaacgatttacgcgtaaaggctgttgccggtgtcgtcacctatgatattggcgatgcaacccgcaacggtattgaaggcctgccggttacggcaagcgatcgcacaaaattgatgcaaagcgtggatgaacaactgaacaaagaggccagcggtgcatcggtgctggttcagcagttgctgccttcacgggatacggtaaatgccagtacgcctaactttgtccgggaggcgactgattattacctgactccgagaggagctcatccgaatgcacgtaaccgttatgtcgtcaccagtccaggactccatatggcctactatccacttgagcatatggatttgatttcgccccgccccgtgctgctcattgccggtgaaaaagctgaaacaagaaaattcagccagcaggcttatgacggagcgaaagaaccgaaagagctggttattattcctggtgcatcacattttgatttatatgacaagccgcagtttgttaaccctgcactgaataagctggcagagttctttagcaaaaacctttaa

SEQ ID NO: 128283 - DNA, 765 bp, Enterobacter cloacae
atgaatatttcactgaaaaataaagtcgcgctggtcaccggtgccgcgtccggtattggatttgcaactgctcgtgcttatgcagaagcgggggcagccgtcgtgttagcggatattaattctgaactggtagataaggccgcaaacgatctgatttcccgtggcttcgaagctaaatcatttacctgtaatgcggcaaatcttgatgaagttgaagcgatggttcaattcactgtttctacttacggtcgtctggatatcgcatttaataatgccggtgtacagaataaacttgtcgaaatcgcggacgctaccgtggaggacttcgaccgcgttaatgccgtgaacctccggggcgtctggggatgtatgaagtatgaacttcagcagatgcgcaagcaggaaagtggtgtcatcgtaaactgttcttctatcggcggaattgtgggcggtgcagaacgtgcgaactaccacgccgcgaagcacggtgtgctgggcctgaccaagagtgcagctcttgaatatgcaggccggaacatccgggtgaatgcagtttgtccgggacttatctggacgccaatggtcgatggtatggtcgcatcaggccagaaagaagccctggaaggcatggtgaaagccgttccgttgcagcgccatggtaatccggaagaaattgccgatgccgtgctctggttatccagtgatgcatcgtcctacgttacaggccagtcaatttcggttgatggcggcctgaccatgcgctaa

SEQ ID NO: 128284 - DNA, 2103 bp, Enterobacter cloacae
atgccccgacccattccactcgaacgttatcgcaacatcggtatctccgcgcatatcgatgccggcaaaacaaccaccactgagcgtatcctgttttacaccgggatgagccacaagctgggtgaagtacacgatggcgcggcaaccaccgactggatggcgcaggagcaggagcgcgggatcaccattacgtcggcggcggtgagctgtttttggcccggcatggacagaggctttgaaccgcaccgcatcaatattatcgacacccccgggcatgtggatttcaccattgaggtggaacgttccatgcgtgtgctcgacggcgcggtgatggtttatgactccgtcggcggcgtgcagccgcaatcggaaaccgtctggcgtcaggcgaataaatatcacgtcccgcgtctggcattcgtcaacaaaatggaccgcccgggtgcggatttcttccgcgtggtgcggatgatgcaggagcggctgaaagctaatccggtcccgattgtgatccccgtgggcgcagaggaacacttcaccggcgtggttgatctcatcaagatgcgcaccattctttgggatgatgcgacccagggcatggcgttcacctacgcgccggtgcccgacgatctgctgagcaccgcgcagacgtggcgagaaaaaatggtctcgtctgcggcagaagccagcgatgagcttatggataagtaccttgagacgggcgaactggatgaagctgaaatcatcaaagggctacggatccggacgatctccggtgaaatacagcccatgctgtgcggcagcgctttcaagaacaagggtgtgcagcgcatgctcgacgcggtgattgaattgatgccgtctccactggacgtgcccgctattgatggggtagacgaagatggacagcacgccgagcgccacccaagcgatgatgaaccattctctgcgctggccttcaagctgatgagcgatccgtacgtcggacagttgacctttattcgcgtctattccggcatactgcgcaaaggcgacgcggtttataacccggtgaagggcaaaaaagagcgaatcgggcgcatcgtgctgatgcatgccaacgaccgccatgaggtggacgagttgcgcacaggggatatcgcagcctgtgtcgggctgaaagacgtcaccaccggtgacacgctgaccgacccgaatgcggtgatcacccttgaacggatggagttcccggacccggttatttcgctggcgattgagccgaaaaccaaggccgatcaggagaaaatggggattgccctacagcgcctggcggcggaggatccgtctttccgtctgcacacggacgaagagtccggtcagaccattatctccgggatgggcgaactgcatctcgaaatcatcgttgaccgcatgaagcgtgagtttggcgttgaggcaaacattggtcgtccgcaggtcacctaccgtgaaaccctgcgtaaagcggtgaaggatattgaaggtaaatttgtccgacagtccggcgggaaagggcagtacggtcatgtggtcctgagtctggagccgttagcagccggaagtggttttgtgtttgaagatgccaccaaaggcggggtagtgccgcgggagtacatcccgtcggtggaaaaaggcttgagagaagccatgaatacgggtgtgctggcgggctatccggttgtcgatgtgaaagcgaccctgacgtttggttcctaccatgacgttgactcctcggagatggccttccgcatggcggcgatcctcggcttcaaagagggcgcgcggcgggcggatccggttattcttgagccggtgatgcacgttgaggtggaaacgccggaagagtatgccgggaacattatgggcgatctctcctcccgccgcggcatggtgcaggggatggcagagcagtacggcagccagattattcgcgctgacgtcccgctggctgaaatgtttggctacgccaccacgctgcgctcgatgtcccaggggcgcgcgacgtatacgatggagttccatcattttgcggaagctccgcggaatgtggcggatgagattattgcgaagcgcgtgaagagttaa

SEQ ID NO: 128285 - DNA, 123 bp, Enterobacter cloacae
atgtcaatgaaagcgttgctgaagcacggtatatctgagaaagagattaccgccttttttgtcttctctgagacgttcgacgattcagcgaccgaggctcattccggctgcgtcaggctgtag

SEQ ID NO: 128286 - DNA, 1002 bp, Enterobacter cloacae
atgacaaaattacctcggttttcactcgcctttattcatcctcgttactggctcagttgggcaggcatcgccgcactctggtgtacggtccagctcccatattcgcttctgttaaaagcagggcacggactcgggcgtctggccatgcgtctgcttccacgccgcgtggaaatcgccagacgaaatcttgagctttgctttccggagatgaaagagggtgagcgcgagcgtttgcttgagcgtaattttgaatcggttggaatgggcgtcatcgaaacgggcatcgcgtggttctggcctgactggcgcgtgcgcaaacacttcagcgtgaccggctacgaacatatggaacaggcaagggcgcaaggaaggggcgtggtgctcattggcatgcattttctcacgctggaattaggcgcacgcatctttggcatgctcaacgcgggtattggcgtctatcgtcccaacaacaatgcattgctcgactggctacagacgcgcggtcgtctgcgttccaataaaaccatgctcgaccgttacgatttgaagggcatgatccgcgcgcttaagcaaaacgagatcctgtggtatgccccggatcacgactatggaaaaacgaatagcgtgtttgtgccgttttttgccgtcccggacgccgcgacaactgccgggagctatatgctggtgaaaagtgccagaccggccgtgatcccgtttgtaccacgcagaaaagcagacggcacagggtatgagctgattatcctggacgatattagcgataccttgcagggaggcgataaagtggccgtggctacgcagatgaacagggcgattgagcgtgcggtgatgatggcacccgagcaatatatgtggctgcatcgtcgcttcaaaacgcgtcctgaagggcaaccggaccggtatgcgcgaaaaaaacaggtccagtcctcagtcagaactttcgctgccagcgatatgtcggatcggtcgagtatccagcagtaa

SEQ ID NO: 128287 - DNA, 1122 bp, Enterobacter cloacae
atgtggcctatccccaaagtacccgaaaaaagtacaattgccaacttgtcatacaagcgatgggggattgttcttatttctatgttaatagtttgtgctcttttaggtttttctttatggggggttgatgaatataagaaaatagagtttttccttctgcttccggcatttttcatatggttatgtctttttggcgcagcgctgaatcgttatgaacagtcaagcattgctctttctgcctggaaagaggaaactgaacgaacaaaggcattatggcagcactggagtcgacaacagttgtcagtggttggaaatgttatccttactcctgaggacaaaggggctgagagtttgcttgggcctttgtctgatattccagcatatccggataaagttagaccgctgtcgcattcctggggttccatccgtgttttatctgatatgatcgacaaacagttggagcaacagtatccgggttatcggaaatatttgcatactgtttatgtattacaaccctccagttgggacaaaaataacgtaagccagattattctttcacaatgggatttacttcccgaagtgaattattccgttgagtgtattgaaaaatttcacgacaatgttaattttgatggtttgatattagttcttagcttccaatgctggttgacaggtataccgaaacaatccagcgaaatggtctctgctcagcttatatcatcatcaactttttccaaacgacatgctataccggtacttgccggattaggccgtgttatgcatctggataatgataaccttgaaaaagctttagaaatgctttttgaatacaatcgaatagataagagtgatgtacgtcatgtttggctttctggtataactgctgatattacttcaaaattgatgcagtatgccgaacgatttcagtggaaacttccagagaaacatcctttttatttaattgatttttcttttggtcctcccggtgaaatgacattccctgtttcactcgcattgttggttgacgcagctcaaaatactgaagctaaccaattattaattatccaggcatcacctcagtccaggctgctttgtttgattactcggaaacattacttatga

SEQ ID NO: 128288 - DNA, 261 bp, Enterobacter cloacae
atgtctggaattgtttgcctgggtgatgataccactcatggtggaaaggttattgccgcgtcgtcgacaatgtttatcaatggtattcaggttgccctcgtcggtgatttagtttcttgcccaatacacggagtcaatcagattaaagaaggagattcaagagcatcagaaaatgggttaaatgttgttgttaataactgtgcttgtgcctgtggatgcaaagtcattagttctcacatcgaaaatactattgagtcttaa

SEQ ID NO: 128289 - DNA, 999 bp, Enterobacter cloacae
atgaacaagataaacgctgaaatgaaaccttactgcgtcgggcgctatatgctcgacctgccatccccctttacagcttataatgacgctgcaccgctggataacaatatctgggcggcggtgatttcacggcctgaggatatatataaaacctacctggcgacaaagaaaatgtaccacccaggttttgtgcagttaatcgctttacgtgaaaaggcgctacaaaacagtaaaaccatagacgcccgggatatgccgtttttaaaaaaagtctggccgttacccactggtatggatggtgttatttttgaacggaatgataatgagggtaccgcagattttattcgcatactggaaggctatttatatactaacggcgtagttattaaatttcagaagcagaccattaatgattctagccctgtatataatgagcaacgaagggggcgacccgccagaaactatgtctcaagtgatgtcagccagatgcagtcgctgatggcgagaattagcggcagggataatgacgtcattccgaggaaaccaggttcctgtatcacccatgcgtttattgccaccgacccgacggcaagggaacgggaagatatctccgttgggcttgaaagtaagacactggaacatatcagagttattctttctaccgataacctcacccgagaaaaagacacggtgctggagagagcaggtgagatagagagtaacttgtaccgtggtcatgtagaaagaaaaggggcctttagtgttaacgggctgcaggcccaggagtttctggcaacaggtttacaggcatctcaggacgagccgcgttacggctttgatatgttcatcaatgaaatgacagccagctacaagactcccaattttattctgaccctggagaatgattccatgccgccaacctcctacagcaaggaggaaattatcgccttctgggacacgatcagccgtagcgtacgcgtgcgtcccggcgcgttttga

SEQ ID NO: 128290 - DNA, 1620 bp, Enterobacter cloacae
atgattgaagccactgaaagcaattgtgttctgctgggatacgacaagtttggtcatcccctctacaaggccattgccacgccgaaagacaaggagcaatggctcaaactttataagatgccggacagagtcatcccggttgtatttttaccgggggtgatggggagtaatttaatgagtcctgacggcaagtctatctggaaagtagatggaacatggagcatgaaatcctggttagtgcggggcgccgaggaaagaaaaaaattactggatcccaccaaaaccgtggttgatcccagcgggacaatcgagactgaaagcccagaagagcggctgttattttcatcgcgcagggacaggggctggggggaagtcggggcgatgagctatggcactttcctcccctggctccaggaagcactgaacgataaccagataatgctaacaaataagaccagcaaaaatggttgcctgaccttgcgtgagaggctaatggataaacctttgggagccgaaacgggtgagagccccctgaccactgaggaagtggctttaagctatcagtacctctttccggttcatgcagtgggctataactggctacagtcaaatatggattctgcacaagcactagccgatcgtattgaaaagattattggcgattacaaagccagcggacgcaaatgcgaaaaggtgatcctggtgacccactcaatgggagggctggttgcccgttactattcggaattgttggacggagaattcggacagaaaaaaatcctgggtattgtacacggggtgatgccggatcggggggccccgatggcctataagcgcatgaaagcgggtgaagcaggaataaccggtttagtaattggtggtaatggcgctgaaatgactgccgtgctggcgcaagcgccggggcctttacagctactgcctggtaagggatacggtatgggttggtttcatgttgaaggccttaagcagcctttaccccagacaaatccctatagggaaatctatacccagcgatcggtgtggtgggggttatgtgaggaacgctttattaatactgaaaataaaaatataaataaagtccaactggagcaggactggcaatcatatgtggacattattgatggtaaagtcagaaaatttattgaggggcttgatgggttttaccatgaacatacctatgccttttatggcaatgacgggaagaattacccctcttatgctgaactacactggaaggacgtaagcggaaaacataccccggaagcctaccgctcgctggtcagcgaacagggagaaatattctacccggcggacaaatttaaccagaccattcgctatgccacgctggaaacaccggaccaggggtatgttagccgcaaatatgaattattacctcctgtggacgacggtgacggcactgtaccggtcagagcggcagtaattaattctccgaaattaaaggcccagctcggtgtgggcgttgaccacgagggggcatacaaatctgacaacaccatggatgcgcgctggtttactcttcgatcaattataagaattgcacagcaggttaaaaatacggggcttgcttatcatgaataa

SEQ ID NO: 128291 - DNA, 1371 bp, Enterobacter cloacae
atgcaaagctacgatttaaaaataatgggtggccgaactcaaattggatcaggatggggtaataacgagcataaactcgttgcgcttgataaaataactctagctccagtcattgttgactggagctacgaggatactcctgaaaaaatttttactggtagtcgatttaccgatacggagccaacaaaacggcttttagtcaactctgatatatacgtgcgtggcagcctggttaatataagcaatataggtggagcaggtgcttccttcgccgctattcaggataatggtatggtcgtcgcatggggattgccgggagaagcggatactaccccaaccagtgatcgtaaccatgatgttcaagttgtctgtggctcagaagaaacctcagtaggtattaataaacttaatcagatttttgtatggggacgaacctctgatgagcctatccccgaagatattgcagcccttaacgatataagttttgtgaaaacttttaaaaaatggggtgaatatgagtatagtgctttcctggccataagaaaaaacaaacaaattgtgcaatggaacgatgttgggttcccttggacaatgcctgaacatattgcagaaatgaaagattttattgccatagaatccaccgatggtgcattcgctgcgataagagaaaatggccatgtcgttgcatggggagatccaaaatctggtggcagactaccggaacatttaaatgatatatctgatgccacaaagatattcggcaatcacgatacctttcttgttctgcacaaaagtggaaagatctccacatggagtgaagctgaatataacagcatagcgccagaatacattaccactctcagcgacatcaaaaatatttaccccttttatggtggttttattgcattgcgggaaaataacatgctggtctcatggggtgatcatgctgaacctatcccagccgaaatagcctcgcgctcagatataatcgatgttcaggttggaagaaaccaggctgccgcagtacttcttccgggaggcaaagtcttctcatggggtgaattgtcgaacccttattttatacagcaaccagaaaatctatcagaggtaatatatatttgcgcaggagcagactgtatagccgcactcaaaagagatggcagcgtagttgcctggggccatcccgatcagggcggtgatacttctcctgttgcggatgagctatataatattagagcaatctatagttctacttatggattctgcgcccttcgcaatgacggaaaggtaatcgtttggggtgaatatgggggggatatgcgcaatgttcctccagaacttcagaacaacattacttatgcatgggagtga

SEQ ID NO: 128292 - DNA, 345 bp, Enterobacter cloacae
atgtttaaaataacggtttgcttattaacgtttaactccgaaagaacgttgcacgatgttattcctcctcttttaaaaatagcagatgaattcgttgtagttgattccggcagtacagacgcaacgatatatatttgccagagttatggattgtcgcccatattcaaaaaatatagctggcacggcgagcagatgaaccatgccatatcccatgcgcacaacgactgggtgctgtgcatggacagtgacgaaatactcgatcaagaaaccgttggtgctattttaaaattaaaaatgggcgatgaacccgaaccggatatggcgtggcggatatgtcgtcactag

SEQ ID NO: 128293 - DNA, 1764 bp, Enterobacter cloacae
atgaataaagaaacaataattagtgtattaattcgtttactgcaagagcctcgtgatggtcttatattgataaatggagagtggggggttggtaaaacttatttcttacagtttgagttcaggaagtattataaaaaagaaagtcatttttacatgtccgcgcttggcttaaacagcttgcaagacttcaaagatagaatgttaagtgtaacatatttagatagttcttcagaaataaaaaaacttagtgaactaaccgcaagcgccacctcagcaatctctcaagaagaaagcttagggaaatttactgaacaagttctttcaacgttctcaggtgcgatgaaagattacgttctaaaagatctttgcggtatatttgttattgatgatcttgaaagaatcccccaagaattacgagatgagatagcaacttattgcttgcaaaactaccagaaagatcaaagacttaattatattcttgtcggtaatttttcagagcaaagcgatcaaatcctaaatcacaaagagaagattataagcgatgaaatttatttctcgattaacaatatctcagaaattttagaacaaaacttaaagattaaaaatgaaatctacagaaacaccataacaaaaaccataattgattttgaagaaaacaatctaagaatcatcaacagagtaatcgtaaaactatcacctctcattgaaggctcagagatagaagatgatatatcggaaatagatattaaaaatctaacaagctcattatgtgcgcatataatacttaaggaaaaatttgcttatcgtgaaaatgattttcgccaaaattatttatcatcatcacttaaaactctaacaaacacatctaacgataagacggagcagattagcaaagaagaaagtaatttattaaatatcactgcttacaaatcttacaataacttgatggttccatattgtttcaacgtaatatcaaaaactgatatccttccatacctcttcccaagaaaacaaaaattacaaaaaagtgattatgctgccttagcacaacctgagctatacgacatttcagaaagagattatttagatgaagtggaaaaagtaatactcaaaaaaaacaaaccaaaactctcaatttggctgatggctactcacaattaccttagattatcacaatcaaattatctttctacaagaaaggggttaacgaagaaagcaattcaaagtaaaaaaacaacgtttagcgatgaagaaataaaaatctatttttccgagctacatcctaacatcgatgacatccctcttcacgtattaagaagagataatgatgacatacataatttttttgttgacaaatacaaggaaataaaaagtcatgaaaagataaatgagttaagagataaaatgattaatgagggttggtgtgctattgatgcagatatctatcaatcaaagttccaattcaacctgctcgaaaagctcaatgtagacataatcttttccgcaataaaaactaaatggaccatccgtgacatcaacaccttctccaatcatttagcatcactctataatttctcaaatttagctgacttcctatccggtgaattgccgcatctcaggaagttacattctgcattaagctctcatcataaaggaatatcaaaatctttccgaaaaggtgcgattatgcaattaacagaaacggttgggaatattaaaaaggctttagaagatagtatcgccactaaatctataaatccttag

SEQ ID NO: 128294 - DNA, 1668 bp, Enterobacter cloacae
atgcaaccagcaaaatgttttttccatagtttgtgctttgttcctccagatccattatcttctgggattaaaatattcgggttttctgagtttctagcttcgcttgcacttttagttgttgtatttaccgtaacagatactagatacaaattccgtatttccatcgccccactcccactttacgccatcacttttgcaataattgcactcactggcatcataagtctagtatctgatgtctggagcgcaactaaatggtgggtgcttgattcaagttttgaaataaagatatacatccaagcgatacttgggttttgttttttactttgctttatgttatggatatattacgcttttcttaaacctcctgtatttagaaaaagaaaccaaatgaagtatataaatgctttatacaaatacattgcaaaaggcgttgaacaggaattagccataataagtgacgaattaggtcgctcgtccaagtcattaataaaacatgctggccgaggaaatagtgtaactactcaaatagccaatgatattttatatttaataggaaatagaaatttttgcaaagtgcttgtggctacatcaccacgtactgctacatatttctttgtaagcacagatacttttaaaaattatgatattccactccatcagttctccgcaaacgtctcacgagaggtcataaagaataagaactctataatttaccatgaggatgatggatatgactctggcttgatgggagaaatccaggagtggtcaaaaagtttttatggcaactaccgacttatcgactcacttcaaagaggacatctttctccatttcagttcaattataaaacatttttaggctttgataacgaacagtgggatgcatactttagacttagcattatatatttagaggagaaattaaaagtagaaaaatttattgacacaaacccagtactaaattctgtattagaaagcataaaacactgcactcaaaatctacacatggtagataaaacagatgatgagattatgaaaagcgaattggtggagaaattacactcatcaatgaatttcattgaaaacctctttggcactacaacaaaatacaaagcgaaagccatttatcaatatagtgtcaaggaacgacggaaatatgttttcgatatacatcataatatctcaagcgctttaaatgaattattattcaaggcatcactatgccaagcagataattttaccacttggcacattcaaaacaatattgtttgggatggcatattttcaccccatgaaaagtcccttggggagtttcatagaatgacaataagaaggacaataagaaaattgtatgaagagctcaaaagcattgaaaaaattgcaaatttcaaaaacacaagaattgcaggtcttatattaaatgtattgggattagataccggaccttgttttgcaacaagaaacgataaaaggcttgctctcatcaaaagacttactcagaaaataataaaagaaaaatttctaacacttttagctcaacaaccccaagttgcggaaagcatgttcccaaaatgcatatcttacgacccggagagaaaatgcctagttaagacctacgctgtcggcataaacaaagaggctccaaagcattatctttacctcgaatag

SEQ ID NO: 128295 - DNA, 1512 bp, Enterobacter cloacae
gtgttagtacattcggactctatggcaagacatatgatggcatcaactcgttcgagggttcaaaaatacaatccatacacattaatttctctttgtttaaaatacaataacaaaaaacacgacactcatatagatatgatgcgacatatgccatggattattaatttatgcataaaatggtctgccgcagttatatcaagcaagcgaacttttcgtgatattaatgaacagcaatccatagaacttttccagagagtgtttgagtctcttagttttatccctaatggcgtaatgcaaaaagatggacttgatttttttatcagaaatatgatttatcaacagatgatatatcaaaaaaccgatgcgttaaatacaattagtcgacaatcattcctctttgaagggctagagaaaacacatagcattgaaagaacatttgaagaactaacgaaagttaaaatcgaagactttctggctctttcttttgtaatgatttcattagtgctcagtaaggaaagtactactctgttcactgtgaaaacattcgaaattattttcgacaccataccagaaagtacagtgatgaattttttagattgtttatcaatcgagcaatcagagctacagaacttcgctagagctaatcttagcaataatcccctaacagagtattatttacctacaccttttttagaaaaaccttttataaaaactaaagatgagtatttgcaaatccatccgcaactgacatctacatgtcttcaaacttatatttacgatttactgcgtaaaaataatgctgaaaccttcatggataaatttggaggattatttgaaaattcccttcacaagctattaattgagagtaaattcaaattccatattgaaaaagaactaattaaattattacctaaagataataaagttgttgattttattataccaagcgagaactccaatatttacatagacgttaagggtgtagaaatacacagtagaggaatggttacacttaaccctaggaatatatcaagcacaataaaatcatccgtattaaaagcgatcaagcagtcgcttgaagtacatagaggtcttgatatagtaaattcatcactaattccttatagagataatagttttataatatgtgttacattcaagaatttatttcttggaggagggaaactaatttttaactcatatgctaaggaagatatcctgagaatatattcaaacttcgaagagaaataccaaataccttatgagaatatattttgtattgcatttgaagaatttgaatacttattagcatcatgtgctttccataaaatcgcccccatagacgttctacaatatatcgttgtacaaaacagggatcctttgacctcaaagctcatgttcggagatcacttaaaacatttttttaaatcggtcaaaaattccacaatagtcaatgatgcagggttaagaagtatagataggattgcatctagactcatgcccaaaccgtga

SEQ ID NO: 128296 - DNA, 510 bp, Enterobacter cloacae
atgtttgattataagatttccaaacatccacactttgatgaagcatgccgcgctttcgcactgcgtcacaatatggcgaagctggccgaccgcgcaggcatgaacgtccagacgctgcgcaacaaattgaacccggagcaaccgcatcaactcacggcgccggaaatttggatgcttaccgatattacagaggattcaacacttgttgatggtttcctagctcaaatccattgcctgccatgtgtgccgctgaacgaagtagccagcgagaaaatgcctcattacgttttgaatgctacagcagagatcggtcgcgttgcagcaagcgctgcttctggtgaacaccagacaacaacggaacgccgccaggttatcgaaagcatcaattctgtcactcgcttaatggcacttacagctgtttccctgcatgcgcgcctgcagtacaacccggcaatggcaagtgctgttgatacagtgacgggcctcagcgcgtcttttggtctgatctga

SEQ ID NO: 128297 - DNA, 852 bp, Enterobacter cloacae
atgagcactatcctgaaatgggcgggaaacaaaaccgccatcatgtccgaactcaaaaagcacctcccagatggccctcgactggttgaacctttcgcaggttcctgcgctgtgatgatggaaacagactatcctcattatcttgtcgcggatattaatcctgaccttataaatctttatcaggtgattaaagaagacgttatcagctttattcatttggtagagcgtattttctccaagttcaccacggaagaagattattataaatgccgccagttttttaacactgtacccctggagccaatagaaaaggcagcttatttccttttccttaatcgtcattgttatcgcggtttgtgccgttataaccagcgcggtcttttcaatgttccatatggtaattacaaaaagccttatctgcctgtcgatgaaatacgtacatttgctgaaaaggctgtgcgcgcgacgttcatctgcgccagttatgacgaaacgctggcaatgctgcaggcgggtgatgttgtctactgcgatccgccttataacggtacttttagcggttatcacactgccgggttctctgatgatgaccagtatgatttggcatctattctggtgcgccggtcatcagaaggccatccgatcatcgtgtccaatagcgacacccgcctgattcgttcgttttatcggaaatttacccttcaccgcatcagcacaaaacgcagcattggcgttgccgcgggcgaagggaaaaaagctgacgagctcattgcggtgcttaaaccaaagatgtgcgtaagcgtcgatccaggtggccctgattgctctgttgtatggaaggtgcctgcgtga

SEQ ID NO: 128298 - DNA, 831 bp, Enterobacter cloacae
gtgaaaggggcgcagctcggggcccatcattttcacgggacgcctgtttgggggagtgcaggtgatgttcatcgcattgcggtgagcggagccggtgctttcgtttcatatgtgcgcccggaccagatagcagcatctctcaattttgccgccgcagtgggtattgataacggagcattttcagcatggatgcgtggcctggttattaactggtgcgaattctatgagtggctgcttggctattaccaccatcctaaagtggcttttttcgtgatccctgacgttgtggaggggggagaaagtgataacgatgcactgattcgtcaggttcctcgcatgtttcgggataaggcggctcctgtctggcacctgcacgaatctatagatcgtctggttgagctttgccgcgaatggccccgggtttgttttgggtcatctggagaatatgcggttatcaggacagagcgctggcatcgtcgtatgcaggaggctttcgaaactatttactgcaaatatacctttcaaaccagagttcatggcctgcgtatgctggatgggcgtgtgatgggcaattatccactcgccaccgctgacagcacgaatctggcctgcaatgttcctaaattcaactctaaatatcctgaactaaccagggctatccgcgaggctgagtattcacgcggtcttagcgaaaaagagctcaaagccgtaattttgaaaaaccgttgcgccattcttaaaggcgctatcgaggcagtgcggccgccctctatctctgaatggtcctcaaaagggttgcagcctttccagcttgaactggagatcgcatga

SEQ ID NO: 128299 - DNA, 1434 bp, Enterobacter cloacae
atgatccagccgaaagtatttatatcctacagttggtccagtaaaactcatcagcaacatatcaaagatattgcggaacgattagctgctgatggagttgaaagtgtcatcgatatttatgatttgaaagaaggtgatgataagtaccattacatggaaagaatggtacaagataaaacagttacacatgttttagttatttgtgataagaaatactctgaaaaagccgacttaagaaaagatggtgtcggtgttgaatcaatgataatttctcaagaaatatattcctccgtgtcgcagtcgaaatttataccattgatatttgagtataatgacaacggagagccatatacaccgacctttttgaagtcacgtatctatattgatttttctacaccagagaaagaaaatgataactgggagaggttaattagactgctttatggtaagccagagtttactaaaccaccgttaggtaaacctccggtttatttagagcaggatacttcaacgcctacatatgaaattaacgcaaaatttcaaactttaaaatcagctgtaataaatcaaaagcagaatatcaaagagtgtagaagacaatttttagatgtttgccggaaccactgtgtttcccttcaggtagtaacacaaccaactgcaaatgattttgctgcagaagttttgcaaatccataaggagcttattcctgttagagacgccattacagattgggttctactcgagggcgatacacagggtgaggattttcctaaagcactgctgcagtttatggaagtattattagcgattaaaagtcgcccaaaaaatgtgaattcatggaatgatatatggtttttgcctcatcaaatttttgcttatgaaacgtttttatatgttttgtctgctttgataaaaattgaatcatttaaatatgtacatacgttactgcatacatcctatttgcttccagaacacataactagtccggggatggagtttgctaattacagtgagttttatttgaattctgattttcttcaaagtaaattgtcccctgaaaactatcgattgcattcccctgttgctgagttagtaaagcaaagtgcaactagagacgatatctcttttggggatttgaaacaggctgatcttgtggctcttatgatttcctttatcaatccgggagttttttggtatccgcaaatgttgctatattctgggcattatgaaaagtatcctttatttactagggcaatacagcatagaggattcaagaatattgcagctattactggtatcagtgatagtaaagttttggctcaaaaactgacagaaggtgaggctcagcgtaataccagcagatggcatcaattcggttttagcagagatttccttaatcagatgaatgttagtcgtttggatagtattgattga

SEQ ID NO: 128300 - DNA, 447 bp, Enterobacter cloacae
gtggatgacctgcagagggtggatgactggctggcggccctgctggcgaatctggaaccggcagcccgcaaccgtatgatgcgacaactggcgcaggagctgcgccggtcgcaacagcaaaatatcaggctgcagcgcaatccagacggcacaacctttgagccgcgccgggtgacggccagaagtaaaaaggggcgcatcaagcgccagatgttcgccaaattgcgcaccactaaatacctgaaaaccgcagccactgcggactctgcctgcgttgagtttgctggacgggtgcagcgtattgcccgtgtacaccactacggcctgcgcgacagaattacaaaattaggccccttaataaagtatcctgaacggagactgcttggacataccaacaatactgtagaattagtaaaaaacattatgttagattatatgaaacgttaa

SEQ ID NO: 128301 - DNA, 1092 bp, Enterobacter cloacae
atgggattgcaggatgaattaaatctagcaaagaaagaaatatctaaagatagctttgatatgtcagttggggagctgagtcgtatttacgaaagaaatgaagttataattaatccaaattatcaaagattgttcaggtgggatgaatcacagaaaactcgctttattgagtcattattgttaggcattcctattcctcctatatttgtatttaccgatgagagtgggagatgggaggttattgatggcttgcaacggctttctactatatttgagttttcaggtgtgttaaaaaaagacgatgggacttgtcatcctcagttcattccttctggaacaagactactaccttcccttgatggtatgaagtgggaaaaagaatcagaagacgatgaaaaagttatacctttatctattcgtttagattttgaacgctctcggttgcgagtggaaatacttaaaaaggaaagtgatgaaaagacaaagtatgagttatttgaaaggttaaatacaggtggttctagactcacagatcaagaagtgcgaaattgcatcatggttatgcttaatccggacttattcaaaaaacttaatgacctaagtcagtatgctagcttcaaggaggtaactcttcaaactgagaaatctatatcggaacagaagccattggatcttactttgcgttttcttgcctatagatactctacttttgataaaagtgtagatataaatgagtggttaaatactatttctcgagatattgcatcggataaagcttataacatagatgctgagagtgatttatttaagagaacgttcgatgttttagctaaaactacaggtcagaactcgtttaaaaaatatgatgggaataacttctcaagaggttttttaatttctgcttatgaggttattacgcagggtattgctgcgaatattgataaatatgagaagcagtcagcgggttatgtcgaagagaaaataaaagcaatctggaataatcctgagtttaccaactatgctcgggctggagttaatgcgccaagtcgtttgattaataccctgcctaaagctccagtttggtttgactaa

SEQ ID NO: 128302 - DNA, 405 bp, Enterobacter cloacae
ttggtttatgtgacccatgcccttaaaaaagagattcatggattttcagaaactaaggatgttgatacatgtataagatttttaactgcattgatagagaaaaagactaatatagcagtgataaggcatgaaaactatgttgataccgagtctaatttaagttctaaagttttcgataacatcgctaagtctattggtgtcgacactcatcaatacaaggacttttatccttatattgatgagtcaattgtgaatgcgaggaacaatattgcacatggggagcgcttgattgttgagcaggttagttttgaacaactaactgaaaaagtactcgctctaatgaatatgtacaaaaatgatattgaaaatatagtttttacaaaggaatacttaatatccatttag

SEQ ID NO: 128303 - DNA, 597 bp, Enterobacter cloacae
atgcagaaagcgataattgaattcggttttgccacaacagcaggtaatgttgtggtgttcaattacgatagtgagactcgggaaattctgtcttcaacaatagagtatattcctgtaggtgtgggactccccgcgaatgcgtgtactgatgccccacctgagggaaaagatggttttgttgtatgtcgaacgattgcggacgatagctgggaatatttagcggatcatcgtggcgaaactgtatggaatacggaaaccggcgagcctgttgaaataaccctgccgggaggttatccagcggggacgacaacaatcgagcctgcgacaccttacgatacatgggatggtgagcaatgggagacggatgaagctgctaaaagcgttgccgatgttaaaaatgcggagttaaaaaagggagagttactccttgtcgcaggggcatcaatcaatcctctgcaggatgccattgagctggatatggcaaccgatgaagaaaagcgccgctatgacgcctggcgaaaatatcgtgtgttgctgacgcgcgtggatacatcgctggcaccggatattgactggcctgaacctcccgaagattaa

SEQ ID NO: 128304 - DNA, 354 bp, Enterobacter cloacae
atgaaactaacgtatctgacacttttgattctccatatcaactcccttatcgactcagggaagtacaacgacattacaatcgaagaagttcataatgccatcgaacgcaaacagcttttaaagttcctaaaaaaacgctgcggcaaagatattgatctcagtcttcacttggatgaagacattaaatttgaagatatctatgaagagcggatgctcagcctttatgatggctacgcagggaatgagtcaagaaagtggggtgtccgtaacctaggcctatgcttagttttagcctggaccaacgaactgattcaaatgtctagcgcattcccagaacaatacccactaaagtaa

SEQ ID NO: 128305 - DNA, 183 bp, Enterobacter cloacae
atggcgaaaatgaatgatgtgaggattacacaggccgaaattgcacgagatgccagactgagcccggagtatgtggaagcgataatggcgcactatgagccgctgggaaccaatgaggcaggcgagccgctttattcaattgttcaaatgtgtgctgcgatccttcgaggcacccagatgtaa

SEQ ID NO: 128306 - DNA, 1203 bp, Enterobacter cloacae
atggtgggcatggcatttacacactcatcaagtgatttcagttttatcctaagcgatgtggcgaataaatccatgcttcagggctgggctgattcccctgaaacgtttgacaggtggactcgagccgggaatctgccagatttcaaaccgggacaccgtgtcggcctcgatacgttcccacgcctgcgtgaggttcgtccgggggcggagtacaaatacgctaccatcggcgagaagggagaaaaaattatactggccacttacggcgaactgttcagcatcgatcgccagagcatcatcaatgacgatctgtctgtgttgtccaccattccgatgtcgatgggacgagcagcaaaagcaaccgtaggggatctggtctatgccgtattgcagaataatccggcgctgagtgacggcttgccgctgtttggcgtcgaacacaataactatgttgctggtgaattgtctgttgataatctggcctctgcacgcgctcagatgcgcctacagaaaagtcaggccgggcaggtgcttaatattgtccctaaattccttattgtccccgctattcaggaagcgttagcagagaccattatccgctctatttctgtgccgggctcatccaacagcggaacacataacccggtaagggatacgctggatattgtcgttgagccgcgtcttgatggcgtggatgaggatgcgtggtatctggctgctgcacagggcagcgatactattgaggtggcggagattttggggcgcgatcgtaaatccgtcgccgcgatagccagaccattgaagccgacgccggacagcagcaagacccggaaaaattacaccgttcgtactttgctgcaggcgctcggcaacccgcaggatctggacgtaaaccagatgaccccggcagaacggcgagcgcactggcaggcagaaaatgagcgattgaagtatgaggcggccaggcgattcttgataccggctgaagaatgcgcccgtgagttcagagcgatagccagggggactatcatgacacttgaaaccctgcccgatattctggaacgtgattgtgccctttcgaatcaagctgttacgcgaatggttgaagtgattgacaagtttcgcgatcatctggctgtggaactgatgagcgataaattttatgacgatatagaggaaaaaacggatggcgaaaatgaatga

SEQ ID NO: 128307 - DNA, 1143 bp, Enterobacter cloacae
atggctcaattcaatcactttgaactctcacttctgaaccccagctttgactcccctttggtcgacgcgttgacggagctggagctgctccggcacctgcggctggaaaccgacgttcatcctatcctgtttgcgcagttgaaggccgtattccacatgctggagagtcttggttctgcaagaattgagggaaaccacaccacgcttgccgactatgttgaaagcaaggttgaaggaacgcagagttcgacggatcagctcaaagaaatcaacaatattgaagccgcgatggagtacatcgacggatatctgagcaacggcgatgagataacggaatattttatccgcgagttgcatagtctggcggtagccggattgcaacaggaaggcgacagaacgcccggtgcatatcggcaacataacgtcagcatcgctcagtctgaccatttgccgccggaccacatccgcgtccctgattatatggcggaactgacctcctttattaaccgcgccgataagccaaagtatgacttgatgaagattgcgctggtacatcatcgtttcggctggatacatccctttggcaacggtaatggcagaacggtcagattgctgacctatgcgttgcttatcaagtatggttttaacgttcagacaggtggtcgggttctcaatccgacagccgtattctgtaacgatcgggaacgctattacgccatgctttcgttagccgataagggaacagagcaggggctggaagaatggtgcttatatgtgctttcggggatctcctctgagctgaagaaagtcgatcaactgacgaaccacgctttcctgagcgaaaagatcctgtatccggccatcgatttttcgtcggaaagagggttgataaatccgctggaatcaaaggttctgaaacgtgcggttgaactggggacgataaaagcgggcgatctacgtgctgtgttgcctgatctgaaaccgacgcaggtgacttaccagcttggtaaactaattgaacggggactgctccagcctgtagaagaaggggcgcgtacctatacggcgaaattttctaattcgtatctgatacgtggagtgattaaggttctgcgggaagaagggtttattcctgatttgtga

SEQ ID NO: 128308 - DNA, 3321 bp, Enterobacter cloacae
atgaataatgaattgcgctcttcacattacggttctggtgacattgtccttggtaataaaataacatacccatcagaacttacccccgaaaacctattccctattgcagaggacatatttagaaagatacgtaacagcgatatagccacggccaagaccattatagacgctataaaaaaattacctgccacacctgtcgccagaaaatttgtagatgtattaaatacagcaattcttgcatcagaaaatgctttaacctctggaattgatgaactgtatactcttgccaaagaagatgatttatcagataaactaagagacgttgttttttctgttattatgcttatagagtttaaaaataacaatcatgaaaatgctatagccatatactcacagtctccaaagaaaaaatactcacacatgttttatcttcagtgccttgcaactgaagatgaaattaacgatttctggaatgagaaccagcctctcgttagtgtagatgaactttatgcaatatctataggtgccagccgggtaaaaaatcaaatatcagcaaaaaattttgcaacgatcttagttgaaagagtaccaacacctataaactctattctgcttaattatattaccgtactggaacttgcagaaaaatatcacaatatagatttactatctctggataaagatgtctatgatcaagtaattagctgcataaatgacacaatcacattcttagaagcatatccagagaacaaatggttgctttattctttaagtaatttagttatgcttgttaaagcaaatcattatcaacttattcaaacaatagctaaatataaggataaaatatcagccattaaccaatctgttactgactttgttgatatgctattctctttcgatgaaacagctcctctcactttacgtgatattaaagaagatgatgagttaacatcaggctctctgattgtattattagaggccgctgcaaaaggaacgtatattaaggaaaatataaagcagcttattctgaatactgatttaaaacaagatgattatattaaaaacttgcctttcaactatcaacttatctcgttaaaagctaaactattattaaatgatagtaatgatcacattaataaaaatagaatcaaagaagatcttgctattttcattccattagcacataaagataaaacatctctttccggcaatggcttagttaatttatgtgatgatctactctggttagatcttgctaaagagagctgtgatcttctcgaacctcgtttacctgaaaatttatggccgtcacgcttagttatagcctattttgagtcacttattcgtgcagaaaagctaactacattaacagaatgcctgagcaggatagataaaacattatgggatcactacacatggctccttcaggccagaatagatattgcatataacagttggcctcaggcaataatagccctagaagaggctattaagaaaaatgatgataattcatacccttggcttctactgattcgttgtaccttaaaaactgctccagctacagccattactattctagaaagaataccgaaaactgttttctcatctttcgatactcataccttgtcattattgagacttatctcaaataaagtagatcctcatttttcagaaaaaataatttcagagaaatttattagctcgccacaaaaatttgcatctattcttttacaaacacatttttcatctttaacaggttatcaagctaaaaaagctaatgaattaaacacgcaatatccagataaagttataagagctataaaactgatccgtaatggagtggaagaagagaaagttattcttgatataacacctgataaagaacaaggtgccttattatctgctcacactgaatatggagatcttcttgctaatttagctataaatgaggaagatgtttatgtcatggatagagtaaaaataatagaagaattaaatccttatcatgttattttcagatatgcactaaatattgtctctgaaaaaccagacattaacttcccgataaaaaagatagaagttccttcagacccagagttaatgtttcaaaaaataaaagacgaattttcgcaatatgatcatcaatcaagagaagaacatattatcaattgtcagaatgtgcctttatatcttaaagctaatgaacttgaaaaaggaaaacctgtaaaatctattttgaagctactaacctctcagagagtcaataaatctttatcattacccgagggtgaagtcgatcatccagaacaatttattactgatattcatggtatcatttatttcgctttaacgcattcagacataacattacgcaaaagtagatccaaactaataatcacaaatgagactaaaacttgcattgataattggttaactgaagttgaaaatccttcttatctatctatcggtgtgcgcgatgatcatctttttaggataacggcagaagacattcaaagttcaacagcatccattcgtgactccctgaataacttacttgactactgcgaagttcactcagttccggtagcggatacgccagatactttattaaatgtaaaagagtttttagacgcatctgtctattctacaatgaaatatgttctgttcacaaaaacaccatattttattattgatgactcctttagtgccctgacaaagtctttagactctgaaataaagatagtaaattcgatagtgtttacatcccatctcttagagcatctaccgctacctataaggttaaaaaatttccaatgtcatgtagaaacttatcttcctatgtatataagctacaaggattgtattgcattggcaaattcagatgatgaacaacatgtcactttagtgactaaaatatttcaaatacacgccaatccatttaataactttaatagcttatgttcattgtttactcatgctgtctctttgccattattttcagtttatatcaaccattataagaaaagaagaccattatctctggataacgctataattgtattattcaatacttgttgccaaggtgtcgttaatgcttccgatggacgtaccgcagaggaacgtttagtaacatttactaagcttattgttgatgaccgtatataccctcaaggatttatttcatttattttttcaattttcagttcatttgcacagggccattttcttgatattagctatatgaacaaactaataaatgacgttaaaacaaaagaatcactcggggtcaactcaactatggcaaatgaagcttctaattaa

SEQ ID NO: 128309 - DNA, 333 bp, Enterobacter cloacae
atgactatggattttctaacaagtaccattttgtcgggattactttatgacggattaaaatctggcgtaacgattagtgcggtctggttaaaagatactcttagaaactggctgattgacgataatactgcgcaaataatggcggataaaattactcaactgggcataaatgatgatttaagtggaaaagcaataaaaaccagaattgataacgatcctgagttattgaggctattaatggagattaaaactgcaccgcagactattaaccatgttagtactcatcatggtagcggtgatatcgtgcatggtaataaaatcatcaataactaa

SEQ ID NO: 128310 - DNA, 195 bp, Enterobacter cloacae
atgatcataatgcaaccagacaggtattccgccggtattattgcggcactgaaaaagcgcggaatgtcgctttctgccgtttctcgaaacttagggctggcatcatccactctggtaaacgcgtttacccatagcttgcccaaagctgaatggctgatcgccgaagcgctaggcgttgtgccagagcaaatctag

SEQ ID NO: 128311 - DNA, 315 bp, Enterobacter cloacae
atgaaagtgactgacgaggctttgttacgttcagggtttacaccatcggatttgcagaagataaaaaacaacgttgaaagctatggcggaaccttgggggaagcgattcaggatctggctaatcgattcagggttgttttatggataacatcggcatgtctgatggtttttatcattttagtattgttttctgcgaaagaaaccgtcgtgggtggtgggatatcaattctgatcgcaatagtcatcgttgcatttattcagccgccagtcctttcttataaatcctggcggttctggagaaaattcagagactaa

SEQ ID NO: 128312 - DNA, 699 bp, Enterobacter cloacae
atgagcaccagagcggagataaaggatggtgcgcagtttgacgttttgcgaaggggtgtcgtttatactgaggtgcttggctgggttgacatggggcacgctcggggtagtgatatcatggagcttaaaagccagtttatcgcgggggagcttagtggcaaaccttcctacatggtgatgtatcggcaggacatgcactttgtgaaattcaactcacaattcggtgtaggcaagttctctcgctgggagattcaacgtggccggagtaccgaagatattaacagaatcatgctggcgatgatgatgaacacagcagctcgatttgaaggcttgcaaagcctgcgggctttctcctggtacactgatagtggctttagtggtgaagacttggtttctgatctgttcggattccatcgagctatcatgccaggacggtacggataccgcctaaaacctgtcagttatgatgccgccgttcgtcgctgggatcattacggtgctattggttcccataaaaaccgtggtttccgtccgattctgttccctgacccggaagatccgtgtgtgcgtcaccagccgtacacggtgaacctcccgcattttatgacatggctgaagccgtgggacgatttcagctctggtaatgtcaaagttattacagacaatgggacgtcacttgggtacacaggggtgaagtga

SEQ ID NO: 128313 - DNA, 426 bp, Enterobacter cloacae
atgcgtaaattctttaaatggagcatcctgatattaattacgggtgttatcctatgctggctatttgtctatcttgttgcatccggtatcaatgaagctaccacatacactgaaaatgattttttcaattatcactccctgactgataaagatattgagaaggctccgcgtatatcgaataattattactttgaatcacatcccggagatggatacgccccctcaaacacaatcatttttaggggagtatctaacgtcgagccgatgagggcttatttgtctaagctgggctataccaaacagaaaggcggttcgagggaggcggaaatatggacgaagccagagcagatgaatagtgctctcttttacctgcgctttgatgctgctactggcgaagcagaactaactaaggaactgaataactga

SEQ ID NO: 128314 - DNA, 192 bp, Enterobacter cloacae
atgaaaagaagaaattttagtcctgaattcaaacgcgaatccgctcagctggttgtcgaccaaaattacaccatctctgacgctgccagggcaatggatgttggtctttccacgatgacaaaatggttcaaacaactgcgtgatgagcatcagggcaaaacgccaaaagcctccccgataacgccggaataa

SEQ ID NO: 128315 - DNA, 726 bp, Enterobacter cloacae
atgaaagagctggggctggtcagttgccagcaaccgactcaccagtataagcgtggcggtcatgagcacgttgctatcccgaatcatcttgagcgacagttcgccgtaacggagcccaaccaggtgtggtgcggtgatgtggcctatatctggacaggtaaacgctgggcgtacctcgccgttgtactcgacatgtttgcaagaaaaccaatgggctgggcaatgtcgttctcaccggacagcagactcaccatgaaagcgctggaaatggcatgggaaacgcgcggtaagcccgtcggggtgaggttccacagtgacctgggtagtcattatacgagcaggcagttccggcagttactgtggcgatatcagattaagcagagtatgagccggtgtggaaactgctgggataacagtccaatggagcgcttcttcaggagtctgaagaacgaatgggtgccggtgacgggttacgtaagcttcagcgatacagctcacgcaataacggactatatcgttggatattcgtgctcagaccgcacgaatataatggtgggttaccaccaaacgaatcggaaaaccgatactggaaaaactctaacactgtggccagtttttgttgaccactacaactgcaccgctcactgcttcatcgctgaaccagcgaataacgctataaccagcatcggctatctgctgcttctggttttcaacgtaacacgttaa

SEQ ID NO: 128316 - DNA, 1695 bp, Enterobacter cloacae
atgattaagtcattaacgtccttatcagatttaaatatgcgaacaggtgccgacattcttcttgaagtgctggagagtgaaggcgtggaatatatttttggcaaccccggcaccaccgaacttccgctcattgatgccctgctccggcatgaaaatattcactatattctggcgcttcaggagagcaccgtggtggcgattgccgacggctacgcgaaagcctccggcaaaaccggttttatcaatttgcacaccgccagcggtcttgggcacggaatgggaaatttaatcaactcgcggatcatgaaaacgccgctggttgtcaccgtcgggcaacaggacacgcggcactacgtgcgcgacccgctcctgtacgatgacatagtctccattggatcgccggtggtgaaatgggcgcaggaggtcaccagcgccgaccagctcccggtgctggtgcgtcgcgcgttccatgctgccagctatccccccgccgggcccgtattgctctctctgccaatgaacgtgatggaagagctgagcgacgccgggatacaaacggcctccaaagtgaactatcacaccgtcgcgggctccctggacgagctggcggcggacctgagccaggttacgcccggcaggatcatgattgtggcgggggatgaagttcactccagcggctcgacgccggagattgtccagcttgcagaagcgctaggtgcacacgtttacggctcatcgtggccgttgaatttgccctttcccacgcagcatgccctctggcgcggcaatatgcctaccaccgccagtgaaattgccagcatcgttaatgcctacgacgcggtgtttatcattgggggcagaagcctgatcaccatattatacagcgaaggagacgcgattccgggctcatgcgcggtctaccagctctccgccgacatgaacgagctgggccgcacctacgctacacgcctgtcggtgatgggggatataaaactctccctgaaggcgctcttacctctgcttcagcagcgcctggtggcaggcaaattgacgcatcagcggctgctcaaaacggcacgcgctgaacgtgaaaaagagtggcaactgcaggaagaacgtctggctgccgagcggctgcgcccggccatttcgccgatggtggcggcctatgaagtcatcaaagccgttccgccgggcgtcaccattgttgatgaagcgattgccacagccagacatgtccgacgttttatctccgacacgcagcaccagcgctactatttcatgcgcggcggcggtctgggctggggtatgcctgcggcggtgggccactcgctggggctgggccgcgagccggtagtgtgcctgatgggcgacggcgcctcgctgtattcgccgcaggcgctctggacggcagcacacgaaaacctgccggtcacctttatcgtgatgaataacctggagtacaacgttcttaaaaactttatgaaaggacagccgggttacagctcgacgcagttggggcgctttatcgggatggatctgattaatccgcacatcgattttcagtcgctgggcaccgccatgggcattcgctgttgtcggataaccgatgctgcagacatcgccgaagcggtaacccgcggactgcagtcaggaaaaaccaacctgattgaaatcgcgatttccgcggattaa

SEQ ID NO: 128317 - DNA, 564 bp, Enterobacter cloacae
atgagagggattaaagaggcgttgaagcaactagccgctatttgtaatgaatactcggtatccggaaatttcaataccgttaatgacttggacaatgcatttccaaccaacctacctcgttccacagatgttgattacttatataaaaattacaatccggaaaaattaaacattgaaacaggcttcacgccaattaaaattcactctatcagtgagctctcgaaggctcaaagtggttatgaatacttaccggataattatcttgttattggtgatgatttaggtggaggtaaacctttaattgcggttatcgaagaagggaatacctctgtctatgctagttatgatgtaattgaaccatttaaaatagctagcagtctctctggatttatattttcattagctgagcttattgatttggtatatggtcaatacggtatctttgatatagcagatgataatgacgaagtgaaaggtgactttattgatgagttgcggaaaagaattgcgcctcttatcggtaatgaaggttttaatgcattctatgattatttttatggctag

SEQ ID NO: 128318 - DNA, 162 bp, Enterobacter cloacae
atgacactaactgccactatgagaaaaaaagacggcgaaatagttgagtcccctgtattaagcattcgcaattgtgaccaatgtgattttttcgttgactatgacaaagatcaactaagaaattacacttgggttcctgactatgattactttaattactga

SEQ ID NO: 128319 - DNA, 3249 bp, Enterobacter cloacae
atgagcatggacagtaccaaagagctgattttccaggatgagatgatcgctcagatgatcgatcgaggctgggtccgtggcaaaactgaaggctacgatcgcgaacgtgcactgtactcgcaggatgcactgacctttgtgcagaccacacagccgcaggaatgggagaagtttgccaaaatttatccttcggataccgagcgtcatttccttgatgcgctggtggcgcagctgaaaaaagcggacatcaacgccactgatatgctgtctcgcacctacggtacgttaggcgtattgcgtcatggtatcaaaagccataatgcgcgttttttcctttgtcagtttaagccggaacataacctcaatccggaaactctgacgcgctacaaacagaatatctgccgcatcgtgccggagctggtttacagtccgcatgcgtcgaacgccgcatttgaagaaactggcgctaaggctaagaaatggcgtatcgacctggtgctgttcgtcaatggcctgccggtagcgacgctggaactgaagtccgaatttaagcagacggtgcaaaacgccattacgcaatataagaaaacgcgtttgccgaaagatccaggcaccaataaacctgagccgctgctgacctttaaacgcggcgcgctggtgcactttgccgtcagccagtacgaagtgtttatggcgaccaaactcgatggcgataaaaccttcttcctgccgtttaacaaaggcacccatgacggcggtgcggggaacgatatcccggaagatgccaacgactacgccaccagctacctatggaatgaggtgctgctgccagacaatctgctgaaaattctcgcgagcttcgtgcatctgcaaatcgtcgaaaaagaaaacgctattggcctgaaatacaaaagcgagagcctgattttcccgcgctatcaccagtgggacgtggtgaacaaactgatcaccgccgccacggtggaaggcaccggcaataagtatctgattcagcacagcgcggggtcgggcaaatcgaactctatcgcctggacggcccatcagctttcccgcctgtacgatgagaatggcgagaagcagttccactcggtgattgtggtgacggaccgcaccgtgcttgacgatcagctgcaggacaccatctatcagtttgaacatcaggacggcgtggtcgggcgtatcaataacaaagaaggcgacggttctaaatcggagaagctggccagcgcgctggaaaactctcagccaatcattatcgttaccatccagaccttcccatttgtcctgaaggcgattgaaaacagcgtaagtctcaagcagcgcaaatacgcggtgattgccgatgaagcgcactcctcgcagagcggttctacggcgcgtcagctgaaagaagtgctgatgaccgaagaggcggatgatgatgtggagatgtcttcagaagatattctggatgccaccatcgcggcgcgtaaaggcagtaacaacctcaactattacgccttcaccgccacgccaaaagccaaaacgctggagctgtttggccgtcgtcctaacccgcaggaaccggcatcgaaaacgaacaaaccggaagcgttccacgtttactctatgcgccaggccatcgaagagggctttattcttgatgtgctgaagaactacaccaactacaaggtggcgtacaagctgctgcaaaagctggacgatcctgatcaggaagtggacagcaagaaagcgaagatcaaactcaaccagtgggtttcgctacacgatcataatgtgtcgcagaaagtgaaggtgattgttgagcatttccgcaagcatgttatgcacttactggccggccaggcaaaagcgatggtggtgaccagttcgcgtaaagcggcggtgcgctacaagctggcgttcgataaatacatcgccgagcaaaagtacgacaagatcagcgcgatggtggcgttctccggggaagtggaattccatgaagatgaccacaacagccttgcgctgcttaaccagaaattcactgagatcaatatgaatccaggcctgaaaggccgggatatgcgtaaagcgtttgatactgacgactaccaggtgatgctggtggccaacaaattccagaccggttttgatcagcctaagctctgtgccatgtatgtggataaaaagctgggcggcgtggaatgcgtacagacgctttcgcgcctgaaccgtacctatcctgggaaggcacagtccggcacgtttgtgctcgatttctacaacgaacctgacgagattttgggggctttcctgccgtactaccagacagcagagctgatggatgtcagcgatccgcagttagtctttgagctttatgaaaagctgcgtaccagcggtattttcctgtggaacgaagtggagcagttctgtgaggcgttcttcagtaaaaacaaatccaacgcggccattagcaatatctgcaaacctgcggtagagcgctggaagcatcgttacacctcagcgattgatgcctatgtgctggccaaagagatgtttgaacgcactaagaaaaccggcgatgttgtgctgatcaccaatgcagagaacaccttcaaagagtgcgagaaggaaaaaagtaagctggatatcttcaagaaagatctcggcagctttgtccgcttttacgagtttatgtcgcaaatcgtcgattatgacgacaagaaccttgaaaagctgagtctctttgctcgccatttgcgtccgttactgcatgaacagcgtattgaagaagatgaaattgatttaagcaacgtggagatgagccattaccgcctgtccaaactccacgaacagcacctgaagctgcaagaggatgctgaagaatacaaaatcaaaccgggtaatgatgtcggaacggcgaaaccaaaggacaagaaagaggagtttctttcaaatatcctggctcgtctgaacgagctttttgtcaccgataatctgaccgataaagacatgatcaattatgcctttgcggtgcgcgacaagctgtcagaaaaccaggcggtgatgacccagatcgcgaacaatacgcgtgagcaggcaatgctgggcgatttcccaaaggcgattgatgatgctgtcatggatagcaatgaagcccagcaggagatgatggtgcaatatctctctaatcctgaactggcgaagggctttgcccgcgtggtgtttgatatgttgaaaggggcttaa

SEQ ID NO: 128320 - DNA, 1326 bp, Enterobacter cloacae
atggctaagtataaagcgtatccggagtataaggattctggggttgagtggctgggggcgattcctaaggattggtctgtcactaaattaaagtacatcgctgatttgctaactgcaaaatctaacaatacagatgacttatttgttggattggaaaatatatcgagtggtgatggaaagtatatatcgaaacaagaaaacatagcagatggtacatcggtgtcatttgaaaagaatgatgttcttttcgggaagttgcggccttatcttgccaaatcttggttagctactttctctggggtatgctcatctgagtttctggtgcttcgtacagctaaattacatccaaaatatcttaattattattcattaacaaatgagtttattgagcaggttaattcctcaacttatggctccaaaatgccacgagcaagttgggagtttattggcctgttacctgttccaacctgttcttattctttatcagagaaggtagcttggtttctcgatcacgaaaccgcaaaaatcgataacctgatcgagaagcaacagcaactgattgaactgctgaaagaaaaacgtcaggcagtgataagccatgccgtcaccaacggactaaaccctgatgtgccgataaaagattctggtgttgagtggttggggaaaatccctagccattgggaaatgaaaaggttagcttatcttggtagcgcaagaaatggactaacttattctccagaaaacataactgatcaagaatcaggtgttttagtattaaggtcatcaaatattcaaaactcaagcctttgctttgatgataatgtctatgttgatagtatcatccctgaacaatttctagtaaaagaaaatgatttacttatctgctcgagaaatggcagtcgtaatttaatcgggaaaaatgctcttattagcaaagatgctgaaggaatggcatttggtgctttcatggctatattcagaagtcaaatgaatacatacattttttgggttttaaattccccgctatttgattatcagtctggatcttttttaacttcaactattaatcagttaactattggtaaccttaatagtatgaaaattcctgttcccacgctcaaggaacaaaaagagatagcgcggtatctctctagaaaaaataatgattttatcgctttgattaataaggtaaaaaatagcattaccttactccaggagcgccgcaccgcccttatctccgccgctgtcaccggaaaaatcgacgttcgcgattgggttgcccctgacacgcaggatgttgaggagccagaggaagccaccgcatga

SEQ ID NO: 128321 - DNA, 2361 bp, Enterobacter cloacae
atgactaacactaacttttctcaaacggctgcgtttatctggtcggtagctgatttgctgcgcggtgattttaaacagtctcagtacgggcgcgtgatccttccctttacgctgctgcgccgccttgaatgtgtgctggcggagactaaagacgcggtggtggcgaaatatgatgaattaaaaaccagcccactgccggaagatgccaaagagaagtttctgctgcgcgccagcgggctctccttcttcaatacctcgaagatggatctggggaagatggggcagaacgacatcaaagccaacctggaaagctacgtacaggcgttctccccggacgcgcgtgaaatcttcgaacacttcaaattcagcgagtttgttggcctgctggaagatgccaacctgctgttcaaagtggtgaagaaattcgccactaccgatctgagcccgaaagcgatttccaactatgaaatgggcctggtgtttgaagagctgatccgtcgttttgcggaaagctctaacgagaccgccggtgagcactttaccccacgcgatatcgtgcgtctgacaacttcactggtatttatggaagatgatgaagcgctgacgcaggacggtatcatccgtactatttacgacccgacggccgggacaggcggcttcctctcttcaggcatggaatatgtgcacgagctgaatcctaacgcggtgatgcgtgcctttggccaggagctgaatccggaatcctacgctatctgtaaagccgacatgctgatcaaaggtcaggacgtcagtcgtattaagctggggaacaccctttctaacgaccaactgccgcaggaccagtttgactacatgctctctaacccgccgtttggcgtggactggaagaagatcgaaggcgagattaacgacgaacatacacagaaaggctttaacggtcgctttggcccgggcctgccgcgcgtctccgacggctcgctgctgttcctgatgcacctgatcagcaaaatgcgtgacaaccacaatgtggatggttccgtgagcaaaggcggacgtatcgggattatccttaacggttcgccactgtttaccggtggtgcgggcagcggtgagagcgaaatccggcgctacattctggaagccgatttgctggaaggcatcgtcgcgctgccaacagacatgttctacaacaccggcattgccacctacgtctggatcctctccaacaaaaaagcgcctgagcgtaaaggcaaagtgcagctgattgatggcaccaacctgtgcggcaaaatgcgtaaatcgctgggttccaagcgtaacctgatgggcgaagacgatattaaactgatcacccagaccttcggtgattttaaggtggtggatgccaccactctggaagagcttggtctggaaaaagccgctgagcaaaaatccagccgtggtcgccagcctgccacagctaaaaccgaagcgccgaaaaccttcgccagtaaaatctttaacagcaccgactttggctatcgccgcctcaccattgagcgcccgctgcgtttatccgctcaggtgacggatgaggcgattgcgacgctgcgctttgcaccgaagccgtttaacgcgccgatggaacgcctgtacgaagagttcgcgtcccagtggcaggagggggcctatggtgatttctccgaactggaagcagaagcgcgtgccatcatcaaagctgaatttgcagagctgaaagagaagcagattaaagacctgctcgacagcaaactgtggctggcgcagcgcgggttaatggaaaaagcacagcagattcaggcagctctgggtacgcaggcgggtggcaaaacgctggtgagtaatgacttcaaccagtaccagttgaccctgaaaggggccatcaaaacggctggcgtgaagctggacgctaaagagaacaagcagtttatcgacgccatcaccaccaaaaacccggatgccgagccggtagtgaagaaggtgctgaaagaagccgctcagccgttgtacggggcatttgaatacaaaggcaaagtggtggagtttgagcaggacggcgagctgcgtgataacgagaacgtgccgctgaacccggcggtatccaccagcgacctgattgaaaactatttcgagtctgaagtactaccgcacgtgaatgacgcgtggatcaacgccgataagcgcgatgcgaaagatggtgaagtggggattgtcggttatgaaattccgtttaaccgccatttctacgtctatcagccgccgcgcccgttggaagagatcgatgccgacctggacgcggtcagcgccgagattatgaagttgctgcaggaggtacattcctga

SEQ ID NO: 128322 - DNA, 471 bp, Enterobacter cloacae
atgagtaaaaaaagtcatttagtaagtttaaccatccttatcattgccgcgtttatcttcggcagaagcacgtatattgaatacctggcatggtattatgggaccaatgatttaatatttaacgaaacaaccccctcattagtatccagtttatttaacgggctctacttcgccctttcagcatgtattatttacgtgttactcattatattaaagagaatccccaaaaatattgtagtttcatgtctgcttcagttctgtattaatattgggctatatactctttttgttgcagtagatagaggttatagtaaattgcatactttaggctctggtgctactgacatcacccacagctattttttaggggcgttgctgacgagcactctcctgaccgtcgcgatcgtgagcgtaatacatgctaagtttctttcttcaaagcataaagatgggctacataaaggcgtttga

SEQ ID NO: 128323 - DNA, 405 bp, Enterobacter cloacae
atgctcagcgtgctggtttctaggaagaaaatttatatattactcgcaatcctgatctcttcttatggcatatggcgtgctgttgatgagtttctctatattgagcaagacattattcgcaaagaaaatatcgggaaggtttccgtactgtatattacagaaagcaatgcgggagctacgacttcgaatgtatataaatattatttggcgtcgtcaaaaaaatcggaagaagcttttttaggcgatgtcaggaacgggtatgctccatttctgataactacggatcctgaagcaaaagtagagagtgaagaaaacactatatatatcacagtcagtggtaaaatttatcaatttagcaatatatcttactcaacgcttatctatttgaattcatcacctttttaa

SEQ ID NO: 128324 - DNA, 834 bp, Enterobacter cloacae
atgagtcgtcaacgaaggcttaggtcttatgaggattacgaaaaagcactcagcaaaggtgtcggttcgggtcaactccaggattaccagccctggctgagggttcaggatgtaaaatcccacggtaatcgttctttgatctttggcctgaaaaccctgcgaaatcaccacgtcatgtcctctattgaaagtgatttcttctaccaggctgaattcaacgattctgtcattgatatccgcgagcagttccccctccttccccttaatctcaccgaacagatagccggacacatcggtgtaaagcatcctctcgtcagaggggtaaaaggccctccggttctctacgtgatgactaccgactttcttttaacggttaaggaccctaccggaggcattaaatacaaagcctttgcggtaaaacctgactgtatccctacccttcggatggcagaaaaattagaaatagaacgccttttctgggccatgcatgacattgaattcaaggtttacgtggggtctgaactgaacaggataaggagcaagaatattgcatgggtaacgtcagccataagaattgatgcagcacactatgaacacttacccttcgatgacgttgtccaggcattgcagccaggtgactatgctttagaagccctctgctcttctcaggcccggagactgaatgttgaaggcagcgacatcatgacaatcattcaggtggttatcgccaaaaagctcattctggttgatttaaccacccccatacctgaacttggcgttcttcgtgtattaagcaatagctatcatcagaaggtgaatgaacgatgggtataa

SEQ ID NO: 128325 - DNA, 2133 bp, Enterobacter cloacae
atgggtataacaaaaaacaccgtctgggaaagtaagaattctgacgagctgaagcagggcgtgtatcgggtcctgcatatcgatgttgatcgggatgccataattctttttgagcttcaggaaagacggataagcaaacccttcatattatcattccagcgcttcagcaacatggtaaaaacgcggaccgtcggtcgcacccgtttcgttcttccctcttacatgcttgttgatgaaggagatatcgacccgctaagtaaaagaaagcgggatgaaaattatcaaatgattttacctctcatcagcgataccactttcctcttcgaatacgcccagtctaagcgctcggcggtgctggtaaagtacgcgtctgataagggcgtaaattcacttcatctccgaatgttactggttctttactggcgttatggtcagaacatttatagccttctccccgcctactctaaaagcggagcccctggaaaagaacgtaaaactacggccttgcctctcggcagtaagaaaaaaaatcgggtactgccgatgcaacgcgcaagtacgttcttactgaaagacactgataaaaagaatattgttaagtctctcaggaagtactatctgaaggttaacggattttcacttactgaaacctataaaaaatataccagtgactttttcaggaacgaaactgaaagagccaggctggcaaatgaagccccccacatcccctctctgcggcagtttcagtactggtcaaaaaaactcatcaccaccggaacgcggatccgctcaaaatctaccgtatcgaacttcttacagaatcagcgtgcccgcactggctccgcagcgaacaccggtacgctgccaggagatgtatttgaaatcgacgccactgttgccgatgtgcatcttgtctctgctcttaacaagacaagcgtaattggccgacctaccatttatacggtagtagaccgcgcaacaagaatgattaccggcgtccatgtctcgctctaccatgcctcatggagggcggccaggcaggctctggctaactgcttcatgcccaaaaagaatttttgcaaactgttcggcatcaatatttctgaatggctgtggccatgctcgcacgtcccggtaaagctgatatgcgataacggtgaaatgataggtctccagccccaggataaagtcacgccgatgactgcacttgaaattgcacctgtctatcgggctgacagaaaaagtgtggttgagaggcgattcgggattttaaatcagaaggcaatccatcccctgctgggctcgacccggggcggtaaaattgtcaaaggagagccactgccagcatcgcgcgcttgtctgacgttacaggaggtcaccaggacaataatactggccatccttgagcacaatcagtctgtctttaaagagctggcgtacatcaatcctctccttgttgagcatgatctggctatgtcaccgctgaacagctggaaaattagcctcaaaaaaagcagattcagtgcccatacgatcagtgaagatgaagtcgtttcccggcttttaccgccggaacaggtctgtatcacccccggtggattacagtatggtaatctcttttatgaatgtgacgatgacctggcgtccgctgcacgcgtgtttggtcaatcccgttgcgatgcccgtatcgatgataattgcgttgactatatttatgtacgtcttgataaaaacaaaccgtttactaaacattacctgcttgagaaacggaacatttttaaagggatgcctcatcttgaatcggatgtgcttgccgactggattgacctgcagtatgaaaaatcacccgtgacgccggttacccacctcgtgaatgactatgcagaaaaattaaacgagaccgggttacagcggctcagctctttcagggagcagaacagaagccggacgaagaacattactgaaaataaaaaggaagagctcaggagaaacgctgacgctctggagcatgaatctcgcagacttccgctgactacagtagaaaacatgactctgctcccgggcccggaagaaaaggtacggtggctggcgacgcagaaagaacgcaaggacgctcaggaagataataaatga

SEQ ID NO: 128326 - DNA, 1440 bp, Enterobacter cloacae
atgaaaaaagtctttgcacagtatcatgaggccattcttcctgagcacagaggtaatccgttaatcgaagcattacctccggtacttaatgaacaggaaattttactggcattcagccattttcctcctcctgatgaacatatccgatggagtggctcagcttctgtcaggagccattatgttgaccgcattaaaaactaccgctgtccccagacgtgctacaccgaatgttataaatatctcgaaagggttatccgggacgggtacgccgcaagaaacccgctcaaaagcagcacccagcagtacctccactattacgcggatgagcgaccggatatcgaacctgtggatggttttttccatcccagtgccgataccgtaaccatcgtcggtaacagcggttcaggcaaaacgacgatgctggaacaggtgctgggttatttccctcaggttattgagcataaagagtacaaaggtacttttccaggcgtctctcatcaggttatctggatcaaggttaactgtccctataatgccagcgtccgcgacctctgcgaatccattcttgcgatgcttgataatgtactgggttcggacgcaaccaaaccggctatccgaaacggctcgctggcacgacagatagctcaaaagattaaatcctcttttctgggtgttctggtgattgatgaaatgcagcggcttaagttctcacgtacaggaggtgaggccaccttgattgatttcctacacgagattgttgattcactaggcgtttcgctagttttttgtggcaatcacccgcttgaagaaaccctttctaaaaaactcaggatagcaagaagggctgaatccggaggctttataataatctcagcgcctggctacaataccccagactggcagtcttttattacctatctctggccgctccagtggacgaatgtggagacaccgttaacccgggaactcaacgaagagctctttttgctttccagaggcaatctatccgttgcacagcttatttacagaagggcgcaaatgcgggttattggaagcggtaatgagatcatcaataaagccgtgctcagggcggccgttccgcccctgtcagcacgcgcagaggattttcccgatataacaactcttttctcagcccctgctcctgttaccgttaaatctaactcacacacgataaactctgtttcagaaacgataaatgacgacggtagtgagtcatcatgcttacttattacaggggatttgacccggccccagcatactgagctttatgataagacgatggatgcgctcaaatcatttgaggataaaatcatccgtatagaataccgttcggtattccggagcctttctgcagaacaggagaatttcggacgcttaaccgcttacggtttactgtgcactgacccttcgctggagtaa

SEQ ID NO: 128327 - DNA, 873 bp, Enterobacter cloacae
atgaacattctgcccgccctgccggaggaaacgctttacagccgctgcgtaagaacgcgggacgtttatggcatcactgcggagcagtttttcagggcttttctcaacaacaccacacgttctctacatccctcgttaaccacttcacttaacatcctttctgagcataccgcagagaccggacccgaactttggttaaaccagacgctggtcccgctctacgcatgggctttacctaagtaccggaccgaacttgaggacctgaccgttcgagcagccaggttgcatacactgtgtaaattatgccgctatgcagagcattaccctgccgtgttaaagcactgtccggtatgtgtgcatagtgatatcagaaaatacggtgtagcatactggcaccgtcagcatcagatagcaggcataacatcctgccatcatcatcaaatcaacttaaattatatcgctgaccccagactctcttcactacatctgcacttcccgtacaacagagaaaaagtgatttcactcagtggacattatgattttgaatttgcaaaattcacatcttctgcgctgagtctgatatgccagtcagatcctggctttgtcagccataattactccccgctaatttcagaatttttacgctgcgtcacagcccaaaacgaccaaacgctctttgagcaaattaatcatctcgccagccgatcgaaaaaaacctttagcaccctctttccagtgcggaataacatggtaagccagtggaaagcactcctatacagcctttcaccacagccacctgccagaattttactcctgttatattgcctatatcagctgaagccatccggaaacctttcgcctacccctgcttaa

SEQ ID NO: 128328 - DNA, 996 bp, Enterobacter cloacae
atgttaacaagatcacgttatctgcctgacgaaaccttacacagttttatcttcagaatttgcttaattaacggagaagaacagttttctgacgttactaatcataacgttcaatggctaaaaaatttacagttaaatgtcagaacaattaagtacttcgcaggatacagcgatctagatttacttatcttaatgagaaattcatggcaggcaataaagagtacaacaatcttcgataatccagtagagtatatgtcggaaataaacacactcctaagaaagcaacctcttgctcgtagaggcacccataactaccctttaaaatattgcattgactgtataagagaatctattaaaaatataggattcggatattttaaatcatcatggcattatgaactcgccggttattgctttattcataacaaagcattaacgcacttcaagagaaatattaacatgcaaccccatgagatattaaaaacaattcttagaggagagcaccccgcaggcagttacagcttaatccccaataaaaactcaacaatagaaaaaacctctttaatttacagtaacaaaattaaatcaatagaattatcattcaacaatgaagattatatctatatcgcagattgcctaaaggcagaaattaaaaacttcatacgcacatgcactgtcgaccttcccaaaatggcattgataagcgacacttttaacaaaacaaaaataaagaaaccctacaaagaaggatacttatttcaggataacgtccttgccaaaattattcaatgtttctttactgtaaattttgaacctttcattaccttttggcagaaaaatgcagcaaagaaaattgtatattgcggctccgttaaaactaaagacacatttgaatttttattcatctatcagaatacggataaatgcaataggtgtgaatacttctcatgcccggtaaagcatcattatattgaagacgccgaactaaatttataa

SEQ ID NO: 128329 - DNA, 1188 bp, Enterobacter cloacae
atgaataaacctattttagtctgtctgggcctgttcgtttcgcagtcagcccactccagtggtctctatttttatgaaattgcaacagaggataccgctctggcgggggcgggccaggcggcacgcgcgcaggatgcttctaccattgtaactaaccctgcgggcatgacacgattgccggatcgcatgttcacggggggactacaggcgatggacggcgatatttcctatcagcttgatgatgaaaatggtcgaaaaagccctggagatgtcatgcgttttttccccaacgccagtgcattctatactcagaaaatgaatgacgcgctctacgcgggtattggtctttacggcaactatgggctgggcattgattatggcgactgggctggggatcgtctcatcaccaaaagcacgatggttgccatgactttaagcccgtcgctggcctataaactcaatgacaggctctccttggggggggctgtcaacgtaaactacggttttctttccctgacacgagacgtaggaggcaataacgaaaaagagaaggatcacgactgggccatgagctaccgtattggcctgttacttgatgtcactgaccagacccgtgcgggtatcacctggaccagtgaaaccaaatacgattttgatatagacggtaaagcacgcttacctcatttaccgaacgttgaatacgatcttcccatttccgctcaggtgcgtgcgccgcaacagattatgttgagtctggtgcatgacctgaataaacagtggtcagtgatgggcaatcttggctggcaggactggagccaattcggcgcgccgcaaatcaccgttaacggcaaggaactcgataaaaagagtcgcctgaaagactcctggcacagcgcgcttggcgttcagtaccgccctacagaacaatggcgtttaaacgcgggtgtagcctttgacagtactatttatgattcccagagtgacgtggcacttactctaccgactggtgatgaatggcgcttcgccactggcgcgcagtaccaggttacgccgcaaagcaatattggtttcgccgtctcttatttacatatgcagtcctctcgcgtccagtcgcccgagagcttaaaaggccattacgatgatccttatctgtggtttgcgagcgtaaactatagttaccagttctga

SEQ ID NO: 128330 - DNA, 1107 bp, Enterobacter cloacae
atggcaaaatggttcatttttattttacttctttccggcatggcccatgctgaagaacatattctcccagttaaacatgcacataaggtgtatccggtggtcagccatctcagcgctccagaatcgctgcgcccgtgctgcgcgtttggctatgatctccgcgtccgggcgatgggagtacccattccggtctatcaaatcggcaatgtcttatcgctggaaacgctggggcgtcaccactataacgacagcgcgctgggggcggtgaaaaatatcgttggtctgagtgaagaaaaaaatggtctgatttacacccatcgcggtggatttatcgatatcgcccatgtacgcgatacggcggataacaccttctaccttttcacgcgcctttacccaaaacttgggcggccgtggcggtttttttatagcgaagaacttggcgtaagacgtatccagctactggactttacgccccccgcgtccatggttcagcgctatactctggcagcctggctggcaggccatcttgcgtttcaactggcccagtggcatgaaatagcgcagtggtatggattccagtctgtccccggattttcagaagaaatctccgccttttcaccggaagatctctactccaacctgctgggtgcgcgaattgctattaacgtgatattgcagggcgaaacggattccgtagatagctataacgctgcaatggaaaaagagttaaaacaagcactgcttcaactcggcgtagccacgcaaactgaaactgaaaggaaattccgcgaactggacggtgactggtggaacagccaacgcagagtaccggataaattccttgttttaaaaagaaattataatctggcgcataatcgcctgccgacgccggtctcatatgagagaacgaaacccttcatgctcacgtttcctgctgtcgtgacagggcatttattgtcacgcttaggggaattacaactctatcccggggcgtcaatgcagtcgctccccagaccgaaaaattattatggtcctgctcaattccagatgctggcgaataaggccagtgaggctgacaaaactcaacttgaaaggatagaaaaataa

SEQ ID NO: 128331 - DNA, 939 bp, Enterobacter cloacae
atgataagggcttatagtttcttgccgctgttattggcatcggggttagccctggctgaagagagtgattcgcggacgtttcccatctggggagatgaggccaaagcacgcggttattcgatacctttacccttcggcgtgaatgtcagctacatgaacatgcgtcagaacattgacgtcgacagcattagtttttccggactggccctgggaaaccatgccatacctaccgatatgttcaatattgatgctggcagcacccgcgaaaggagtaaaacagaaaatttacgcctcgatatgtgggtgtttcctttcctgaatatttatgggctggtaggccacacgcgtggctcatcggtgtcgaaggtgtctgtggatgcggacccctcgcgctatacgggagtcgatcgtcttatcgcgtcatctgtgcatcagctcaaccagagcggtgaccttaaagatattgattttattctcgatttcaaaggcaccacgtgggggactggcatcacgctggctggcggctatgaaaactggttcgcactggtcgacacaaactatacccgtaccgatttcgatattctcgacggtaaaatttcggccctgacggtctcgccgcgagtgggataccgttttcgcttccagggaccggttggggaatctcacctgagtctctgggtcggcagtatgtaccagaacgttcagcaggagttccggggtagtctttctgacctccacatgccagcagagctgcaaccgctcatcaataccgtgaaccagaatgataacgggcgtttcgatgttaaacagaagctgaccgcgccctggaacatgttgctcggctcccagtatgaaataacacctcaattcaacgtgctgacggagattggttttaatgaacgtaacagcttctttatcgcgggcgaataccgattctga

SEQ ID NO: 128332 - DNA, 1116 bp, Enterobacter cloacae
atgcgccggcttttactggcgctcgccttgctggcctttaacgccggtgcggcaggtatgatcgatccagaagatggcatggtggatatgagccattatcttcaggataatccttatggattcctgccgataccggtagtgattactgaacctgctgtaggttacggcggtggcctgtttgggctttttctacatggtaagggtaaggtgatcggccaccgttttattccgcccgcgatgaccgcctttggcggcggcggcacgcagaacggcacctggtttgtcgggggggggcaccgccatacgtggcaggacgatcgaatacgctaccttgtcgcgggtggctacgccaatatcaatctggacatctactcgggcgacttcgccggatttggcagcaaccgctcggttgaagccgaaacccgcggctatggcgggatgcaaaaactcctgtttcgcgtgggcaatacaccgttcttcgttggtgcatcgcagttttgggcgaagatggcgatctccgcccccagcaatccggttattgataaaacatggaaacgggtactgggggaggcgagcacttcgtcgggtttggggatccgggttgagtatgacactaccgataatttcttctggcctggtcggggcgtctccctcagcggtgaatatcagttttacggtcactattttgggggcgattatcgctacgacctaatgaccctcgacggcaagtattttattcccctctcgccacgctggtccctttcccttgcggctaactaccagaaactgtctcactcgcagcagcacctgccgccgatggcacggccctacattgcacttcgcggaatctcccgctatcgctatcagggcgagaatgtcagtacagtgcaaacacagcttgcctggcaggcaacgccgcgctgggtggttctgggttttgctggagctggaagcgcagcagacagcgccggcgatctctataatacggcggaagtcgcctggggagcaggtttccgctatttaatcgctaaagagtacggtctgcatactggctttgacgttgcctttagcgaccatgagcaggcggtttatttcaacgttggttccgggctgtag

SEQ ID NO: 128333 - DNA, 9699 bp, Enterobacter cloacae
atgaacagagtttaccgtctggtatggagtcatgtggctggcagctttgttgccgttggcgaacacgcaaaatctcatgtttcaggggggggccgggtcaggcgtcagcgagcgctgaaactgttatttttaagccttactctccatcccttttacgcttcagctgatgatgttaactggtcgagcacttatcctgattacctcttttcaaccgatcccacatacaactatgacactgttattgaaacgggtgttgcgtttagcattgatggtcaaaacttacctaatcattacgcagcgggcaccacgcttaatatacttggacctttgccgcagtttcctgatgtgacgtcaggaagtggcgtcacgagccgggcggtcaccctaaccaacgcgttacccggcgcggccgctccggagggaagccgcatattaaccattagcgcaacggattcgcagggcatagttacaccattaaccgctgataatatttccgaatatacctactcaccaaatccggcaaatccgcagcagaatcaggagttgaacgttgagattccgggcctggatggcagctaccaggtaatcagtatttatgattcagctactttcgtttccggggatgatgttcctgttggaaacatggagttgccggtttacgatccggattcggtgcggattatgaatcagtttggcattgccgaagtggattcccttggcggctcggcgaatattaacgtcggggcagataccactgccgccacgccaattgcggcgccagaaaacactctcgatctactaaccaaaaattctacgctggcaagggctgacgcatcaggcgctgccagtgtcatcaactggctttctgacaactatatccgtttccgccctgcggctgtcatcagtggacagacccagagcgtcggggcgcaaagcacgcaatacaattacaccctgacattaccaaactatacggcattaccgggcggtagagtggtgcaagtcggggaacgtacgtttgatataacatcctctgctgatattgctgatgtgaatgattatctaaccggacagggggcctatgaggataagccacaggtccagtactggctaaccgcaggcgcgcaggttcagggcgaaaccatcgattccgcagtggaagcgcagaccgtttataacaacatcatttccgggttgctgaatcaggcgcagagcacatccattaatctgacctataacgtatgggaagatcgcacggcacacagcaataacgctacgttgggtacgggggatctcagggttatttatgctaacggcacaggggccactggcacggtgaccgaaaccagcagtctggcagtggatggtgcctcggcggtgatggatgcctttgatggcggtgtgatcacgaataatggtgctatcaatgcctggcgaagcagtgccagtagccctctgaccgtgggtatgcaggcggaatacgctaccgcaataaacaatggcgtgttgaatgccggactcttcctcgaaaaagatggcagtaatcaaaatgtcagtaactatggcggcgcaggaatggtcgggttgaccaacgcctccctaaccaacaacggactgatcaacgttgcagttaccaacaacgccacccataacgcctgggggatgcttgtcggggataacggctccatcctgaatgccgcaacaggaaccatcaccgtaacaggtaatgccactaatccggatggtcgtgcggggggatatgctatctacagcgactcgaccggcacggtcaccaacgatggccgtatttttattggcggatcgcccgttacttcatccatggctgagcctgatcctgttaaccttgtcggcagcggcgatcttagcgcggctatgtacagcaccggtaaaggggacatggttaacagcacgtctggtgtgataactctgctcgataacacccgcaatgcggctggcatgatgattaacggggggacagaaaacgcgaccaacaacggtcagattaacgtcctgggtgtattgacctctgcctccagcggtgatgtttatgcagcggccaattacggcatgtatgtgaaagataacggcggggcggtgaccaatagcggcgatatttttgtcgatggtgataacaatattgctcttaacgtgctggctcaaacggccaatgcgtcattgacctcaaccgacgccagcaccattaccgtggggagcgcgggcgataccggcggtacagataaccaaccctatacctatcgtaattacgctgtctatgccgaaggactcaacgggcgtgcagcttccgtatcgctcgattccgatatcaggctgctctccgccggggccattggtgtgcatgcgcggggtaacgcaaccattgatatcggatcccaggcctcgctctcttttgaaaatacacaacagattgggtattacgcctgggggcagggtgccagcatcaacattactaacgccaccattacagataacgcgcaagcacagtcaattttgtttgcggttgatcacggagcgaccttcaccggcgataccggtacgggcagcagctacgatctgatcgtatcaggccagggagcaacgggtgttttcgccaacggagtcgacgatctcaacaatacagatatttcagatgatgttgccacgcagctcacaacaggtgcagcctctgttactgtctcaggcaataatgcgatcggcgttaaggtgaccggaggggccgaaggggctatcaccgatggcgctatcaccctggcgggagacaacaccaccgcagtgatggtggatgggcgcaattataatatcgatgccaccatcgatcctgaaccgcgtgaaacacgcgtggtttcagacgcagtgatcgcgtcgaatgcaggacagtcagggattgtcggatataacgtcggctatctgggtaacctgacgctgaatgccggagcggcaattaaccttcttggcaacagcagtaccggaattgtactgcataacaatgggcaggccacggttacggcgccggtgagtgtcgccggaaccgacaatattggcgttgatatccagaatgccgggctgctgaataacgatggcattattaccgtttctggggcagcgggtagcggaaatattggtctgcgggtgcagggcgcaggagccacggtgagccagttgggcaccgtttccgccaacggggggctggccgctgttcaacttgcaggggacggcgcaacgcttacggttaacggttcagggaatcaaataaccgccagtaacggcgcagacggtgtgcgcattgacagtacgggggcttcctcgttcaatgccagcaataccacgattgatgtaacgggaactggcgctggcattaataataacgccagttcaagcgacattaacctcaacaacgtgaccattaattcaggcgatggcccggcgatacgtactgccgtaacctttaccgctgagggcagcggcaacacgctcaacgtttcaggtagtggaagtggcttcgcctttatgcaggctgatggctcgcaaacctccggcaaccttaccatcggaactggttacaccatcaatggtaatggggcagacagcacggggatactggcgcgaacgaccggcaatgtaaactccggttctgccattacgatgggaacaaccgcgggtgcggcaatagaagcgaccaatgcgaccagtctgacgaatgccggggtgattacgaccagcagcgatacgggcagtacgatcctcgcgcaaaatgttgccgcgttcagtaacaacggaaccattacttcatccagcaccacgaacgcgcagtcgctgattgcgttgaatggctcaacgacaagccgttctatcaataattccgggatgatcatcagcagcagtcaggatgccacggttatcgacgcatcgggtacggcaaataacactgtaaccaataccggcagtctgcgtgccgcaagcgatacggcacaggtcgttcttaccggtagtggcaacgatgtcatgcaaatttcagccggcacgacgcagggggaaattacccttggcggcggtaacgatcgatttggctttacggcaggtgactttgccggaggagtgactttcaccggagtagatggaaatgataccgcaacctttggggatgttaacttgtcggcagtaggacatgttctgagtgaaggcggtaccaacagcacactgacattcaacgggacgcacagcagctcgggatcggcaacgattggctcgcttgccacagatgacctgctgacagcgaccaatattggaacagggtggagcacactaaccctggatggcgatcctacagatatacgcattatgcaggatcttgctctctctggtgccgcagatatcaacgtcaacaatggcgcgacgttgcgtacaggtgataatggtgtcaccagcggcatggcgagtattcgtcagtatgatattgccaccgtgggtgcaaccagcctggtctcgttcgatggtgcaggcattcaaacctatggcggtattatttctggcactggcagtatcgagcgtactggtggaggaagtacgatcctgctcggggagaatacctttaccgggagtacgctgattggcacagggtcggaagtggcgctgggcaacggcggctccacgggcagtttatccggaaccacggatatcaccgataacggtttgctgacggttaaccgttccgatgaggtcaatctgaatagcgtgatttcggggacaggagcattccgtcagtcagggagcggattgacacgcctgagcggcgataatagctacgccgggaacaccaacgtagagcaaggcacgttgatcatcaatggtgtgcaaaccggaacgggccagacgacggttcagagtggggcaactttgggaggatacggcacgctgggcggcgatgtggtgttcaacaccgatagcgtgctgcgccctggcgacgacaatcgcggcaacggtacgggcattctctccatcaacggtgatttaacgctggcaagtaatactgacagccagttccagcttggcgaagcctatacccctggcggagcgttgaatgatctcgtctctgtcgcgggggatttaacactggatggcgtgttgaatgtcgcgctaaccaacggagggagcttcctgccgggagtttatcgcctgtttaactacggcggaagcctgattaacaatgtcatgaccattggctctctgcctccaaacgatgccgagctttacaacatccagaccaacattgccagtcaggtcaacctggtccttgactttgtggaccccactaaccagctacagttctgggacggcgatctgaacggcagtaaccatggtgatggttcatcaggaaatggggttgttgacggtggatttggttactggacggcactgatttcgggagccagcaataactggacccaaagcgatggggtgggcaacgctccctggtcccagtctgcgtttgcagtcttccagggcgcatcgaacgatgtgctggtcagtaatgcttttggtgacgtccgcacgtctggtatgcagtttaccactgatggttatgtgttgatggccgatccagctaattcggactctcaactgcacatcgtggcgaccaatcccccggattcatcggcaattgataacagctacgatacggtgggtgggacacacgcggacagttatttcctgatccgtgtgggcgacggagccgccggcgaagatatcacgaccacagtaaatgtcgatcttgttcaggacagcaatgccgatggggcgattcgcctggttaaaactgacccgggacgtctgatcctcaacgggaataatcagtattcaggcgggacatccgtactaaacgggacattgcaggtttccagagacagcagcctgggcgatgcagatacgtttgtgatgctgaaaaacggcgccacgttccagacgggggcagattacaccactaagcgcttgtttattctcgacggcacggccggaggcacgtttgacgtttacggcaacgcgtttacgtcacagggcgggatcggcggtgatggtccgctgaaagtaatagattcgtccctgggtacggatgagggcgtactgaatctggatgtcgccaatagctatcagggtgatacgacgctggaaggtaaaaacggcaccggttcattaacggtaaacgcaaacgtgaccggtgcgctggggaggtctgacagtgatattaccctgaccgatgcggcaaaactgaatctcagtaatgaaagctcggcagaagcgcataattttgccgtgaccaatgccaccctggcttttaatgacaatgccagtgcggataacagcactatcgcgctgggcaacggtacgctggaattgaatgataccagtaccggcggaaatgccattattagcgttaatgctaatagcagaatgttgcttgcggataacgccgatgcaggggcgagcgtaaccacgaacagcggcacggttgcctttgcagacaatgcgcaggctgcatccgggcgagtcattaaccagacaggagggacggtaacgctttcggactccgcaggcaacacctccatcggctcgctttctggggcaggcaacgtcacgcttgccagcgccacgttaaccgaaggcagcctgagtctggatgataccatcagcggtattatcagcagcagcggtggcggtctgaccaaaaccggtaacggcacgctgaccttaacgggcgccaatagctataccggggcgacctcggtatcgcagggcgttctgttagtgaatggcgatcagcgtgcggcgaccggagcagtatccgttaccgccaatgcaactctgggtggggcgggaacgctcggtggacttgttgatgtggcagatgacggtcacttgaccccaggcgctactgtcggcagcgtgggcgagctcacaatggctggcctgaaccttatgcaaaacgcccaactcgatttccagtttgggcaatccggtacgcccggcggtgcgctgaatgatctgcttaccgtcaatggcgctctgatccttgatggtcagcttaacatcacccaaaccccggacggcagttttgatgtgggcgtgtatcgcgtgattgattacagcggttcactcaccaataacatccttgaaataggcactgcgccccaggccgcagacgatctctatgtacagacctccattgacgggcaggtgaatcttgtcaatcgcaccggctataccatgcgcttctgggatgggtttgggggcgacggcggttcactcaagaataatagcgtgatcgatggcggaaacggcgtctggcagaacagtaacggcaacgataactggactacggaccagaccgatcctgacggggtattcaatacgccattcagtgatgcagccttcgcggtatttggcggtgaagcgggcaccgtcaccgtcgataacagcctcggggatgtgaccatcagcggcgcgcagtttgcaacgaatggttatgtaattaacgagggggtcatcaccaccgatactgccgatacgcttgtccgcgttggggatggtacggcgcgcggcgcagcctatactgccacgatcaattcgcaaattgctggaagcggcggtctgaataaaacggatctcggtacgctgatcctcaatgggaataacggctatcagggagggacgaccatcagcggtggtgttttacaggtatcgcgcgacattaaccttggtgcggcagactccgtgattaccctggcggggggaacattgcgctatggcgcagccttcgacaccacccgcgatgtggttctttctggtgaaggtggaggcgttgataccaatggaaataatgtctcattactgagtgcggtaagcggcagcggcaatctgagcaaacagggggagggggcgctgacattgacgcaggacagtactttcgagggcacaaccactatccgcaacggaacattgcaactgggtaacgggggggaaacaggaaatgtgctgggcgacatcgttaacctcgccacgctggtcgttgatcgtgttgatagtgtcgatttaaacgggatcatcaccggcaccggggatttcattcagcgtggtcagggcaccaccgtgctgaatgggctgaataagtggtccgggtatacgcttgttgaaaacggtacgctactggcaggcggaataaacaggttgagcagcgcttccagccatattgtcagcagtaatggcgccctggataccggtgggtacaaccagacggtcgcagacctggtaaaccagggaatcgtaaatctgcggggggaaaatgtcgggtcaaccctgacggtcaaaggcgattacgttgggcttgacggcacgctgaaaatcgccgctcagcagcacagccccggtgtagcagaccgcctggtgatagatggcggctcagccagtggaacgaccttgctggatattgacgtcagccggctcggcgagccaactgaaggtgacggcattatggtggtcgaagccgttaacggcggcgtgaccacggcgcaaaccaccagggatgcgttcacgatcggttctgactacctgacggcgggcgcctgggagtaccagctctttgcgggcgaccagaatggggccggtgaggactggttcctgcgagccggttatcgtccggatgtgcccggtttcgacaccctgccatccatcattcgccaggcggatctttttgtactgggcacgctgcacctgcgtcagggtgacgaacagccctatcgggcagataacccagccgatcaggaagggcgtttttgggcgcgctacctgaccaaaacggttgaccagaccctggatgatgccaccaacagtaccagccacactaactataacggcatgcagatggggctggatctctggcaaaacgagacgtggcgttctggcctgtataccaccttcctggatacagacagttcgattgacggtaatacaggtatgagtggcggggcggcgtacaactcaacgttttcaacctatcttggcggttatgccacctggacgagcaccgatgggttttacgtggacaacgtactccagtatggctatcactcggtcgatctgaaaaacctgaccgatcatgaaacttatcatccggacggaaactctgtcaccgcctcggtggaagtggggaaaccctggtacttcggtgatacgggctgggcttttgaaccccaggctcagttgatctggcagtggagcgattttgatgatgtcacactcaacgacgaggcgaaaacccacgtcagcgtgaaggccgacaacgcggtaataggccgtcttggggcgcgtctcacagcggaatacgataccaactacggtaaagtgaaaccttacttacgtgtaaactactggcaggagttaaccgacgggaaggatgaggtgacttaccgtaatacctccaacagcgacggcaaaactacgctgaaggcgaaccagcagtttgccgctactgaagccgcggtgggtgccacctggaccgtaacggacaacgttcaggcctataccgaagtcggaaagacctgggataatagcggcaaaaccagcctggatgcggatatctcggcttcgctggggatgaaaatacggttctga

SEQ ID NO: 128334 - DNA, 528 bp, Enterobacter cloacae
atggcaacgacaaggtctttaccatggctattcatcctcctgctcctgtctgtttttttgtgtgcagtctggtttattttttcaagttcaggctcacaactgaatgacaaaccaggcggaatagcctatgtcagctacgacaaaatactcgaggagtcgacaattctggcgcaggaaaacattcgtaatgaagaagtcattgcgctggctaacgccgcgtcaaaaagagcggaggaaaaatattacgctctgcctgagccgattcggcgcgagataagaatgatgaataatatgagtaaaaacaataaattaatggcggaaaagagcaatgtccggcgaatcagtctgaaagttatctctgcggagattgaaaagtatcgggtcgaaaatcattattcgattgtatttaacaatgatattgctttgccacccagtgatggccgggacattagtaatcttattatcaataaaatcaaagggattgaaatagaatatggggaatacccgatttttagtgaggttttttaa

SEQ ID NO: 128335 - DNA, 954 bp, Enterobacter cloacae
atgattgcagtattttcctctctgacagccgctatctccgcggtacttatcttcagccacgtaagttatgccgctgacggtcatcggattacacagcgcgcaaatgccgtgctgacgttaatgagctatatggtggtgcctgatattactgccagcgatcttaatattggtgcgggcaccaatgaaagtaatgaactcaatattacccagtttggagggggcgcaacgatgagtgagacctttcctgtctatatggaaggggctatgggttacagccgttacgatccgcaattcgttttaagcaatggcacagaaacgcggcgcatacctactaaatggaacagtcttaccgccacgggtggcatcggctgggattttcttgtttaccgcgacagtcgcggcggaaggtgggtcatccgtccaatcgcgaatgtaatgcttgggaccatggcaagcgatgccagaatcggggcatggttggtagatcggcgaacccgtgcagatttagactttctcgacggcggcagaatgaatgcttatgggctggggggagcgctaatgctggattatgaacttgtctctcaaccccatgatatcgacattgagttgcgttactctggcatgaagttgcaaacctttggcaacaccaccaaagcagttgagggtcatgcaaaagcccataatcttgggatctatgtgcgccggcgtgctccgctttatgacttgacgctgttaaaaagccctgttcgttatgtgctggaaggtgcgcatacgcaatatttcagagagcaacgcggtaaactgggctttaacagcctgagttcgattggtataggaatagaactggacagtagcaagtaccccgtattcattacgcgtacacgactcgtggctcgttatatgtttggaaacgacactagtggttacggggtaggtctggcgatgagtttttaa

SEQ ID NO: 128336 - DNA, 1017 bp, Enterobacter cloacae
atgacaaataaaaagttacgcttaattttattgctggctgttcccgcccttggtgtcgcttcaggtggctggttttatttcaacagtggccattatgtcgagactgataacgcttacgtgaaggcggacaaaaccgtgataggtgcggaagtgtcaggacgcgttctcaatgtggcggtaaaagaaaaccagcacgttaataaaggtgatttgttgtttagcgtggatcctaaaccctatgaactggctgtctcgcaggctaaatcggaccttagtgatactatcatcgcgttaaacaccatcaaatcgcaataccagagtaaacttgctaacattgcggtgtcgaaaagccaacttgcctatgcaaagcgtgaagaagctcgtctgcatcgtctgagtggtccaggctatgtatcggcttccgatttggatagtgctcaccagaaagttctgctaatgaagctggaagtgaatatgctgcaaaaacaattgcaggaggtagcagacagcttcggtggtgatatttcaacacccgttgagcaacatcctcggtataaaaaagcgttggctgaacttaataccgctaataataatctttcacatgtgaatgaatatgctccctcttccggcagtatcactaaagttttacaaactggagaatatgtacaaaacggtacaacggcaatgctcttggtttccgatagtaatctgtatgttgaggccaatttcacagaaaaggaactggcccgcatccgtgataatcaacttgctgagatcagcgtcgattatgcacctggcgtaacctggcacggtaaagtgagcagtatcagtccggccacaggcgcggagtatgcggtgatcccagcggagaatgccaccggtaactgggtaaaagtgacacaacgcgtgccggtacgaatccgtttgcaaaccgactctgacaagccgcaacttcgtgcgggtctcagcgctactatcaaaatcaatacgcaagctgacaccgaaagcgcttcctga

SEQ ID NO: 128337 - DNA, 1539 bp, Enterobacter cloacae
atgtctaatgtcattgcagctccgcggccgcaaaagaagcgcgccgatcatcgcctgtttattacattttcagtcatgctggcgacgataatgcaggcgctggataccactatcgctaacgtcgcactgccgcatatgcagggtgcaatgggagccacacaggatcaaacctcctgggtgctcacctcctatattgttgcagcggctatcaccatgcccctgactgggtttgtctctgctcgtattggccgcaaacgtctgtttgtctggtctgtaatcggttttactctcgcctcaatgctgtgcggggccgcgcagtcgatcgaacagattgtcattttccgtttgatacaaggaatctttggcgcaagcctggtgccgctgtcacaatcggtcatgcttgatgcgtggccaaaagaaaaacatggttcggccatggccctgtggggtatgggagtcatggttggcccaattcttggcccctcgctgggtggttggttaaccgaatactacagctggcgatgggtgttctatatcaatattccgattggcatgctggcgtggataggaatcactaccttcgtcaaagaaacagcgcttgataacaagcgtaaatttgacctactgggattcttttttcttagcgtagcaattggcagcttgcagttattccttgaccgtggcgagtctaaagagtggttttccagcggtgaaatcattattgaagcggctcttaccgtcgtagcactatacctatttgttgcacacatctttaccgcaaaaaaaccctttatcgaaccgggtattttttgcgataaaaatttcgtggtagggcttgttttcagttttggtatggggactatcctgcttgcaacgatggcgttgatgcccccgctgttacagggttttatgcactacccggtagtcgacgtcggtctgctgatgacgcctcgtgggttcggcaccatgttcagtatgatgatagttgggcgtatcgccggcaaagtcgatctgcggtatgtgattgccgcaggtgtagtaataatggctacttcactgtggcaaatgacccatttcagtatgtggatgagtcaatggaatattattagtagcggcgtggtgcaaggcattggtatggggcttactttcgtgccgctctccacgctaaccttctcgacattggcccctcaatatcgtactgaaggcgcctctctttattcgctgatacgaaatatcgggagcagtatcggtatctcagcggtaacgacctatttagcgcaacagagccagcgcaatcacagtatttttgctgaatttattaccccttttaataaagcgctacatgagaacattcaaaacggcgtatacaatctgcatcatacatcgggattaatggcgattaatggagaagtgacccgtcaggcgaccgtactggcctactatcaggattttcgtctgatgatgtttttatgctttgtgctgctaccattggcgctgttgttcactaagccagtgagagttgaaactcccattgattag

SEQ ID NO: 128338 - DNA, 783 bp, Enterobacter cloacae
atgaaaaaaatacttggattgagtgcaatagctttggtcagcaactgttgggcagttgaacactcatcaggaagtgctgcgcaggcaaataatcctcttgccaatatgacagcattcaacatgcaaaactattacataggtgatgtaagcggaacagacaaggacgcaaatcagttctggtttcgcttcgcgacgcctttctccttaggcgaaagcgactggcttttacgtgcttctttgcctgtaaacacatacccagccccaccaacaggaggacatcaaactggtgtaggggatctcaatctttttgcctcctggcttattgacactggaaacccagcagtaagctttggttttggaccacaaatcacagccccgacagcctctgaggatgccgttggttctggaaagtggtcaggagggctggttaacgtcctttttgatgcaagtaatccgaagttccagtatggatatctcgcctcatggcagcacagttttgctggggaggataatcgtagtaacgttaatcttgccacgttccagcctttccttttctatcagctgggaggcgggacctatctccgctctgcaccgatctgggcatacaatcttcataatgatgattacagtattccgcttggactcggtattggccaggtaattaagaagcagaaaactgtttataacttcttcattgagccgcaggcgagtatagccgaccgtggcgacgggcagccaaagtggcaaatatttgcgggcctcaaccttcagttccttaattaa

SEQ ID NO: 128339 - DNA, 795 bp, Enterobacter cloacae
atgcaattacgatacgctttgactaactcagtactgcttctgatgatgctctcttttcaggcaaccgctgaagtaagcaccgttaaaaccagtgaagacaagcaggatgacgatcccactaaggtgacgacgaaggtaggaatttcatggtcagataactatgactttgatgacagcaacgtctctttttctgcttcctgggcatttgatgaggcaagaaaattgaacgcgagggtcaacagcgacgcgagcgaatggcgagtaggggggtcatggttgttcccgattggtatattcaattttaactttggcagaaatgaattcaccaacggcgcatctcagacgaattattcgttggggacgtttataccgcttagtgcctttggtattgaacccgctggattccagatattcccaatggcgggttatacctataacacaggggacgagattcaatgcggtggcggaaaatgcgcagagtctgaatttaatggggatctgtctcctgaaaatggtttcgtaaacattgatgcatccgggagcagtggctatgttggtgtcttcgtccttaagccattgaccataaacatacgcttgttgagcttcctggccggttcctatggttcaaagaacgatgaaggagacaactataaaggctattttggaggccttgggatagggtattcactaaccagacatcagtctgtaaaagcgttctctttcgttcaggacaataatacctacatcgacgaggccgataagcgcattcttgcggcctatacctatcagttctaa

SEQ ID NO: 128340 - DNA, 1836 bp, Enterobacter cloacae
atgactgtacagttgacactggcaatgagcacgatcggtctgattgttctcagcctgatctggcgttccattgccccgcagcaggcggctatcagcgatctgctggcaggcgttgcctggttgcttgtcgccgtaccggtggtacgcgccggctggcatagcctgcgccatcccgatctgcatggcgtaaccgatctgttgattgtgctggcaatgctgggagcgtgggcattaggggatttaatcaccgctgcactattacccgtgttgatgatttttggccacattcttgaagagcgtagcgtcatgggtacccgccaggctattgccggcttgacgcagctcacccgcagcaaagcgcgacgcgtgaatgttgatggttcactggttgttatcgacagtcaggccgttcgtaagggcgatattgttgaaatacgtgccggtgacaatgtccctgcggatgggaaaatcctgagcgggtacgcaagcctggacgtggcctctattaccggtgagtccgtcccacaggaggcagggccggggagtttaatttttggcggggcgataaacctaaacggattgatacgaatggaagtcatccatactggcgaacagtcgacactgggaaaggttattgcgctgatgaaagatgcggagcaagccaagcctccggtgaccagattacttgaacgctatgcatcccattatctgattcttgtactgcttattgccgccagtacgtggtttttaacctacgatagccaggcgatgctggccgtgctggttgctgcctgtccatgcgcattggtgctgtctgcacccgctacagctatggccggtatcgctgtggccgcacgccacggtattttgattcgaaatgccgccttcctggaggaactcgccgatgttgacgccttaattatcgacaagactggcacacttactcagggccgtttacatcttgtggattcagttttaacacccgaagccgattattcagctgttcttcagcttgctgctgcgctgggagccacaagcagccacccggtcagccatgctcttgccgaatatgtgaaaggtgattgtgacgttgtggttgaaagcgctgaggaaaaacaagggctgggcgtcgtcgccattaccaacaaaggcccgggactgctgggtcgtgctgatctgtttgctacgtattctgttcaaaccttgccggttccggagcatgaaggtcccatcgttggcgttgcgctcaatggcctgtttatgggctggtttttgcttgccgataccctgcggcccgaagcatcagatgcgctgcttgaactcagacagatgggggtggacaagcaactgatgctgacgggcgatcgtctgcctgcggcaaaccttgttgccagccagctcagcatcccggaggttgtggcgcaggcgctaccggcaactaaacttgaacaggtacagaaagcggttgatgacggctggcgtccactggttgtcggtgatggcatcaatgacgcactggcgcttaaagccggtgcggttggcatggcgatgggggcgaatggtgctgacatcgccctggtttcagccgatgtggtgctcaccgggagcgatcttcgccgtatccccagtgcaatccgtctaagccgcaggtgtcgtaaaacattactggtcaacgtcatcattgggattggctggaccatatttatcgtggctgccgcagcccttggtctattaggcggtgccggagccctggtcgctgcgttgctgcataatctaagtactttaatggtgctagccaatacgggcaggcttcttcagtttgatgaaacacattag

SEQ ID NO: 128341 - DNA, 1083 bp, Enterobacter cloacae
atgaaaaaacaatccgtcacgatgagcccgtgggggcaatcctaccgcattgccttttttagtttgtatggtgccacactactggccgcactggtctggttgttttccagttttcaccagatcagccctgatagccaggcggtggtgtatcgctttggcaagccccttgcggtcaagcattccggcatgctcttcgcctggccgaagccgatcgatcggatcgagattatccctgggtcggatcgtattttgcagcatgatgtgaaacctctgcagcgcagtgaacagctgaagcttctaactggcgcacagttgtattcagatgcaggcacgggagccggatacctactgaccggagatgccggcgtggtgcagcttaatatgcaggttttctatcgcatccagacacctttgcgatatgtccttcagcgaccgcacattgatgcattaattgaccggctggggcagcgtgccgcgacgctggtttgtgccggacgcgacctggatactgttctggttgcaagaccggaaaccatgcaaaacgacagccacgcggcgcaggagcgcgctaagctgcggggtgacctgaagcagatgattgaacaggatttactcaggctaaaaggtaccgaaaacgatcctggcatcaccattgagcgtgttgatattgcctcttcactgcctgataacgctgttgcggcattcaactccgttctcacggccagccagcaggccgagcagaaaattgctcaggcccagaacgaagccacacgactgttgcaaaaatcacaacaagaggcggatcgtatcgtgcagcaggcggaggctgaccgcagtgaaatgcatgcgaaggccgaagttgctacccaatccataatcaaacttgcacaggcccgggctgagggcagcgaggccggcctgctccagcgaatctggcgcgaaagagtttcatcagtactttccagtgcaggtcaggtaactgcggtcaatcctgaagacagcagtaacatgatcctgagcggcccggcttcacagacagaaacgtcctcttcttctttgcagttattcgggggtatcccatga

SEQ ID NO: 128342 - DNA, 999 bp, Enterobacter cloacae
atgaaaattcatactattacgacacctgcaaccccaggtaaggtggggcaaaaaacaccacctgctcgttcgcccagcgtgtcacgaaagtggttccgctacggtgtcgcggcgttgctgatcgtactggcactgttaacggcctgcctcgtccaggttcaatccggcaatgctaccgtcataacccgttttggcagcccggtgagggttctgctggaacccggcctggcctggcgtttaccagcccccttcgaatcccccgtagacgttaatctgagaacacgttccacctccagcggtttgcaggatgtgggtacccgggacggtttgcgcgttatcgtgcaggcatgggccatctggaaggttaatcctgaaccggaacatgtgttgcgttttattcgtgccgtgcaaaaccagccggaggaagccgcaaggcaaatccgtacctttattggctcatcgctggaaacgaccaccagtaattacgcgctgtcggacattgttaataccgacgggaaaaagataaaaatcagccagctggaaaagcaaattgaaaaccagctgaagacacaattgttgaacagctacggtatcgaactggttcaggtgggtattgaacgtttaacgcttccttcggtaacgttgaacgccaccgttgaacgtatgcgggcagaaagagagaccatcgcgacggaacgcacggctgaaggtaatcgtctggctgctgaaattcactcaaaagccgatcgtgacgcacgaatcatggaggctgacgcctctgttaaagcatcagccattacagcccaggctcagcgtgacgtagcagctatttacgcgaaagcctatgccctagatcctcaactctataacctgctgcgttctctcgatacccttaacgatgtggtgaataagagtacccgtattgtattaagtacagatgctgacccgttcaaggcgctggttcaacagccttccgaaaccgacaggccatcacaatga

SEQ ID NO: 128343 - DNA, 1878 bp, Enterobacter cloacae
atggttacaaaccataccgacgcaaaaggtaggcctaaaaaccaactacgctcgcggttgctatattgtggagtgatagtctgtttactcttgtctgcttccggcctgcttttactaaagtcgtctgaacaaagttactctgaggcgtggttatactttcttcgccctttaactgcggctttggccattacacttgcggttatcgtaaatctttggttttgcgcaccttcacaaaacgaacaaacttcaagtgacaatatcgtcaaaaagtcttttaaagattctttaaggaggttcactcaacatccactactgtggctttggataagacatgctatactaattattgtaactgcctgctgcgctgcaatcgccctttacctcactgaagcaaaccttaaaataacccctgataataggattgtgcttagccatgttatacctgcgggttctgcgcttctggccgtgacgtttgcattgcttgtttgcgagagaatgctaagttttcgtcctgtccgctattggcaattgcagaatgtaagcgtcggcctgttacgcgtactactcagtattttcctgctggtcaccgttgccctggctatgtatggttatattctcattctctccgtatggatgctaaaaatcgccagcattctcgttgcgttggtcgcgattgagatatgtatccgtaccctgattgcgttagctattattccagccttaaacaagccttcaccatttcttacccgcagcctgctggcagatcagtttcactggccgttcagaccgttacagcagatgcgacgaaaaattttccagcattttggggtcgatgtcagtaaagtccaggcgtttcagcttatcggcaagatttttgttccggtaatgacaggcgtcatagttattggatggctggtaagtgggttgaatcaggtgccgctggacagtcgtggtgtatatgagcgtttcggacatcctgtcgccgtcctgaagcccgggttacatgtcggactgccctggccgttcggtaaagtagtacctgtagactatggtgctgttcatgaactcaaactgagtgacagtgaggcagctaaagaaacattgccttccaaaattgtcgatcccatagagggcccggctcctcaggagagctggcgcctgtgggataacagtcattcaaccgatcaggcacagctgatagcgagcggtatagacggcaagcaaagttttcagatcgtcaatatggatatcaggctgatgtggcgtgtcggcatgcaagataccgatgctatgaaaagtctctatcagaccgaggacattcccacgcttttgcagcgagtggcacgccaggtgctggcgcaatattttgctcaccaacagctcgatgatttactcaatgaacaacgtgctgccatgtccgttgagcttaacaggtcaattcagcagcgcctggatcgcctggatattggcgtagagttattgtatacgcgagtggaatccattcacccacctgccggggtcgccaatgcttatcatgccgtacaggcggcacaaattgcagcgaatgccggcatcatgcgcgaaaaagggtatgccgcaaccgtaacaaacgatgcacaacgtaaagctaccgttgccattaatcaggcagaggcgtccgcaaatgagctgcattcaaaagccaaccgttctcagcttctctatacagcggagtttgacgcctggaagattaaccctgaagcctatatcaatgaacgacgctaccagacgtatagcaaagcgttgtccaaaacaccgcttctgattattgatagccaggcctctggaacaaatgagcccatgcttgacttacgtcagttttctcaaccttccagatag

SEQ ID NO: 128344 - DNA, 1977 bp, Enterobacter cloacae
atgaaactgaaacctattgccagagggcttgctcttgccggcctgctttcaaccctcatactccctgcctatgctgacgttacgccaaaagatgccacagcagcaacgaagcaaaccaatgagcagttgtataatcaacttcccttctctgacaacaccgatttcacagatgcgcataaaggttttattgcgccacttccaactgaaatcattagaggcgaacaagggaatgtggtctggaacccacagcaatacgcctttattaaagagggagaaaaagcaccggataccgttaaccccagcctctggcgtcagtcccagctgatcaatatcagtgggctgtttgaggttacggatggtgtatatcagattcgtaacctcgacctgtcaaacatgaccattatcgaaggtaaagaaggtattaccgtggtcgatccgctggtgtcggcggagacggccaaagtcggtatggatctttactataaaaatcgcggcaagaaacctgtcgtcgctgttatttacacccacagccacgtagaccactacggtggtgttcgtggtgtggtggatgaagcggacgtcaaggcgggcaaaaccaagatttatgccccagctggcttcatggaagccgctgtagcagaaaatatcatggcgggtaacgtcatgagccgccgcgccagctatatgtacggtaacctgctgaagccggatgcgaagggccaggtcggtgcgggtctcggcaccaccacctctgccggtacagtaacgctaattgctcctaccaatatcattgaaaaagatggtcagaaagaggtcattgatggcctgacctacgacttcatgcttgcgccaggctcagaagcgccgtccgaaatgttgtggtttatcgaagagaagaaagtgattgaatctgcagaagatgtcacccataccctgcacaatacttactctcttcgcggggcaaaaattcgtgaaccgctgccgtggtctaaatacatcaatgaagccattgtgcgttggggtgataaagccgaggttctcatggcgcagcaccactggccgacctggggcaacgaaaacgtcacaaaactgctgaagagccagcgagatttatatcgttacatcaatgaccagactttgcgtatggcaaaccagggtctgacgcgtgatgaaattgccgccaactttaaactcccggattccctggctcatacctgggcaaaccgtggttactacggctctgtcagccatgacgtcaaagcaacctatgtcctgtatctcggctggttcgatggcaacccggcaacgctggatgaactgccgccggaagaagccgcgaagaaatttgtggagtatatgggaggcgcggatgccatcctgagtaaagctaaaaccgattttgaccagggcaactatcgctgggtggctcaggtggtcagcaaagtggtgtttgccgatccaaacaaccaggccgcacgtaaccttgaagcggatgcgctggagcagctgggttatcaggctgaatccggcccatggcgtaacttctacctgaccggcgcgcaggagttgcgcaatggcgtagtgaaaggtccgaccccgaataccgccagcccggataccgtgcgcgcgatgacgccagaaatgttctttgactatctggcagtccatatcaacggccagaaagccggtgcggctaaggcagtgttcaatattgatttgggcaatgaagggggtaagtacaagcttgaactggaaaacggcgtacttaaccatactgcgaatgcagaagctaaagatgctgatgccacgctgacgctcagccgtgacacgctgaacaaaatcatcctgaaagaaaccacccttaagcaggctgaagagagcggtgacgtgaaactcaccggcaacggcgccaaactggatgagatgctcagctatatggataagtttgaattctggttcaatatagtcaccccataa

SEQ ID NO: 128345 - DNA, 1032 bp, Enterobacter cloacae
atgatgaagctctttttaaatcttcggatgagaaatttcctcattggcgtgataactttcactatttccggagcatgtctagcgggcaattcgctatctcaaataaaatatgagtctggaaatctgcccattaaatggcatactggcggtccggagtgtaccacgtttaaaaatgattttcagattcacaaatacaacaaggatttttatatcctgcgcgaatcaggttgcgtccataccgaaaaaccttttctttatatcttgtttggacaagaaaaagcgattctttttgatactggcgcaggcacagatacagatgctactacaggcagaactccgaatgttgtcggtgccattaatggcgtgattcatcagtggttaaaagagaacaatcgatcatcaattcccctgattgttactcatcttcattcgcaccttgaccatacttggggagattatcagtttactcagcgccctgatacaacctttgtgaagcccggtgatgttgaaatcctaaaagcattttttggtattgaaatttggccggaacaaacaggaaaatatgatcttggtgaaagaaaactggatatcattccggtaccaggccatgatgcaaccagtattgcagtatacgatcgtaatacagccgttctgctaactggagatgtgctttatcctggtaggttgtatatcaacgaacctaatcctgatctcatgcaagccagtatacaaaggctggttgattttacgcgccaccgccccgtagcacacatattgggaacccatatcgaaagacgcgcaccctattatgattatccgcgaggcgctcattacgctcctgacgagttcccactgcaaatggggcgcgccgaactgcttgaactacaggaggcaacgaaacaacgtacccgtgaggggtcaggcaacacgattacccaaaaagcataccgggactttaccctctgcggcgtttatccgacatgtaaaccagttaatgctcccgatagcacagcgtttgttaacgacctttga

SEQ ID NO: 128346 - DNA, 810 bp, Enterobacter cloacae
atggaaaccatcatttttgcctcacaggtgttgttggggaccggactgggtgttcttctgtttgacctgattgctgcgcagcatctgcttgccattgatgcccttagttttacggcttctgcgattctgcttatgatgtctgccgctgctttttgcggagcagaacgttgtccaacagaggctacgccggtcaaacaggaatccctctggcgcgtcatttcacccttgcaaaaaagaagcattttgttgttacctgcgcttgccgctgtgggatctcccgcgatggcgcttttacctgcactggcacaagaaataagacctgaagattctgccgggctggccttgccgctactctttgcacgaagtcttggacagctctgcgggccgctgatgcttgatgccagtaaattacaacagtatgccgtaaataacaggttgttgctgacctgtctgagtttatttattggaagctattttttattaccgctatctgccggatatccatacaccggactggttcttatcttcagtgcacatatggcatcgaatattatatttgctttgggtacgtttggtattttgaggaacttcccgcagacacaggttgcaaaagcaagtgcgatgtcatggcgtgtgcaggtaatgaccgccactgttttcatcggtataaccagtgcaatggcgcaatacttcggcgcatggtatgccctttattgtatgtccttgttcagtctgggagttgtcggagttttgctgtggttgaatagggagagaacactaaataaagtgaacctacgcctccgagagtag

SEQ ID NO: 128347 - DNA, 480 bp, Enterobacter cloacae
ttgaggaattttaaagatagcgaattaatgctgctttattaccctgctgtaattttttttacaattcccatcatcaaatctactcctcgtttaacaacgtataggctgtattcttgttttaacaccctatacgttgttaaatgtgcttacagatgcaattatcaggcgctagcacagcggctaacttatatgaatacgacttacccgataaaacaccttaatcagttacgtccaatgttgattggctttcgcaaagaaaatgggctaacacagaaagaggtttctcagtatttaggagtaacacagcaggcctatgcccgacttgaatctaatcctgctagcgctagttttgaacgtttgtttagagtttttagcatcttaggaattgaacttaccttatcttcaatacaacactcagccccaataactgaagtgaaaaacgaatatgaaagctctccggccagacgggaaaaatggtga

SEQ ID NO: 128348 - DNA, 258 bp, Enterobacter cloacae
atggcgggtcatgacttggattttcaggtggtctatcggggtgagaccttagagcattaccgtcccggagggtgggtttactttcagcgtcctaaagagtgcggcggcgggtactggttggggcgcacttttgatggtgtttttatgattgagtacgagcgaccggtatcgctaaatgatggtatgaattttctggcctcaatgaaaaaagtagagtcaaaaagcgaggaatttgacccgaatttttcacttttctag

SEQ ID NO: 128349 - DNA, 1329 bp, Enterobacter cloacae
atgagaataaaagtagacaattttggcactatctcgcaggctgatgtacacataggtggcctcacagttattaccggtgaaaatgacactggtaaaagcaccattggtaaacttcttttttcgatgataaaagctatctcaagatacgaagaagatttggaagaggataaagaagatagaatcacgaatattgttgataaaatttattttaatctaagaagaaggattagtattactgaaaatccagagttgagagatatttttaatcctcgtaaattttatcctttgttaaagctcgatgcgtacaaaacgataactgaaaggcggaattatattgatcgctttacacatttaggaattattcctcagcttcttagtgagtcaattagtcatgatctaaatagaatactcgaaattttcgaagaaccagaggatgaaatatcagcaataaacagagcattacgcaaggcgttctattccgaatttaaaggcgagattattcagaagggacatgaaacgcctgtgaaagcttcacttgaagtttcagatggtgcaagcaatcttattgatatcaaatggactagagatggcatctatcattttgtttatagtgatggtttaggatacggagatgcgacatacgtagactcgcctagcgttatgcaattccataatttggtgagaattgcaaaaacattgtatgataataatacagagccgggtcgcccctctgtcccattccatttgaaagatctatctgcaaaactcagtgattctgcatatagtttatttgaacatgcagacctatttcctgaaggatcgttcctaagtgactcagcaaaaatatcgtcaatgataaacaatgctgtgggcggatatataagctttgatccagaggcgtcggattttttccttgaaaaacagggtattaagatttcttctgggaatattgcctcagggattaaatccttgggtattctggatatgcttctcaaaagtggtgcggcttcggtaaattcattgttaattatcgatgagccagaggtcaacttgcaccctaaatggcaggtgctttatagtgagcttatttgtgagttagttaattcaggggtggatgtattaattaccacacatagcccatatatattagatgctcttaagcattacgcagaaaaatcttcaatagaaaatcacttttatctcacggagaaattccctggtgagttgtacagttacttcttagatataactgagaatgtttcttatgcaattaatttacttgctgctccattaagggaacttaatcaggagtatttagatgatttctaa

SEQ ID NO: 128350 - DNA, 618 bp, Enterobacter cloacae
atgatttctaatgaagaattaattttcaacaaactcaatgaggttcatgctggaagtttgacggatataaccaccctaagtaagaatgactcgggggatagggagtttatcattagtgatgtactgggtttcaactacgatacagtaaaaaactgttcagatgcatataaaaaacaattaaaagaaaggtcacctgatgcacttttctactttgactcgaaactctattttatcgaattcaaagaaggtaaaagtgaaaaggaagacatacgcctgaaaattcatgaagggcttacgactctttatcattttgttcgtaagaatatcccggctattacaaaaaaagattttatggatcttcatattaattatgcagtggtttgccgttctaagggggataaatctgttctcagtgcggatatgttgaatgcacttgaaaattcctcacaaaaatatagtttaaaaaatcttgaaggatttcttgtcaagcaaactgcagtaattgatgaaccttctcagattttaaaatttctcaacaaggttacctcgggtgctgtaacaacaatccgtgtgtttgaacatatgggagttactcaggatttcaatttaactcattga

SEQ ID NO: 128351 - DNA, 756 bp, Enterobacter cloacae
atgacgagtcccgcagcgcgtcacatgatgcgggtctcggcctctgaaactgcgcagcgggctgccgtcccgctgcgcaatgcaactgcctatgagcagatgctcgttaagctggccgcagacaaccgcacgctaaaacaaatcagctccaaagagcgcaaagccgcgaaaaagcgcgagctgctgccgttctatctgccgtgggtcgctggcgtactcgaaaacggcaaaggcgcgcaggatgacatcgtcatgacggtgatgctctggcgtctcgatgctgacgatatcgccggggcgctggaaatcgcccgttacgccatgacctacggcctcaccatgccgatcggtcgccgtccgacgccgtgcctgctggccgaagaggtggcgctggccgcgcagcgcctgctaacggcaaaacagccggtcagtctggcgaacctgctcgacactatcgcgctgaccgagcgcgcggatatgcccgatatcgtgcgtgcgaagctgcacaaaatcaccggctacgtgctgcgtgatgcggagcaactgccggaggcgctggcgcacctgcagcgtgcgatccagttagaaagcactatcggggtgaaaaaggatattgagcagctggagcgccagctcaggccaaaacccgaaccggcaccgaaaacaaaaacgactcaaccgcgcacgcgcaaagtcgccgctaaaccggcggcacggcgcgggcgtccaccaaaggcggcaaaagccgcaggttaa

SEQ ID NO: 128352 - DNA, 1023 bp, Enterobacter cloacae
atgattacaggaatggatattcaggccggggcgaagattgccccggcgtttatgctaaagctggataacgacgatatcacgcaggattttagtgaccgccttatcagcctgaccatgaccgacaatcgcggattcgaggccgaccagctcgatatcgagctcgacgacactgacggccagatagcaatgccgccgcgcggtgcaaccttgaccctgtggttaggctggcaggattccgcgctgataaaaaaagggacgttcacggtcgatgaaatcgagcacaggggcgcgcctgatacgctgaccatccgggggcgcagcgctgattttcgcgggacgctgaactcgcgccgggaacagtcatggcatgacaccacgctcgggcaaattgtcgagacgattgcggcacgcaataagctgacggccagcgtggccgacacgctgaaaaccgtcgccgtgcctcacattgaccagtcgcaggaatcggacgcggtgtttctgtcccgcctggctgaacggaacggggcgtcagtttcggtaaaagcggggaaactgttattcctgaaagcggggagcggtaagactgccagcgggaagcccattccgcagatgacgcttgagcgcggcgacggcgatcgtcatcagtttgccattgctgaccgggaagcctataccggcgttacggcaaagtggctgcacaccaaagacccgaagccgcaaaagcaaaaggtgaagctcaggcgtaagcccaaagagaagcacctccgcgcgctgcagcacccgaaagcgacaaaagccccggcaaagactaaagctaaaaaagagcaggaagcgcgcgagggtgagtatatggccggtgaggctgacaacgtgctggagctgacgaccatctacgcgacaaaggcgcaggccatgcgcgccgtcaggcgaagtgggacaaactgcagcgcggcgttgcggagttttcaatctcgctggcgatcggccgggcagatttatttcctgaaacgccaatcgcggtga

SEQ ID NO: 128353 - DNA, 675 bp, Enterobacter cloacae
atgaagtgttattatcaaggctgcagtgatgaagggaaaacaaaagagcatatcccacccagagctttttttcctgatggggaagcagaacagcttttaacagttaagtcgtgtgttaagcacaataatttaaaatcaaaagatgatctctatgtgctggcacaaatttgtatgaatgccgcgccaagtaacagagcaagggaggtcttttttgataaggtcgtaccacaattagattacaataacggcgcattaagaaggaaacttgcagcaggctcggttcctttgccagatggtgcagttaaatatcaagttgatatatgtaggcttaacgatttttttagcgctctttcatttggtgtcgtatttaaaacatgtaaatctgtattacctgaagattatactctgaaccatttgtatcctaacctgaccagtggaatggaatctttgaattctgacatcgaaaaatcattggatatgttttattctggtaagccaatgagtattcttgaattcgggaagccaaaaacaaaaaacgaaaatatctatacagttgaaatatttggtcgcccagacttttcttcaagtataacgattgttcatgttttttttgggaggtttaaagtaatttcaatgctcactaaaaaatgtttaaatccagcaattcatcaataa

SEQ ID NO: 128354 - DNA, 930 bp, Enterobacter cloacae
atgaatatagaaaatgtgaattctgagccgtttttgaactttcatcaatttcatgagcatataaatataactataaagattcttacagcatcattgcataacactattgaggttgtttcatcatcaaatgatgaaaaagcattaggaagactaatatccaaagctgaccctgcatggaatatgccgcctatctggtctttttcaggcatacccaaatcacagatatatggttatgttagtgaatttggtttggtaggagctttctctgcgcttgatgatttttttgatggaattgaagcggaaattaataggtggaatgaaaaaatagatgaagagaaaaaactggttcctagagaagattgtgataaaagtgatgaaaaaacactcaatatttttaataaatataattgggataaaagtgaaattgaaaaatattctcctttattgaaatatttcagactagtaagaaactgtattgcccacagaaattctaaatcatcatctgctttggctgatttttccagatctgaatgtctacattctgttttttccgaaaatttcaaaaataaaacaataacaggccttccgaagttcaataaagaagataaaataattatcgatccaaagctagctatattttcatcgcatatattaaggtgcatttctgaaaatgtaaataataagttgataaaatttctgggcgaggatggagtgattaacatggctgcccatcatgctttttttaaagaccaaccagcagtaattggcacacataaaacagctgaagctatattcaattttattttaactgatagatatcgggttacattagatgataatagagaagcttgtactaaagctaaacaactagggatatggaaacggtgccttagtcgatttgaagcggcaaatcgtgaccagcgaagttaa

SEQ ID NO: 128355 - DNA, 1629 bp, Enterobacter cloacae
atgacaattcacgatccacgcttcagcgatgtgattatcattggcggtggcgcgacgggtgccggcatcgcacgcgactgcgccctgcggggattgagcgtcacgcttctggaacgccacgacatcgccaccggcgcaacggggcgtaaccacggtctgttgcacagcggcgcccgctatgcggtcactgacgctgagtccgcgcgcgagtgtattgctgaaaaccagatcctcaggcgtatcgcccgccactgcgttgaaccgaccaacggcctttttatcacccttcccgaggatgacctcggctttcagcaaacctttattaccgcctgcacggcggcaggcattcaggccgaggcgctcgatcctgcacaggcgcgccgacttgaaccctcggtaaacccggcgttactgggcgcggtaaaagtgcctgacggaaccgttgatcctttccgcctgaccgccgccaatatgctcgacgcgcgggaacacggcgcacagatcctgaccgggcatcacgtcaccgggcttattcgtgaaggtaataccgtacgcggggtgcgcgtgtgtgatacgcagtacaatgaacaccgcgagctgtatgccaccgtcgtggtcaacgcggcggggatctggggccagcgcatcgcggaatacgccgatttatccgtccgcatgtacccggccaaaggctcgctgctgatcctcgaccatcgcatcaataaccatgtcatcaaccgctgccgtaaaccgtctgacgccgacatcctcgtgccgggggacaccatttcgttgatcggcacgacctcaatgcatgtggactacagtgaaatcgattacaaccgcgttaccgccgaagaggtggatattctgctgcgcgaaggggaaaagctggccccggtgatggcgcagacgcgtattctgcgtgcctacgcgggcgtgcgtcccctcgtcgccagcgacaacgatccgagcgggcgtaacgtcagccgcggcatcgtgctgctcgatcacgccgaacgcgacggcatggacgggtttatcaccattaccggcggcaagctgatgacctaccggctgatggcggagtgggccaccgatgccgtctgccgtaagctcggtaacaccgcgccgtgcgtgacggcggagcgggccctgcccggctcgcagcaatcgacagaaaaaacgctgcacaaaatcatttcacttcctgccccgcttcgcggttcggcgatttaccgccacggcgaccgcaccccgacctggcttggtgaagggcgactcagccgcagtctggtgtgcgaatgcgaagccgtgaccgcaggcgaggtgcaatatgccgtggaaaacctgacggtgaacaacctgcttgatttacgccgccgcacgcgagtcgggatgggcacctgtcagggggagctgtgcgcctgccgtgccgccgggctgctgcaacgttttcatgccacctcctcaacccagtcgctcgcccagctcagcgattttttaaatgagcgctggaaaggcattcagcccgtcgcctggggcgatgccctgcgcgaaagtgagtttacccgctgggtctatcagggactttgcggtctggagaaggagcacaaccatgaaatttga

SEQ ID NO: 128356 - DNA, 1353 bp, Enterobacter cloacae
atgctcagtatctttaaacctgcgccacaccgggcgcgactgccagaggcagagattgatcctctctaccgccgtctgcgttggcaaatcttcctcgggatcttcttcgggtatgcggcgtactatctggtacgtaaaaactttgcgctcgccatgccatacctggtggaacaaggcttctcccgcggcgatctgggctttgcgctgtcggggatctccatcgcgtacggtttttcgaagttcattatggggtcggtgtcggatcgctcgaatccgcgtgtgttcctgcccgccggtctgatcctcgcggctgcggtgatgctgttcatgggctttgtgccatgggcgacctccagcattgccgtcatgttcgtactgctgttcctctgcggctggttccaggggatggggtggccgccatgcggacgtaccatggtgcactggtggtcacagaaagagcgcggtgggattgtatcggtctggaactgcgcgcataacgtcgggggcgggcttccgccgctgctgttcctgctggggatggcctggttcaacgactggcacgcggcgctctatatgcctgcctttggcgccattctggtggcgattatcgccttcgccctgatgcgcgacacgccgcagtcctgcggcctgccgccgattgaagagtacaaaaacgactacccggatgattacagcgagaagcacgaagaagagctgaccgcgaaacagatcttcatgaagtatgtgctgccaaacaagctgctgtggtacatcgcggtggcgaacgtgtttgtctacctgctgcgttacggcatcctcgactggtccccgacttacctgaaagaggtgaagcacttcgcgctggataaatcctcctgggcctatttcctgtatgaatacgcgggcattcccggcacgctgatctgcggctggatgtcggacaaagtgtttaagggcaaccgtggggcgacaggcgtgttctttatgacgctggtgaccatcgcgacggtcgtttactggcttaacccgccgggtaatccgggtgtggatatggcctgtatgatcgtaatcggcttcctgatttatggtccggttatgctgatcggcctgcacgcgctggagctggcgccgaagaaagcggcaggcacggcggcaggctttaccggtctgtttggctacctcggcggttcagtggcggcaagtgccatcgtcggttacaccgtcgatttcttcggctgggacggtggctttatggtgatgattggcggcagcgtgctggcggttctgctgttgatcgtcgtgatgattggtgaaaaacgtcaccatgccgaggcgctggcgcgtcgtcagtaa

SEQ ID NO: 128357 - DNA, 1059 bp, Enterobacter cloacae
atgaaattaactcagttagcgacaggcctcctgctggcgggcctgatgacaggctccgcgctggcggcggataaaatcgtgatcgcccaccgtggcgccagcggttatctgccggagcatacgctgccggcaaaagcgatggcctatgcccagggcgcggattatctggagcaggatctggtgatgacgaaggacgaccagctggtcgttctgcatgaccactatcttgaccgcgtgacggacgtggcggagcgtttcccgaaccgcgcccgtaaagatggccgctactacgccatcgacttcacgctggcggagatccgctcgctgaagtttaccgagggcttcgagattgagaacggtaagaaggtgcaggtctatccggggcgtttcccgatgggcaagtctgacttccgtattcacaccttcgaagaggagatcgagtttgttcaggggctgaaccactcgacgggcaaaaatatcggtatctacccggaaatcaaagcgccgtggttccaccatcaggaaggaaaagacattgccgcgaagacgctggaggtactgaaaaagtacggctacaccagcaagcaggataaggttttcctgcaatgtttcgatgccgcggaactgaagcgcatcaaaactgagctggagccgaagatggggatggatctcaatctggtgcagctgattgcctataccgactggaatgaaactcaggaaaaacagccggacgggaagtgggtgaactacagctacgactggatgtttaagccgggcgcgatgaagcagattgcgcagtacgccgacggcatcgggccggattaccacatgctggtggcggaaggctcaacgccgggccacgtgaagctgacggcgatggtgaaagaggcgcatgcgagcaagatgcaggtgcatccgtataccgtgcgtgcagaccagctgccggagtatgcgacggacgtgaatcagctttacgacgtgctgtataaccaggcggatgtggacggattgtttacggatttcccggataaagcggtcgaattcattcaccggaagtag

SEQ ID NO: 128358 - DNA, 726 bp, Enterobacter cloacae
atgaaaatcaaagatggattattggttttaataattactgcatgttcatacttatatacatacgtatattttttaggatatttcagagcaaaaaacattcctgagcagtttattgatatccagttgatttcaatgataaaggttggtgtttttttgttaggggtcttagggttaatgtcattttttattgacatgttgacttcgataggtgagcgtgaaataaatgaaggccagactgatgctgtgacactgagtgaaccatggaggcttttctttaaacgaaatagtctaattatcattacaatgcttttggctataatggatttttttcatgatccgacaatatcaaaactatcatttattgtgtttgtattttgttttgtttttctggctgagttttctgttgtgccaaagaatgtaaatacaaaatggtatatgcggaggtttaatatttatttgaaatcacctagagttactggatcaataaaagctgctcataagtttaatgtattaacacaatttgtatatttaacttggggcatgtcggcattgttattgatgtattttattggtgtgaccgtggctaatggtgaaaaggataccctcatgtgtaatgggaaatatcatgctttacaaataaactcagatgcagtgcttgtcacacgagattatcgggaatttaagtttatagagaaaactgaatgtagttttacgaatttaaaatga

SEQ ID NO: 128359 - DNA, 783 bp, Enterobacter cloacae
atgttaaatgttggcatcaaccattccctgacacgaccagtcaataggaaattctataaatatcttaatatggaaaattgcttaaaaaccctgagtaacggtacattatggtattcaagaccagaaaaattcaacgatccttttgactgctacccatattttccatcccaaggcaaacaaaaactttttaaaagacttaaaagcgtctataaactcgaacaaaaggcatctaataaattattgcaaagaaattttaatttaatgagtcaaacaggcgtaggtggaataactcatcgtttagtgtcaaataacttaacagtcacatgttttagtttagaccatttatccgctcctatgtgggcacattatgccgacgaacatcaaggctttgcaattgagtttgaatatacatccgaaatgattgcacgaatttcaaaaactgaaaatccaataataatagttcctttcgatgttaattataccgacatgcgacctgccttatatgacaaagacggtaatatgaacgggttgaatattgcactatctaaaagcaaacaatgggcttatgaacaggaagtaagagcattaagtaaccgtgagggtatccatgaattttccagatttcaaattactaaggtttttgccggagtaagagctggtaaagagaataaagccaagataagaggcgcaatcgctgatatgaataaagagataaattcacgatgcaaatttattgaacttggtatggcattcgatagctacaaatttgttgagttgaattaa

SEQ ID NO: 128360 - DNA, 1557 bp, Enterobacter cloacae
atggcgagcaaagctattttagtaaatttggatgcgatgattaagcgtgcggattttgctgctgaaactgatgacgaaacgacttttgatacaataaatagtatttcggtcagagatttgaatgattttactgctattttaagaaaaccagattttcaacgtgagacaaatcactggtcaccaaatcaagtggtatcaatgcttgaaagttatgttaatggcgatctgataccagcagtaattttatggaaaagttcatatatattcgtaattgatggtgggcacagattaagtgttttaaaggcctggattgaggatgattatggtgatggtccgttgtcattaaaatattttggtgctgaaatttcgaaagagcaaagaagcattgcagacaaaacccgaaaattgattaatgagcgagttggaagttggcgtcattttaaacaacggctattagatgaagatatatctgcaaccgaaagaaataaaataacaaatattttgactagagggttaactatccagtgggtcaaaggcaatgccgataaagcagaaagttcattcttcaatattaatatgcaaggcacacctcttgatgaggttgaagagctactcttaaaaaataggcataaaccgacatctatatcggcacgcgcagtgattcgagcagggaaagggcatcgttattggtcggcatttagtcaagattactcagataaaatagaaaaggctgcaaaaaaactgcataccatactatttgatcctgatttgaatactccagttaagactcttgatttgcccctagggggggccagaggcgttagggttgcgattcaattgcttatcgattttattcttattgctaatagagatcagcaaggtaatcctaaatctttagataaacaggacgatgatgagtttggtgctacgactattcagtctttgactaatgccatcaaattggctgaggttattacgggaaatggtgatggtagcttaggattacatccagcagtttatttttatgggccaacaggtagacataccagtcccatgtttttaggtacttcagctttaatagctgaaaagataaataataacgataaaggattctttaaaaaattcactgctgtgagatctgatttagagtcaattttagtaaaagataaggagttgatttctatgattattcagaaaaatagtcatagggcaagggatttgaaatataaagagttcttggataatttaataaagagattagaattgagtgatgaaatatctgaggtagagttaattcaactagctggccttcaaggcaaaattgttgctggtgatcttgcagcaaaatcaaagaaattcagcgatgaccaaaaaagtaagatatttattaatgcagcactattttccgctataaaatgccctatttgtaaaggttatttggatgctactaaatcagtgtcatacgatcatgtcattcgagttagagaaggtggggttgggcatagtgataatggtcaattgacacatccttattgcaatcaagcgattaaaaactga

SEQ ID NO: 128361 - DNA, 312 bp, Enterobacter cloacae
atgctattcattgaaacggatatttttacagaagacgtcaaaacgttactggatgacgacgaatatcataggttccaaatattcctggcaacgcaaccggattacggcgatctgatccagaatacgggaggcttgcgaaagattcgctggcttgctggcggtaagggaaagcgtagtggagtcagagttatctattttcaccgtacgcgtgagtgtgaaatcaggttgctgctcatctatcgcaaagggatcaaagatgacctctccgcgggtgaaaaagccatactgaaaaagatgattgagaggtggtaa

SEQ ID NO: 128362 - DNA, 291 bp, Enterobacter cloacae
atggataaggcgctgtttgagcgattaacccaaagcattgcgcaaatcaacgaaattgccgagggccaacgagagccgtcgcgtacgtttcaaattgatgcgatgaaaataaaagaaattcgtcaggcgtccgggttgtcgcagagtaaattcgcgaacttaatctcagttagcgttgatacgttgcgtaactgggaacaaggcagacgctcacctacaggccccgctaaagcgctattgcgcgccattgctaacgaccctcaacatgtcatcccagccctatcgcagtaa

SEQ ID NO: 128363 - DNA, 138 bp, Enterobacter cloacae
atggcgttcccgcagtggcgcttcaacctgcgctcttccaacactgagccggtggtgcgcctgaacgttgagtcccgcgccgataccgtgctgatggaagcccgaacgaaggacattctggcgctgttgaatcagtaa

SEQ ID NO: 128364 - DNA, 765 bp, Enterobacter cloacae
gtggctggcactgatttaatctcaattatcactccatcctataactctgaattatttatagaggaaacgtacaactctatatgtagtcaaacatatgataattgggaatggcttgttactgacgactgttcatccgatagaacgtgggaaattcttaaaaaaattagtttgtcaaatcctagggtaaagatatttcagaacaaagaaaacagtggtgccgcagtttctaggaataattctatctcacatgcgtcaggtgaatatttagctttcatcgatagcgatgacaaatgggaaccatgtaaattaaatgaccagttgcattttatgaaaacccatgactgcaatttttgcttcactgcatatacgttaataacagaacgtggtgaattattacataagaatattgacgccagaaaaacatgtttgtttgtgagctataaagatttgttagctaaaaaagtaacacttggctgttctactgtcatgttaaaaaataatgcgtttgacaatatcagaatgccattaataagaacgggtcaggattatgcgctatggttacatttgctaaaaaaatataatgtcaatgctgttttatatcccaaagtattgacgtcatatagaatagttgctggttcaatatcaagaaacaaattaaaaaaagcaataaggcaatggtctatatatcgtaacctagagaaaattaatcttgttatgtcaatgtggtatttcgtaaattatgcttggcgtgcaatttcacgttga

SEQ ID NO: 128365 - DNA, 1131 bp, Enterobacter cloacae
gtgaataaagctacatatactgctattgctaagattatatcgagtaatctttcggcctctgttctaacattcctttcattgatgtggttaagtcgtgtttatgatgtaaacgattatggattgtttactaaatactattatatgttgggaataatgtatgttttattagatctaggtctaccaaatgctttggttatatctttgtcgaaacagggccaatcctttaccatcactgatttagtcaaaagatatcaattcaattttgctgttgtggtatttattgtaattattttggggttctattttttttcaccactcatagcaatttcttttatcatatgtagtattataggtattattttaaaattcaactctattaagttacaaatagtggatgattggggaggaagttccagagtcgttttctatctcccatttttgcgtagtttaggaatttttggtgtctgccttgcggttttattttttaatgaaaaatatgaaccaaattatatatatgccgtaatgatcttttctagcataatggcgatgtacatgagttttaacaaaaccaaggaaattaattattcaaagtctggcatttctaaaaatctaaccggaatggcatggaagttgtatgcagcaaatatttttgcaattgtatgcatgcgagctgatgttatcttcatttcgcatttcttttccgatgccttagcaggtgagtatgctaggatttcgatgatcttttttgctgcaccattactggccggggcaattaatacagtatttatccgtggtctatctgctagtgaacttgatattaattctgtaaaaaatattacgttcaaattatttggtgttacctgtctcggtttattaatcttattagtcttaactatagcatacgctggaacactcgtatttggtgtatgggaagcttttatcaatcatcgagatcagtcctttttcttaattttaaaaatagctcaattattgttctttattattacctttatcttactttataagtacgtaggttttattattggtgctattgctttcctgatgtctagagttggtggatgggtgctgcaatggatttattgtaagcgaagaaagcaagctttttcttaa

SEQ ID NO: 128366 - DNA, 1518 bp, Enterobacter cloacae
ttgtcagtgataaattattatccccagagcgaacaaaataataataaaaatttgaactattatttagtagtcgtcttggtcgctttgctctcaggtttctatgtgcaatacttggctgatacggcctatggcttgtttatttcttatttaatgcttacggttataattttatcttctttatttagtttagagttatctgttaagctctttgtattattatcattaatcacaccacagttttcgcgtactttcgtagaacaagtggtaagtagtaataaccaagaagttgaacaattctttagctttcattcagttcaatttgcaggcctagggctatcagttattgctataattttcattggctttatttcgatatgtaaactgctttatcaaaaaacgaaacttgaaagcaaggacaccttatccttttttaaagggttatactttatctttgcagtattgttattggcaacaacagtatcctgtctaataggaagaactccagatatacggtacataatttctgatttccgtatgtttattatttggggaataggtgcgttagcggcaatactcatatgcaataatgaaaatataattgataagatctataatatattacttttttctatcttagttatcgggttgagaacgctgttcttcttcgctaacgattttataagtggaaggccaaatcttgaatatgccactcaggcatatattgcttatccgttgatgttcgtatttgcaatgactatccgcagtctcttcaaacgattattaatgactggtgttgcgttactggctgcgatttcaatgaaacgcgaagatatcgccttcgtttttctatgcgtgatggccattttttatcttattgtttttttaaatgaccgagggcttagaaaaaatgctctattagcgcttatggtgcttgtagttattacatcatttgccatattcgctttagcgatttactccccacaaagttttgatttcttactatataagttcgatttcttctcaaaactaatttcaggtgataaacagtcttcaggatctgttttagttcgattatatgaattgcagaacatagttggttatagcgttgaacatatatatccaatttttataggaatgggttttggtggctacttcgatttttcactaaccggatatcctatcattcttggtgtatcagattatagcattaatgaacttgcgaccaataaattcgttagacctcattcttttactaacttcctgttcttgaaaggggggttaatatttttaacttattatttaagtatcattattaagatgatgagtcgttcttttaggcttatgcgtagagtattaaaaacaaaatcgatatacagtaatgaatttaggatctatttgttctgtttcctatattcaatattttgcgtaaatatgttttggcaacctgtacataattttttattttcatttcttctcgtactcttgttagtaagaactaaaactctcattaggatataa

SEQ ID NO: 128367 - DNA, 189 bp, Enterobacter cloacae
atgcaaaacggtaaccgtcaggttaccgttttttatgtttgcgccctctccctgtgggctgagggttccccacaaattaatgcgagcactgagcaatcccctcgcccctccggggagagggttagggtgaggggaacatacggctgtggtggtcattccgttcactttatgttccttgctactctgtaa

SEQ ID NO: 128368 - DNA, 522 bp, Enterobacter cloacae
atgcctatttcatgcagtaaacccaaaacaaaagatgaacttagaattttggaggcgaaatttaatttcggtttgccagaagattataaagaattcctcaggtttaaaaatggttttgttgtaaaatctccagatttttgtgaacttgagtacgaaggtgtcgatgaaggggttatagctttttatgccctttttggaataaatatgaaaaatcctaatcacgacatttttcgtcaaaataagtgttttttaaatgaacttgattttattgatgataaattaatcatcggcggtgatcctggaggtaacttttaccttatattaaatggtagtgaaagccaaggtgtgtattattgggacagaacacatctacatgcagatgatgatatccaatattttgagttcgctgagcaaaatgagtgtggcaatatctataaaattactaatagctttactgaatttcacaagataatttgtaagacttcccttgatgcaggaatgaatgtaactgttgatttatga

SEQ ID NO: 128369 - DNA, 432 bp, Enterobacter cloacae
atgagcagagaagaattagtagagctttttgataaacattctgatttaatcaacatgggaacgtctgaagattctccaggaagtgactggatcgatgctgcagaaaaagcattatcagtgacttttcctgctagctataagtggtttttaaacaattatggtggcggagatatctgtggtgaggaaatttatagtatttactgcctgccttttgatgaggcggtaggtggagatatagtatatcaaaatactatagcaaatgataatttgaaaaaaggaagagttgttgtatcgaatacggattttggcgaagagttcttttttgatgcaaatgaaatggaaaaaatatatgtttcattaggggagaatgttcaaccctatgctgataattttattgtgtatctcaagaaacgattgtttgcatacatttaa

SEQ ID NO: 128370 - DNA, 1668 bp, Enterobacter cloacae
atgacggaagaaaatacgacaggtaatgagagcagtccctcgacgatctacataaaaccagaatgggatgacaatggaaaggtctactggcctggcatacagaatcagaaaaaatcagagaatgctaaagctgttttgctgcagccgcctgtcaaagcgatccccgttatcttccttcctggagtgatggggaccaatttgatggcaaacaaagcttcacaaaccgaagatatttggcgtggcgatagtttgggaggcgtatttcttaaatgggcgggagttgacggaaagcgcagaagaaaattacttaatcccgataccacaaaggtggacaatcgtggggatattaaccagaccctctattctccgctttccgatgacggaaaattatttacaacccgccgggagcggggctggggagaggttttatccttcagctacggtaaatttataagcgttttccagggggcactgttggatgactggcagcaggatcttgttcactatggtaaatcaacgtcggagaaaaacggggtattaagtcagctggtcggcaaatcgctgtctgaagagaaagatactgaaattaccggcgaatccatcctgactcagcaggaactgaaccatttcaagaactttttattcccggttcacgtctatggctataactggcttgaggataataaaacctcggcgcaaggactggttgcctttatcgacaggactatcaacctctacaaaaatgagcgcggccacggcatgccctttcccgccgggcaggaaaaagtcattatcgttacccattccatgggcgggctggtagcgcgttacgcgtcccaggtgttgggcgcaaaagataagattctggggatagtgcatggggtgatccccgatcttggctcaccggcagcgtaccgccgcatgaaggttggcgcaagacaggaaggcatggccggagccgtgctgggtaataccgcagaagagctgatgccggtcctggccagggctcccgcgccgcttcagctcttaccttcggcgaaatacctttccggagcgccctggctgagcgtggaaggcgctggcgaagacggcagcgatgtaaaactaccgcaagccggggatcctttcggggagatttacctcaacaagacgctgtggtatcgcctgtatgagtccgacattatcgataaggacgaggcggtgagtcagagtaactggattgagtacaacgatctcattgataaaaatgtccaaccatatattgaaagtttggataatctttatcatccgaatacttatgccttttatggtaataaaatcgattcagacggtactcttatgtggaggaaaacctccattacctacccgaaaaacaggcatgaaagtgacagaaagctgcccaacaactaccgggagatccccctgccttttaatcgttctcagatgtatgtgatcacctcatcaaatacggcaggcgatggcacggtgccggtggaatcgctgagcgcgatttgccgtaacagcgaaatcaaaagcgttctggctatcggcgtggaccaccagggagcctatgacgtcagtagcatgaaggatatacaggccaggccagccctgcagtttactctcagagccattgtgaaaatggtccaggagatcccgaaaccatga

SEQ ID NO: 128371 - DNA, 1092 bp, Enterobacter cloacae
atgaaaaccattagacagctcacagcattatcccttatggcgggcagcatgctttttattgcccagactacggcatccacgccagtgcagaaggacagtccagtgataaatagtttgtttgcgcagaccaaaccgcagtgcatcgggcgctatgtgattgacgttcccgagtcattcaacaatcagcttcacgatatgatttttattgatgattttaaaattgaaagcaaacctctctatccacccgcatttaaacagcgggtgcagttaagagagcaggctctgcgcgatgctattaataaaccaggtaacaaacctgaaaatgccccgtttttaaaagaggttattcaacttcctgatggcaaaggcactattttcgatcgcaatgaatcgggcactccggatatatacagaaagctggaagcccatgtttattcaggcatgacagcctttgtaattactacggatattcgtgacttttcagataaaaagcacagtgaaaaaaaatcaaaatatttagcaagaggttttactgaggccgatgcaaataccaagccagttaagctggctgccctgcagtctctgatatcacggcttagcggcagaaaagatgaggatgttccgtcggttaaaggtgtgtgtattccaaatgggtttatccgggatgatggcgaaaaccataaggaaagcctcacattccggtatgaaaatgatgattttgtttttggtgtcgatatggataacacaattaagggttcagaagacacgctgtttaaccgtagtgtgcaaattaatgaggcgcttaaaacatcaaaccagtacactattaagaaagtagtactctcaccgaacggtattccggctgagtcatggttgtttggtggtacacaggtcatcagaaatacggcaacgggaaaggatgaaaagaacacattctataattttatgctttatgctaatgagcgtaatgcgacaccggataagccgaatcttaacattgggttcggcagtgagtacaaaaaaacgcgctacagcgaagcacagatgatagaaatctgggaccggttggtgaattccctgcgctataaatga

SEQ ID NO: 128372 - DNA, 318 bp, Enterobacter cloacae
atgcaatgcatctgtaaatatatggccttatcatcactggctgctggtttgctttttattgcccaggctacggcatccacgccagtacagaagggcagtccagtgataaatactttgtttgcgcagaccaaaccgcagtgcatcgggcgctatgtgattgacgttcccgagtcattcaacaatcaacttcacgatatgatttttattgatgattttaaaattgaaagcaaacctctctatccacccgcatttaaacagcgggtgcagttaagagagcaggcgctgcgcgatgccattaataaaccagataacttataa

SEQ ID NO: 128373 - DNA, 1398 bp, Enterobacter cloacae
atgaataataaacctaaagttgttcctgtgatcatagccggtggtgtagggagtcgtctatggcctatgtcacgagaagagcaccctaaacagtttttgcctcttttaaatgatacattatcattattacagcaaactttaatcagagtcagtggcgttggtttcgaaactcctattattatctgtaatgaagagcatcgtttcttagttgcacaacaactgaaagaaatggatttgctaaataataatatcatccttgaaccatgtagcaagaatacggccccagctataacattagcagctctttctttggatgatgatgattgcgtgatgctcgttcttgcagcggatcattatatcaaagacggccaatatttttcaaatctaattaaaaaagcattactttctgttgacaatgaaacgttaataacttttggcattactccatctcatcctgaaaccggatatggatatataaaaaaaggcgatgaaatatctgatggctttttcgtcgttaacgaatttgttgagaagcctaacaaagataaagccaatgagtatatttcagaaggaatgtatttgtggaatagcggcatgtttatgtttaaaccaagtgtctatttaagtgagataaaacgatttagacccgatatacatgacgtgtgcgttttagccattgcggatgctacaagagacatggactttacaagaattaataaagatatttttgattcttgtatcagtgagtcagtcgattatgcagttatggaaaaaagttcccatgtgaaggttctccaatttgactcgcaatggagcgatgtgggcgcttggggcgcattgtgggatatatctcctaaagattcttctaataatttcacatcaggtgatgttcacacagttgactctgttaattgttacataaaaagtgatgggatttttacatcggctatcggtttaaaagatctaatagttgtagctactagagactcggttctcgtatcacaccgggatgatgtccagaaagtaaaagatacagttgaatatctaaagaaaaataatcgatacgaatataaacgccacaatattcgttatttaccttgggggacaacgttatgcttagttgactccagaaaatataaaattaattttgtcacggttgaatcaggaaaaacgatttcgttgcaaaaacactatcatcgtaacgagcaatggacagtcttatcaggaactgctgttgtaatcattaatggtgaagaaaaaatcattacagaaaatcaaactgtctacattcctatcggaagcgagcattcaatccacaacccaggtgtgttacctgttgagtttatcgaaactcaaatcggtgagtacattgattcaacagatgttattagaatgtaa

SEQ ID NO: 128374 - DNA, 1077 bp, Enterobacter cloacae
atgggtaaaattgccataattgatcctgcttcatatgctttaccatatgattatttttatgtaaaaagcttatcttctttttataaagttgatttttattgctcctctactaaattcaactatgactatgtagagaagcttagattgttaccaaacgtcaccgtgcatgaatttcaagtttctggtgtaaacaaatttcgcggattgattaattatataaaactactaatgaaagttgctttgtcatcacaaaaatataaagctattaatttacagtggtcattggtaacattttttgaagtaatattttttttctatgtaagatcaaagctgatagtcacatttcataacagcgttccacataataagcctaggaaagcatatcgtaatattaagatattggcacacatggctagtaaattgttatttgtaagtaattatacaagaaatgattttttagatttatatggttttgcaaaacagaaatgtttcgtcttaaatcatggggttatgccaataaataacgagcatttccattgcaaaagtttttcagttcccccgagacgtattgttttttgggggaatataaaggattacaaaggtgttgattttctattagatgccctacctcttttcaaaaagaaagggtatagtctagaagtttatggtaaatttgatgagaataaaaaagcactcgcacaaaaactctatcataatggagttaaggtaactgatggatatttaaatctggatgaggttgaaaaacttttgtcttctaatattgccctcattcttccttacaaggctgcatcacaatcaggagtaatgtacactgcgctaaactataatactattatattagctaccaattgtggtgatccctacgagtttctcaaagaatgtgatttaaaagaactctcatttaaatataatgatttgataagcttggaaaaaagtcttgattatttatctgttaaccatgaaattattaaggaaaggattgtatcgagcaaggagaaatataattgggcttttcctgcttctgttttaaataatatctttggttcaagaatatga

SEQ ID NO: 128375 - DNA, 543 bp, Enterobacter cloacae
atgtcaaaaatagtcaagagcttaatgtatatttatgtggggctatggaatcacattttatgttatttcccttcctataaatttagatggtttatcttaagattcctttattgtgcgaatattgatcgcggtgtaaatatacatatgggggtaaagttttttagtccgtggaaattaaaagttaaggcagggactaatatccagtggggttcatttcttgactgtcgtggtggattagaaataggttctaatgttgatattactttaggagtaaaaattctaacgcagtatcacaatatccatgatgaaaattattccaccatatcgaaagccgttataattagtgatgatagtatcgtgggctctttttctttgttgttacctggatgcaaaatagaaaaattcggtgtgctgggagctggttcagttttaactaagacagtatatgaaaacacattatttgccggtaatccggctaaatttataaaaaacagaggtatcaaccaaattgttaacgtaagttataaaaggacctttcattaa

SEQ ID NO: 128376 - DNA, 582 bp, Enterobacter cloacae
atgccatatattagcaaatatataactgaaaaatttcataaaaaaagtatatacataccacatcctatacgattaattattgctaataccaatgaaataaaatcaaatgatgtaggtagcgttacaaatgtattcatgccgtcatttgttgaagaaaacttgaaacatacaatttgtgcaagttttgatactttgggcaataaatttattttacgaaccaaaggtaagatttcaaaatttaaaaatgtttctactcaagagtttttttataattatgatgaaaacatgttagatgctgacgctattttcattcctcaaaagtttgattatcgggtaagcggggtactttttgaggcactgcaaacagatgctaaaatatttatgagtaattgtcttttctctaaaaaccttaaagaaaaatttgaatccaagatagtcatagttgatgattgggagcattatattcgacatgaatttgttaatgaaataaacaatcgaaatggaaaggaaagaataaatcgagaggcattcaattctgttggatttaagttgctacagaaggaattattatgtcaaaaatag

SEQ ID NO: 128377 - DNA, 141 bp, Enterobacter cloacae
atgtttggagataaaattggtgcaccattagaacaatttacgcatgcttatccgcaatacggaaaggggggcgtagaacaaatgcatgcagacaaacggacaattactttcgacaaaattgatattcttccggaggaataa

SEQ ID NO: 128378 - DNA, 366 bp, Enterobacter cloacae
gtgattaaaaatctcaatttcatcaaagaaaatgtcctgcttcaatggacgtgtggcgaaagtaacatactggttagtatgccatttttagactatgcaatggtcgactcaacacgccagttagtctttgcgttaagcgaaccaaagccattaccgaccgttttgactatcttcaatgcgcagggcgaaaaactattttggtctgcacctcctgaaggtgcgattttctattacttaacattcaacctgtcaaaggaagtggttgtggtctgtagctatgcggaaaagcaaaacggctggcatgagtggttttattcctgggatatgaagcgtaatgctttttctcaattgggcccagcgtattaa

SEQ ID NO: 128379 - DNA, 405 bp, Enterobacter cloacae
atgataaatgataaacttattgagtatgcacgagaaaaaataccggatgagtttcgttcttatctaaatgaaaagaataatcttcaatgtgcatcatttataagtagtactcaaaatgaattgagaataatgaaagcgcataaagaatatactaaatttacagggttgaaagttaatggtcttgatgatttaatcattgcccttgaaaattttgaaaaggaaaatgtattcgtaattaatatccgaagtaagttgtactcgttcaagatttattcagatgaaaataataatactttactgggtgttattatccttaaacttaaaaagaaaactgcagaggaaattcgatttggccgagaaatacttggtattacgacaccaccccctgatatagaagatgattag

SEQ ID NO: 128380 - DNA, 381 bp, Enterobacter cloacae
atgaaaataactaatcagctgaagaggaagttattggtcctggatggtatagataatgactttataaattatggcgcagaaatagcatgccctgaatgcgaaggcgtaatagtctattccatagtaaactcatatgagtttgacacgctctctgaagaggtaaaatgctttttggttaagaaaatgagatgcgtgaagcttgttagtgaatataataaatataactacgatgaaagccaattagacgcttcgaaaaacatttgttcaaagtgtttgaaagagttttctgctgtattaacgtataaagaagtgcagccagcccgatatcgggtatatcttgtggggctttttgaaggtgatttgaaacagatcaaactttaa

SEQ ID NO: 128381 - DNA, 366 bp, Enterobacter cloacae
atgattgaaaatctcatttgtattaaagaaaatgacctgcttcaatgggcgtgtggtgaaagtaacatactggttagtatgccatttttagactatgcactggtcgactcaacacgtcagttagtctttgcgttaagcgagccaaagccactatcaaccgttttgaccatcttcaatccgcagggcgaaaaactattttggtcagcacctcctgaaggcgcagctttctgttacttaactttcaacctgtcaaagcaagtggttgtggtctgtagctatgcggaaaaggaaaacggctggcatgactggttttattcctgggatatgaagcataatgctttgtctcaattgggccctgcgtattaa

SEQ ID NO: 128382 - DNA, 786 bp, Enterobacter cloacae
atgattttgtccggcgccgcacactccaccgttccgtccgctatccggatatatcccccgccgctcgtcagaatgatttcctgcttcgcgctgatgatgagttttccctcactgctgctgatgcggatatccttcagcgcatccagcgtcatctcatctccctgcgcctggatctccacctttcctttgccggcaaacattttgatgcccagcttttgcgcaaacagacttacccgctccccggccgccacggtgaatcttttcagtgcgctgaaatctgtgtgcccgccgctggtgctgatgatgttgtctcccgccgactgctgcaggcttttccctgtcacctgcgctattccttccggcgccgagaccagcaacgccgctttctttaaatccgtcagcgcctctgacagcagcgccttctgcgtctgcacatctgccagctcagccctcgccgcctctgccgcgctgcgtaacgcttcagccagtgaccgcgcctgctccagctggctcatcgccgcctgcatttccagcacctgcccctgcgccctggcctggccgtcggcactgataaatatccctttctgcgcccgtatcgcaccccagctgtccgtcctgagctcaaacccctcaccgcgctgctgtttctcgctgtcgaccaggtggccgaggttcagctggctcttgccgccgtattccgtgctgaccttgatatgctctttcccgcgctcgtcgtcgaggcggattttgttgttcgctggcgtgcgcaggacgttgcgtttgtag

SEQ ID NO: 128383 - DNA, 684 bp, Enterobacter cloacae
atggcgcacctcgccaaagctgccgtactggccgctccagcgcaccgcgccgcgctcgtctgtgacctccagcggagcaccgttcagatcggtattgaaccagtaaatctcaccgctgctctggtcacgaaggtgatccacacgcgccagcgggctccaggcttcattcgggtcgtatacataggtgctgcacagcccgctctcctgctgctcctgcagcaggcgatagccctgccacaggaagcgggtgtcggtagtgccgtgcgtcgtggtgacgattttgcgcgtgcggcggcccagcgcgtcgtagtgatagcgcgcctcaaaacgcccttccggcccggttccgcgggcggataccagccggttctcggcgtcatacgcataatgctgttcatacagcccgttgcggcggctgaccaggttgccccagtggtcgtatttcataaacagcgcctgccagtgctgcaggcggttatccgtgaccggtaccgcatcgtcactggcggcgaggttatccgcggcgtcgtagctgaactgcgcgcggctgtgtccctgtcgggcctcgtagtgcttcagcagacgcccttcggcgtcgtagccgtagtccacctcaccgcgcagtgtatcgctgacgccggaaagctcaccgcgcgcggtgtagcgatacaggcgttccagtag

SEQ ID NO: 128384 - DNA, 237 bp, Enterobacter cloacae
gtgaacggactgcaggcccaggagtttctggcgacgggcttgcaggaagataacgatgaaccacgatataattttgaaatgtatattaatgaaatgacggccagttataagactccgggttttatactgacccttgataatcaacgcatgccgccaacttcctacagcaaggaggaaattatcgccttctgggacacgatcagccgtagcgtacgcgtgcgtcccggcgcattttaa

SEQ ID NO: 128385 - DNA, 2109 bp, Enterobacter cloacae
atggtctttatggcgggcatcggcttaatcatctccgtcgtcgcactcctctatctttccctgcatcttatcagcaccaaaaccaatgaaattgatgaacaccgcgcggcgctttccgtgcagggggccattcagacatcggtcaaccgcgtctcctcgctggtgctggataacgccgtctgggacgatgcggtgcgggaggcctaccgtcccacgctcgataccaactggttgtataacacctggggcgccggctttaaaatcaacaacctctatgatggcaccttcgtgcttgatgagcatttcaacgtcatctggggatcgtttcaaagtcagccatttcaggagacgaatctcgattttttcggtaaggggctgaaagccctgattgctcagcacgcgcgcgccttatcaggcgataaaaatatctatgccgggatcagcaaaacgcgaagcggcgtcgcctttgtgggcattgggctgattcgcccgatggtcggaagattacaggttaccgacggaacgcgccgctatctggtaatcacccgtcatctgaacgccagaattttatccgacctggggtcgacctttcagatcgataacctgcactttacgccggataaaattaacgagctgagtatgccgctgcgcagttcggcaggggagctgctgggctatcttaactggcaggcacggcttccgggagcgcaggccgcccgggcggcatcctctgatatcacccagattgtcgtgctggcatcggccctgatcctgctctttattctggtgagcagcgtggggctgtacaagcttgcgcgaggagaaagccaggcacgtctggtggccagaacggactggctaagccatctgccgaaccggcgagcgctcatcgaggcgctggatcgggtgagcttacgcggagatatcgacgtcaaaagcgtggtgtttatcgatctggatggctttaaagacgtgaatgacatctacggccacagcgtgggtgacgatctcattgtggcgattgcgaaaacgctgagtgaacgcgtgccgccggggggaatgctggcgcgtatgggcggggatgagtttgccatgacaatcggcggtgataaggcagagacacaggccaccgcttttgccgtgtcggtgctggattctctctccaccccgattcagctgggggaacgcaccatccatatcggggccagtatcgggatcgccagcggaaccctgattgaatgcaccagctccgagctgtttcgtcgcgccgatattgccatgtaccatgccaaaatgagcgggaaagggcgtatcacccactacgacgccgagctgaacagcgcccgtgagcgcaagctggcgattgaaaatcagatccgtaacggtctggagcgcgctgagtttgaggtctggtatcagccgattattgacgcccgcagccagaaaatgagcagcgtcgaagcgttagtccgctggccgcgtcgcccggaagggccgctgggcccggataccttcatcgccatcgcggagaccagcggcctgatttacaaactgggccagtttgtgttgcagcgcgcctgtcaggacctccagccatacggtgacttaacgctttccgttaatatttctcccgcacaattccgcgatcccgccttcgaagacaaagtggccagcgtgctggaaaccacccattttcctgccaaccgactgcagctggaggtcacggagtcttatgtgctggaaaacccggagcgtgcccgcatggcgatagccaatcttaaagcgctgggcaccgcggtggcgctggacgactttggcaccggctattccagcattggctatttgcggcgttttaacttcgacaccatcaagattgataaatcgctggccgggctggtggaccacgatgaacaggcggccgcgctggtgagcggcacggtgcggatcgccaacgcgctggggatggcggtggtcgccgaaggggtcgaaaccgaaagacaaatgaaactgctgcggctggctggctgcgatcaactgcagggtttctggttcagccagccgatgccgattgagtcaatcagggcattacatcaggtcagacgatgctga

SEQ ID NO: 128386 - DNA, 1026 bp, Enterobacter cloacae
atgaaaaagatcggatttttatcctttggtcactggacgccttcaccgcagtccggcacgcgctcggcggccgatacgctgctgcagtccatcgatttagccgtggcggctgaagagctgggggcagacggcgcctatttccgcgtgcaccacttcgcccgacagcttagctcgccgttccctctgctggccgctataggggcaaaaacaaaaaccatcgaaattggcaccggcgtaatcgacatgcgctatgaaaatccgatgtacatggccgaagatgcgggcgcggcggatctgatttccggcggtcgcctgcagctgggcatcagccggggctcaccggagcaggttattgatggctggcggcatttcggctatgtcccgcaggaaggggaaaacgagtcggatatggcgcgtcgtcataccgaggtgctgcttgaggtgctgcgtggggaagggtttgccaaaccgaacccacagccaatgttccccaatccaccggggctgctgcgtctggagccttattcagaagggctgcgcgagcgtatctggtggggcgcgggttctaatgcgacggcggtatgggcggcaaaactgggcatgaacctgcaaagctcaacgctgaaggacgatgaaaccggcgagccgttccatattcagcaggcaaaacagatccgcgcgtaccgtcaggcctggaaagacgcagggcatacgcgcgagccgcgcgtgtcggttagccggagtatttttgcgctgatggacgaccgtgaccggatgtatttcggtgccagccgcaacgacagcgatagcgtgggttatcttgatgagaaaacgcgcgccatcttcgggcgcagctatgccgcggagccggacaagctggttgaacagctgaaaaaagacgaggcgattgccgaggcggatacgctcttactgaccgtaccgaaccagctgggggtggattataatgcgcacgtgattgagtctattctcaaacatgtcgcaccggcaatgggctggcgcgagtag

SEQ ID NO: 128387 - DNA, 627 bp, Enterobacter cloacae
atggttttaatattaagacttccaccctgcgtctcaatattcccagacgtgttcaccacctggctgttcgcattccctgccgcatcccgctgcatccacaggttgtttcccgccatgatgtcgccgcgctggttggtgatgctgtcggcaaacagcgccaggttattcgccgcgtacagcagcgcggtgttgacgatggcgcccggcgcgctcagggtcagcgagccgcgcgtgccggtgaagccgtccacggtaatgttgctccggctggccacggtgatgtcacctccgccctgcaccgagcccgcggcgttcagcgccacgctgcttccggagagcgtactcgcgccgccgccggtggtgatttgtccgttgttgctgagctgcccgcccgcgttcaggttgaccgcctgcccctgcagcacgctgcggttatcaatgtcgccgccgctgttgatggtgagggttctgcctgccgccacggcggttctgctggtaaacgcgttcgtcaactgcagcgttaagtcccccagggacaccagctggccggtaaggtccagcccccggctctgcagccacaggttgccgccgctcagcagcttgccgcccgcgctctgggttacctag

SEQ ID NO: 128388 - DNA, 1788 bp, Enterobacter cloacae
gtgggactcgcttttacctttacggctgctttcgctgatctgtgccgcgttcagattgagatcgttgcccgcgctcagccccgcgctgccgcccgccttcacgtcgctggcggtcacgtcaaggttgtgcccggcgttcaccagcaggttgccgcccgcggtgacgttactgccctgatacgtgacggacgaacggctggttttcgcccggctggagctgaatgcgtcgttgatctgattcgcgttgacggcaatatcgccccacgcgttcagcagcatatcgccgccggaggccaggttcgccccggtgacggtaatgtttttccccgcctcaagcgacaggccatcctgcgcggtaatcgacgccgtgttgcccagcagggtgtctttcaggccgatcttgccgtacttccctccggcgttgatatcaatctgctcaacctgggtcaggttgttgatgctgccgtccaggctctccagcgcgaccgttttgccgctgatggtggagctgatgttattgatatcgccgatggcgctcaggttgaggtcgccgcccgctttcatcaggccgttgttgaggttgctgatgctgttctggctgtcgagcgtcaggctgtttttcgccagcagcgagctgccgctgttggtgatgtcgccgcccttcagggtgacgttgttgcccgcgattacgctgccgttattgacggtgacgtccttcggcgacaggtagagtttcggtaccatcacggtttcgccgttaacggtggctttctcccaccacagcaggctgtggtcgagcgcggcaatctgatcggcggtcagcgagacgccaaactgcaggcccagcgactgctgcgccgccgcggcgttgtccatcagatagcgcatctgatccagatcggagccgatgccgttcaggtagcggttaccggtctggttgagcaccacgttggagacatagcgggtatcgaacgctgcatcgccgaggaagcggtagtcgtaatccgggttcaggttgaggcggccgagcatataggacgagccgaggaactgcttctcgtcggtaaacgccagccgcgtctcctgcggtgccgtggacgacggtttgaccccgagcattgcgttcaggtcggcaaacagggcgggatcaagctgtccgagaccgttcagtttcgggttgatgctgatcaggtacgggcttttcgggttgtcggagaagacaaaatagccgttgttgcccgacggaagcgggtaagcgctggtatcgacgcgctggccctggtaatgcccgacggcgccgccctgagcggttctgagatcggcggtggtgaccccggcgttcgccagtgcgcccagctggccgaggttcgcgttgcctttctgcgtggtgccaatgttgctgagagacgtgccggacgcgccgccgttttccagcgcgccgccgccgttaagctgctgcagcgcaccctggagctgatcgttccactgcggcgagttcaccgccacggtgccggtcgtgttcagcccctgtttttgtacgccgctgccgacgctctggttgctgagggtgttcagcgacggcgtggagataacgttgctgacgccgcccgcgttcgcagtggtattggtgttgctgatgttactggtgaagtttgcggtgacgttaccgcccgcctggatgacggcgcggtagagttcacccggttggaattctgtttcatgcccaaccagattgtactcaatagtatcattctggaatttgatattcttactaccagccacgcctaa

SEQ ID NO: 128389 - DNA, 1332 bp, Enterobacter cloacae
gtgacggccaaccgtgacgtcaaatccaccattaccggcaaacaaccccgtctgctcttgaacggagtcgtacgtgctcttcatcttatcctgactggcactgatgtaaccggagccagtcatacttccgaacgtgaagctgccgcccgccgctacgctggtctgcttagatttgtaatcattattgtcctgctgactactcatcaaaagatcgcggccaatatcagcgacaatcttctcaccgttgacctgcgccccgttcagaatggcatctctaccgctggtcatggagaccgtgccgccgctgtccagcgtggtttcggtccaggcggtgccgttacctttttcattacctttagacgcattcacattggcgaaaacactgatccccatcccgccgctgccgcccccaatacttacgcccacaccaccaccgctgctgctgtttttgccggtggttttctgcgtgttggccgctcccgtcagcaggatgtcgttttcagcattcagcgtggcgtcaccgcccgctttcagctggctaccgccgatcaggatatcgccgctattcgtactcttacctttgcccgtggcggtaatagaaagatcgtttccggcattgattgtgctgcccgctaccgtgtcgctatcggcatgctgctgagatttcgatttctggctagtcagagagaggctgacaccaaatccgttcgccggatcgccagtctgctgggcaacaaccgctccctgtgccgcctgtacgcccgagagtgtcgctttcgttgcctgcagggcagccagacgtccatcactttctttagacgcctcctgtgcagtggtaacagcgctgttgattgcgccacccactacgccagacagagccaccgtaaggccactggatttttgttcaaacttctcatcgcgggcgcgtttgtcatgacccggctcgatcgtcacgctgtcgccagtgagcgccatatttttgccagccaccaggtccgcgccgccgacacgcagctgattaccggcggcaatatcaacgctcccccccgtcgagcccaccgtactgaagctctgactctgggtagtgcctttctcacggagatcgtgcgtgcttttgctgctgccgatggtgaagccaatcccgcccgagcccatcaggccggattttttctcttccttaaagcgccaggaggtgtcgctgttcgtcgccgccacgatatcgacgttgttgcccgccttaagcttcacgtcgccgtcgcccgccacggcggatccgttcaccagcaggttgttgcccgcaacgacctgcacgttatcgccactcagcaatga

SEQ ID NO: 128390 - DNA, 501 bp, Enterobacter cloacae
atgcgccagctcaggcgccgacgcgcctgccaacgcacccgcaatattaccgcccgccagtccctgaagtgccgccgttgccgcctgaataccgcgctgaatatcgctgccagtaccgtacttctccattgccgtctggccagcctgattcacgatttgcttatcacttgggttagcattaccttccgatttcagcttctctttggccgccttcagcgcctctggatcggtcatggcattccgtgccgctatctctccctgcgtccgcgcgatatccgcagcctggctgccgatatcactgataagcccgaccgctttcaggcgattttgctctttctccttgtcgaagattgggctgatgctatcgttggcatgttcggtatcgcggctcaggtttgccacatcctgcttctgattatcccgatcgcgaacgataatggtgccgtctgccaccgccgcttgggtggtaccttccgcatggccgctgtggcttgcgcctga

SEQ ID NO: 128391 - DNA, 138 bp, Enterobacter cloacae
atggtaatgccaggcgacaacatcaagatggttgtgacgctgatccacccaatcgcgatggacgacggtctgcgtttcgcaatccgtgaaggtggccgtaccgttggcgcgggcgtggttgctaaagttctcggctaa

SEQ ID NO: 128392 - DNA, 138 bp, Enterobacter cloacae
atggtaatgccaggcgacaacatcaagatggttgtgactctgatccacccaatcgcgatggacgacggtctgcgtttcgcaatccgtgaaggcggccgtaccgttggcgcgggcgttgttgctaaagttctgggctaa

SEQ ID NO: 128393 - DNA, 789 bp, Enterobacter cloacae
atgacgacagactcaatctgcttggccttgtcatcgttccactggctacgaatcatcaggcgaccgataacgttgattgcaccacctggagaatcatcaccggcgttatccagggaggagtttgtcaggcttattgaggcgtgtcgtagccagcaagcaaaaaacatgtggtcgctttctgtctatacaggaatcaggcctggtgagctgtgcgctctggggtgggaggatatcgaccttaaggctggcacgatgatgataaggaggaatctggcgcaggataaatttaccgttccaaagactcaggcaggaacgaacagggtgatacaccttatcgagcctgcaatagaagcgctgaaaagccagttggaaatcaccaggcttggcaaagagcacatgattgatgttcaccttcgagagtacggtaaaaaagagaagcacaaatgcacgtttgtttttctcccatccgtaacttcaagaacgggattatgtggcgatcacttcacggtagattcggtcaggcagatctgggatacggcagtcaagcgcgcaggcattcgtcacaggaaatcatatcagtcacgtcacacttacgcctgttggtcattgacggctggagcaaaccctgcattcattgcttcgcaaatgggtcacgccgatgcgcagatggttttccaggtttacggaaaatggatgtcagaaaataacgatgcgcaggtagcgcttctgaactcaaaattgagtgagtttgccccatcagtgccccacgcagctttaagagccgtgtaa

SEQ ID NO: 128394 - DNA, 231 bp, Enterobacter cloacae; identical to SEQ ID NO: 128168

SEQ ID NO: 128395 - DNA, 711 bp, Enterobacter cloacae
atgcgtcagaaaaccatcgatgcgattatggcgcatgctgcagctgaatatcctcgcgagtgttgcggcgtggtggcgcagaaaagccgcgttgagcggtatttcccttgccggaatcttgccgcggcgccggaggacaattttgtcctttgcccggaagattacgcagctgttgaggactggggaacggtgatcgccatcgttcacagtcaccctgacgccacaacgcaaccgagcgaactggataaagcgcaatgcgacgcaacgcttttaccctggcacatcgtgagctggcctgagggggatttacgcaccattcagccgcgtggggaattgccgctgctggagcgtccgtttgtgcttggccacttcgactgctgggggctggtaatgagctatttccggcaaacacatgggattgagttgcacgactaccgggttgattatccctggtgggaaaacgactatccggacaacttctatcaggattgctggtatgagtgcggattccgcgaattcgacgggctaccgaaacccggagatatggtgatcatgcaggtccaggctgataagtggaaccacgcgggaatactactggatggaaacatgctgctgcaccacttatacggacatctgagccagcgggtgccgtatggaggctactggcaggaaaggacgatgaagattttacgttacaaatctctgtgctaa

SEQ ID NO: 128396 - DNA, 324 bp, Enterobacter cloacae
atgctcaccatgtgggtgacggaggacgagcaccggcggctgcttgagcgctgtgacggcaggcagctggcggcgtggatgcgacagacctgcctggacgaaaagccggcacgttccggaaagctcccctcaatctcgccggcgctgctgcgccagcttgccggcatgggcaataacctgaaccagatagcccgccgtgttaacgccggcggcggtaccggccatgacagggtgcagattgttgcggcgctgatggccatcgatgccggacttgagcggctgcggcacgccgttcttgagaaaggaacggacgatgatcgttaa

SEQ ID NO: 128397 - DNA, 1557 bp, Enterobacter cloacae; identical to SEQ ID NO: 128207

SEQ ID NO: 128398 - DNA, 159 bp, Enterobacter cloacae; identical to SEQ ID NO: 128232

SEQ ID NO: 128399 - DNA, 207 bp, Enterobacter cloacae
atgacggttatttggcacccagtgcaggccgggtattttattggccaccgtggcgttgagacgtccgctacccgtgagaaggcgcagaaaggtacggacatacggcatggcgggcagccgtgcgccgcgttcgcgggcagactcaacatggctgatagcctgtattgcagcctgacgggcgggcttcagggaaacgagcgcgtgtga

SEQ ID NO: 128400 - DNA, 576 bp, Enterobacter cloacae
atgctcagggctggctgcctgactggatggtgcgcacagcgccagccgctggggctgaagaagccaccgaaaccgacgctaacactactgaccacgctgcttaataccggaggccgccgccttcgggcggcgggaacagacatgaccatgcaatatgacctgaaccgaatcaacaccctgaccgcatccgacctggagtttatccgtcatcagggcgaggacgcgcgccgcgccctcagcgatgccgtgaccggcctcctgtcgacacctgaaggatggcgcgtctgcgccgagttccgcagcgagttcggcggcttcttccccgtccagtgccgcttcagcgaggacggcagtgatgactggcatctgtgcgtgtgcagccccggcgaagtctcgccgtactggcttctggtgctgctctcctccggcggtgaagtggtgcgtaccctttaccagagcgacaagctccagcctgaccggataaaccagctgatcgcgcagctggcaggtatgcgccgctttaactgcactgccagcaccgtggtgaagctgatgaatgtggaggtgacagcatga

SEQ ID NO: 128401 - DNA, 981 bp, Enterobacter cloacae
atgagccatcaactcaccttcgccgatagtgaattcagcactaagcgccgtcagacccgaaaagagattttcctctcccgcatggagcagattctgccatggcagaatatgaccgctgtcatcgagccgttttatcccaaggcgggcaatggccgacggccctatccgctggagaccatgctgcgtattcactgcatgcagcattggtacaacctgagcgacggtgccatggaagatgccctgtacgaaatcgcctccatgcgcctgtttgcccgattatccctggatagcgccctgccggatcgcaccaccatcatgaatttccgccacctgctcgagcagcatcaactggcccgtcaattgttcaagaccatcaatcgctggctggccgaagcaggcgtcatgatgacccaaggcactttggtggatgccaccatcattgaggcacccagctcgaccaggaacaaagagcagcaacgcgatccggagatgcatcagaccaagaaaggcaatcagtggcactttggcatgaaggcccacattggtgtcgatgccaagagtggcctgacccacagcctggtcaccaccgcggccaacgagcatgacctcaatcagctgggtaatctgcttcatggagaggagcaatttgtctcagccgatgccggctaccaaggagcgccacagcgcgaggagctggccgaggtggatgtggactggctgatcgccgagcgtcccggcagggtaaaaaccttgaagcagcatccgcgcaagaacaaaacggccatcaacatcgaatacatgaaagccagcatccgtgccagggtggagcacccgtttcgcatcatcaagcggcagttcggcttcgtgaaagccagatacaaggggctgctgaaaaacgataaccaactggcgatgttattcaccctggccaacctgtttcgggtggaccaaatgatacgtcagtgggagagatctcagtaa

SEQ ID NO: 128402 - DNA, 480 bp, Enterobacter cloacae
atgggtatcagcaagtgtcaggacttcacactgctcaagggagatttcatcccgcgccagcgcatccagcagggagggggcaagattcgccagcttcaggcagcgctgaacgtggcgcgggtgatagcccatcagcgcgccgatctgagaggccgttttaccttcctgctgaagggtacgaaaaccgataatctgctcggcgggatgcatgtttttacgtcgaccgttctcgatcatcgaggccgccacagccatctcaacgggcaggactttcaccggaacaaacggcgtgtctgcatcgagcacaccgcgcatcaccagaatgcctgtgcctctgcggcgaccttccccgccgacaatgccgatcataccgtccggcagttctgcaccgatcaggttctggaggatgcccattgcctgaatactgtctgccatctcttccacttcctgatcggtatgcggaatgatgcgcgtgtttaa

SEQ ID NO: 128403 - DNA, 366 bp, Enterobacter cloacae
atgcagaaccttaacacccgtccggcgacccgtaaggtcgggcagagcactgaaatcgtgaagctgctgcgcattcaggccagcgacacccacgtggtcgagtttgacaacgtggacacccgctttaacgactgcaacaactggcaggtgatggcaggagggaaacgtgtcctgttcagcaaccgcatgtatgagcgtttttcagatgtgaaatcggggatcgtggcaacgatcaacgtgtgtgaaaacagcggcagcgtaacggataaagcgatgctggaaggggcaaaaatcatgatgcaggttcttgatggctatccgtcctttgcagcactggcagcacacccgaaacgcattaccggttaa

SEQ ID NO: 128404 - DNA, 411 bp, Enterobacter cloacae; identical to SEQ ID NO: 128205

SEQ ID NO: 128405 - DNA, 198 bp, Enterobacter cloacae; identical to SEQ ID NO: 128206

SEQ ID NO: 128406 - DNA, 273 bp, Enterobacter cloacae
atgcacacacgaaacgtcaacgtcaaaaccgccgctcaagaatcttccagcaagatgggggaagaacaaagccctgtttctgtcgcacgggaatgggtggctcaggccacttcgctgaaggcgggggtcaccgtcaccctgtccgacgtgtcccgatacggcgacgtgcaggtggagatcagaacctacggaacgcttaactggcgcgcctggtcatttgacccggattttcttttggaactgaaacgcaatctgcagtacgtgcagctttaa

SEQ ID NO: 128407 - DNA, 432 bp, Enterobacter cloacae
atgaaactgcagcttttcagcaccgggaaagaactcccgccacaggcccatccgttgtttgcagacctggccagctgcggttttcccagccctgcagctgactatgtcgaatctgatctggatctccatgattactgcatacggcatccgagcgcgacttactaccttcgcgccagcggtgacagcatggccgacggcagcctttacaatggcgatctgctggttgtggactgtgccgagaagccccggcacggcgatattgttgtggccagcgtgcagggggagtttacggttaaacggcttctgctgacgccacgactcacgctgcaacccatgaacgcggcctggtcgccgatttaccccgacccggacgatctggatatctttggcgtcgtcacgcacatcatccaccgcccgagggagatgtactga

SEQ ID NO: 128408 - DNA, 432 bp, Enterobacter cloacae
atgaaactgcagcttttcagcaccgggaaagcactcccgccacaggcccatccgttgtttgcagacctggcctgctgcggttttcccagccctgccgctgactatgtcgagtccgacctggatctccatgattactgcatacggcacccgagcgcgacttactatctccgtgccagcggtgacagcatgtccgacggcagcctttacaatggcgatctgctggttgtggacagtgcagagaagccccgccacggcgatattgttgtggccagtgtgcagggggagtttacggttaaacggcttctgctgacgccacgactgacgctgcagccaatgaacgccgcctggtcgccgatttatcccgacccggacgatctggatatctttggcgtcgtcacgcacattatccaccgcccgagggagatgtactga

SEQ ID NO: 128409 - DNA, 261 bp, Enterobacter cloacae
atggaaagactggaggcagagctgtatccctccgggtgtgtccctctcatctacaacattgttgaggtgatggtggaagaaaaacggaaacaccgtaatgtcaccattccggctgcggcgcttgcggtggtgatgcagcttgcaaggaaggaaatggagcgtatcgccgtatgcgctgaggatggcggcggatcggcagaagaaaccctgaaagaagaaaacgacgtcatgttgaacctgcgcgcagcgctcgatgcctga

SEQ ID NO: 128410 - DNA, 273 bp, Enterobacter cloacae
atgcacacacgaaacgtcaacgtcaaaaccgccgctcccgaatcttccaggaagatgggggaagaacaaaaccctgtttctgtcgcacgggagtgggtggctcaggccacttcgctgaaagcgggtgtcaccgtcaccctgtccgatgtgtcccgatacggagacgttcaggtggagatccgcaccaacggaacgcttaactggcgcgcctggtcgtttgaaccggattttctttttgaactgaaacgcaacctgcaatacgtgcagctttaa

SEQ ID NO: 128411 - DNA, 159 bp, Enterobacter cloacae; identical to SEQ ID NO: 128005

SEQ ID NO: 128412 - DNA, 273 bp, Enterobacter cloacae; identical to SEQ ID NO: 116735

SEQ ID NO: 128413 - DNA, 1686 bp, Enterobacter cloacae
atggtacacagcatggcaaacaacgtgtcacacaagctgtcacacacaatgattcgtgggcgcacatactacactaactttagactaaatgattcaacaagttttgtgcgtctgagtctcggtactgatagccgaaagcaagcagaagtgatcatgaatcagatccgccctttcattccccttgtgcagaatggaacgatgagcctcgaagagttcaaacgcaaaatgcaaggctaccgagctgccactaagcaggactttgacaactatcttctacatgcactcgaaagagatattgcagaggtggagcgtctgccggagttaggacagtggcacagaaacatacatcctaattgtctattatctgcttcagatacggtagaagccgcacaaggctattcggaagctcacttccaacgcatggttaatggtagcgatcagacagcaaacgaagtgcttgcaagtcttcacatgaagaaacttgaactttccaagggagatttgccctttgcgaatcaagtaggtgctgcacttgatatgagccgcgcgaccgtcgcgcaagcctatgaagcattctattcgaaagatttgctacgatatcgccaactcattgcaacactgcaaaatcagttagaagagcagaaactaaaatcttcaccccaaagtagggttgaaacaaaccaggctttttcaacggaagttaaagataccgcaagccaagcaatcaaactttccgaagcatggacgcagtatgttgaagaaaaaggtcaaaaatggcgagcaagcatcgctaacgagaaccagcgtttctttgatgtgctgatttacgttattggtgataaaccgattgatcgggttactaagcaagatattcgtgaagcgctgaaagtgaccgaaaacttacctactcgtactaagctgccatacaagcgcctatctttgcctgaatgcattgattatgacgtaccagaggaagatctgatcagtagtcagcatgttgaaaaacatctcaagatctggcgctcgctttttaaaacttacctcgtcgaaaccaaagaccagttagagaaatccccaaccgatggaatcacatatgaggtgaagcctaatcggagaggtcatttcagcaacactgagttgagtaagcttaaaaccaagctgttctcactggaaaataacgattggcgcaaatggtactttctcaccctcatttatactggtgctcgacgtggcgagattgcctctatcagaaagcgggacatccgtttagatgaagaaacttcacgctggtacatttatatagaagacgggaaaaccgaacatgcccaacgccagataccactcaataaggttttagagtcaggtttactcagtcttgccgatgctctaaacgatggtgatctgattttcagtgacttacctaactacaccacagcaacagtcgaatggggtaagttgatgaatgaaacaggtatccctgattatgatgagtttgggctaaaaaggcgcatacatagtcttcgtcacaccttcgtaagccattgccttgcatctgggggcgtgtctttacctttgatgcagtttgtagttggtcattcccgaacccaaagtttaggcgtcacctctatttacacgcatcgcccaccgcttaaagacctgttatgtgtagttgacttccagaactaa

SEQ ID NO: 128414 - DNA, 672 bp, Enterobacter cloacae
atgcagactcaatttatcgcggaaataattgtgagcattgacgagaggttgttaggcgttgagcttctcactcgcttcattgcctcagatggacgtccccttcaccctgagttcgtgatttcatcttgggatttagataggaagcggcttttcctatacgaacaatgtggaaacattgccattaagcaaacgtggttcgagcaaaagaatctattttgtacactgaacattgatcagcaaatggcttttctgatacgccatgactacatacttagacaaactttcgaatcgatgccattcatcaaacttgaactttctgagcatttccttggtttggataagggattgaaaagtcccttattaaaatcgctgagccagggtgtaaatgggctatggctcgatgaccttggtgcaggaaacgcgaatgttgttagtttgatggaaggatactttgaggttgtaaaggtagatcgctgcttctttaatcagcaggtgcagaagccaaccttctacccgctgattgcatcaatcaaaaaacactgtgacaaaattattattgaagggattgagaatagagatcatatgggaatactgcgtgaggtgggggtttggggattacaggggtatctttttaaatctgtcccttttaaaaacgtggatttattgctgtag

SEQ ID NO: 128415 - DNA, 1641 bp, Enterobacter cloacae
atgaaagcccaacgtgcggcggagaagcagaaagccagggatgaaaaggccaatctgaaagcgaagcagcagctacagaagcgccaggaagtagccgagcttaaacttcgccatgcagggctgcaagtgtcaggaattaaaggtaaatacgggcttgatcctaaatctcagtatgaagcgttacgttatattcatcagcaaagcgaagagtttgcgaaggggaatattagctctcaacgtatgaatgcgcttatacgcgagcgtgtaaccctgttacgcagagaagccgcacagcaagcgaaggtgacacaggcacagcgtacccagtatgcagcagtagccactaagctaaaggctcagaagggcgggaatgctcctatcgtcggtggtggagtgttgggaagtcttgcgttaacggctggctccttcggagtggggcagcgaattattgacaaagggaatgagaatcttgacttggttagacaatcggcactggtaaaaaccaatccgaacgccataaaaactatggtgacgtgggggcagcaacatggggttgactcagctaatacatctaaagccgttgataatatgaaagatgtgcgtgaacgtctcgccatgactgttaacgatgctcaaatgaagaatggtgaatggaagggcggtgatgggggcattacgtccatcatgaacaaatttggttgggggattgaggacgttaagacatttcaaaatagacctcttgactttatccaagcaaccgtgaatgaagggcaacgccgtggtatgtcacaggctcagattggtacgctgatcgagagcttaggtgatgacctgatgcactacaccgatatgttcatgaataacggagcggagtataacaagacgctgaaaactctcgttgaatcggggcagacgctgaacgacgagcaaatccgccaggtatctgtttacggcgatctgtccgtggcaatgggtaatctgatgaatggaatagacaatcagttgtttacaggctggatgaaaggctttgccgatgggggcgacgatctggtaaggaacaccaaagtgatcacagaatcagccggattgctcggagagggattaggcgaccttgctaaacaggtgacgggctttgttggagaaatctccagcgtagtgtccgatctgaatgctggcattcgtgagaagttcccagattggtttagcgaagctaacaagccagcggcccaggcggtaatagatggtgtaacaggtagtgctgatagtgcggcttcttgggtgcaggacaagacagggtttaatacccgtagtgtcggtcatgcagttaaaggttggttaggaatagatgatcagcctacagggacagcggtagaacaatacggcctgaatggtgattctctgcaagggggagcgcttcgtgattctgctatatcatccctaaccagcaccaatagtgcgccatcgtacaatcttgcacctgtattcaatctcaatcttgaagcgtctgttccgctcaccatcgccagcgatagctcaagattaagcgattacattgatttccaggcgagagcctcacaagcaagtttcgcacagtcactaaccttgtcagccttgagcggtcaaagcagtacaggcgggtga

SEQ ID NO: 128416 - DNA, 198 bp, Enterobacter cloacae
atggaacttatcctaaagagtgccacatcaggtacagtgaaaatagacgatgctactgagttattaacattagctcagatctgcaagatttacggcgtgagttataacggagttcgtcagcgtatgcaccaatacggcgaatccccgtcaaaagctatcgacttctttattgagaaacaaggcggtggtaatgcttga

SEQ ID NO: 128417 - DNA, 1038 bp, Enterobacter cloacae
atggcaaaagatctatttagcggcgctatttacgaatcatttacaagcccgttcgtattcagtacccaacttaatactatcattaccaatctcggattattccgagaggaacaccacgcagtcaatacaatcgcgcttgaaaaaataaccgatgtaaaaaatctggtggcgaaggaaaatagcccatactctcaatcagattggtcgagtgctaaacgacctgacttttctaactcattgtaccagatgaaattttttgggattctcaacagtattacatcgcttgatctccagcaatatgcaagccgtggagttagtgacacagccgatcaggtgagtattgccctaagcgatttctctgatgcacagtattcaatggcgaataacgctgttgaagtggatttggttaacgctctgcttggtctgcgtgttgatagcgagtttgccggacagggtgatcttgatttcctcgctggcggtagtcgcacagaatacaccctcgacgtgagcgacacggcgaacattttcgagcaactaagcgaaatcacatgtattcagaatgtggcgcttggtgatggtctggcacagcagaaacaaggcactgtgatcctggcggctggtaaggctgctaaagccctacgctatcacccatcggtgaaagatttcatggtgtacacactgccacttcaaagcggtgaaaacttcgctacacgtacagcgtcagcaaatccggcctatgaagtttggactctgaacggagtcactgtgatcgatgtgacaggctactctctcatcacagacaaaatcggtgtggacgggttcgccgtcacccctcgaatggctgacagcgctaatgcgctggttctccacaccggaatcggagtgcgtcacctgacgttaggtaaagaggccgcattgcatcaccaatatgtgattgcagatgctaaatggcagttcccaactattgcgacggaatcaagttttttagcgattaacaatattcctacggctattgtgttcggatctctgtctgagtaa

SEQ ID NO: 128418 - DNA, 378 bp, Enterobacter cloacae
atgcagtttggacaatttcaaacattaaacggggataacagccacgcccgttacaaagtggtggcatattgcgacgatgcaattctccaggacaagctgatccgtgtggaatccggtattcccgattctctcattgttggcgacctcgtaaccgcaacaggtgcaaaagctgtcaccccaggtgacattgcttacgtagtggtcgagccagtcaaagcaggaagcaaagcctttattgtggcttcccctgtacacgtcattctatcccttgcggggattgagtttggcgatcttgatgagtcattagctcaggcacagcttgcaacgcttggattcactttctccgatttcgacactgtagcgcttcgcactacgtaa

SEQ ID NO: 128419 - DNA, 216 bp, Enterobacter cloacae
atgttcctgatgaactctacgacgcatattaacaagctggctgatgaaataacatcttatacagatgatcagctttcagttattgccaaatgtgcagggtgctcagttgaagagttaaaatcttcacagcagacaataaccaaaaccttaaacacccctgttaatcctcttgaaggactacaggcacggttaaaaacattagctcaaggaaaatag

SEQ ID NO: 128420 - DNA, 333 bp, Enterobacter cloacae
atgactaaaaccgatattgacctaatgctacaggaatttcacgagcaactacacattccgcttcttgaggcagtgaacaccgtatataaggcaagccctgagaatgcgcctgagagcctctctgacgctgttaaaatgcttcacctgtcagcggtggcgctggaagggattatgctctctgtagagcgctcagacagtctacgcgaggatcaggaactgataggaaaggttacacagtcggcgctgtctctggaagcgtgtaaggatgaattaagcgacctgctcgcacagtgtgatgaaaataattctcaatatgataatgattcctattga

SEQ ID NO: 128421 - DNA, 225 bp, Enterobacter cloacae
atgcatacacagacaatacaaaccaaacgattcgcccagaacgttaaatgctgcgaatggtattacgatgaaatcgagaatgtcatcaatgatgcttttctgacagatgaagaaaaaataatggcacttgatgacctggaaaacagaatcctcactctcgcagcgccttttctggctgctgcaaataaaatcaaaatgacaatggaacaaatggaaaatgactaa

SEQ ID NO: 128422 - DNA, 375 bp, Enterobacter cloacae
atgtctaagaaagaacggaataatattctacgaatcggtaaagcagcgcaaaaacagcaacagcgattattaatcacttctctcgaagaaatcccaggcacattgatagaacatgttgaagaagtgcattcaacaccgccctctgtggaagagtgggctgcgttaaatgatctcctcgaatgttcaagcggagtttattaccgaccacgtaaacgcaaggtttacacctgggacgatagccagcttaaaaaatggcaaatgttgggcttcacctctttacgccattacctcaattacaacgcaatgaataacaccgtggcgggagccagggattttgatgaactatttcacattggagacagttacacagaataa

SEQ ID NO: 128423 - DNA, 282 bp, Enterobacter cloacae
ttgaacaacctttacctattgaacgaagatacaaactttcaacttggctgtaaagatgtatgcagacgaatctataaccaccttgcaagcctacatcgagagaatggaaccttcccttccagcgtcaaaactctggcatctgccctgggatactcggaaagcgggatcagatattggctatcccttcttcgcgatgccaaagtgatcgccatctctcgcgggggcagttattacgatttcgacgttattcacaacgtttctttcatcacctctaatcactaa

SEQ ID NO: 128424 - DNA, 918 bp, Enterobacter cloacae
ttgattcaggcatacgaagacggttatttttacagagacaccccgcaacacgatcacccgctttcagcattttccagacaatctcatcaactcaccgttattgataatgttctgtacgttgtcgatatggatactggtgaaattcttcgctacgactatacagagtatttgctggatggtggcattgttcaggatctgcatttgagctactcgacagcagacacagccagatcaaaacaggcacaccgtgaatactccaataagctgggcgaccttccagtcaaagcagcctataacgggatcaaggagtttgcagacgtattaagcaagcccgatttcacgaaagtatttgcattatgtaacgaagttgacaggcgaaacttggcatttttaacacgcgcggaactgtgcgcaatactgaacaccacaccggatcacctcaaccgtgttttatccggtcttgagcgtaaaaagtacatcaaggttgataaagctgaacaccagaaaggcgtattaaaggtatgggttaatccttcgtttgtctggaaaggtgatttagctaaccgctacttatctggacatttgcagggcttcccaatcttggaacgtaaacgcccagtaaaacgctctgaggtgctcgacacgctcacggcggcggcaatggctgcttatgatgcctggcacattgaaaacggttataaggccaatcagccttattctaatgaatggtatgcagagatctcgctctacgataacgcccacggcgaaggagtaaggcttgcagcagaaaatcagacattgaatggattattgaatccggcgacagcagagggtgatttcatccgtgagttatttactccagctcaataccaaaccttattaagagaaaccacgaagaaaacaaggagaatttattga

SEQ ID NO: 128425 - DNA, 579 bp, Enterobacter cloacae
atgaaaggtattagtcaggcgctaaagagtgcagacgaagttaaggcagtagcagcagagctacagcgcaacgccagaagcaacctgttttattgcttgtgggtgtttatgtatgaaagcggtctacgtatctctgatgtgctcaaactccggtacgaagatgtagaagggcaatctcaccttaaggtgaagcaggagaaaaccggaaacgtagtgaggccaaaggtgacagccgcgatgctgtcagccgtagcgcaacgtaaggcagagcaagccgatttgccagtgaagacggatttcatctttagcaagggcgatctacgtagtaaaggcaacgcagtaacccgtaacacggtattcactgaatttgggaagatgggacgtagagccggattctctaacgtgggctgccatacgccgcgaaaaagtcgggggcgaatcctattcgaaaatggagtagctattgaaactatcgcccatttcctggggcagacagatccacgttcaaccatgtattacatcgggtacggtcaggacgtgcaggacgatttaacagaggagttttctttagaatggtga

SEQ ID NO: 128426 - DNA, 1206 bp, Enterobacter cloacae
atgaacagcaaaaatagaattcaaaaaaaactgctgaaatatcatcacattgaccttaagaaccctcgtcaccagtcggatctggcaggttcggacctgcggtttatggatcttaggaggtttaacttgcgtaatattaatttatcgggttgcgatctttcgttcagcgatcttcggggagccgatttctcatatgcctctctgaaaggggcaaatctcagccactgtaaaacggaaggggcgattttcagtcacgcgaactgtaccggagtggacttttcagggagcgacatacaaaaagctacttttactggggcactgacagagcgtgtggatattagcagcgacacgctttcatcccgaccgctcatctccgtctatatgcctacctggaaccgtgaaacactgacgatcagggctatacaatcagtattgaaacaggattatacacactgggaactcattattatcgatgatttctcatcgtcatttgataaacttcagacttatatcgccgatctgaatgacccgcgcattacctacatccgcaatgaatttaattccggagcctgtgccgtccggaatcaggcgatacgaatggccaagggatatctgataacgggtctggatgatgatgatgaatggctgccgacacgcctgtcctcctttcttgcctgccaacataaacttcaacagcacagcttcttatacgctgatgattacctttgcgacagcaccggatacaagcaccttaatgaattacaggtttaccctaaacctccctataaaaagaacctgtttgataagcggaatattatcggcaaccagatgcttactttaaccagccggatgcagcaggttctgtttgatgaacacctgaccgccgctcaggattatgatgcattctaccggttggctgaaacctatggcgatcctttcaaactggacgtgataactcaggtgctatatgtcaatcacggtgaggtccgcatcacctgctcaggacgtaagttttcaggttatctggatttttaccggaagcacaaagcaaaattagacgtatcgagtaaaaaatatcagcttttcaccctgtactacattcgcaacaaaaggatgcgaccacaaacgctaatgaatctgatgacattacgcaatctgaaacgctatttgatgatgtattccagcttccggaacaggaagttctaa

SEQ ID NO: 128427 - DNA, 1416 bp, Enterobacter cloacae
atgtttgtagagtataaaaaatattccttatgttctttctcaataatagctccatttatggctattatatttgctgttggaaaactctaccttgatgacaatgccagattaatggatgggtactatggatgggaaaatgaagggcggccgctagcctctttggttatatacatattaaactttggaaagatacttacagatatttctccgctatctcaacttatagcaattgctcttgctgtaggttcttgctcgattataggaagagatgtcttaaagaaatcaccagtagtttccgcgattgccacatctcctttattcatattcccattttttattcagaatctttcatttagatttgattctgtgacaatgtgcctttcaatatttatactatgcataccatttatttctttttcagtcaggagtgcggcatcaatcgcactaataacatttttgtcggtgcagtcatcattattgacttatcaggcatcacttccagtattttatgccatcatgatggcttgctttacctatgacaaacataaagacgcacgcaaatatatattgattcttgcatcgtctgcatgttcgttactcctgtatattgcggtgacaagtaagtcgtttgttacatctggatatgcttctggagttggtggtattttaatgccatcacacccacattttaaagaaataattgagtctacatatagtgttgcagtatatccatttggggttttatttgataaatacttcacaatcgccatttcatttatgtcgattctttttatatactccacaataacacgcatcaccattactataaaatcaaacatcgtagttttctcgtcaatcgctattgcgcttgcatgttccatagtgatgttttacgtgctggagaacccaagtataaatctgaggatgatgatatgggcgtcatccattgtctttgttgttttctctgttggggcattaaactccaataaatatgcgtatattattttaagcaccccaatgctagcactgatgttttcttacgcaaatgattactataactctcaaaagtctcagtatgaacttgaaactatgcttgtaagagagattggggggaacagagaaattaataagttaaacactccaatttatctcaatggatactcagggctttctccacaggctaagcgcatcatagaaaagcgacctttaattcaagacatgatgagacacgacatcggaacttggacgagcgcaaagtttgcttacttacattaccctatggctgaatggaaatgggttggtaaattaaaagacaaaacatggtgtgatcacatgatcacaccatggaatggttactactcatcacactggtataaggacggtgtaatggtaacatttgagaaatgcagaacctaa

SEQ ID NO: 128428 - DNA, 2235 bp, Enterobacter cloacae
atggctacgacacctaccaacctgtcagtaccgagcgagtccccgcgcgatctgaaatttaacgcagggaaaattgatgaatttgtgacatcgctggcacttcagtacattgatcgctttggtgatgcgcattacacaattgaaggtctgaaggctttagtacttcagcagatatataatcttggctggaatccggttggaagcttccagggtggcgctacagtttcttccgcaggggatattatccaggatgaaacgaatggtgtatggtatcgctgggatgacctctccagcttacctaaggctgttccagcaggttccactcccggttccaccggtggtattggtgaagggaaatggctagctgtcgatgtaaatgatgtcttaagaaaagaccttcagggaagcaatggatcaacattaatcggtggctctgtttatgtagttgactatttttcagatgccaaggtggcgaatgccggcaagtcaaagtacatcatgacgcgtgggcaccatgcgctcggtgttggggcggggacctatatcagaaatgggactacgggagtgccttcatcaggtactgagtataaatttttcgattcaactggttctggctggacgctgactggaatgtcatatgattgccagcagtttggtgtcaatggtgatgggacaaacgaaacggcaaaggttcagctttggttggatagctgtgcggactatcatgcaagggcttacatcaaggaatcgttttctgcgagcgttgtaggggttgtattaaactcatcacataaaggtcttcagttcgattttagaggttggcttaagttcttcggtgatggttctgcgcctgttaatgctccgagcaatgtgacaggaagtgcttgttttgctgtatacatgaatggatgcaccagccttagcgggcaaataaatattgacggaaacagatctgctaaaatttacagtgagcagatccataacattggtatgttcggtggagtagataataacttaacccttaatttcattgaaagccgtggtgatggcgtatacgtaaaccatcacaaagcaaatgtatcaacccctccagccgtagattccgttgctgccaataacttcccaacaaggctaaagttaagaataaatagtgtcaatagttcgtttgatggtcgcaatgctgtatctcttattgcctataaaggatgtgaagtatctggcatgagctcacagcatggaaatggcactccatcagggtcaacaggtatcggtaagcaacctggcggacttgatgtagaaccaaattattactggcagtcatgttatgatttggttgttccttcatggatttcagatggggccggttggacaggcggtttcagtctggttgggaaaattaatggtaccgattcgtttgatgttaacattagaggcgtaattgcaaatattgaatgcacgcaatccataccaaatgacagcgtccgttatggggtggcattgcaatatgcaagagatattgatatcaggggagtatctcgatgcctaacaaataatccatacagcacgtttaaaagttgtggggttatggctacatgcatttctaactttaatgttgagattgatattgtcaggttcgagcgtgtcggagagattgcatgcgaagatgtcataaatcaggcagtgacaatgtgctcgaatggaaaactgtcaataaaagcgacaaactgccataatggcctgagcttgtcagcactggataatgttaatgttgatttattcttcacagttccggttacaatgtctggctctggagatagaggtgtcgtgcaatatatccagtcatattttaatggcgcattccaggcaacaaatattcaacaccataccctcaaagttagcgcaagcggagggacaacattgacatcactcaattacggtgtgcgagtgcacccaaccaatactccaactgttttcagggatacgtgtacgatcaacgaatctgatttaacagccgttccgcacgacacctctaataacaaaaacaggcttcttggaactgtcaatttccaaaaaggaatcatatatggagcaacgaagaaagtaggagatgacgcaatatctggaacaaacatatggggggctggtgataccatatggcatcaaagcagctctgccacccatgccggtaagagatataacggaacttcgtggcagaacttcggtaacctagtttag

SEQ ID NO: 128429 - DNA, 2478 bp, Enterobacter cloacae
atggcgctggttgagatatcgaactttccaggaacgcctaagctgcgttgcagggtgccaaacggcacccttttttatgactggctggcggccaatgacgctacctttcaccgcgatctgctgatcgtccgcaatggcgtaaagttgggcgacgatgatgagctggcgtttgaactgagtgagctggaccacatccagatattcgaccagccaaagggcattgtcggcgacatcctgagcccgatctttaaagtggttggccaggtgttttcgttcctggcaccgaaaccggccattgcaaacagcggcggcaatacggtcgactcacccaacaatagcctgaccggtcagacaaacaccgcgcgcgtctacaaagccaagccggatatctacggccaaatccgttcgttcccggatctgattcaggaatcggttttcgaatacgtgcaccagacgtccaccgacggcggcctgaagtacgttacagagtggatgtgcatcgggatcggcaaatacgattacgagtccgtgcgttactcagaatccagcctcggttcactggcaggcgctgaattccagttcttccagcctggcgaagtaatcccgcagatcgtcgagggatacgggttcgatgacgttgacggtcaggaggtcccagggcagaacgaagccagcgattttccgatcgaaacagcaacggcaaacacggttgtcagcggaacgtattccggcggccagatagcgatgaaaatcgtgaagcaggcagagttcgattactttatgagcctggtgcttccgcacgcggttaccttcaccatcaacgtgacttacagcactgcttccggcagcgtaactacggatgcgacattctcaggcacgcttatttccgccgttgaaacaaacgatggcgctgtggttaacccggtgcgctggtacacgtttacgatgaacaagctggaggggccgcaggatattccggcgaatgccacgatcaacaccacgaaattcatccttaacgataacgaggcgctggtggttgggccgttcttttccccggtcgagtcaacccagttgtggcttcatacgcagtccagcctgggcggtaagaaagaaacgaactggaaggtggtcatctggaaaattgacgacgactacaaccaggtgcctggtacgcagcagacattcacgtatcggcagaccacgcctcaccagtcaacgagtgaggtgttttatcgcactgacaagatcactccgtccggcggcttcgggaaatacgcggtcagcttccagcgcacggataactccggcgacgcgtcactgctgaaggtcgaagagatccatagcatcaacatcaggacgaatgtcgttcatccgaccgatacgctggtgcgggtgaaggtgagggcgaccgagaacgctcttggcagccgtgagcgcaaatataacgcgctggtgacgcgtcataccatcacgtacgacctggacgcgcagtctgtggattacacactgagaccgtcgcgctcgttcgctgatgcagtggctcacacctggctcatcatgggtgagcagccggtaagcagcattgacctgtacgggctgtactcgatcgccgaaagcctgcctgatgagcgactgggctacttcgactacacgtttgacgacgagaacgactcactcggcgaccgcgtgcaggcgatctgcaatgctgcgtcggttgtggcgtactgggacgacggcgtgctgacgtttacccgcgatcagaaagttgactacccggcggcggtattcaaccgggccaacatgaagactgacgagtacaaaatgacgtacgaagctactcttccgggcggttatgacggcgttcaggtgtcatacgtccaccccacaacgaacaacaagacgtacatcaactaccgcgtgctgaacggcgccatcgtcgagcaggaagcgaaaaacccaaacaagctggagatcgtcggcttccgtaatgagtatcaggcccgggagcgcgcattacgcgaaaccaagcgcctgatctactcgcgcgtgaagatgaacgccaaggtgtttgaggacggcattatccaggtgggtagcgtcatccagatgccagacatctacgacagcaaccagcaacagggttacatcaccgggcgcgccggtaataactttgataccagcgagccgatcacgtttaccggttcgatgtatgtgctggtgacagacagcctgggtaacccgacgctgcgctatccggcaaccgcccgcagcgacacgaagtatggcttcaccgcggctatccccaacattcagctcaacatatggaacggagacactgtgcagctcccgtcgcgctatctcattgcgacagtggaggaactggacagtcagctatggacggtcaacagcatcaaacctaacacagataacacggtatctctgaccgtcgcggaatacagcgacgccatctaccaataa

SEQ ID NO: 128430 - DNA, 417 bp, Enterobacter cloacae
atgatccagtcgaatacacgggacttcagtacctctgattttattcggaagatgatcggcgtgccgtgggctaaccgggcctgctcgttcgatagggtcgactgctggggcctgtgcgtgctgtattaccggcacgttctcggcattgagctgcatcagacgccggactacgaagccggcgaggacttcttcacctgctatcagggtgatgtcgttttctggcgcccggtcgacaagccagttgagggtgggatattcgtcgggtaccgcggcgcgcaaccggcacacgttggcctggtactgaaccggcaggcgttgcattcgcgcggcgagaacggaagtgtgcgcatggactcgttgctggttatacagcgggcattcaccaaagtggagtatttttcgtatggcgctggttga

SEQ ID NO: 128431 - DNA, 174 bp, Enterobacter cloacae
atgacgtacaaatcagttaagcacggtctgccgcgctctttcacccgcgtctgggtgatgaccgacaccgggcgggaaactaccggctacgttaaatcggatggcgagtggcatatcaactgcccgcgcattcgggcgactggcgcgaaggtgctgaggtggaaggagagctaa

SEQ ID NO: 128432 - DNA, 195 bp, Enterobacter cloacae
atgcttaataaatattttgtagcttatcaaatcttgaaaaatggacaggcctatattacaggatcgacagttgtagccgatcctgaaggattggagccggatgttttctttatgaatacagcaaaagaaatagccaaacaaagaatggttatgcctgatgcagtaatcattaccgcattcaatcgggttaattaa

SEQ ID NO: 128433 - DNA, 987 bp, Enterobacter cloacae
atgatgatgacagcgcaaaccagaatcgggacgccgatcgtaccgcgcaataaagctgaccctacgcagtcctcgcggcaggtcagcaggatgttcaatgatatcgaagaccggtatctgaacatcaagcgcaggcttaaggctctgtttgatctgcggctgactgggcagcagcgtgaggcgaacgcacagcagtcctggatgatgtgcaacaacgagggcgcagaaccttcgctgtatcaagtcaatgccggtaagttcgtctatgacatgaccgctgctgaattggccgatctgctccaggtggtgcagtcgattctaaatgatgagcttcttgaaggcggcagtcagaacctatgggcgatggactacgtcattgcggaatatgaccgcggcacgctaaacgccttcaccaacctgtcggtgcagtctcaggtatacgccagtcagactacgctacagcagcttttaagcagcccgggctacctgaaccagattgcggcggccaggctgacaacgttcagtgactggaaggtcatcagcgatacagcccgcggcgacctgaccaacatcatcactgacgcggtggcgcgcggagtaaacccacgcgagacggccagcgtaatcagtaagcgcatcgatgtgtccatgtcgaaagcaaagaacatcgctcagaccgagcaggtcggcgcgctgcggcgggctcagtggaatgaaacggactgggctgctggccggctggggctgaataccggcctgctgtggctgtcagcgctaaagcctacgacgcgtacctggcacgccagccgtcacggcaaggtctacaccaccgaagaggtgcgggacttctatgctgagaacggcaaccggtacaactgctattgcagtcagataccggtgctgctcaacgacgacggcagcattttcaacgaggggctgacggagaggctaaaaaaagagaggatgagctggaaagaaggggcataa

SEQ ID NO: 128434 - DNA, 207 bp, Enterobacter cloacae
atgacgagcgcatttatccctttcaccctgagtctggatgtttcagcggcgggcgaagaggctcaggctgtagccagcgagctactgcgccgcactattggatttagcccgcacatctctgaagatgaggcgcttcggatcctgctggtcgacatgacccgtgattacctgaaggccaagagtcaggcagagcaaacaacggagtaa

SEQ ID NO: 128435 - DNA, 210 bp, Enterobacter cloacae
atggggactttaatcaaaggctggaaggtgatgcttctgaccaaggatgggcatgagtctggaaaggcacctgaggaagtcggctggcaaagcaccaatgagccagacattcgtgatggggtgctgattattaaaaatggcctggacacccacggcgttcccctcagcatcattcacggcttcagcatcgaagctgtaaaggctgaatga

SEQ ID NO: 128436 - DNA, 690 bp, Enterobacter cloacae
atgaacagtcagcaactggaatacgtacgtcagcagctcattgtggcgaccgcagatctgagcggggcgacgaaagggcaactggtagctttcgccgagaatgcacagttcaccgcgacggctcgcagtcgggggcggaagaaaataaccgacccggtcaccggccggaaggttaaccccgacggcccggtgatgagtggcagccagtcccgcgccaaaggctcatccatcgcgctggttgggccggtggagttcgtgaccgcatcctggcgccgcgccgtgctgtctctggaagaccatcagaaagcgtggctgctttggaactacagcgagaatatccgcttcgagcaccaggtggcgattacccagtgggcatgggctgagttccgggagcagctcggcgcgaagaaggtggcgggcaagacgatggagcgcctgaagaagcttatctggctggcggcgcaggatgtcaaagcggagttggcaggacgtgagacttacgaatatcaggcactggcggagctggcgggcgtggcgaaatccacctggacagaaacgtatttgcctcactggctggctatgcgtaacagctttaaccgactcgatagcggcgcgcttatctcagtaacgcgatcgcgttcacaacaaaaggcgacaaattcgcactcaactcttgcaaaaccgaactga

SEQ ID NO: 128437 - DNA, 423 bp, Enterobacter cloacae
atggcactgacgaaaaaacagcgcgcagagctgcgcatgaagttcggtggtcgctgtgcttattgtggctgcgaacttcccgaaaagggctggcatgctgaccacgttgaggcggtactgcgaaaatctgagcagtgtatgaaggctgctgcgaaaggcatcttcaaactgaaggcgacgggtgaatactacaggccagaggctgaaagactggaaaacctattcccggcatgtgcgccctgcaacttactgaaaacgtcctactcgctggaaatgttcagaaagcaggtatctcttcaggtcgagcgagggcgcaagagcagcatgaacttccgaacggcagagcgtttcggccttatcgagacagtggagaagccagtggtgttctggttcgaacagtatcaggaaggagcagcatcatga

SEQ ID NO: 128438 - DNA, 441 bp, Enterobacter cloacae
atgagcaacatcgacaaacgcgcattacgtgaagctgctgagaaggctggtagcgataagtggcaagccaagaaaataaatggcgacttctacgtcattcgcaatggtagttatgaaaagcagcatggcttcacatcgtatcaaccaatagcggaaattgaacacaaaccagtcagggattttgttgccgcggccaaccccgccactgtgctggcgctgctgaatgagctggaagccaaagacgcgaaaatagccaatctaaccgccgaacgcgatgctcttcgtgaaggcgagatgggcgacgcgaagcacagtaatacccgtgctgcggccgatatctatttccagttggtcgaggagtgcgaaatacctgctggcggatcactggttgagtatgtaagcgaactgcgtgaacgtgccgcagccggtaaaggagagtga

SEQ ID NO: 128439 - DNA, 609 bp, Enterobacter cloacae
atgaaattatttgagatggaagtttttctgcgtggcaagtgcttgccaggtggcatgaaggtcaacgaaacgaacgccgaatacctgatgcgtaaatttgctgaagcggaggccaggtgcgtggcgctggctgcggagaatgcggggctgaaggagctaatcaaacagcacgctaatagtgttgccgtgtgtccgaattgctctcatgaagagccgagcgaaactgacgatatcgttgcgctttatcgttctatggaaaccccggccaccgacgctttcctggctgaagtgcgggctcagggtgtgaccgagtacgccagtaagcgcgggttctcattccagcacggttgtatccatgcccacttcggcaatggtgatgtgatggttggcgcggtgacattcgaaaacggtgatgctggaattaattttgctccggttcgcgagaaaactggcggtgtgggtacgagctacgaatggacaaaagggaagacggcggatcaggttgattccgtatttattatcgccagcagtaatgctgaaggccttgaagttatccgcgacaagttaaatgaatccatcgaagagcttcgcaaaggagtgcagtcatga

SEQ ID NO: 128440 - DNA, 345 bp, Enterobacter cloacae
atgaccataacaattcgtgggcagattcttgcagccctgcgtaataacccgggcctgaacagtgggcgtattgccaccatgatcggcatgaccaccaaaaagatttccggcccgttaagcacgttgtttgcagacggcctgatcgagttcgaaggtaagcatggccagcggctgtatcggctgaccagctacggcatgaaatacgcaccggaaaccataccggccatgccgaagggtaattcgaagctggtgcagcgcacagagacaaacgtgatctgccaggaatgccgcaacagcgcggcgatgagaagggtattgatggtttgggggagggtagtggtatga

SEQ ID NO: 128441 - DNA, 159 bp, Enterobacter cloacae
atgacagtcacccacaacggcaagcagtacaccgccaaaaagctcaacgataacgagtggcagctgacgtcggtatcgtcaccgcgtgaaaagctggtgctgaaccgctggcagatgcatatcgctggcctcctggaacaggttgaggtgaaggtatga

SEQ ID NO: 128442 - DNA, 210 bp, Enterobacter cloacae
atgatcaaccattacggcaccaccccgctcattcgccagtgcgtcacgcctgggatgatggcaatgcatgaaggccggacctatcgcgtctcagcagtcattcaggagcgcaaatgggtttacctgcacaccgatgcagaaatcatccgcctcagtgactgcgtgattgacgtccttctggacggtcacggcaaccctatccagcactaa

SEQ ID NO: 128443 - DNA, 198 bp, Enterobacter cloacae
atgaatatcacatgcgagtgcgtagacatgcgcacatccgtcggcccccacaacaccatcaaagttgagatggagggcgttgtgctggccggaaccgttaaaacccgtgacgtaataccccaactcgacggcgcagaagtcatcgagtggttggctgaacagggatacgtcatcactcatcaggagcgtgcagcatga

SEQ ID NO: 128444 - DNA, 159 bp, Enterobacter cloacae
atgacggcggcagaacggtgggatgaagagtctttcctgcgccttatgcgcgacgtgataccggaaaagcccgagggtgatgacgagccagttaacctggccgccgagcggcagaacccggtcattagttgggatgaatttgccggtaattttaattaa

SEQ ID NO: 128445 - DNA, 867 bp, Enterobacter cloacae
atgaaattcgaaaaagccatgaggaagaaagccaagctacggctggcacttaccgggccaagcggttcagggaaaacttatagcgcgctgatgatatgcaaaagcatgggtgggaaaacagcggttattgataccgaaaagggaagcgcatcactctactcgaatgaatttgatttcgatgttctggaattggatcccccattcagtcctgagcgatttattgaagccatttgcgctgcggaagcggcaggttatgacaacctcgtcatcgactcaatctcgcatgaatggagcggcgttggtggctgccttgatgatctggacaccattgccaaaacaaaattcaagggcaatacccacgccgcctggagcgcattaactccacgtcatcgcaagtttcttgacgcaattcttcgtgttaattgccacttggtcgccaccatgcgaagcaaaacggaaacagcacaacaggaaggaagcaaaaaggttgtgaagctgggaatgaagactgagcagcgagacggcgttgaatatgaatttactactgttctcgacatcaaccatgaaactcacacggctactgcatcaaaagatcgaactggcttgttctcaaatgctgattacacggtgctggatgagacagttggcaagcgacttatggggtggctaaacgacggtcgctctaaagcagaaatagaccttgctcactttgtctccacagcagaatcagcgccttccttcgaacaacttaaaactgcctgggcagaggcttttagggcattacgagacacgccagagcaggtgaaagcacaggaagtatatgaggccagaaaggcagaattaaccggcaatgaacaggtggcataa

SEQ ID NO: 128446 - DNA, 531 bp, Enterobacter cloacae
atggctagcaaaggcgtaaacaaagtgatcctagtcggtaacctcgggcaagaccccgaggtccgttatcttccgtccggcggcgcagtatgcagcgtgacgctggcgacatcggagtcatggcgagataaagccaccggcgagctcaaagagcaaacggaatggcaccgcgtcgttctgttcggaaagctggctgaggtggccggggagtacctgcgcaagggctctcaggtttatatcgagggtcaactacgcacccgcaaatggacagatcaatccggtcaggaaaaatacaccacggaagtggtggtcaacgttggcggcaccatgcagatgctgggtggccgtcagggcggtggcgcaccggcaggtggcagtcagaaccagcagcagggcggttggggccagcctcagcaaccacagggcggcaaccagttcagcggaggagcacagtctcgcccgcagcagcagtccgctccggcaccgtctaacgaaccgccaatggacttcgacgacgacatccctttttaa

SEQ ID NO: 128447 - DNA, 219 bp, Enterobacter cloacae
atgaagccagaaaaagacaacgccatacgcgcggcctgccgccgctgcaccgaggaaatccagcaggccatgcgcaagaagccaaagccaaactggaacgaaacggtgcctcccatcatcaacaagcatcacaagaaaattgaagctctgggagttagtctcctggagttcgtcgtcaaaactggccgccttaacgggcggtttggagctgaacaatga

SEQ ID NO: 128448 - DNA, 612 bp, Enterobacter cloacae
atgaatatgaaaactgaaaaaatcgtgatgatggacagcgatgaagcggccagcatccagactttaactggttgggtcgaccgccaaggtcgtttctggggaaaagacgaacaccaggcgcgttggtgcggagccactcatcgcaagtgcaaaaacaaacctgacgagcaccctattcatagcactcatggttattgcgaagaatgccaccgcgaaagccgacaggcgaagttctctaactttgagcgcgcggtatgggccggagagccgctcgttatctttgatgatgaccagtactttttcgatgctgaatcgctggccgactattgctatgagcactccctgctgccgagcgagttgcagttaatgatctgcgaacctaactacccgccggagttcgatctggagcagcactgcgaagagataatgcctgatggtgatgactattactgcttgccgcaagctgtgcgtgatgctgctgaggcgctgaataaggcgctgaaagaaagtgctccagtttcgtggagcgccagcaatcgcgtggcgatcgtatctgacgacatgctaaacgacgagcagaaggccgaaataatggcggagcgcgccgcatga

SEQ ID NO: 128449 - DNA, 216 bp, Enterobacter cloacae
atggacatcatcgataccgcagcagagattgaagagcttcagcgtaacgctgccctctccgctcaccgagtaaaccgcaacgccgtatcagctgagcgttgtgaagaatgcgacgaaccaatttctgagccacggcgtgctgccgttcccggctgtcagacgtgcgccagtttccagggtgttatcgaattgaggaataagcagagggggatgtga

SEQ ID NO: 128450 - DNA, 384 bp, Enterobacter cloacae
atggattacagcaagctaagcgactttgaaattaacaaacgagtttccatttgcattcatccagatataaaaaattggaattgttatgacgtttctggaagggcgtgtttcgtaataaacgagggcacaccaaagcgcgtgcaatatggtttttcatttacaagcgacccggcagatgcatggccgattatcaccgcaaataaaatcagcatttacgcaatgagcgaagcggacaaaagaggcggttggggggccgaggcttttcatcccaacgatgcatatagctttaacgataacccacttcgcgccgcaatgattgtcttcctcatgatgcaggagtcagccaatgttccagctaattcagcggggtcagatttacgctga

SEQ ID NO: 128451 - DNA, 240 bp, Enterobacter cloacae
atgttccagctaattcagcggggtcagatttacgctgaccagcacggttggcccgtcatcatccacagctgcacatcacagatagtccgctactggcgacagggccggataaacaccgcttcaatcgaccgattcaacaatgactttgagcacctcgatcacagtgaggcggcacagatacgcgccgaactggagacgagcgagcatatcaaatcgctgcgtgcccggcgcgctgcatga

SEQ ID NO: 128452 - DNA, 2415 bp, Enterobacter cloacae
atgattgcccgctggttctggcgcgagtggcgctcgccctcgctgctgattgtctggctggcgttgagcctggcggtggcctgcgtgctggcgctcggtagcgtcagcgatcgtatggagaaagggcttagccagcagagtcgggaatttatggccggggaccgggctctgcaaagttctcgccccgtgccgccgggctggattgaggaagcgcgcaaagaggggctgaaggtaggggagcagatcacctttcagactatgacctttgcgggcgacacgccgcagcttgcaagcgtaaaagccgtggatgacatctacccgatgtacggtgacttacaaaccagcccgccggggctaaaaccgacggccggtacggtcctgctggcatcgcgactgatggcgctgctgaacctgaaacccggcgacagtatcgacgtcggcgacgcgacactcaaaattgccggggaagtggtgcaggagcccgactctggatttaatccgttccagcttgcgccgcgcctgctgatgaacagcgctgatgtggcgaaaaccaacgccgtccagccgggaagccgtgtcacctggcggtataagtttggcgggacgcctgcgcagctggaggcgtacgaaaaatggctcctgccgcagctcaagccggaacaccgctggtacgggctggagcaggatgacggggcgctcggcaaatccctcgaacgttcccagcagttcctgctgctgtcggcgctgttaactctgctgcttgccattgcggcggttgccgtggcgatggggcactactgccgcagccgttacgatctggcggcgatcctcaaaaccctcggcgcgggccgcgcgcagctgcgcaagctgattgtcggccagtggctgatggtgctggcgttgtcggctctgaccggcggggcgatagggctgctgtttgaaaagctgctgatggtgctgctcaaaccggtactccccgccgcattaccgcctgccagcctctggccgtggctgtgggccatcggcgcgatgacgacgatctccctgctggtagggttacgcccgtaccggctgctgctcgccacccagccgctgcgcgtgctgcgccgcgatgtggtggccagcgtctggccgctgaagttctacctgccggtgattattgcggtggcggtcgggctgttggcctggctgatgggcggcagtacgttgctgtgggcggtgctggcgggcgcggtggtgctggcgctgctgtgcggcgtagtgggctggatactgcttaatgtcctgagaaagctgacagttaaatcactccccatacggttagcggttaaccgactgctgcaccagccgtggtctaccctcagccagctctcggcattttcgctgtcgtttatgctgctggcgcttctgctggtgctgcgcggggatctgctggatcgctggcagcaacagcttccgccggaaagcccgaactatttcctgatcaacattgctcccgaacaggtgacgccgctgaagggtttcctgtctgagcatcacattattccggaatcgttctatccgatcgtgcgcgcccgcctgacgcagatcaacggccagtcgacggagggaaataaggatgaatcgctcaatcgcgaactcaacctgacctggcaggcgaaacgtccggaccataacccgatcgttgccggcacctggccgccgaaagcgggggaagtgtcgatggaagaggggctggcgacacgcctgaacgtgaagctcggagacagcgtgaccttcaccggcgatacccaggatttcaccgccaaagtcaccagcctgcgcaaagtggactgggaaagcctgcgaccaaacttcttcttcatcttcccgccgggtgcgctggacggacagccgcagagctggctcaccagcttccgctgggaaaacggcaacggcatgctgacgcagcttaaccgggaatttccgacggtgagcctgctggatatcggcgcgatcctcaaacaggtcgggcaggtgctggagcaggtgagccgcgcgctggaggtgatggtagtgctggtgaccgtctgcggcgtgctgttgctgctggcgcaggtgcaggtgggcatgcgtcagcgtcatcaagagctggtggtctaccgcacgctgggagccagtaaacggctgctgcgcgccacgctgtggagcgaatttgctctgctcggtctggtggcgggcctggtggcggccatcggggcggaaaccgcgctggcggtactccagagcaaagtcttcgacttcccgtgggagcccgactggcggctgtggctcacgctgcccgtctgcggcgccgtgctgctgtccctgtgcggcggctggctcggaacccggctgttgaaaggtaaagcgctattccgccagtttgtcagctag

SEQ ID NO: 128453 - DNA, 1197 bp, Enterobacter cloacae
atgctgctgtataacgtcaaaattgcgctgctgacgatgctgctgatgggcgtgtttttcctgatccgcttttcgctgatcggcccctatcaacgcgcggtggatgactccatcgagcgcaccgcccagtatgaatccctgctggtggagacgcagaaagggatcattacgctcaaagcgaacaatatggagcaggcccgggatgcggtgatggataaatcccagcgcgaacacatcgccgggctgatgcgtaaagagcggctgctggcccgctttgacgtggcttcgctgctggtgatcaatgccgagcagctgctggtggtctgctttggcgcgtggttgatcctggaagggcagatgagcatcgggatgctttacgcctatatcagctataagcgctatttttccgatgccatggtgcaggtggcgcagaagctgctggacaaaaatgccctcaaggggccgctggatcgcgtgggcgacctgctgtttgccccctctgaaaccagccagtttgggaagcggattgtcacctcgccggtctgtctgcaatttgaggatgtctcatttgcctatcctggccgggaggccacgctacagcatatcaatatgaccctgaagcagggcgaagaagcggtgattgtgggccagagcgggtcgggaaaaaccacgctgctgcgtctgatctccggcatgctgctggcatcgtctggcacgctgcggatcaataagatccccattgaggagtgcgatctttcctcgctgcgtcagcacatccgcatcgtccatgcggacgatattctctttaccggctcgattctggacaacatcgcctgctttgacagcgcaccggataaagagcaggtcattgccgcgtgtcggctggcggaggtggaccacgtcgtcgccaggctgccgcacggctacgaaacggagatgctgccggggaacacctttttctctgccggggagatgcagcgtctggttctggcgcgcgccctgtacagccagcctaagcttctgctctgtgacgaagtgacggcgaacctggataaaacgaccgcgcagaaagtgctggcgaacctgcgtagcctggggattggcctggtgtttgtcacccactcgccggacgtggtgggctgccaggggcgtctctataccatggaaaacggcaccctgcgggagagtgagcaatga

SEQ ID NO: 128454 - DNA, 144 bp, Enterobacter cloacae
atgccgcttattaacgttgccattgtcgcggtggacgggtttagcccgttccactactccgtccctgcatcctgtttggcgacacggtatccggggaaaagcgctttaacgtcacgatctgcgctgaaaaaccgggattcctga

SEQ ID NO: 128455 - DNA, 708 bp, Enterobacter cloacae; identical to SEQ ID NO: 116832

SEQ ID NO: 128456 - DNA, 207 bp, Enterobacter cloacae
atgttgctcggcttaaaacatgtcgatttagcaagctccaaacagtaccagaacaaaactcgccaaaaactatcccgccttcagaaatgcgccttcgacctactaggggtcggtttggatatcgaaaattattgtacgttaaggatgttttttggccttactactttagctggccttagccgacgaaacgtccgttgtgggctgtaa

SEQ ID NO: 128457 - DNA, 1815 bp, Enterobacter cloacae; identical to SEQ ID NO: 115304

SEQ ID NO: 128458 - DNA, 387 bp, Enterobacter cloacae
gtgggttttgcgctggcgctctggctgtcgccgtcgctgaacatgctggcgctgggcgagagaatggcgcaggggcttggcgtgtcgctgctgaaaacgcgcctgctcgcgctgctggccatcgccctgctgtgcggcgcggcggtttcagttgccggaccgatcgggtttatcggactcgtggtgccgcagctgattcgccgtctggtatcggtggacctgcgcgtgatggtgccgctttcagccctctgcggggcgctggttctgctgatggcggatatcgccgcccgtacgctgttaacgccgtatgagctggcaaccggcgtgatgactgcactagtcggcgcgccggtctttatccttatggcgtcaaggatgttcaaatga

SEQ ID NO: 128459 - DNA, 525 bp, Enterobacter cloacae
ttgttcctgaccggtttcctgctgatgggctcgttcgtgacgctgtttaattacatcggctatcgtctgatgctttcaccgtggcatcttagtcaggcattggtgggtttgctctctgtggcatatctcaccgggacatggagttcgccaaaagcgggcgccatgaccgcgcgcttcggtcgtggtccggtgatgctggtttccaccgccgtgatgctgttcggactgctgatgacgcttttctcttccctgtggctgatttttgccggaatgctgctcttctctgcgggcttctttgccgcgcattccgttgccagcagctggattggcccacgcgcgcgccgcgccaaaggtcaggcttcgtcactgtatctgttcagttactatctcggttccagcatagccggtacgctcggcggggtgttctggcataactacggctggaacggcgtgggcggatttatcgcgctgatgttgtgcgcggcgctgctggtgggcgcgagcctgcataaacgactgcattaa

SEQ ID NO: 128460 - DNA, 240 bp, Enterobacter cloacae
atgccccgaatttcagatattcaggccgcctttattgcggccatagagcttaacccaaagggctaccgctacctgagaacagacagctttatagaaaagttgcgtggttttaactggcacttcacccgagccgacgccaatgcatggatagagcgcaatcagccaggcttcgctgacaagacgacagacggtagcgataaccggtactggatcctgagaaacatggggagggtcctctga

SEQ ID NO: 128461 - DNA, 315 bp, Enterobacter cloacae; identical to SEQ ID NO: 122167

SEQ ID NO: 128462 - DNA, 588 bp, Enterobacter cloacae
atggaaagaaaaaccgttatcaaactcagcggctcaatggctcagcgatttggcaggacacatcgccgcgcactaacgtcggccagcgaagtattcagggcactttctaacaccattgacggatttgatgcctacctgcgagagaccagagcgaaagggctggactttgtcatcttccgaaaccaaataaacataggcaaggaagagtttgatcttcttgggcctggtgatgagctccgtattatccctgtcatacgcggtagtaaaagggcggggctctttcaaattgttactgccgccgcaattgcggcctttacctggtggaacccaataggatgggcagcaagcacacaaatgacactatatgccgcagctggttctatggccgttggtggtgtagtgcagatgctctctcctcaggtttcaggtctgcgaatgcgtcaggaacctgataacaaaccctcctatgcgtttggtggtcccgttaacacgacagcatctggcaatcccgttcccctgctttatgggcaacgggaaattggcggcgccattatatccgccggggtttatgcagaagatcagcaataa

SEQ ID NO: 128463 - DNA, 711 bp, Enterobacter cloacae
atgcgcgacaaaacagttagcgccattctggcgcatgccgccgcatccttccccgaggagtgctgtggcgtggttattcagaaggggcgggtggagaaatacatcccctgcaaaaataatgctgagtcgccgactgagcaatttgaactcaatcatgaggattatgcggccgccgaagagcagggaactgtggtggcgatcgtccacagtcaccccggcgacggggcaacaacccaaccgagcgagctcgacatgctgatgtgtgatgccacggaactgccgtggattattgcatcgtggccggagggcgacattcgcaccgtcatgcctcgcggagaccgacccctcacagggcgccagtttgttctcgggtatgcagactgctggtctctcatcatggactatttccgcatcgaacacggcattgaactgcccaactacagcgtagatcgccactggtgggagcagggtgaaaacctctatatggacaactggcaggaatgcggttttcgtgagtacgacggtcccgctcagccaggtgacatggttatcatgcaggttcagtccaccgtcccgaaccatgccgggattttgcttgatggcaacatgctactgcatcacatgtatggccagctaagccagcgtattccctacggtggctattaccgtgaccgtaccatcaaaattctgcgttataaggatttgatgtaa

SEQ ID NO: 128464 - DNA, 759 bp, Enterobacter cloacae
atgagtatttcatctgatgtccagaaactggaaccgggtaagcgcgtccgcctgatcgaggtggacggctcagcgttcggtgcgggtattcttcgctttcacaacgagacaatcccccataccgaggcggaaatcatcgccgcaggcggcgacgagtcaaaacttgagccgaagtcggtgtggtggcaggggcaggattatggcgcgtggccgtatgaactgaccggcatatctgtcagcagtgacggccagaattcacggccgtctctcaccgttgcaaacatcagcggcacgattggcgcgctgtgccgaagatttcaggggatggctaaagcaaaggtgatcatccatgacaccttcgcccactatctggacgtaagaaattttcctgacgggaacccgactgcgaatcccaacgaggagcgcaaacaggtttattacatcgaccgtaaatcaggatcagacgatgaaaccgtagagtttgagctttccagtccagccgatctgcgcgggcaactcattccgacccggcaaattcagccaatgtgcacgtggtgcatgcggggctggtacaaaaccgggaatggctgcacctacgccgggcaaaacggctggttcgataaagacggcaaccgggtggatgatccttcacaggatgtttgctccggactgctgtcaacgggctgcaaacctcgtttcggagagaatgagcagctggattatggcgggttccccggggcttcacttctgagaggataa

SEQ ID NO: 128465 - DNA, 348 bp, Enterobacter cloacae; identical to SEQ ID NO: 127238

SEQ ID NO: 128466 - DNA, 387 bp, Enterobacter cloacae
atgattgagacgagcctcgatttttccggcctgaatgacatcgcaaaggatctggaggcgcttagccgcgctgaaaacaataaggttcttcgtgatgccacgcgcgccggtgcggaggtgcttaaggacgaagtgatcgcacgtgcaccggtacgcaccggaaaactgaaaaaaaacgtggtggttgttacccaaaaaagccgccgccgcggggagatttcttccggcgtccatattcgtggcgttaacctgcgcaccggaaacagcgataacacgatgaaggcgaataacccgagaaacgccttttactggcgattcgttgagctgggcaccgcgaacatgcctgcacatccgtttgtgcgacccgcttacgatactcgcgagtaa

SEQ ID NO: 128467 - DNA, 339 bp, Enterobacter cloacae
atgcaggccggaagactgagagacagggtggtaattcagaacatcacaacatccagagacccttctggtcagcctgttgaaacatggcatgacggcgcgactacatgggcagaagttaaaggtatcagcgggcgtgagcttgtagcggcaggtgcagaaacggctgtagccactatcagggtatggactcgatttcgtaacgatataactgctgcgtcaagactcagggttgtgactggcccgttcaagggtgtcattttaaatatcattggtccgccgatacctgattctcgcggcattcagctcgaaattctttgtaagcaggggatcgaaaaatga

SEQ ID NO: 128468 - DNA, 684 bp, Enterobacter cloacae
atggggacgaagctgggtgagaagattgcccgcgagtgggacgatctcgacatcgacgtcgtcatcccaatccctgaaacctcctgtgatatcgcgctggaaattgcccgtattctggacaagccgtaccgtcagggcttcgtgaaaaaccgctacgtgggccgcacctttatcatgccgggccagcagctgcgtcgtaagtccgtacgtcgtaagctgaacgctaaccgtgccgagttccgcgacaagaacgtgctgctggtggacgactccattgtgcgcggcacgacgtctgagcagatcatcgagatggcgcgtgaggccggggcgaagaaagtgtatctcgcctccgcagcgccggaaattcgcttcccgaacgtgtatggcattgatatgccaaccgctaacgagctgattgctcacggtcgtgaagtagacgaaattcggcagatcatcggtgccgacggcctgattttccaggatctgaacgatctgatcgacgcggtgcgcgccgagaacccggatattcagcagttcgaatgctcggtattcaatgggatctacgtaacgaaagacgttgaccagcagtatctcgactatctggattcgctgcgtaacgacgatgcgaaagccgtccagctgcaaaacgatctcgaaagcttagagatgcacaacgaaggttga

SEQ ID NO: 128469 - DNA, 591 bp, Enterobacter cloacae
atggcgagcaaggggcaacatcgcaagaatcgcaggggaaagcacaacgtgaccaaagacgaaatatttaatgccatcctcggcaaagagggcgggtacgttaatcaccccgacgacaaaggcggcccaacaaactgggggatcacgcaagcggtagctcgcgcccacggctataacggtgatatgcgtaaccttacccgccagcaggcgctggatatcctgacggctgactactggacagggccacgcttcgaccttgtttctgaggtatcaccagccatcgccgccgaactgtgcgataccggcgttaacatgggcccatcggttcagaccaaatggtttcagcgatggctgaacgtgttcaaccttcagggggcgctctatcccgatctgattgctgatggttttatcggtccgcgcactatcagcgcattgaaaagctatcttgcccggcgaggaaaagagggagagttggttatgctccgtgccctgaattgcagccaaggtcagcgttatctcgagctggcagaacagcgcagcgcaaacgagacgtttgtttatggctgggtaaaggagcgggtggttatatga

SEQ ID NO: 128470 - DNA, 282 bp, Enterobacter cloacae
atgacgtggcaaacactgatcctgaacattaacgctgttgcatgcatccttatcaccatacgcctgatgttcttcaggaagcggagcttacggcgccgccgtctgatggagtttctggcgtatgggctgatcctcgctccagcgtttaccgctttccgcatctggcatggtgattacgtgcaggtcgactacggagagctggttgtcaatctcgttgtctgcattgccgtatggcgagcaaggggcaacatcgcaagaatcgcaggggaaagcacaacgtga

SEQ ID NO: 128471 - DNA, 804 bp, Enterobacter cloacae
atgcctgaacatgtcaacgagaagtcagtgttctttgttaaaaactgcgagaagcgattcaacacaaaacaatgcggtactgtcaacatcggcactcttgagttatatcgggaaactggagaggaacagatcgcagatgttgaggaaggtttcttttcattgtcggttgactttaatgacatcgacgtacaaaaaaagctggctcattatcttactaataggcatttaggtgtagcatctctgaatatcgaggcaattggtggaaaaagtaaaagcttgatctcagaagaaatggatcacttctcagtatacaaaggtcattttaagtgggtttatcataacagatttgttttttcaatctcttgcttcaatgatccaactgaagcgtctggattgttcccaaaatacgatgacctttggttcattagaaaagaaaacatgaacaaagcgttggagattataagagatgaaaccataaatcatgtctgcgacttgttgagaaaaggcaaaaaccctttcaaatcacatgtaactatcgaccccatagaaacgaactgcacattaaaaggtatcgactatcgacaaagaaaaataatttataacaatgccgagtatgagagagatccagatttcattcactccattcatgaaagaataccttttataaaacctagcacatactcgaatgaaaaagagtatagatttatcatcgattttttccagaacggagtttttttagaaccgaaggaaaagtttttaattatatcgacaccatctctaacaggattaattgaaacattataa

SEQ ID NO: 128472 - DNA, 363 bp, Enterobacter cloacae
atgcgtgacattcaaatagttttagagcgttggggtggatgggcggccagtgatagctctggcgttgactactctccgatagctgctggatttaaggggctgcttccgcaaacaagcaaatctcgtctttcttgtacggatgatgatgctcttgtcattgaggggtgtctggcgcgcctcaaaaagaagaaaccatacgagcattctttacttgtcgcacattatctctatggaatatcaaaaagaaaaattgccaaggcaagaaagaaagatgaaaaactcattcgcatcgagattcagatggcggaagggttcattgatggctgcctttcgatgttagacataaagttagaaatggagtga

SEQ ID NO: 128473 - DNA, 990 bp, Enterobacter cloacae
gtgagagccatacttacacctgaagttgctccgatgtccggtgtggtgctgtttcgtcccggaaacgaactgctctggttattccgccagggcagggtggtgattgaaaggccatcagaagccatccagcatctgccatctgggctgattcctgaagcgcaccagccgctgacagatgatgacagtatgcaggctatttttgagaacgaacgagttatccagcgtgctggtggcctgagcggtcttgacgcctggctggaaagaaaattcgaatgtcagtggcctcatacagactggcacgcgagagactttaccgtgatgcggcatgcacccggcagcattcgtctttgctggtcttgtgataaccaattacgagaacaaaccactgaaagactggcaggaattgccatgcagaacctggtaaaatggttagtcgaaagggtgaatattatgctgggattcagcgaagaccacaccctgacgcttccggagttctgctggtggatggtacgcaacgatctggctgagcttattcctgaatcagtggcgagcaaagccctcaggattaagcctgaatcgcatagttccgtaatgagggaaagtgacattgttccgtcgttaccggcgactgaaatcctccaggagaaggtgaagaaggttgtctccgttaaggtagaccctgagtcaccggaatctttcatgcttaggccaaagcgccgccgctgggagaacgagaagtacaccagctgggtgaagtcgcagcagtgcagttgctgcaataacccggcagacgacccccaccacctgataggccacgggcagggtggaatgggaaccaaagcgcatgacctgtttgtgataccgctgtgcagagcacatcacgacgagttgcacgctgatccggtggcatttgaagcgaagcacggcgaccagttagcgctgttggttcggtttttagatcgagcgctggcaatcggcgtattagcatga

SEQ ID NO: 128474 - DNA, 390 bp, Enterobacter cloacae
atgaaactggtgctcccgttcccaccgagcgtaaatacctactggcgagccccgaacaaggggccgttgaaaggtcgtcatcttatcagcgccaaaggcagggcatatcaaagtgcggcatgtgtggccatagttgagcagttgcggttccttccaaaaccttcagctgcaccggctgcagtcgagattatgctgtatccacctgacgaacgccgccgcgatatagacaactacaacaaggctctgtttgacgctctcactcacgcaggtatctgggaggatgacagccaggtgcagagaatgctggtggagtgggggccgaaagtcccaggtggaagagtagagatatcgatcaagaaacatgaacctctggcgggtgcagccgcctga

SEQ ID NO: 128475 - DNA, 324 bp, Enterobacter cloacae
atgaaagcagaattaacgtcgcgtcagagtgaagtgctggacgccatagtgctctacaaggacagaacgggattcccgccgacgatgctggagcttgccgcattaattggctgtgcatcaccgaacgcagcagcagagcacgtaaaggcgctcaagaaaaaaggttacatctccattgctcctggcgctgccaggggcatcaccatcgtcaaaacggaatctgatgaagatcctgtgtcgatcattaaagacctcttatccggtggagaccaggccagagatcaagctgttgaatggctgaagaaacagggagttactttatga

SEQ ID NO: 128476 - DNA, 660 bp, Enterobacter cloacae
atgaaatactcactgatttacgctgacccagcctggctttatgacaacaaagccagtaacggtgcagcagaggatcactacgacacgatgaaactgatcgacatgaagcgcttaccggtttgggacctggctgtcgatgatgcagttctggctatgtggtttaccggaacccacacccgcgaagctatcgaactggctgaagcgtggggctttaaggtccgcacgatgaagggctttacctgggtaaagttcaacccactggcagagcagcatatcaacaaagcacttcaggcagggcgtgtggaggatttttacgacttcctcgacctgctgaacgtacaaacacgcatgaacggcgggaactacacccgagccaataccgaagacctgctaatcgccgccaggggaaatggactggaacgcaagtgcgccagcatcaagcaggttatctacagtccactcggtgagcacagccagaaaccagccgaggtgcgtctccgtctggaaaaactttacggtgacgttccgcgcatcgaactatttagccgctgcggtgcaccaggctgggaccactgggggaatcagtcagtatcaccagctgttgagcttattccggcagtggccgtgccaatgagaaaaccgcaggagcatgcagcatga

SEQ ID NO: 128477 - DNA, 879 bp, Enterobacter cloacae
atgagcactaaattaaccggttacgtttgggacgcttgcgcttcttcaggcatgaagctgtccagcgttgccatcatggcgcgcctggcagacttcagcagtgatgaaggggttagctggccttctattgctaccatcgcgcgccagattggtgctggcgagagcacggttcgcacagctatatctcagctggaaaaagacggttggttaacccgccagcagcgtcgtaaaggcaaccgcaatgcatcgaatgtttaccagctcaatgtttcgaaattacaggcagctgccttttctcacctgtcagaatctgacgcgtcaaaatctgatgcatcaaaatccgacccgtcaaaatttgatgcgtcgaaaaacagtaataatggcagttttcacccgtcagaatctggtggggatccgtcagtaaaatcaactactgatccatcagataaaaaacctaattgtcaggttgcgtcgcaacccgacactgcatgtgtcaatcaggttgatttgataactggtcaggcagtcttaatcctcaaccatctcaatgacgttactggtaagacattccgcaaggggaaaagctccctggataatattcgcgccagacttcgtgagaacttcacacacgatgagttgctgttggttattgattacaagcacgagcagtggaaagacacgaaatactacgaacacatgcagccaacaactttgttcaggccgaccaagttcgaaggatatttgcagaacgcgttgcgctggaatagcaaaggccgacctaagcgtgaggacagggacgatgtccgcaaacaagatccattgaaattcggtcagccagacaaagccatcccggcaggcttcagaggagcgaactcatga

SEQ ID NO: 128478 - DNA, 180 bp, Enterobacter cloacae
atgcgagaacttaaccggcgtttcagagatcactatggcgtcccggtgcgcgtcatcagatgggagcccgagacccgacgcgttatatacctccgcgaagggtacgatcatgagtgcttcagccctcttgagcaattccagcgtaaatttacagagttaaaggacgaccatgagcactaa

SEQ ID NO: 128479 - DNA, 555 bp, Enterobacter cloacae
gtgggtatagaacctgaatggaaagttgagaagcagcccgcatggctggtggctgcaatcaggaagacaattgccgctttgccaggcggatacgctgaagcggcggagattctggacgaaacccagaactcactctttaaccgctttcgtgctggtggcgaccagatctttccaatgggctgggcaatggtgctgcaaagcgctgctggagtaagttacatcgctgacgcgttctctcgtgaaactgataacggaattcacgttcccggcgccgtgcctgatgatgaaaacgaagagattggcctgaaactggccgagctggtggggaggcttggtgagctggtcaacgcttaccgtcattacattgaagatggtgtggttgaccggagcgagtggcaaagtcttaacgatatcgcatatcagttcagggtcactctcatgacgttcctgaaccttatttcccgtgtttattgcctcccagaaatgggggaggcccgcgagtgtgcagctccgggccccttggcgtgtcgtatcagtggagaaactaacgcatga

SEQ ID NO: 128480 - DNA, 252 bp, Enterobacter cloacae
atgcaagagaaaaaactcccaactcttaccgaagcaattaaggagattggtgtaattaccatttcttctgcttgcggatgtagtgctcgttccatctataagtggatgaaaaaaggatgtctgcctcgtacagattttactggcgagactaactatgcggaaaaaatcgctttagcctccgagggaaaattctcaaaggaattgatcaaggcgattagtcgtccccaaaagcctacagattcagcggtttga

SEQ ID NO: 128481 - DNA, 753 bp, Enterobacter cloacae
atgacggaactgatagttcacgcaagtacacctattattgaactcatggttcaggaagaaagagcgcgacaagacttctccaaaaggctagcgctggcctgtgaaaaagctggtttacagattcatggtcgacaggcagaaattgctaagaaaatgaagctaacacctaaagctgtgagcaaatggtttaacggggaagcaataccaaggcgcggaaagttgcaggaattagcagcttatcttggcacgtctgccacttacctgttaggtgactcttctgaggatgggattatcaaaagacaagccagtattgccaatgacgtttaccgcgtcgacgttctcgacctgactgtcagtgcggggccaggctcgttcatgatttctgagtttgtagaagttctgcatgctattgagttcacaagtgaacatgcgcgctccctctttggtaaccgacctcagcacgatgtgaaggtcatgactgtagacggtgacagcatgtgcccaacgattcaatctggtgaccgcctcttctttgatgtgtcagtgaggaacttcagggttgacggagtttatgcatttgttttcgggcaacactttcatgtcaaacgtctgcaaatgcagggattacagttagccgtgctttcagataacccggcatacaaagactggtacgtaactgaagagaatcaggaccagctatacatcatgggcaaagccctcatccatgagtcaatagcgtataacaagctgtag

SEQ ID NO: 128482 - DNA, 435 bp, Enterobacter cloacae
atgatttatgaaaaggttttatttatttataccactttattgcaggaaggaatggcggctgccggttttaacactccaaacgtggttctttttgatgttgacccacttaagatctattcattagttgtgacgtgcggatttttaacagatacatctaaaatttactggaacgagattgacgtaacttttaatgataaatctgttattgatcctacattcgatggtgaaagcactttcaacgtattaggcagtggatacccaaacaaagatcactactcctccgtttcttctttctacctgaaaggcataaggttaacaaacccaggtttatacactgcgaaggtttccctctatgacagcggggcagacgggaataaaggaaatctaattgatattaaggaaagtcactttatcgtagcgggggattttgagtag

SEQ ID NO: 128483 - DNA, 210 bp, Enterobacter cloacae
atgcttcagagagtgaaagagcttgaaacaaaagtcgcaacccttgtaaccgatgttgcaatcatcaaagacaagctagcttcaaaagaagatattcagtcagtaaagacagagctacataaagagttgaatgctcaaacatggaaaatcattacagctctagtcataactgtgcttttagctgtcttttctaaatactttatcaaatga

SEQ ID NO: 128484 - DNA, 210 bp, Enterobacter cloacae
atggatttggacgatgaaagggtaagtatgattgttcatgccatgggcagggcggttatggatttgtcgctctcaggccagccattgacgcaggaagctatcatcaagaagctggaacagtatcgcagagaaacgggcaatgtgatcggcaagggagttaacagggatgctgcggagatagtgaggaaaggtagtaaggctgtgaagtaa

SEQ ID NO: 128485 - DNA, 360 bp, Enterobacter cloacae
atgacgaacacacagaacgtcaacgagttacaaccacgcatgacccggaagcagctgatcgatgcagcgcgtaaggccgcccctctccttccgccagcttatcgcggaattatgaccgaactggctaaccgcctggactatacaagcgtagcgctttgcgaagcgatggcgcagcgtaaacaactggctcttcagaacgctactctgcgtgaagatgtcgcaagctgggccaaagagtgtgaccgcattgttgaacgctacacgaagaccagaaccaatatgcatttactggaagcccagcgagaattgcgtgagctgtcacccatcgtcatttcccaaaataacgaggtggctctctga

SEQ ID NO: 128486 - DNA, 828 bp, Enterobacter cloacae
atggctaactcattcaagcaaatgacccgtgacgggaccatcaagcgcaccgataccgggatgttcatcagcctcgaccaaatccatgtgcgggaaggtttcaacaaacgcgaagatgatgaacgtacccgccaggcagatgatgaccttttcaactttctgatgaatggtggctccgttcccccgctggaggttatcgcccgtgatgaaggtggagtgtgggttgttgaaggccaacgtcggcgtcgctgctatgcgcgctgtgcagaagctggtaagccagtagaccgcatccatatcatgccgttcaacggtaacgatgttcagcgcctggcgcgcatcatgaccagtaacaaccagctcccgctatctgatatggaacaggcagctgttattcaggagcttcataacgccttcaaccagaccaccagcgagattgcaaaactggtcaacaagtctgtccctactgtcgaaaaacttctgcttcttagcatagccaatcacgacgttcagaaagaagttaagtccggagccgtgtctgtagatgtggccgtagaccgagtaaaagagtttggcgaaaaggccggtgaggtgcttcagaaggataaagcttctgctgctgccaaaggtaagaagaaagttacccgcagcgttatagcgccagaaattagcgttaagaaagcgcgtcgccttgtagagctgatcagcctggcgggtataagcgacacaggtgttatctatctcgaaggattggaccatgcagaagtcgtggagattatcgacgagcacaaagctatcgccgttcagcgtcatggagaagcatcatga

SEQ ID NO: 128487 - DNA, 429 bp, Enterobacter cloacae
atgagcacccttaccaaagaatggctactgaagaccatcgcagagcttgaagaagagcgcgatgctgtgcctggcgcagtaaacgaagatgcggcgatggcgctagcggcgatgaagctggcgctggcatcgctcgaagcggagaaaaatgccgagccggtggcgaaggttgagactgttggggtttgttggtacgcagataacggtgtacctcgcaaacctgctgttggtacagagttatacaccgtcccgccagcgccggtatctgttcctgaatggacaaacgagcagtgcctggagttcctgtcgatcgctttccggcatgcggaaattaagggcgaccttgagcttgatgatatccgccttggtgtgaagatggccaatggtagccgcgccgccatgcttcaggagataagcaatgagcaataa

SEQ ID NO: 128488 - DNA, 528 bp, Enterobacter cloacae
atgagcaataacaacctaacaaacgagcgcctgagcgcactgatccgtgtcgctagggattctcttgaattgtatgaaatggagcttcctgtcattgatgatgtaatgctagcgctggcagaactacagcaacgccgcgccgccatgcttcagggttccgaacctgtaacgacgactaacaagttgccagaagaaaccggttcatctttgcaattgcgtaatctcatccgtcagcgccatgctgagtggtcacaggccacgttcggtgatgttggtcctgtcggcccgctcaagcatctgtcgaaagaggcactcgaagcagcagaggaacctgatgatctaagtgagtgggctgacatgcagttcttgttatgggatgcacagcgccgcgccggtatcagcgatggtgaaattacagcagcgatggaagaaaagctgaaggtgaatatggcgcgccagtggccagagccgaaagatggcgagccgcgactgcatatcaaagcagcaccgcagcaggaggtgaagtga

SEQ ID NO: 128489 - DNA, 270 bp, Enterobacter cloacae
atggtaagcaaacttaaacagcggcgcctgcgccgccttaaagccgacgttgcctggtggaaaggtgaagcctcggatctgtacgccagagtcatggagcaggccgacgaaatagccgaactccgcaggctggtcatccgcgtgccgatgccagtaattttttcaacggagatggccaaccagctttataacaacgaaacgaaaagatgtcgtacctgcaatgatggcctccgtggtgggtgctcatcatgcattttctataaaagatag

SEQ ID NO: 128490 - DNA, 1143 bp, Enterobacter cloacae
atggcagctcgccccagaaaacataatgtcaaaatacccaacctttactgtaagttagataagcgtacttcaaaaatttattggcaatatcgccaccctgtaacaggttcatttattggattcggaacagatgatgaagcggcaaaagctgctgcaatcgagatgaaccgtataaccgcagaacaagaaactcagcaatcttatgctctgattgatatggcaatgaagagctcagggaaaaaggatcaaggtatacgtgtttctgagtggattaaaaaatacatcgaaattcagatggaaaggttgcgtgacggtgagataaaaaaacctactgtaaaatccagacgattatgttctcagattctcgcagatagagtgccaaatcttcgcctgaaggatgttgatacaagactcattgcaaaaattattgatgaatataaggcagagggaaagcacagaatgggccaactgataagaagcgtactaaacgacgtgttcaaagaggcgcagcatgctggcgaggttgaccctggctacaacccagccttagctgtaaaaaatccaatagccaaagtgaaacgaagcagacttagcattgaacaatggaaattgatttttgaaagcgcaggttctttgccgccttgcgctcaaaattctatgcttttggctttagtcaccgggcaaaggataggtgacatagtcgagatgaagtttagtgacatttgggataatcaccttcatgttacccaaaataaaaccggaatgaagttagctatccccttaaatttaaggtgcgatgcaatcgggttgactctggctgatgttattagtaagtgtcgcgatagagtagtaagcccttatctgatccaccatgttaagcatcacgcttacggtaaggcgggatctcacgttccagaaaaaacgatatcaagatattttaaggaggcaagagataaagcaaatattagctggcctaaggattgcactgcccttccaccgtttcatgaacagcgctcgctttcatcaagaacatacaaagctcagggtatagatgtcaaaactcttttagggcataaaaccgaagcaatgagcgtaatgtatggagatgatcgtggtctagaatggaaaaaagttgtgatttaa

SEQ ID NO: 128491 - DNA, 240 bp, Enterobacter cloacae
atgttcgttgagctggtctatgacaagcgtaatgttgatggtttggttggcggcagagagattatcctggcagagctgacgaagcgagtgcaccagatcttccctgatgccgaagtgagggtgaagccgatgcaggcgaacggcttgaatagcgatgccagcaaaagcgatcgggaaaagctgaaccgcatgctggaggaaatgtttgaagacgcaaatatgtggctggtgaatgattag

SEQ ID NO: 128492 - DNA, 576 bp, Enterobacter cloacae
atgcaaattggctacgtaagggtgtcaacaaatgaccaaaacacagatctccagcgacaagctctcgaacgcgcaggatgtgaacaggtttttgaggaaaaaatgagcgggacggtagcgaaccggccagcgcttaaaaagcttctgcgaacgctgaatgagggcgatacgctggtggtgtggaagctggatcgcctcgggcgaagcatgcggaacctggtactgttggtggacgaactccggcagcgcggcatccacttcaaaagccttacggacagcattgatacatcaagcccgatgggccgcttcatctttcatatcatgtcagctctggctgaaatggagagggagttgatagtggagcgcactcgggctgggttggccgcagcccgtgagaaagggcgaatcggtgggaggcggccaaaattgacacctgagcaatgggctcaggctggcaggttgatcgcaaacggagtggatcggaagcaggtggcgatcatttacgatgtggccgtttgtactctatataaaaaattcccagtaaataaagacgttacacgaacttcaacacattaa

SEQ ID NO: 128493 - DNA, 762 bp, Enterobacter cloacae
atgcaggtaggcgcattcaaccttggcgctatccagggggacggtccaaccctcgataatatggacgggttcacgcctaccggatttacctcacatcaaaatgatggtctgactcagttgggcctgacatcgaatacaggactaacttccatcattctcaatcggggcaacaggccaaccagaatacatcaggcatactctctacgtcgtacctggttttcatattacagcgggatcgcatgggcctatcacgaagcttacacgactggtaatacgacaaaatcaagcgatggtactttgaaggcggcgtcccctgtcgcccgtattgtaaaatcccgtgaggactgccagcgtgaggacattgattctgacggtttcagctggtgtggaggtggaactgccaatgaagaagctgaagggatcaagatttcaagactggatgttggtgtttatgtcctgactggttcagcgggactggcctctgagggctggcagttattgccaccaatggaccctggcggcatgggggaactgggtgtagttgaagctgagcagacagaaggcggtgggctgacgattcggctttttaagcggaaatacatactcaacgaagaaggcgaaattgttaaaacgaaaggggctcctatagatgttcctgccaacagctggatcgacgttcgcctcgatatgcctgatgattctgcctttaatcagaggatgagtcaggagccacagcttgagcctctttctccagctctctga

SEQ ID NO: 128494 - DNA, 195 bp, Enterobacter cloacae
atggtgtctccaaaggcgtcactgataaacgatgaatttgcatcatttggccttggagcctggtatgttccaaccccaaaagcccccacttgcatgacattaccggagtccgttccgacgttcttcgtcgcgctacttcccaaaccgacctttattcacctgcatcagcagtcatggacagctctgccgcactga

SEQ ID NO: 128495 - DNA, 924 bp, Enterobacter cloacae
atggaaattaccgccggattacgttgcccgacatatggcggggcgatatccggcggtatcggtaatgtgaatactgcgacagttgagggttacgtgcccgggtcgaatgtcattttcataccgacccagacggtaatcagcgatgaggggatattcaagctggacagcgtcactatttccggcgcgaacgtcacgcaaaactggagcggcaattcaaaccccggattccctaacccacagcgcgtggcgttctccggtacgctgtggcagatcctgcccgtaagccagaactcaaacattggccttctcgttcagaacagcaccgactttacggctatcacaacagcgtccagggtcgggtactgcatctataaagccagggtaactgtcggtacgtccggctgggtcacgccgaccattgcaggatttgatcgcagtaaatacctggtctgctgtaagtggaacagcccttacaccctggactatgacggaaaccggctgctgtttctgaatgatggatcaaacacggaagaccagcccatgagcggcaccgttgatgtggtcatcttcgcgggaggcgtttcgccggtggccgcgaatcccggatttaatatctataacgccgcaggccagtgcacgttctcaactgcgcggcgcccgttcgtttatctcggcgttaattttgttccttccacgacggcgcagaccgttcccgggggcggatatgtgcccgttggccgctttgggcttagggtccccagcttcggtggcggtcgcatttatcactaccactatgggctggtcatgcagaacgggactctcagggtcggaaggggagtgtatgtcggctgggcagacaggcagctggcgaacgccggggttacgcctatttcactcccggtcattcccgatatgtacgtttaa

SEQ ID NO: 128496 - DNA, 2799 bp, Enterobacter cloacae
atgcctgctgctattccaattgttgccacggttgctgcgggtattgcggctgcaaacgaagcttatgcgattgccatggctatcactattgctgcgcaggtggcaacgcagatgctgacgaagaagccctctattggcggttaccgtgatgtggcggagagaaaacaggttctgcgcgcggctgccagcccgaaaacggtggtatatggcaggacggtatcagcaggtacgcttttcttctccgaagaggaaaaaggcgatcagactgatggcgaatggcttcaccttgcgatcaccctggcgggccaccctctctccggtgtgggaactatctatctcggtgatgacgatattggttcgtaccctgataacgccacctacgaagtacataacgaccgccagactgccgatccgtttatgcttcagaactgcccgtcctggaaagaggacatgatcggcaagggcatttcctggctacgtgtgtcgctgaagtttaacgctgaaaaattcccctcaggcattcctaacatcaaggtcgagaaaacggggcgcaaggtctatgacccgcgcaccggccgcacggaatacagcaacaaccttgcgctctgcgtgctggactattaccgaaattacctgaaggtgccggatgcggatatcaactgggatcagtttcaggaagccgccaacatttgcgacgagacggtaacgaacggcgacggaaccacggaaaaacgttacaccttaaacggtgagttcgacctgaacgaaaacaaggccagcattcttgaggcgatgctggctgccggagctggcgagccaacatacattgcgggtaagcacggcattctggttggtgcgtattatggccctgcaaccgaagtgatcaccgaaagtcagctggccggcgatatcgaaatcatgccggaagtatcgcagtctgagcgcgtcaacaccattaacggtacctttatcgatcctaagcagacctacgctgaggctgatttcccggcggtgtctgtcagcgaatgggttgctgaagatggcgttgagatttcacaggacctgaagcttcgttttgtcaccagtgagtttcaggcccagcgcctggcggacatcaagctgaagcgcacccgcatttcacgcacgatgaatctcacactgaacctgagcggctatcgctaccgtcctggcatgtacgtgaaggtgaatttcccgtcgctcggtatcatcaatgtcgaaatgcgcgtgaccgactggcggttcggtgtgcagaacggggtgcagatcaccctgaaacaggaaactgctgatgtctggggtgatgcgataggcaagccaattgagcggccgccgttcacgcagctgccatctggtggggtggcgcagccacagaacctgaaatacaccgtcgaggaaattggtcaggtggttcagggcgtgctgtcctggcagaacatcgggcagtttgtatacaacaaggttgtgatccgcaaggcgggtcagacggtgctctctgttcaggttccgggttccttcacccgcctgacagggcttgtccagtctacctacacggctcacgtcactgcggtaaaccagatgggggcagagtcgccggaggcatatcttgaattcagtattcaggccccgccagcgccgtcacgggtcgatattgagcaaagctattttgccatcactctgtacccgcgccttgcagcagtgacgaacgtatcaacgcagtttgatttctggacgtccggcgaaaccaagctgccgaataccagcacgtcaacggttgaaggaagggcaacgcgtgccgggatcggcaccacatggagcagccataacctgaagaacgggcacacttattactggtatgtccgcacgatcaacgcgtttggtacatctgcgtttgttgaagtggccgcgctgtgccagaccgatacgtcgggcctgattgacgtcattgacgagtctgtcaggaattctgacgccatgaaaaacgtggagaagggcattgataccaaccttgaaggtattctgcaaaacgcgctggccaataacggcacggtggaacgccagttccagcagctgggcgaagtaaatgccgaaatcatgacggtcaggacaacgatcgccacggtagacaaggcgcttgcccagctcaccaccagtgttaagtctcagttcgaaagtgttaactcgcaaatcctcgaacagcaaacggccatcagtgataacacgaaagctatcgcttccctcgatacgtatgttcaggcagaggttggagacctgacgacggcggttaaccagaaaatgaacgccgaggtgacgagcaacggtacaggcaaggcttcatataccctgaaccttggcattatccgtaacggcgtgaagtacaacaccggatttggaatgtccattgagccttcaggtggttcttacaaatccacggttgtattcgctgctgaccagttcggcatctactcaggaagcgatcccggcaactatgaggccgccttctttgtctataacggacaggtctttatccgtgacgcgatgatccaggacggcagtatcaccaatgcgaaaatcggcagttatatccgctcgacaaacttcgcagccggagttcggggctggaacatcgacaagaacggcgactgtgaattccacggcaaactctatgcagacagcggtaattttgcgttcaacgggaccaataacacggtcgttattaacaataacggtattaccgtcaacatccccggcggtggccgtatcgtcgttggttcatggtga

SEQ ID NO: 128497 - DNA, 399 bp, Enterobacter cloacae
atgaagcatccagactggcataacagattaatcgccgtgataagggccgctgaaaagcggccttttttatggggcgaacatgactgctgcctgtttgcagctgactgtgctgaagcgatgaccggggataattttgccgacggctggcgtggaacgtatgacagcgaaacgggtgcgaaaaaagcattgctgcgcggcggcggatcgctggagaaagtgctggcgaagtacctcgatgaggtacctgtgaagatggcccagcgcggcgatatcgcggttgtcgagaatgctggcacccgatgcgccggggtgatttacggcggcgccgtgtgggtgccgggggaggatgggctggtttgtctgaggattaaaccactgagcacctggagggttcgctga

SEQ ID NO: 128498 - DNA, 585 bp, Enterobacter cloacae
atgctgtattcccctttttcagattcgatgatcacctggctctcccgtgacagggttaccgcggtgctggcggccaacgtccagtttgagtccgggaccgcttacgtccattccggcaccggcacgctggtgctgggcggatatgtctattacggcatgggaacgatgggcgccattgatgatgtcaatgaaaccaacacgacgagcccgacgcaactcaggatgacgctttccggcctggacatgtccctgtttgccaaaacgcttaacgagcgctgtgtggggaaaccggcggaactgtatctggtggctatggacgacaacggcgttgttcaggttgctgacctgatttttaaggggcgggtatccggtacaggcgcgacgtcgggggaaaccaacgcactgcaatacaccgtcagtaacatttttgaagactggcagcgaccgttcccggaccgctatacggacgaatcgcatcaggccgcacagccaggcgatcgcatttttcgttacgtcgcacagatggcagaacgttcaatttactggggcagtaaaaaagatgcgccaggatttacctatacgtga

SEQ ID NO: 128499 - DNA, 594 bp, Enterobacter cloacae
atggctgcgcttgaatggcctgctgatgtatgcccgtcgtccctgacatggcgaccggaaagtaacaccaaaacatttcgctctccctttaatggtgcctcacagaccgttcgcttccccggcacccgctggatctgctccctgacgtttaacaaccttaccgacgataaatcccgacgtattgatgcgctggtggccgatctcgatggtgaatacggcagggtgaaaattcgcgactggggacgcgaggggagaacgcccgccggaaatccggtagtgcaggatgcgaaccagacggggacccagctcagcagtaaaggctggacgcccggcaagctcgtactgcgcaccggagattatcttaccgtgaacgacgagctgaagatggtcactgctgatgtgaccagcacttcaacgggtaccgcaatgattccgattgcgccgatgctgcgtacctcgccgccggttaacggcaaaattgaggtggctaacccctacggcatttttaagctgaaagataaccagcagggcgcgggtaaccgggttcctggcgtgtttaccagctacacactggaatttgaggaggcgttttaa

SEQ ID NO: 128500 - DNA, 2481 bp, Enterobacter cloacae
atggctgggaaatcactcgggacccttacactcgatcttgttgccaaggttggcggttttgtttctggcatggataaagcggaaagagcctctcagcagtgggctaagcaagttcagaaggatgccgctgaaactaccaaagcttttgcctccattggttcagcaacagttgctttagccggcgctgttggtgttgctggttttcagcttctaaaatctacctcgaaacaaatagcagagacagaccgttgggctaaatcactaaatatttccactcaagagttgttatcgtggcagttcgctgccgaaaaggccggtgtgtccggcgatcaaatggccgatatcttcaaagatattggtgacaaaatcggcgatgcggtcctgaataagtcaggtgaggccgttgatgccctgaatgctcttggattatccgctgaaaaattatccaaagtaagtccagacaaacaacttctggcgattggtgagtcgcttggtaaaatcagcacaaacgctgaaaaaaccacagtacttgaaagccttggcaatgacctttcgaaacttcttcctctgtttgataataacaatgagaagcttaagcagtttttaagtctcgctaaagatttcggagttgctccagaccctgcatcaatagacgatctcgttaaagtgaatcagatattcgaggatattgaagcacaggttcgagggttaaaattagaaatttcagcaggactcgccaaagtagacttatctcctcttacagactcacttgatcaattgaggaaagttttaacagatccaaaggttcttcagggtatcactaacttagtgtctgaggtggcagagcttaccggatggttggtaaaatcagctgctgcggctggacaattagcagcaagcacaggtaataggatagctgccatcggtggtaatattgaccgaaaaaatcttgatcaggtaaaagaacgaattgactggcttcaaagaaacattgatgcaggtaactttcctgaaactgaaagtattattggcagtgtactcgattcaaatattactctggcaaatgcaaagaaagagttagaagatctaataaaattaaagggtcaattagttgctggtagcccagcaaaactgccagttcaacctgcaacagtaggtgggggctacgcgcttgataaagacgaaacaaacgggaagacaaaacccgattcaacccttaaaaagcttgagtcttcgtttaaatctatggagacaagttatcttcgtcaaattgctctgatcgacactactggaaagaaaagcgcagaagtcacagaacaacaaaagcttcagtttgatattgcggacggcaagctggctggacttaatgaaactcagaagactcgcctggagcagctcgctactgaggttgatcgcctcaattcagttaaaaaggccaatgaggaaaatatcaggctcgccgaatatgttgcgaaccttcagcgcgaaaatgctaacgctgcaagctccctcgatgcggatgttatcggcgccgggttaggggataaagcacgcgaacgaatgcgtgagcaactcgatattgagcgtgaatttaacgagaagcgtgaagacctgcaacgcagattccagagtggagacattaagacctctaccgaatatgaccgctataaccaggaactcgataaggcacttgcggtacggcttgaaaaatatcgttcccattatgaggatctggacaaaattcagggcgactggctcgctggtgcacaggatgggctggcaaactggattgacacttccagcgattattacagtcaggtatcgggtcttgtgggcaacaccctggatgggttggttgacaacatggcggatgcactcaacgggaataaagcggactgggcggactgggctaacagcgtgctgagcgaactccaaaaggttctgcttagagctatcctggtcaatagcctcaagtctgccggtgatagcggacttctcggctcgcttggcgggatgtttggaggcgcgtcttctggtggcagtacgccatctggtgcctacgattcagccgcttctggtttaaccctgaacgcaaaaggcggggtttatgattcccctgatctgagcaaattccgcaatggtattgtgaacagccctacgatgttcgccttcgctaaaggtgctggcttgatgggtgaagctgggccagaggcgatcatgccgctaaccagaaccgcagacggctctctcggcgtgcgaatggtagatgatgctgtttcctccgttagcgcgggagggaatagcattcaacagaccattcagcagcatttctccatttccggtaatggcgatgccgcgcttaagcaggcgatggaggaggctgccgctaaaggggccagagacggcgcgaagaaggcgcggcaggacatgctgagtgatttccagactaacgggcagggtaggcgactgcttggcgtttaa

SEQ ID NO: 128501 - DNA, 459 bp, Enterobacter cloacae
atgagaaacttaggatggttgttgtcgttaggtggtgttgcgttaggcgtctttgcattactcatggatgtaagcgttcctgtcggagatggttcacgcgtcaacaacattggtctgatggctgagcggcagaattatttaattgttgcagcggttttgtttattggtggaatattgcttgcaaataaaacaaagagaaatatgcctagaaataattacaaagcctatgacctatcaaccataaacaaagatgatttcatcaagggtgacggtagtattaatttagaggaagtccgcaatttttcaatcttcctgcttgaaaaacactctggtaaatcggtatcagaaattactttcatgaacatgcctcttattgagcgtattgcaggggaaatgcctgcccctcttgggaaaaacttcaagagcgagcttgagcgaagtctaaaagcaaacatatga

SEQ ID NO: 128502 - DNA, 381 bp, Enterobacter cloacae
atgaaactgacactcgacaccctgaaagaaacgggagcgtttaccggccgcccggtggaaaaagaaatcacctggaaatcgcaggatggtaaggaacatacagccacaacttatatccgtcctcttggttatcacactgccacatcagatgtgcttgctggtctgggccgtattgatggggttgctgggcgtatcgcagcgtcaatttgcgatgagcatggccatcaggtgtttacggttgccgatgttaccggcgaggccgatccagaccgtggcgcgctggatggtggcctgacggtggcgctgctggtggctattcaggaagttaacgatctgggaaagacggactcagtgcagaagacgaaatctggtgcgaactag

SEQ ID NO: 128503 - DNA, 492 bp, Enterobacter cloacae
atgtcagtagtgactcaaggcacacagttgtacgtgctcgcgaatggtgtcgtgagcgaaattgaatgtatcactgcattttcaccaggcggaagcccggcagatcagattgatgacacctgcctgagcgaacgtaacacccgaaaatataaaaagggcttgcgtacaccggggcaggcaacggccacgcttaacgcagatcctgctaacgccagccacctgatgctcagcaacatggcagagtcaaacgaccagagcgacgtaacgtttgctatcggctggtctgatggagaatcagagccgacagtgggaactggtccgggtgcggtagatggcctggtgcttcctcccgatcgaacctggtacgtattcaagggatacgtttccgacttccctttcgactttcagggaaacacggtcgtgcagacttctgccaccatccagcgttccgggcagggggcatggattcctaaagcacagtccggcagctaa

SEQ ID NO: 128504 - DNA, 366 bp, Enterobacter cloacae
atgatagcgcctgtttttaaagtttgtgcagccagccaggtggttcgctccgtgctaggagaatctcccgtaaggctgtaccccttcggcaagcattttgatgaagttgtctatccctatgcggtctggcagaacattgacggtgatcctcaaaattacctgaagcagcgccccgatatagaccgcttttctgttcagattgacgtttacgccgacacagatactgaagtcatcacggttgcgcgggcgcttcgtgatgcgatcgaaggaagcgcaataatcaccagatggggtacgcaggagctcgaacccagcaccatgaaataccgctactccttcgatgtcgactggctcgtcaaacgataa

SEQ ID NO: 128505 - DNA, 540 bp, Enterobacter cloacae
atggctgacggtgttgaagtaagtcttaccgggcttgattccctgcttgggaaaatggaggcagtctcagacgtcacccgtaacaaagcggggcgatttgcgcttcgtaaagccgcaaaccttatcagggaccgtgcccggagtaatgcggcccgggttgatgaccccctgaccaaagaggccatatataaaaatatcgttgccagctttggcagtcgtgaattccggagaaccggtaacctgactttccgcgttggcgttatgggcggtgcgcgacagtatgcccagacaaaagccaacgtcagaaaggggcgagccggtggaacttacaaaacagcaggcgacaaaggaaatcccggcggcgacacctggtactggcgaatgcttgagttcggaacagagcatgcagcagcacgacctatcatccgccccgcgatgaacggtatcgatggccctgtcattaacgtttttgcggaagaaatggaaaaagctatcgatcgtgcgatcaggcaggccgtgaaaaaggggaccaaagcatga

SEQ ID NO: 128506 - DNA, 333 bp, Enterobacter cloacae
atgcaggccgggaaactacgtcaccgggtaacaatccaggagccggtgatagttcagaacccagagactggagctgttaataaaacctggcgggatgtggctaccgtatgggcggaagtctccccgttgtcggctcgcgagtttattgcagcccaggcatcgcagggggaaatcactacccgtatcacaattcgctttcgaccgggaattacccggatgaatcgcatcctgttccgcggtgggatatataacatcgagggcgtgcttcctgatccgaaaagtggccgcgaatatctcacgcttccctgttcagaaggggtaaacgatggctga

SEQ ID NO: 128507 - DNA, 213 bp, Enterobacter cloacae
atgaacgagcaaaaggtaagcgagctgataacagcgctacgcgaacagacagaagcacagagggcgcagacggacgcgataaaccggctggctgagtccaatatggcgttatgcgatgtcattatccagtcactggctgaagatgatggggttgaaattacgtcactgaacgatttgaaacctcagtatctcagccagaaagtcagggggtag

SEQ ID NO: 128508 - DNA, 123 bp, Enterobacter cloacae
atgctactgcttatcggtcactggtatgcaaaccgggaatccgtggccatcgggcaaaccgttgcagaggtcccgcttgcagttgaagccctgcttcagccataccgaatttacggggtgtaa

SEQ ID NO: 128509 - DNA, 783 bp, Enterobacter cloacae
ttgagtaatatcatagaactcaagggcatcagccgcacctacaggaacggtggacaggagctcaccgtgcttaaagggattgatttgactatcgctgctggggagatggtcgcgatcatcggcgcctccggttccggtaagtcaaccctgatgaatattatgggctgtctcgatgtccctgattgtggcgattactttatcagcggtcaaaatgccgcccagctttcacctgacgatctggcaaggatccgccgtgagcacatcggttttatcttccagcgttatcatttaatgcccgacctgagcgcgttaagtaacgttgaaattccggcgatttatgccaatagtgagcgcgaaaagcgccgtctgcgcgcggcgacattgcttggaagactcgggctggaaggtcgtgaacatcataaaccgggagagctttcaggcggccagcagcagcgtgtgagtattgcccgctcgctgattaacggcggtgaaatcattctggcggatgaacccaccggcgcgctggatacgcagtccggtcaggaggtactgtcaatactcagtgaactgaatcagcgtggccataccgtggttatggtgacacatgatatgaaggtagcgcagcatgctaaccgtattattgagctgcgtgacggtgaaattatttctgataccggcagtcgtgttacctccggggttgcccttaaacgacctgacagcgttcagcaaagctggtgcaaagtattgttgaccgtacccgtgaatccctgcacatggcgttaa

SEQ ID NO: 128510 - DNA, 441 bp, Enterobacter cloacae
atgaaaaaagtggttctgatggcgctggctctcggcctttcactgcccgcgatggcgagtgaaaaagtgattgatatgtacaaatctgaaaactgtggctgttgttccctgtggggcaaggcgatggaaaaagacgggtttgaagtacgaactcacgtcatgaatgatcaggcgctgtcagccctgaaagaaaagcatgctattcctgcaggactgcgaagttgtcataccgcggttgccggtaatttgatcattgaaggccatgtgcctgcgacaacgatacataaggcaatgcagtctggttcaggtatatacggtctcgccacccccggtatgccagcaggaagtcctggaatggagatgggagcccgaaaagaggcttacgatgttatcgcattctcaccggatggaagtaaaaaagtcttccagcgaatcgaatag

SEQ ID NO: 128511 - DNA, 303 bp, Enterobacter cloacae
atgaccaaaccgccttcagaggttgcagagctgatccatgatgcaatggaaaacctaaacgaacaaaaagccatcactcgctttcaaatgtcactgaaaggtattggagtgctcgctcaacgcgactttgttgaccagagttttttgatgatgctttcatcagaattaattgtacgcggttggtgcatgtttcagatcagccataccagctacagtctgatccgccatgaatcagcgtcgaaatttcgcaaacttagcagtgaatatcttttgtcatgcattaatggagggaacccagattga

SEQ ID NO: 128512 - DNA, 1479 bp, Enterobacter cloacae
atgaaaatgacacgcttagaagctatcaaggcatggggtagagcaagccgtgaaggtaaacctattcccgatgatgttagaaaggttctgatcagcactcaaaatgatagccttcatgatttcggtgtagaagctcctacagctaaagttagagttagaaaagagcaagtaaaaaagaatatgaacggcaagaggccgttcgctacatcaggtactatccgtagtgcgggaggtgctttaactcctgaaaaaatggaaatatacaaccaaaaacgcaagttagataaccaaaagcgtaaaaacaaccctcaactttattcaaagctaatacaagactttattgtatctggtttatctaaaaaacaagccactaagaaagctaaagcaattattttaagtgcaaccctagataaactcaataacgataaaaaacctccttcagtcagaacaaaaagaattgttaaatctaatactttacttaatgagggaaagattaaatctgatccctggcacatagcaaaagttaagcaagatgagatcaatttatctaaagtagaacaaagacggatcgacacggcattattaagacgtcctatttcatgtattgaatgcaaaattgactttaaatcatttggtggatttgtagatcatactaaagatgttcatcatgctagcgtaagtacacctaagctagttgtaaaaaatgaagcacctattgactctgttgatattgtcattgagttgcctgtattgccagctaacgagccaggagagcccgttgtttctattcctgttgccaaaacaccagaagcatttagtgataagtggatcaggttgtttgtagagaaaggttacagtgctgcaatggttgaagcgtttaaacgtgatgcaattaaagagaatatgacagcattacagatacatgattttcttagtgtctgtaagccttataaagcccctgtagaaacgcctgtacgtcctctagaaacgattattacctctgaatatactagcaccattacagaggccgtagaaacgcttgtagaagcacctatagcatctgttgctaatgattcctcctacgctgttaccctagatgattctatcgagcaagctttgtttgctgatcgcattgttcgtacccgcaccaatcagaacgattttaaagaacgtgtagccgctaactttggttatcgttgcgccattacgaatagcggagaagctttagaagccgctcatattgagccagtaggaacggggaataataacacttcgaatggggtgcttatgcttgcttgtttgcatcgtctttttgacgctggattgatggctatcaagcctgatgctcttacagtgcatttcaaagctaattgtacatactttgctaaaagtacgttggaaggtaaaaaaataaatgatcactcagtttctttgaacaaatcaggattgttagaacgctggcttagctttaatacttga

SEQ ID NO: 128513 - DNA, 1197 bp, Enterobacter cloacae
atgtccacaccacgccgttttaaattcactcaccgcctcattgatggtctgccacctaatgaatccgatgccccttcccgggaagccgagtatagcgataccgaaatcagcgggctcaaatgtctggttggtaaaggagaaggtaaaaagaagtttctcctgcgctatctctggcagggccgcaaacgcgctatcagcatcggtcactggccggaaattgatgtcactgtcgcccgaaagattgccactgagatgaaacgccagatagctagcggcactgacccgcgttatgagcgggacaaatgccgggccataccaacccttcaggaagctttcagccagtattatttcccatgggcaaagctgcataaaaagagctggaacaaggatgagcagcgctttcgtgaccatatagctcctgtgatgggaaatctgttgcttaatgaaatcacgccccgtcacgtcacccaccttcagtcttcgttgtgcgaaacctgtcagcccgccaccaataaccgggtgattgccctgctgaaagccctcctcagatggtcattgcgtcatgagatggtgacagtgaacccggcagcgaatatccctcttctgcgtgaaaataatgcccgtcagcgttatttctcggaaacagaaatcaggcgcattttcgatgctgccagtgcggacaacagccgtgtggccgggatttatattcgtttactgctgctgaccgggctacgccgggatgagctgcgactggcaaaatggacgcattatagtatgcagcagggaacactatggctaccggaaaccaagaacggcacagggcgactggtgcacctaaacgactgggcgataaagctgattgatgaactgcctcgcttcggtggaaatatctggatgtttggtggcaaaattccgggcaaacctgtctgtaatgttaccaaagctttcaggcgcatcatccgacgggcgggcatttacgatgacgaggtctgcattcacacctgtcggcactcggtcgcagcattaatcgtttcacggggaggcaccttatatgatgttcaggcccagctcggacatcgcagcatccagtcatcgcaacgttatgctcatctgcatccgcagcggctgaaagcgaccgggcaattgattgagcagcatattggcaatgcactggctctttccgggaacactgactga

SEQ ID NO: 128514 - DNA, 1176 bp, Enterobacter cloacae
atgaatgatttctcccgctttaacagccggctgaaggagccccgcctgccgcgttcgtcgctggtggcatggtcgctgtttgccctgctggtggtctttattacctgggccagcctgttccagctggatgaggtcacgacgggcagcggcaaggtgatcccgtcctcccacgagcaggtgatccagtccctggaaggggggattatccacagtctgatggtgcgcgaaggcgatatcgtcgagcgtggtcaacagcttgcccaactggaccggacgaaaaccgagtccagcgtgctggagagcgagtctcgattaaacgctgcgatggcgacggccgcgcgtctgaatgctgaggtgaacgacaccgcgctgacattcccggcagagctggatgacgacgttgagttggtcaaacaggaaacggcgctttatcagtcacgtcgcgaaagcctggaaaaagggctggcgggtttacgccagggagcggatctcgtgcagcgtgaactggcattaacgcgcccgctggtgacgcagggggcagccagtaaggtcgaagtcttacgccttgaacgtcaaaaaaatgagctggagagcaaaatcaccgagatgaaaaaccagtactacgttcgcgcccgcgaagaactggcgaaagcgaacgcagaaatggaagcgcagcgttcggtcatgaaagggcgcgaagattcactcacccgcttaacgtttaatgcaccggtgcgtggcatcgtgaaggacattgacgtgacgacggtgggcggggtgatcccgccgaacggcaaactgatgagcctggtaccgcttgatgaccagatggtgatagaagcgaaaatctcgccgcgcgatgtcgcgtttatccatcccgggcaaaaagcgctggtgaaaatcaccgcctatgactactcgatctacggcgggctggaaggggaggtgacgatgatttccccggatacccttcaggacgaggtgaaacgggatgtttattattatcgcgtttatattcgtactgacagtaaccatctgaccaacaggcagggcaaggaattcccggtgttcccgggcatgatagccacggttgatatcaaaaccggcagtaaatccgtcattgattatctgctgaaaccattgaataaggcaaaagaggcgctgcgcgagcgataa

SEQ ID NO: 128515 - DNA, 177 bp, Enterobacter cloacae
atgaacacattccattggctaaaaggaaagacatggggcttaagcattcttaccgcggcgttaaccctgagcgcaacggcgtcagcagccctcccggattcggctgaactcaagcagcgcgaactcgcggacggtctgtatgagatggtttactccccaacggcaaacgcgttgtag

SEQ ID NO: 128516 - DNA, 993 bp, Enterobacter cloacae; identical to SEQ ID NO: 118304

SEQ ID NO: 128517 - DNA, 2163 bp, Enterobacter cloacae
atgctgaataacgaattacgcaaaataacccgcctcgaaatggtgctggcgattgtgggtaccatgaaagcgggaaaatcgaccaccattaatgcgattgtgggcacggaagtgctgccgaaccgcaatcgtccgatgacggcacttcccacgctgatccgccatacgccgggccagaaggagccggtactgcattttttgcacgtttcgcccatcgataccctgattacccagttgcagaaaaaactgtgcgataaagatcgcggcaagctggcgcggcgtctggaaatcgacaaggacatgaatacgctgctggagcgcatagaaagaggtgaggcgtttgaaaaacatcacctgggcgcggagcccatctttcattgtctgaaaagcctgaacgatctggtgcggctgtctcaggcgctgggcgtggagtttccgttctctgagtatgccgcgatagaacatattccggtgattgaggtggagtttgtgcatctcgccggtctggatgcgcacctggggcaactgacgctgctcgacacgccggggccgaacgaggccggtcagccgcacctgcaaaaaatgctcagcgagcagctggcgcgcgcctccgccgtgctggcggtgatggactatacacagcttaaatctatttctgatgcggaggttcgtcaggcaatttcggctgccggcaaatccgtgccgctttacgccctggtcaacaaattcgatcagaaagatcgtaacagcgacgatgaagagcaggtgcgggcgatgatttccggcacgctgatgaaaggaaatatttctccggggcaaatttatccggtctcttccatgtgggcctatctggcaaaccgcgcccgctatgagatgaacgttcatgggcgccttcccgatcatcaggatcagcgttgggtacaggattttgccgaggccgcgctgggccgccgctggcgaacggccgacctggacgatattgaccatattcgccatgcggcggatctgctgtgggaggattcgctgttcgaacagcccatccgcaaactgatttacgcggcttacgccaacgcctcgctgttcgctttgcggtcggcatcgcataagctgctgaactatgcgcaaaatgccagagaatacctggattttcgccatcagggactgacggtcgcttttgatgagctggagctgaatattgcgcgtctggaagaggatatgacgttgctgcgtcagcggcagagcgtggtgagcgatgaggtccagcatgaagttgaagaggcgctcaacacaacggatgcattcctgcttcgccagaaaggtgaacttcaccaggcgctgggcgacatttttagccgcccgtctattcttgatttagcagggcgcgagccatccagtttgcgtgcagacgacgcggatgcaatccagcagctggtgcttgacgatgaagggcaggcgcagattgtcctgagcaagattcgatcgtcatgcgagcagattatgctgaatgcgcagagcagaattggccgggagctggcgttacgcttcgatcagctggagtctacgcttgcccgatcgttgaatgaggcgatgcgccctatcgagacgcgaatcaaggaacagctcagtcatgccggatttcgggcgcggattagcttcccggcgtttcaggcaaaccagcttaatttcaatacgcgcggcttatttaatgatgccattgtgcaggacacccctcccgccagtcagccagccggggcaggcagcgtacgtaataccgtctcgcgctggctcaataatcccggctggggctgggaagagtatgtcgtgacgcgcacacgctatgtcatcgacatcgttcagcttcatggcaaatttacgcaacatatcgatcagttttgcgatcaaatacgtaaagctttggccgcgcaggtcgatgtctctgttacggcaggtatggcaacgttctttgcagagttttcgttgtgcctgaccgggttacaggaaagcttgcgtgatagccttgccgtgcggcagcagaatgaacattcaacccgggcgcttagccagttgttgaagcaaagtatgactactgcggcgtggattcaggaagatacccgactgttacgcgatgatattcaaaccttattcgcggcagagcaaccatga

SEQ ID NO: 128518 - DNA, 387 bp, Enterobacter cloacae
atgtatttcgcacaggacgctctggaggaagccttacaaactccgctctattatactttaggctatgtggattatgataaaagcccggtcttttatacatgtgaagaaacactaaaaaataatctgggagatccgacgtcaggtatcggaacgataaatttgcatgcgtggctgacgacgccgaacatggaaataatagaccttacgtttggtaccacatatggcattgtgaataatgctccatcggctattggccgctgtgcgtttcaacactactctgcatttaatgaaaacatggtttatcatccccagctggttggtgacgattatttaaagcggattggtgccttcgttaatttaagagcgttaaatgtatttacaatctaa

SEQ ID NO: 128519 - DNA, 1770 bp, Enterobacter cloacae
atgtctgacattaataaaaaaaatgagcttcgtttgccggaaggttttgctgaagagaatggtagattgtatttttgccatgaagatgacgataaaatgaaacttgtgtccagtcatttacttgaacctgtggcaaaggcctgtaatcgtgccggtaacgggaactggcatattattttaaaatgcgccaaccatagtggtgcagaagttgaaatgattatctgcatgaaaaaggtgaagaagagtaccgattctgttatcagccagcttgcaggtaaaggtattttcgttgatgacagtaagttattcctgatgttcctgcaacggtcatgtgaaatggatctgccagtctatcgtgtggcgatccggccgggcttccagcctgaagagctggtgtttcagtttggtccttatcccatttttgtggccgggcgggaggggatccagggtgtgataccgggcgaagggatgatggtaaatgatacccttgcagtcgcgggctcgcttgagcaatggcaggaacaggttgccaggaaagtctgcggcatggcaccaaaacttgccattctggtggggctgagttcgtttcttctgcctttgctgggcgaaagtggcgctatttttcatctgtgtggtgacagctcgaccggaaaaaccgccgcactacaggcaggcgcaagcgtgaatggtcaggctgctgagcccggcagcggaagtccaacccaaatccagcgctggaacgcgacctcaaatggactggaattgctgatggtcatgaataatggcaccacattagccctcgatgagctgggttctttcacgggtaaaaattttgctgaaacgctgtatgacattgtgtccggtgcaacgaaatcgagaatggaccctgagactctggggatggcgcgacaatctacgtgggtgcaaaacgtactgtccacgggcgaactgacgattgtagacagaattcggcttgaaaagtctcaggtgatggatggaatgttacatcgtgccctgtcgatccccgtcatggcggaggactcacgcagcgagaatgaaagcattgatgcggccagacaacgtatcagcgatataaagaccagtctgctgacctgccatggtagtgccggctatgagttcgtgcggtgtctgacgcacctggcggatgaaagtgggaactatttcgactggaaaacgacatcagatattatgaagtcatcgctgaacgaatttcatgatgaaatgaaccggcgactgcacgcggggctcactactctcagctctgttgaaagccgggcgctgcgtcgtttcgccattctgtttatgactggagccttcgccgcggactggggtatcctgccatggcagtgctcagacattgctgatgtgacattcgaagcgttcggacgctggttacagcactatcgctgcgatgcaggtcgcaaggagaatatcatgattgccgttcagaactttatcgccgtgaaccgttcaaaattgattgacacaaaaatgccctcttttgcgtctcagaaaaccgatattgccgggtatatactggatgacggaagctatttgctcctccccgatacgctcgataaactgggcaataagtgggggctgtctgcgaaaaatctggcccgcctggtcgatgaggctggctaccttactcgcccggaaggcgatcggctcactgctcgcaggaccatccgcaaagttaatgtgacaggctactgtttctccgccgattttgctaaagcgagactctga

SEQ ID NO: 128520 - DNA, 855 bp, Enterobacter cloacae
gtgaaactggctgagctgttacccgactatatgaagttcgctcttacacacaaaaaatcatatttttctgatttttcaaaaattaataaatacatcctgccccggttgggtgagtttgacatccatgagatgaacaaacgtgacatcgctgcttacttacagagtctggatggcctgagatccagtacaaagaacaggcaccttgcgcttttgaaggcggtcctgacatggggagtagaatacggctatctggatagttcacctgctgccggtatgaaggcttttcgtgaaccagcctcattacgacgggctatggagccgccacaattttctgcttttatgcaggtgctggatgatgacattaagcaggagccccgggacacgcttttaattctggcttttcttgcgctgaccggcatgaggctgggggaggcgcgctctgctgatataaagaatattaacatgagcaagaaaacactgttccttaatgatacaaaatcaggggattcgaggctagtacccttatgccagaaagcaatggatattgttctgctgcagatgagcagatatggcaatgcggggctgctttttcgctcgggagccggtggcagagtcagcgagccccgacggcttatgacggcaatatgtgaaagggcggggattgagcgctttactatccacgagcttcgctataccgccggaagtgcaatgctggctgcgacccgggatgtttatgccgttaaacggtttctcggacataaatgcataagtacgaccaccttatatgcgcggtactttggcattcagcagcacgacgatgtcgaacgcgcaatggcgctgatgctgaaccgctga

SEQ ID NO: 128521 - DNA, 1173 bp, Enterobacter cloacae
atgagtaaaaacgataacgtcgctgatttttctgactttaaacaccctcctgagtggtgtattcagaacagtaaagacatcgagtttattaatgatgtttcggcgacatcattaatcaggaaaatatatggtgcatatcttcctgaagataatgagtcccggagtgatggcagtaaagaaagaagtgtcatgcggtatgtgtcgatacgcaatgtgtttgaacgacttgactgtattttcgctgaggcattgcaacatggcgtagcgtcagatgatgctcgtgcaaattataataaagaaagatttcatgctaaccgtcaggcgcagcttatcaaccaccttatgctgtattctttttgctatcagaagctcaatgattttcaccgatattatatagactatattaaatcgctggccgataaggccaggaacagggagctttctctggttgattcaggagaagtgatagtgaaatcattcttcccttctgaaaaagaacctgtactggaagggatctgttctaatggctggaatgcaatgcccattaaatggcaggcatcatcagataaaatttataaaatatttgataaaggctttagtgaggtggtcagtgactactgccaggatggagtgtcattacagtttctggattatgtcagtggtgtgataaaactgattgacgaaagcatcagtaagttgacggagttatattatcaagggatgagcgagaatgatgctggctataattattatgagaaaaaaacagcatttgatacctttttcctttttagcgttgttcgctatgttttatcaaaagagaataaaagagtgttgagtatgccctcattttttatcaaggctcgttatgttattaacgtgcccgaagtgcgtaaaaaaatgaagaagttgcgggattttatcctgatagatatatgctataaggatttgcaatcagcaggtaatgaggttacctgggctgaactttacgaccacctcctgaaattgcttgcaaaataccacaatcaacgttccagacctgccgaagcgagtttgattgctcttaaggttttctatgatggaagcatgccagataagagcattatccagagccttgagaggaacttatgtccacttgaccggatggaagaccgaattaagcgcaccttcaggtag

SEQ ID NO: 128522 - DNA, 375 bp, Enterobacter cloacae
atgcacattatacagtctccggcagacgctttctgcctgcccgtgccaccggttcagcaattgcaactggtaaacgaactcacagaatgcgctgacagcagcctcactgcgacaacggcactgtgggaggaaacgcaaacccaactgctgtatctgcttcccggcgaggagaagcacctttctgaacaactgaccacttacctgcaccatctggcctgcaatgccgaatacgtcatccgtctggatgattcgctgtttcttgccctgaccattctcagtgactcagggcagggcttttatctgctgttcccgtcgtcagcgacctttaccggggccgctgaacttatcgctatggctgaaccttcaggatattaa

SEQ ID NO: 128523 - DNA, 438 bp, Enterobacter cloacae
atgaaaaagaccaaacccgcaccagtctccactgctgaaacccaaaacgacctctgcgttcttaccggcgaggctgagaaaattaatccgcattccactggtctgttgcactgggagatgacagaaaatctggacggcgagcgagggttgcgcattagcgccaacgacagtggcggtctgttctcccgggaatggattgccctgagtgctatatctggcgttctgaaagcccatgaagccgctgatttcacctccacggctctgcgcccgttgtttaccagcgccagccgcaataatgcgggtttcctcgccgccattcttcgctgtgctgatatctgtctcaccgaagagggttcaggcggggcattcagccatcgctgttacccggactgggaaaagcgactggaaaaactgctgataattcccctttcttcttga

SEQ ID NO: 128524 - DNA, 696 bp, Enterobacter cloacae
ttggcagccaatgatactgtaagggacacggttaaaaacttaggtgaagcggcaggagagcaaatcaagagtcgcttaaaaagtcattacttcagttatattctgacatctttagttgcctacaactggcaaaatatacttgtattgctgaaatccaccaaaacgattgaggaaatacttgaaacgtggaataaaacgcctggatttacctttgattacttcattttccccgtaatgattggttatatggcctcattcatactacctatgcttgctatccctgtagcgtggataacttctctggtggctgagaatattgatatagctgacgtatgggcaaaaaacgtcattgaacgtactaaacaaagaatgaaaaaaagaacatctgattctcaattacgagcaataaactcctcagatacattagcgaaaacaagacacgaattagaattcaatcaactcaaaataaataacatgttaatgcaaaaggaaatgcttgaagattatttaatctcgctagctcacacttataatatcacccctaccatatctaatgaagatgattttgaacgattttttgagttggtaaaggaaaaagggttacttcatacctatccagccaattcaatagtcagacttatggtggataatatctattatcttagaggcaatcgtgaagatcctcccgcaacataa

SEQ ID NO: 128525 - DNA, 135 bp, Enterobacter cloacae
atgaaagacggtttcttaagtgcgaacttatcggtaagttactacttaaatatcttactctctgtttctcttgaagcgatgttctctgccgattttgataaatctcccattcttacttcacagcagcatatttaa

SEQ ID NO: 128526 - DNA, 237 bp, Enterobacter cloacae
atggcgaaattactcctgcaggaaaaaataaaacgcgcccgtgagccattaatgagggagagcaaagcgctctcccatcgattattgattgactgccacagtttgatgatgccacttttaataacaagtaaatgtgcttattgttcttctgtgcaatggcttgtgctggatttttattattacagcagtgagaacgttaatctcaacgccaaaattaaatatgctgctgtgaagtaa

SEQ ID NO: 128527 - DNA, 594 bp, Enterobacter cloacae
atgataaatttaatccctattggaaaagtcatatccttgattgctgtcgcctatgcagttatatgctgtcttattttatgggccgtatacgatgaaaatatggatttttcatctgctgtatcaattgcaacaggaggttctctacttctcaatgcccttttgttgtcacttttttactttggttggcgctggctatggaaaactttacctatattaaacgatctgctcttccctgatttaaatggaacttgggatatggttatccattgggaatggggagataaaaaaggtacatcacgagcaaatgcaacgattaagcaaacctttcttaaaattggaatggatgttgaagctgaaggctcagactcacaaacgttggtggctaaacctaagaaggatgaagaaactgggcgagcagtactctattatgtttttttaacaactcctaaacataaagcaaattttgacgaagaagccccgtatagaggaacggcaattcttaaactaagcctaaaaggtaaacgcatacttaatgggaactacttcacaagccgtaaaactgttggccattacgagctaacacgcattgactaa

SEQ ID NO: 128528 - DNA, 1089 bp, Enterobacter cloacae
atgggcgactctcaaaaacagttcaaaatactgtccctaaatggtggcggtgttcgcggtttgttctcgataactattctcgctgaacttgaaagagttttggctgagcgtaccaacaatcctgatctggccataggtagctactttgacatgatcacaggtgcctctattggcgggatcattgcgattgctttagctgacggacagaaagccagagatttacagattaaatttcataccgctgccccagcaatcttccctcgatataattggattcccggctggctacgaggtatccatcaatttgttaaacgcttatggtgccccctctacaatgctgcacatcttaaaaaagaagtaacggggattataggagatggcaaaacggtaaggatgcttaaacgacgcctgctaatccctacgatcaaccttagtacaggtcgtcctttatacatcaaaacctgccataattctcgattcacaagggatgaccaatttaatctaatagatgttgcaatggctacatctgctgcgcctacatatttcctgcctcattatattgaaaaccagagcgcctattttgctgatggagggttattggcaaacaacccttcctttgtcgcttaccacgaagcactcaactaccttgacgatcaagagtttttgggcttggcaccagaagatatcaaaattctaaatatcggtaccctatcgaatgatttctgtatcaatcccaacaatatcactaaattatcaccaggttacgttgggctatggggcggaggcaaagcactcatagaaactgtcatgtcttcctctcagaaaatgcatggcttcatggcaaacaaaacactcaatcatgaaggtgccccccagcgatatttctcacttgatgaaacagtacccgatcaacaggcacaactcatatcactggataacgcgagtactgaatcattgaaagctcttgtagcctggggaaaatcagtcgcaacaacggcaaccggtgatgataacctctttaagacattctttagcatgaaggctccggctttcatccatccacttgatcgtaaggaaaaaccagaatga

SEQ ID NO: 128529 - DNA, 1311 bp, Enterobacter cloacae
atgaagtggtcagcacacttatatttaagcagttccaatgatggtcttatgaaaaggctggaaccaaccagagaggatgttactttccttgaaaaacttaaaacgactataagagctcgcacaaaagacgttttcgaagaagcaaaagatgtcatcaaaatgctgatcaaaacgcctaataactcaattaatatgctttttgtggaaaatgcggttcagaatacctttttgcgctaccttgaccccgaagatattcaacaggtcgcaaaacttctttttaatatgagtgatgatgctcgcaaagcattcttgagcacagagcccagattttgggttcaaggaagttataattataaaacgttaaataaaccataccacctgcctccacagcagatggacatcgatgatggtacatacatgccaatggaaatgttcaaagaacaaccattggtgggacaccgcttgctactcttactggttgatgcctccttagcatcgttagccaaagaaaatgtcggctggatagcatccaaattacctaattgcggacgaatcattgttaaagaaaaagatgtgcatgtagacgtcccaatgtatgcaatccccaaagagcaatttgtggcccgagaagttgctgcatcaagaataacgatggattccatggatgccataacagcgaatgaaagctatcggtctaaatcggcaaaagtacaacttgaagaagactgtgtttatctcgctgtcaggggaaatgataaatggataaaatccgatccagaaactgttgctcgctggttcaggaaagcagtaagtcgtcacaaagaaccaatgcgtcaaatctgccgctatttgaaagcctggcgtgacgtccagtgggaacacccagacttatcttcaatcgctctcatgaagtgtgttgttgatacttttaataacatcgaaatgccaaactcactggatcacagcgagcttctgttaactgtaacagaaaggttgccagctcagctaacagagggggttaaaagtccagacacatctgatgatgggcgcttattgttccctaaagcaaatatggacaaagctgctatcaataagattatttccaaggccgaagagttgcattcaacactcaatacagcacttaaagactcaccgacaaaaaaacagacactgcaacttttaaatgaactgttcggggatggggtcttgaatgaggagataatcaagccttgggcttcaatgccagcctatcaacaaccgcgacaacctcagccgcaaaaccaaatgaaagattctatgacgagcggttaa

SEQ ID NO: 128530 - DNA, 1722 bp, Enterobacter cloacae
gtgactatccataatcttttcctgcaaagcggctttcaatattctgaaagccgctacattaccgatctgccagttaccttgcacagggactgggatgtttacaccaaaatctaccagaccaaggagggtaactttactgttgccgtcatagatccagatgaagattttagtcaccttccggaagtttatattctcagtaggccagaaaagtttattaatatagcccttccacacatcagtagttttcagagattatgtcttgtaaatcaagacaccgctgactggaatccacagtatcccccagcagtaattgagatgctagatcaccttatacggcaagccctgaataatgctgtctctgctggagatctgcgacaaatggaatttcggggagaatttgtaaattattgggatgggcttattgatgcctatatttatgggaatgcaggtgtactttcaagtgaagacttctcctacagatccctgcaagctgtaacctcaagtggaggacaagctagcaaggaaatagttatattcactgactcccagcaaagggacgattggtacaggctacgaaaccaagaattaactctggaaaaagacagcaatgtgacaattgtcagagtagctcataacgatttagctcctgtcagatggcctccagaatcacttagcgaagtttttgattggcttaaatctgctgaccttgctgcccatgattccctcgcgagaggaatactcaaaaatttaactaaagacaggcagatcgctttactggatatcgctaatgagggaataattggttttgagatcaactttcagtcaagtgcacgtactgttttgcaacaccacacccaaagaaaaaccaagcctggtggaaaaaagaatgggcaaaagcttcgttcagtcctcccgatgttaagagcaaaacacgcaacaagtgcaatactgcgcctgagtgttcgttcaataagtagacaagaaatacaacaaagaaaccgcgttgcccctctagatcttgagaataagaaaatcctaataatcggctgtggaacaatcgggggctttgctgcccaactactgactaaagttggtgccggacgaggaagcataggcaaactaaccctctgcgatggagatttcttatcgccaggtaatcttagcaggcatgctctaccagcaacttatataggctggaataaatctgaagcattgagtgaatatcttaaacgagacgccttaggtcgtctgaacatccatgcactgccatatcgtatggaaatgaaagaagaaaagattcatggctatgatattgtaattgatgcaacaggacatgcacccacaggtaaaatgcttagccatttaatgcgcagctcgcctcgacgtccaccttttctcattcacgggtataacgacgcctatggtatggcatctgttgtgatgatcgatgatgggaaggcctgttatggctgtactcaacagcttacggtactcagcgaatccaacaagcccccctcaccctatcgtaactcttgtggcagcgtttttacgccttatgacgcaagtgtgagtacaatcacagcagcactgattcaggaagctgttttgaatactctcaatgaaaaactaccatggacctacgctcagcattcaacaggtaaagttgtacatcataaacgacgaaagctagccaaatatggaggttgtagtgtttgctcctga

SEQ ID NO: 128531 - DNA, 483 bp, Enterobacter cloacae
gtgtttgctcctgatctcaattccgagctggtcctaagaaatcagagcggaggattagttattgttgaaaccgctgcactgagagctttaaataaatatcgccaattgcataagaatcagtgcgaacaaggtggggttctaatcggagaagttcgcccacctcatataatcatcactcatatcacagaaccaggccctgctgatattgcaactcgctttggctttactcgtaaaaaacaacaccatcaacatcaagttgatcaacactggttaacgtctggcggcttccttacctatataggcgaatggcacacacaccctgaaccaaatccaacgccttcttgcatcgatctttcaagctggagaaaagggttaccctacgacagaccatctatcgtagttatcattggtcagcaacttgactggtggggttattatgagaaaggcaaatgcttaacactcgccaatgaacatgcgggttga

SEQ ID NO: 128532 - DNA, 543 bp, Enterobacter cloacae
gtgtcacccaacaggctccagcgacagttcaatccggatgctcctgatgagcgttgggtaacggacataacctacatcaggacccacgaaggctggctgtatcttgccgttgttgttgatctgttctcacgcaaaattatcggctggtccatgcaatcccggatgacaaaggacattgtcctgaacgcactgctgatggctgtatggcggcgtaatcccgaaaaacaggtgctggttcattcggatcagggcagtcagtacacaagccatgagtggcagtcgttcctgaaatcacacggcctggagggtagcatgagccgtcgcggtaactgccatgataatgcggttgcagaaagttttttccagttgttgaaacgtgaacggataaagaaaaagatctacggaacgcgggaagaagcccgcagtgatatttttgattacatcgaaatgttttataacagtaagcgtcggcatggttctagcgaacagatgtcaccgacagaatatgaaaaccagtattatcaacggctcggaagtgtctag

SEQ ID NO: 128533 - DNA, 339 bp, Enterobacter cloacae
atgagcggtaagcgttatcctgaagagtttaaaactgaagcagtcaaacaggttgttgatcgcggttattctgttgccagcgttgcaacacgtctcgatatcaccacccacagcctttatgcctggataaagaagtacggtccggattcttccactaataaagaacagtcagatgctcaggccgagatccgccgtctccagaaagagctgaaacgggttaccgacgaacgggacatattaaaaaaagccgctgtagattcaatctgtcaatgcaacacccctttcaattatctctttcggtgttttgaacttcagtgtctttctcggtctgttgtttag

SEQ ID NO: 128534 - DNA, 927 bp, Enterobacter cloacae
atggtttacgaaaatgaattgtggcacagttttcttctgcgttcacagataatgtataacttatccaattgcaggaacataatatctaagcatggtgaactaaggtacgatgcctttcctcggctcgaactgattgatatgtacaaattgcatagtttgcaggatatatatgacattcttgccacaagaaatggttatatactaacttccaatatagtgtcgttatcttctggtgtttacgggtatttcaacgctgttgaagatgcctgtcgaaataatttacacataactaattcatatccattggtaaacatctcaaagattcgttactgccataaatgtattattgaagatatacactctaaaggcattggttatcttcgtcatagatggttgtttgaatctaaatgtgcagctcatagtacctgtttatatgaggtttgttttgacaactatttggatgcagtgaaaggacttagtgacttaattataagtggaataaatcctcatggttattgttcccttgtggttgacatttcaaatcctttcaaaactccagtgtatttattgccatgtgccagggataaaattttaaaatggatttctgacaataaaaatgagctggtttactttctctttgacctctttaaaagtaaatcgcattctagtttattaaaggttattgaagtcaggataatgcatagtagttatatttctgcggtgttcaggatattgagtgaggttaatttttgtaatttcaactcatttattaccgatttattcgaggacgtaagttatgcctctgttggacttgatgattattctgttaatgtggattttctcaggctaaaagccgcagattgcaaattttgccggttcaatggtaaaaatttttgctcactttttaatgtaaagcttcttcgctaa

SEQ ID NO: 128535 - DNA, 1827 bp, Enterobacter cloacae
atgcggctcagaaaattaaaactgaaaaacttcagaggctacagaaactctactgaaatcattattgatgaaagcatgacgggtattgtcggtcgtaatgactttgggaagtcaacgattctggaagcgctggctattttttttgaaacagaaggaatgaaggctgacaagaatgacatgaactgtttcagcctaagagaaggggacggccgttttgaaatagcctgtgaatttgatgacctgcccgattttatcatgatcgacgacagggtgcagaccacgctcgcctcagaacatctgctgaatgaagacggcaattttgaaatcgtcaaaacgtttaaagcaacgacttcaggaaaaccggagcagacctgcatccgctgcatccatcccgaagaggagcccctgagaaacttactggcaatgaaaatttccgagctcagggcggtgggaaaagaagctgaaaaaaatgtggcggataaacgcactgcatcgttatggcgtcaggccatcagggaagccgccgctccctatacctgttctgaaatgttgctggatgtcgataaagagtttggaaccgacacaaaatcattatggggtaagatcctcgatttgctgcccacgtatgcgattttcaaagccgacagggaaagcagcgacggggattcagaagctaaaaaccccttacagcaggccgtaaaagacgctcaggctgcgctgcaggacaaaattacagcgctggaaaatgagatccaggacagcgtactggatgtcgcacagagaacgctggataaattacgtgaaatggcccccgaactcgccagtgaactgactccacgatttaaggagaaacccaagtggaccttcagtttcaccctggacggggaaaatggcatccccatcaataagcgcggcagcgggataaggaggcttatcctgttgaattttttccgggctgaggccgagaagcatgtcgcggggacgctcagaaatgtgatttatgccatagaggagcctgaaacgtcacagcatccgaactatcagatgatgctgatgaaagcgttactggcactggcaggccagccgcaccgtcagattatcgtcaccacccatgtcccggcgctggccggattgatccctgtcgaaggcgtacgttatgtcacccgaaatgaggcgggtgaacccgtagtaaaaatgccggatgacgctgtgctgaaggaagccactgaaagcctgggggtgctgccagagaccggtatggaaagggcgcaggggatagttctggtagagggaaagtcggatgtcactttcctgaggcatgcggccagttcattaaaacagtcaggtatgttgccagcctctctggaggacgtgaaaatagtgccagtcctcataggagggtgtggcagcgtcaaacactgggtgacattgaatctggccaacgatctggggcttccctggtgcgtatttctggactccgatattgggggagaccctgcacaggttctgtccattcagaaacgtaaaaaagaagtggaggatgccggtaaggtattcttcgccacgcgcaaacgtgaaatagagaactatctctgcccggatctgattgaagaaatgaccggtgtagccgtcacgtttacggacacctgtgatgctaaaaaaataattggccgggcggtgggaatgaaacccgataatgtgcttgataaattctggccccggatgacagcggaaagaatcatctcaagatcaacctatcatgacggaatgcaggaaaggattgagctggttgagatcctgagcgatattgttgccatgacgagataa

SEQ ID NO: 128536 - DNA, 351 bp, Enterobacter cloacae; identical to SEQ ID NO: 86216

SEQ ID NO: 128537 - DNA, 330 bp, Enterobacter cloacae
gtgggagatgaagcgattgtcgccatcacgcgccagcttcagctgaccctacgctcaggcgattatattggccgttttggcggggatgagttcgcggtgatcatgtccggcacgcctgccgacagcgcgattgctgcgatgtcgcgcgtccacgaacggctggtcaacatgccgctgcacggagcacctatggcgaggttgtgtatcagcgttggggttgccccctggggggcgcagttcacccactatcgtgaatggctaaaggcggcggacgtggccctctataaagccaaaaatgccggacggggccgcaccgaagtggccgcctga

SEQ ID NO: 128538 - DNA, 636 bp, Enterobacter cloacae
atgagtagcgaactggcatctggtttaattggtgctctcattggtggtcttttcaccttatgggggacgctcatcgatgggcgcagacaagaaagagccttggatcatgaagcaaaagataaacaaaaaagtgtgttggtaggtattaaagcagaaatagaaacgttactcgagctttataaaaaaagaatatatgactctctcgaagagtatgaaggtggaaaaccatttgaaaatatatttccgctaacacaaaattacttctctttctatgaaagtaattcttttgccttaacgtccatcaatgaaaacacgatgaaatcaattgttatttgctatggttcagcaagaagtcttgtggatactttcagaatgaataatcaaatattggaggatttatctaaactccaaacaatatatcatgatacccagaaggatattcatcgattcaactttgagcagacctttcatattgcaaccaagtatggagaggggttgaaacagattcatagtgaggttatgtcaagaataaccctctgtttagaaagtattgatgataatttggctgatctcgaaaaaacagaacaactcacgaaactgagaaaaattcttaaaactttggcatttataaaataa

SEQ ID NO: 128539 - DNA, 210 bp, Enterobacter cloacae
atggcaatcagtgatcatgagtatgtgaatttttctgaagatcatgaaatgaactatcacgctaagaaagtaaataaaagagaaactgcttccaatagaagtaccttaagaactatggggacagagctcaagtcatctcttggaaaagcaagactgactcatggcgaattccatccatatgtcaataaaaataaatctcgacttgaataa

SEQ ID NO: 128540 - DNA, 561 bp, Enterobacter cloacae
atgaagaaggtcgaaccagtcagagacaaagagaagatcgcagaggttgaaagactgctgcgtcagaataacagcagcgctatctacggtgatttgtgggtattcctgaatcagacagcggcgcgtattggtgacgctgtcaggttgcgctataccgactttaatcacatcgaagggaacgtgttgaacctgaaggaacagaagacagggaaaatccgctcgatcatgctgactgccaaagcgcttgaactggtagcacaacgccgtgctgataatcctggtcatgaatacctgttcgaagtggacagcaaccgggccaaaggaaaaccgatcagccgggtgacggtctcagccaaattcaaagaagccggggatatgctcaatttgcacattgcggcgcacagtccacgcaagaaccttggctatcacgccataaaacgtggggtaagtctgccgacgctcacgaagctgtacgggcattcatcgcaggcggtaacgctggcgtattgtgggatcatggataaggatgtcgaagacgttttccagactatagattattga

SEQ ID NO: 128541 - DNA, 372 bp, Enterobacter cloacae
atggaaatcgtccaaggtaaagacagctttaacgagatggcgaccggaattctggtgaaacttttcgcggactatccgttttactcatctttcgacttttcagacttcggctggaagcccagaggagacagaactcaaattgacctgctttgcaacacactccaggctctcagcgatatgggttacacggagataatctcttcaaccgacatggacaccgccgctaagttaacaccccgtggtttgaatttacttcaacagcaggcaccgggtgcaggcgatgcagttattaacgttctcaaaggagcagcaggtgagacccgctctgcggtaatcggtgccatcatcggttggattttcggcgggaaataa

SEQ ID NO: 128542 - DNA, 156 bp, Enterobacter cloacae
atgattaatttacgcttcacacctgaattattcaccatcatccgtgccaacgcggcggctgaagggatcggggtcggcctttacttggtacggctcatcgaaaacacgttaattccaaaaaatgggagagaaaatgacagaagcagtaaaaactaa

SEQ ID NO: 128543 - DNA, 834 bp, Enterobacter cloacae
atgacagaagcagtaaaaactaagctctacaaatcactaccgcagccgaacgaagacaaaccgatcacggttgatacattctccccctgtacggttctactttctcgaatccgtgactttaatggggtaaaaatcgacattaatattgtcgcagtatacggctaccttctggggtggaagaaaaccactgggcgagtaacggtatcaatcccccggattagtgatgattgcgcggggatctcagaatctacggtgaaacgtgctcgtaaagcacttaaaaaaatgggatggatagattggaaaacaatccctgacgagggcaaaagcaacacttctcactgtatctataccgtcaaagatcccgaggacatactagctgaactcaacgctggattgtcacagcagggtgatgcagtagttaccatcgcaaaaaaacataaagttacaaccgaagagagcggtaaagatgaacaaaaacgtgatgtggaatcttccgtgttggaacctgccgcgcctgttgctggaaaaccagacggcgtacctgttgtggatgttcctgtcgatgttgatgtacctgccaatgatgatgcgatgaacgcttctgataggtataccgatgaacaattaggcaccaagctgaggcgatggcgcaattggggactggatgaagaagcaaaagcgttttgtctctctcatggtatcagcagcgatgaggacagcatgaatctgtttattcaaaattatcatgtacccgcaccggcgtcagtagaacaacaggttaacgccccagcagatgagctgccgcttgatcatgatgacccgatccctttctga

SEQ ID NO: 128544 - DNA, 522 bp, Enterobacter cloacae
ttgtgtgatgttgccaacagcctgacggctgaaacccttacggtgcgaagcactttacccgaggtaaatacctccggcgctgaaacccctgacttgtcccgtttttacaaatcccgctctcgtgatacctcgttgatcgagactgctaaaaaaatgctcgttcacggttacaccccaggcaaaacggcgctgctcctacgcttgccgtatgacctggtaaaaggcctttacgataactcgtggaatcctcgctgtcgcaagataagtaataccagtcagtacgccactaagcgaatggcccgaatgtactacgaatccggcgcaatgcttgcaaaaatctgtgctgaccttcaactgcctctattcaccgtggtaacgcttcttaagcgtgaaggaataaccgaaaaagaaatggcatctcgaatgccggatcagcatgatccgttgtttgtggcctatcgtgaaacagtcgccagaaaacagaagaacccgcagcggcgttcaccacgcctgcactactaa

SEQ ID NO: 128545 - DNA, 333 bp, Enterobacter cloacae
atgacactaagcatccgagatcggatttttgccgctatgcatggcatgtcagcagaacagtatgcattggaaaaggcgcgggataatctaaagagcgtcaccgcccagcacttagaaaagcatcctgaatacctcaaatcatccccggtggatacgcccaccaaggttaaacggatctctaaatcgttgggggctgatagtcgtccggtggtaagtcataccgctgaccatatcgatcctgaaatgctggcgaaggctaaagcagcggctgctgctctcgcaaaatctgatcctgatcgttacggcaatatcatcaagcagcagggggtgtga

SEQ ID NO: 128546 - DNA, 2154 bp, Enterobacter cloacae
atggcgaatggcaatatcatagtgactgaaaccgtaaacgaggtgacatggtctgtcgatcggacagccttcggtcgcgccctgaaagctgttaaatccatcaaggcagctcacgagaaaccagctaaagcgcttgagaaggcccagaagcggaccgtccagagtgagggcaaagcagcattagccgctgcaaaagcccagactgcgaagcttcgacaggctgaacaattgtcaaaacagcagcagaaacaagctcagattcaggccaaaatggagcgggatgcagtcgcccacgccaataaaatgacctcattacaggctcgccagttatctcagcaggagcaggcaactcgtcaatctgccagactagcggctatttctgcaaaagtgcaggccgcagccagatcacgagcgatgacctacaatcccaacatgcctggagttcactccgatccatctctggtggcacgtcagactgaagcaatgaaccgtggtcacggcgctgttgctgctgacatcgcagccaccaaaaaggcgatggccctggaagagaagcgccagcgtgagaaagaggcggcttttaaacgacaaatcaccgctcacgatacactccgcagggcaagcttgacgatcagccatatcgaagctgcattcctggctgacaaaatgaaagcggtgcaggccattaaagaggccactaagggatacgccgagcagcgttataccatcgcagaaatgcgccatgaacttgctaaagcgactctggaaaccagacgccaggcgcgtattaaccgccagattgttaaagataaagcgaaagccgagcgagcagggcgcatcaatgctcaacgtctgacccgtgaacgtagcgaacgtggttatggtggccttgctgccactggtgtaattgcaggtggtgccctgattggctcaatgggtgttgctcgtgttggtcagaccctacaagggagtttagaacgcaaccaacagatgaaggctctacagtcgcagggtatttcacgtctggaatatgaagccgtgcgtgatgttgtcgctaacaaaaccggctttaatgtctcgcctgacaagatgctggatttccaagccgactttagagataaggtgggccagttaacggctaacggagtctggaagaccgacaagagcggcaaggcgacgttgtccggtggtggtgaactaggcgaccttatcaatgctatcgctggcaaatccaatgcagcgacggcgaagcgcgttgttaaggaactggaccggctcgatttcaatacgttccttgtgtacctcaaagatctccaaaaaacgttcagattttccgataaggaattagctgcattcggcgagagtatcaacgacgcgagcaaggttttacccgcctttgctgatggtggtgatgctgttcagaaacgcatggatgacctcgcccgtaatggttacgccctgtcagacgcgcagcaggaacagttaaaccgtttgggtgctctctctgttgaatattccaggatcagtaattcgttgagtgatgttttttccagcggtttcacatctggccttggagaatacgcaaccaataccgacaacctaagtaaaggtatggcgggcctcgttcctattatggatagttttgggaaagccataggccaagcgactgctgatatgttgtcatttgccggaagggtgggccaacgtgtcaacgagggtgcaacactgccggatgcagtctacaacaccgttgtggatgactctgcaaatagcaccgccgattggattaaggaaaagacaggatttgatccacgtagcatcggtcagacgcttaagcagatttatccgtggctggatagttcagcactaggcaatattggctcaggcacggcgtataacgatccggcgctagcgttgaatgttccaggtctaaactatcaaacaccccagcaaccaacgtttacggttccgacaattgatagcatagttcagcgacagccgctctctgttgcggttacaggcgaagccgagatcaagcttgcgcctcttcaggtgaatgttaatgatggtgcgattaacggtctgattgatacaaagctgagggactacgaacaggcccaaaacaaccttattcttgcggttgcggagggataa

SEQ ID NO: 128547 - DNA, 624 bp, Enterobacter cloacae
atgactcaacgaattcagcagattcaacaaattgtaaatgagcgtaacatcaaatgtctttttcacttcactcgggttgaaaatctggaaggcattatggctagaggtatagtacctatagccattttaaaacaatatcaaatacctgtattgagtaatgatgaatttcggtgggatggccgtactaacgcatcttcactttcgatttcattcccaaattcattgatgttctacaaatgccgtcaagccgacacacaggctaactgggtcgtgcttggtttatacccctcaattttatgggaaaaaaactgtgcgttttgcaaccgcaatgcagcaacaagagaaatcagtaatcaaccattagttaacttgcaatcaccagcatcattagctggaatgttcgatgagctacaaggttttgatagtcgcgaagcgcgaggattaaaactcagccagactactgatgttcaggcagaagtgttagtatttgatatcattgaaccacaatacatcatcggtggtgtattcaataaatctgatgtcaaggccacttacgagagattccttgaaggaaaggaatcccatcttcaagggcttaacagcggatacttttaccgccgataa

SEQ ID NO: 128548 - DNA, 522 bp, Enterobacter cloacae
atgaaaacgctgtccttactgctttttaccctccttcccctgaccggccatgctgaactgaatgtgattgctgatctgggcggtgaagatgctgcgccgtattttgaggccgttaataaacagcccggtatgagcacgggaaacgacacaacatcttcacccccgtcacccgtgctgcagggcgaggccgccatgctgccggtattcacgccggagttgcgcccgggcagcattgccgaccggccgctgcagctgcccggcatcggggcgttgtttctggtcggggatgatgccctgtcccgtgaatggctgaaggctaatgccggtgagctggctgaacagcatgcggccgggatgatagtcaacgtcacggatatggctaccgtgcgtgagctgcgcgagctggcacccggtgtcagtctggccccggcttccggcagcgagctggcccgtcgcctgcagattgcgcattatccggtacttatcaccgataccggcctgacgcagcaggttaagccgtaa

SEQ ID NO: 128549 - DNA, 183 bp, Enterobacter cloacae
atgaaacactctccacaacgtaatgcagctattctcaatcttcatgcccgtactatgcagataaacggcactgtcgatgaaaaggttgagcagttgcgcaaaatgtttgctcagagttcaacacgaactaaggatgacaggaagcaccgtggggatcgagaaaaggtatattacgaaggctga

SEQ ID NO: 128550 - DNA, 549 bp, Enterobacter cloacae
gtggggatcgagaaaaggtatattacgaaggctgagtttagcgaagattttgtaaaagccagtgaagactttaagtacggttatgatgttatctctaaagtaaatgtcaaaactggccagtcaatcttgcgctacgcagtccgtctccagcagaaatggaatgatgagaattgtattctcatttatgatcatgacgatgacaagctctggggcagagtaaaggcatctgactcaaaagatgatgccggcataagctggtatcttggtttttttcatggacgagttgaagcatggaaaaacgatcccctaattgtaatatcgtttcgtgatgaaattatccctgccccgcaaggatttgataagggatttgagctggcggttatacatgcaatcagcgatcacccaaccctcttcggggaaaattgggaaaagaaacttccagaacacatgcgcgaaaagcgtaaacaaaatgctcatactctcaattacttcgtggatgtaaacagttctgattctgacggcagccctgatgagtcatccccaacttaa

SEQ ID NO: 128551 - DNA, 306 bp, Enterobacter cloacae; identical to SEQ ID NO: 82736

SEQ ID NO: 128552 - DNA, 795 bp, Enterobacter cloacae; identical to SEQ ID NO: 82735

SEQ ID NO: 128553 - DNA, 1173 bp, Enterobacter cloacae; identical to SEQ ID NO: 82734

SEQ ID NO: 128554 - DNA, 273 bp, Enterobacter cloacae; identical to SEQ ID NO: 82733

SEQ ID NO: 128555 - DNA, 594 bp, Enterobacter cloacae
atggacgaaaaatcgctctatgcccacatccttaacctgactgctccatggcaggttaaatcccttaccctcgatgaaaatgcaggttccgttactgttacagtcggaatcgctgaaaacattcagttaacctgcccgacctgcggtaaatcctgccctgttcacgatcaccgacatcgtaaatggcgtcaccttgatacctgccagttcgccaccctggttgaagccgatgtcccccgaatcatgtgcccggaccatggttgtcagaccctgcctgttccatgggcgggaccgggaagccgctacacgctgttgttcgagtcgttcgtcatctcatggctgaaaatcagcaccgtcgatgccgtcaggaaacagctgaggctgagctggaatgccgtcgataacattatgcagcgggcggttaagcgtggactcgcccgccgtaaagccccgcagtcagcacgtcacctctgtgttgatgaggtcgccttcaaaaagggtcatcagtacgtcacggttatctctgatacacagggacaggccctggagctcagggatgatcgcggggttgaaagcctggcgggttacctctag

SEQ ID NO: 128556 - DNA, 519 bp, Enterobacter cloacae
atgagtgtgccgcaaacaaaagctgaactgcttttagctattgataaaaatttcagtaaattaattagttacctcaaagcaatcccgccagaaattacctccgataactcaatggatggacacgctaaaggaacagagatgagtgttcgtgacctcgtttcgtatctgatcggatggaatgctcttgttgtaaagtggatcacttctgatgctaaaggtctgcctgtcgactttccggaaactggctataaatggaatcagcttggccttcttgctcaaaaattttactcagattacagtgggttaacttatgaattgttaataattgaacttcagactgtaaaaaatgaacttgtgaagcttattgatgagcgtaccgatgatattttgtatggaagaccatggtacacaaaatggacgatggggagaatgatctcatttaatacatcttcgccttatgctaacgctaatggaagattaagaaagtgggcaaaaaataataatatcagtttaaagtaa

SEQ ID NO: 128557 - DNA, 192 bp, Enterobacter cloacae; identical to SEQ ID NO: 82784

SEQ ID NO: 128558 - DNA, 3168 bp, Enterobacter cloacae
atgaaattccctcatttctttatacagcgacccatttttgcaatcgtcctttcactatttatgctgatagcgggtgccttagccttctttcaattgccactcagcgaatatccttctgtaactcccccaacagtgcaggtgactgcaagttatcctggggcgaatcctaatgttatagctgataccgtagctgctcctcttgagcaggctatcaacggggtagaagggatgctatacatgagctctcagacttcgtctgatggccgtatggtgttaactatctcattcaggcaaggtaccgatccagatattgcgcaaattcaggttcagaatcgtgtatccagggctttacctcgactgccatctgaagttcagcaaatcggcgttgtaacggaaaaaacctcgccggatatactcatggtagttcatctgttctcaccagataatcgatacaatccgctttatgtatctaactatgcgatgttgaacgtgcgtgatgagctttctcgcttacctggtatcgctagtattgcgctttggggggagggtgaatatgcaatgcgagtttggcttgatcctaataaaattgcttccagaggtttgaccgcaagcgatgtcacttcagcaattaaagaacaaaacgttcaggtagcggcagggtcagttggacaacagcctaatacttcatcctccttccaggtcacagtaaatgcgttagggcgtctgacaaccgaggagcaattcggcgatattattattaagtcaggaactgatggccaggttactcgcctacgtgatgtagccaggattgagctcggttcagataactattcgttacgaagtctgctggataataaagatgctgtaggtatgcagattgtaatgacacctggagccaatgcgctggacgtatcagcatctgtacggtcaacgatggaacgcctgaaagaaaaatttcccgaaggtattcagtatagtatcgcgtatgacccaacattttttgctagcgcatcgttgaaatctgttgcaacgactttactggaagcaacaatcctcgtggtgcttgtcgttatgttatttctacaaacatggcgagcatcgattattccattagttgccgtgccgatttcactagtaggcacctttgcgttaatggatgtattcggattttctctcaatacgttatcgttgtttggccttgttctttcaattggcatcgttgtggatgatgcgatcgtcgttgttgagaacgtagagcgacatattgcaaggggactatcacctaaagatgcagccagaaaggcaatggatgaagtaacgggtcctatattagctattacttctgtactggctgcagtatttattccttcagcgtttctttcgggattacagggagaattttatcgtcaattcgcgttgacgattgccatctcgaccatcctgtcggcgatcaactctttaacgttatctccagcactggcttctgtactgcttaaaccacatcaaggtacagataaaaaagacatgctgactcgggtgttggagcgccttttaggttcgttcttcggccgtttcaacacatttttcgacaggttatcggaaaagtacgtagatactgtaagacgtatagttcgcgggagtactatagtcctgattttgtatgctggttttctggcaatgactttcctgggattcaagcaagttccgggtggctttgttccggcgcaggataagtattatctcgttggtatagcgcagttgccgacaggagcctcgctggacagaacagaagcagtcgttaaggaaatgaccagacttgcattagctcagcctggagtggaaagcgtggttgcatttccaggtttatctgtaaacgggccaaacatgccgaactcagctttgatgtttacgatgctgaagccttttaaggatcgtcaggacccttccttatctgcatatgccatagctggtagccttatggggaaatttagcaaaatacctgatggttttgttgggatattcccaccaccacctgttccaggtttgggaagtatgggcgggttcaaactccaaattgaggacagagcaggattaggttttgaagaactggcccgagtgcaaggaacgatcatggctaaagccatgcaaactccagaattagctgggatgatggctagttttgaaactaattcacctcagatccaggttgacatcgatcgcgtaaaagcaaaatctcaaggagtggctttaactgacatctttgatacattgcaggtcaatttgggatcactatatgttaatgattttaataggtttggccgtacatatcgtgtaattactcaagctgatgctccattccgcatgcaggctgaagatatcggattacttaaagtgcgaaatgcggctggagaaatgatcccgttatcggctttgattaatatcaaactaacttcaggccctgatcgtgtgatgcgctataacggttatccatcagcagatattacaggtggaacagcccccggttattcttctggccaggcaaccgatgctattgaaaaaatagtgaaggaaagcttacctgaggggatggcatatgaatggacggatctcacttatcaggaaaaattagcgggtaattctgcgctatatattttcccattagcagttttctttgcattcttgatcctggctgcacagtacaatagctggtcgctcccattcgctgtactactgattgcgccaatggcgttgctttcggcaattggtggggtctggatttctaatggtgataacaatatcttcacacaaattggttttgtcgttttagtcgggctggccgctaaaaatgccattttaattgttgaatttgcccgaactcaagagaatgaaggactctctcctttggaggccgtacttgaggctgcacacttacgcttacgtccaatcctcatgacgtctcttgcatttattgctggcgttattccattggtactggcgagtggcgcgggtgctgaaatgagacatgctatggggattgccgtttttgcaggaatgctaggtgtaacgttctttggattactgcttaccccagtattttatgttgtggtgcgtagtttttcgataagacgaaaagtgaactcccatcaattgttgagtgagaaaagatag

SEQ ID NO: 128559 - DNA, 1206 bp, Enterobacter cloacae
atggcagttgctgttgcaatcacagcaagcacatcggtagcggtggctaaggaagatggcagcggaaaaacatctacggcgcagataccagcaggtccgcaggtaccggtcgctgaggttatttcgcgcaatattataccttcggccgagtttactggttccctggcagcgatcaaaacggtagagctacgacccagagtcggcgggacaatcgaatctgtaagtgttccggaaggaagcttggtacataaaggacaacttctatttcaaattgatccgcgaccatttcaggtagctcttgatagcgctaaggcgcaacttcgccaagctgaggctcaggcgtttcaggcaaatcgcaattttgaacgtgtcagccgactggtcaataatggggctgtttcccgtaaagattatgacgatgcagcttctgataaaaatgcccgtattgcccaagtcaatgtagcgcaggctgcagtagaggcggcaaagcttgatctctcatatacacgagtaactgcgccaatagatggccgcgttgatcggattttgattactgaaggaaatctgattagtaatagtgaagggggggctgcaactttattaaccacgatcgtttcctcaaatccactatatgcatattttgatattgatgaagcaacgtttctcaataccgtcagtaaagcgcgtcctgatgcaatggagggtagtaaagaaaaattaccagtacatgtaggtctggctactgaaaagggatacccacattccggtactcttgattttgttggtaatcaaatcgatcgtaataccggtactgttcgagtaagggccattatcccaaatacggatggtttgcttactcccggagcatttgccagagttcaattaggcacgggaaaagctcaacaggttattttgatcaatgaccaagcagtgggaactaatcagggtaataaatatgtcctggttattggtgacgatagtaaggcgcagtatcgccccatcgaattgggacccgttgttgatggcttacgaattgttgctaagggcctacaagccggtgaaaaaatcatcataaaagggttagtgcgaccgggtatggcggtaacaccaagtatggtttcgatgcagtctctagagagttcattggatgcaaaaccagcaactcaaggaaaggcttctgatagtaataataaggggggtaattaa

SEQ ID NO: 128560 - DNA, 2613 bp, Enterobacter cloacae
gtggtttgggacgaacacatccagcaagtaatatttatcgattccgaaacccgtacagaagaaactcttacacctacagctgcacttgaaggcgatgttgaagtcacattagctgatggcggtaaaatatcctgccataccgcattttcctcttttaaaaatatactggctaattattcaccagaaaatgtaagccgtattactgggatatctgttgcttcaattgaagctgctgcaagtatgattggcaatgctaagaaaattgcatatcacagttggtctggagtagcacagcatactaacgcaacccaaacagaacgtgctattgcgacactgtatgctttaaccggttgtttcgatcaggaaggatgtaatcgaatctatgccagccacccggtaaatgtggttaattcaccgacattgatgcctaaaacgcaatgggaaaaggcattaggtcttgaagaaaggcctatcggcccgccttcacagggttgggttcattctcaggatatctggcattcagtattagaaggaacgccctacaaaattcgcggcttaattggctttggtgccaacatattactttcacaaagtgatacttccctcggacaacaggcacttgaggcgcttgagttttatgctcatgtagatttgtttgaaacacctacatcaaagtatgctgatatccttttgccagtaaacaccgcttgggagcgtgaaggcctaagagccgggtttgaaagtagcgctgctgctcaggagcacattcagttgagaaaacaaatggtttctccgcgtggtgaaagtcgttcagatcttgagattgttttcgaccttgcatgtcggttaggaatgaatgaagcattttttgatggtaatattgaatctgcttggaattatcaattgaagccactcggtttgactgttgagatgctcaggaataagcctgaaggttacgacataccacttgagcataaagtcaggaagtacgccttaaaagatcaaaagaccgggtatctgacaggttttaatacggaaacaaaacgtgcagagttttactctgaggtacttcatcggcacggttataatcctttacctgaatacgtacaacctcaggaatatcagcgtaatgatcctgatttccccttaatgctgacatcagttaaaagtggttttttctgccatagccaacatcgcagcctaacaagtttaagaaaaaaagcatcttatccaacggtagagatatcggttactcttgctgatgaagaaaaaattaagacaggtgattgggttgaaattgagactcgggtaggtcaggctcgtttcagagctaaggtggaagaaaaattatctcacgaaacagttattgctgaatttggatggtggcagggttgtcctgattttggaaaaccatcatatcctgttataggtgaatttagcagtaattttaatagcctaatcagtggggatagttatgatcctgtaagtggtgcactgccactccgttcgttcagatgccgtattcgtaggctgaatgaatttgaattagtaagacgtccatgggacggacgtagaactttccaagttataagtttgaagaaagaaactgataatgttacaaccgtgacttttcaatctaaagctgagggttttttaccggattatgaaccaggccagcatgtaacaataagctgttacccactgatcgattctgaagatatcgtaactagagcgtattcgttaacaggcccagcatttgtagacgctcgtaaaacttattctatttctgtaaggcaccagacagcgagagatgagaatggggagtttgttgaaggaataatgtcatcctttattaacactcgtttgcaagtaggcagttttgttgaaataactccacctggaggcaacttcatcgtcccacttaacgcaatgcaacctgtcgtgatttttgctggtggtattggtattacaccatttatctgttatctggagtctattgatcctgatgaaactggccctgaaatatggcttttctatgccaatcaaaatagtaagcaacatgcgtttaagaaaagaatacaggagttaagtagcttaattagcaggctaaaagtaataaatgtttataatcagccactagattgtgatgtcctgggagaagattacgatcgagcaggatttgctggagcgggagacgttgatgcccatctaattgaaaataatgctcgttattacatgtgcggcccaatgccaatgatggaggcgatatcgaagggccttcagcaaagaggtgttccagcatttgcaattttttatgagatatttcgttctccagcaaaaatcaatgatgatccttctctacgccataaagtaacttttgcgaaatcaggaagagaagagatatggacaactgataaaggtacattattgaattttggcgagaaacttggaatatcaatgccaagtggatgtagggttggccaatgcgaaagttgttctacaaaggttatcacggggagtgttcagcatttgaataatgtggaaccctctgatgagggggcatgtttgacatgtcaatgtatcccagcaggcgatatcacgattgatgcatga

SEQ ID NO: 128561 - DNA, 759 bp, Enterobacter cloacae
atgttaaatattattcccggatattgcacgctttgtcgttcccgctgcgggacgttgaatgaggtgattgaggaccacctcattaaggtaaggcctaaccctgaacatcctaatggtaaggctatgtgtatgaagggtaaagcggcacctgagttagtagacagcgcaaatcgaattctgcacccgatgaagagaactcatcctaaaggcgcagaaaatccgggctggcaacgcataagttgggaagaggctatgtcaaccatagccgggcaactgaaaaaatttaaaaatgagaatggggcggaatctgtcgctttcggttttactagcccaagcggtacaccccttagtgatgcaattgaatggttagaacgttttgttcgtatctatggcagcccaaacaccagctatgggacggagatatgtaattggcacaaagacgttgctcatcgttggacctttggttgtggcatccctgttgctgactattcacatgccgaacttattattctttgggggcataatccagccaatacatggctagcgcaggctaatgcgatagggactggtcggaataatggcgcaaagctgattgttattgatccgcgtccgacacctttagcaaaagaggcaaatgcttggcttaatgtatgtccgggaactgatggtgcattagctttgggattaagccatcttttggttgaaaggcatatgtttaaccaggaattcgttcgtgactggactaatggtctttactga

SEQ ID NO: 128562 - DNA, 1620 bp, Enterobacter cloacae
atgctcagcagaatccggaccctgaggtctctgttttcaaaaggcgaaccagaagcagtacatcatatatccacagtcacgcctgtcggctaccacgccccacgtggtgccggtatgctgtgcgccagcccgctacgaaaaacctgcctgcagcagatatgggagaactgctctctgcccgcagacatctatcagcgtctctatttagcgcctcttaatggtttattagccagggtacagaatgtgccggccacgcagaagggaaggtggtcacagtcagacggcttcggcgatcttacgctgcagttcacgacctgtgcggtcaggctggcaaaagggtatatgtttccacccggcgcggcaccagaagagcaggcagaacagaatgtgatgtggaatgcggtgattttctggtcggcgctgttctggcacctgcctcttcttgcgactctggagggggagttgcttgacggtaaaagctggcttccgggaatgaccattccggactcaccttaccgttttcggttccgggaggctgagaacgcatcagcgtttgctgcccttgccgccgggcaacttatgccgacagaggcgacgggctggctggcagagaatcccgaagcactgtgcaaccttgccggcgcactctggaatcagcatccgggcatgccattgatacgcggcctgatgaagcaagccgctgaaaaagtggaatcgccttcgctggggatatcaggggcaaatgagaaagttgatactctcgcagagccggccctttcagtttcgcgaacgtcgtctgatcgagagaccgaattacaaccctcatcagaagcaaaacttaaaacggcattgccagaaattgcagatttgcagggaactctacttgcatcttctattgcaccggtgccgatggctgatgacggcaatctcgtcagcaatgaaaaggcaggcgagattacggaatgtgatccaaatgaaacagaaatggctgatacagagatgctgctaagccttttcagtgcaatatcagtgcctgatatgaccgggactgaagcatgtgatgaagattcttcagtcaatgccagagcagaaaatgagccagaattttccccccttaatgaaatatcccctgaagctgataagcatgagataaatcagacagcagcagaaaactctttccccgaacctgatactgaggataacatcccattacactctgttaacattgatatgcaaaaaacagtgaaaaaagaacaggctggcactgaatttctcaggtggctttctgaggggatcaagagcaagcgaatcgatattaatcagcctgattcgagagcgcatgcagttgcagggttcatctttctccgggtaccggacatattttatctttacatcagagaaagcggatcagagctgagcagggattccctacagcaggaatttgagaagctgcatattcacagggtgcgccggggagagcgttttattaaagcaaaactgtaccattcgcccggtaaagaaggcacgtttagacctgtaagtggatatcttgtcaagactacacaccttttcagaggggcgtcttcccctgaagacagcgggcttctgtctttcctttga

SEQ ID NO: 128563 - DNA, 1386 bp, Enterobacter cloacae
atgatgattaatgaggcacaagcgcaggcaactgcggccagcggcagcggagacggacggtatccgtcggggctgtgcgcgggtgctgaaatcataccggcggcagatgagcaaacgaaagcggagccgctgacgatggaggcggtgataacgagggaaaacctgatgctggcgtaccagcgcgtggtggaaaacaaaggcgcggcgggggtagataacctgagcgtggcggagttgaagccgtggctgaagcgacactggccgggcatcaggcaggcattgatcgacggaaactaccagccgcgggcaatacgcagaatggacatcccgaagccggacggtggcgtgaggacattgggcatcccgacggtggtggaccggctcattcagcaggcgatagcgcagcggttaagcgccatcgtggataaagacttctcagactccagctacggcttcaggccgggccgcagcgcgtggcaggcagtgcaacaggcacagcgctacgttcgcagcggaaagcgatgggtggtggacatggatctggagaagttctttgaccgtgtggatcaccggctgttgctggcccgcctggcccggaagatacgggacaggcggctgctgaggctgatccgccgttacctgaaggcggaaatggtcaaaggcggtgaaagagagaagcggcgcgaaggaatgccgcagggcggcccgctctcgccgctgctgtcaaacatcctgctggatgaactggataaagagctggagcgtcgtggacacagcttctgccgctacgcggacgactgcaatatctatgtgagcagccggaaagcgggcgaacagatactggaagcggtcagggagttcgtggagagcaaactgaagctgaaggtcaatgagcagaagagcgcggtagcgcgtccgtgggagcgaaagttcctgggatacagcgtgacgtggcacaaacagacgaggctgaaaatagcggcggcaagcgtggggaggctgaaggataaaatccgcagcctgacgacgggtaaccgcagccgctcagtcaaagcgacgatcgatgaactgacgccattgctgcgcgggtggataagctacttcagactgacggaagtcaggggaatactggaggagctggacggctggatcaaccggaagctgcgctgccagatgtggcggcagtggaagaggccgcgaagccgggccagaatgctgcaaaaggcaggactggggagggacagagcgatgctctcagcctataacggtcacggagcgtggtggaactcgggagccagtcatatgaatcaggcgataaagaggtcgtggttcagaggactgggcttaatatcactgctggaacatcacaggcagttccagcgttaa

SEQ ID NO: 128564 - DNA, 1434 bp, Enterobacter cloacae
atgtctgaatttgaattgcttgcgcaggatctcctgcagaaatccgaagaagaagaaaaactgcagcaagaaaaagacaaagagctgattgcaaaagttcttgaaatttatgatcaaaaatacgtggcagaactgctcaggaaagtaggcaataatgactggagcagggaaacgataaaccggtggattaacggaaagtgtgggccaaaatcattgacctctgctgaggaaattctactcaggaaaatgctgccagaacctccgaagcatcaccctgactacgcatttcgttttatcgatttattcgcgggcatcggcggtattcgcaaagggttcgaagaaattggcggtcattgtgttttcaccagtgaatggaacaaagaggctgtacgaacttacaaggctaactggtttaacgatgagctggaacataaatttaacctcgacattcgtgaagtcactctgagtgacagagaagacttgtcggaaacagctgcctataagcatattgacaaagaaattcctgatcatgatgtgctgttggcaggattcccctgccagccttttagcctcgcaggtgtcagcaaaaaaaattcattaggaagagctcatgggtttgaatgtgaagctcaggggacgcttttctttgatgttgcgcgtattattaaagccaaaaaaccggcgattttcgtccttgagaacgttaagaacctgaaaagtcacgataaaggaaaaacctttaaagttatcatggaaacactggatgagctcggttacgaagttgctgatgccggtgtctcaggttctgatgatcctaaaattattgacgggaaaaatttcttacctcagcacagagagcgaattgtattagtcggtttccgccgagatcttaaaattcacgatggatttacccttcgcaacattcataaattctacccacaaaatcgtccaacatttggagagttactggatcctgcagttgacagtaaatatattttgactccgaaactctgggaatacctgtataactatgccaagaaacatgccgcgaaaggcaatggttttgggttcggactcgttgatcctacgaatgtgaatagtgtggccagaactctctctgcacgctaccacaaagatggctctgaaatactgattgacagaggttgggataaagcgaaaggggaattagatttccgcgacgaagaaaaccaaagccggcggccacgaaggttgacgcctcatgaatgtgcccgcctaatggggtttgaaaaagtcggtggcaaaccgttcaggatccctgtttctgatacccagtcttatcgtcagtttgggaactctgtcgttgttcctgtatttgaagctgttgccagattgcttgaaccttacattggtaaagctgttgctgtgcgtacaaacaaagcaaaaaccaaataa

SEQ ID NO: 128565 - DNA, 1200 bp, Enterobacter cloacae
atgtcaggttttcaggaatggttactgagtaaggcaacgggcaattatttcctgtacatcaaacgcttgtcagcaaatgatactggtgcaacaggcggtcatcaggtcggactgtatattccttcaggtattgttgcagagctgtttccctcgatagataacactaaggaacaaaacccctcggttttcctcaatgcaacctattcctcgcatgtttgcagtgatagtgaagctcgcgcgatttattataacggcagctttttcggtaaaacccgaaatgaaaagcgtataacgcgctgggggccagggagtccgcttcaggatcctgaaaacacaggtggattgtccattctggcctttgagcacgagcccggaagtgacagtaagaacgttgatgtgtgggtttgcaaaaatcctgacgaagaggacattgtcgaatccattcttggcgaaattatccctggcgcgctgaggtttggtcccgcaaaagaaattttagggggattagctcttcagccaaaaacaacccggaagaaatacaaaattccagagccctgggagaccgcattcccatctggctccgaaataattaaatacgctgcggactacttttcaaagggctgtgcagacccagacgagcaactcatcgatcgcaggcgtgtagaatatgatattttcctccttgtagaggaaatgcatgtccttgatatcattaagaagggatttaactcggttgatgactttatcgcgctggctaattcagtcagtaaccgcagaaaatcccgggcagggaaatcactggagctacatcttgaacaacttttccttgaacatggtcttactcagttcgcgacacagtccgtgactgaagggaataaaaaaccagacttcctttttccatcttctgatgcataccatgacaaagcatttccggacgaaaaactccatatgcttgcggtaaaaacgacatgcaaggatcggtggagacaagtgttgaatgaagcagacaggatacaaaacatccatctctttacgcttcaggaaggagtgtcattggcgcaatttaaagaaatgcagcaagaacgggtcacactggttgttccctcttccctgcacaaaaaataccctgaagctgttcgtccagaattgatgactctgggacattttattgccaggctgatcggcatctacgctgcataa

SEQ ID NO: 128566 - DNA, 483 bp, Enterobacter cloacae
gtgatttatacccctgcggaagtgcgcactcacacgccagcccgtgaaaacgttgagaggcgggcctctgtccctgatttacgagatgtttttctgtgccatgcctgggacgatcgcaaggacgcagccaaagagcttcatgaccagcttgagatgaacggggtctcagtctggtttagcgaaaaagatgttttacttggtgcaacattgctgcgcgaaatcgatgaaggattggcaaaatcacgcgtagggattgttctggtgacccctgcgctactaaaacggctcgcaggagaagggattgcggataaagagctatcggcccttctggcacgagaccttcttgtccctatcgttcataacacaacatatgaagatcttcgcgaagtcagtccgttacttggttcgcgcagcggtttgagcacagctgaagattcaatggccaatattgccagcaaactagcggagctggtaacaatctag

SEQ ID NO: 128567 - DNA, 2598 bp, Enterobacter cloacae
atgcaatttaaagaactggaatctgggcttcgtcagaagtttaccgacaaccgcatcgtcttctggcatgacccggaacaacgcttcactgattcactcaatgagctggatctcgacaatgtcacgttgctggatatgcgtggcgtttctgtgctcgcaacaaaaaaacgactcgaaatcgacgagcctgagcagaaatttttactctatttcacctgtgaggctcctgctcgcgagcaggactggttgttggatatccgcctttatagcaccgaattccacgctgattatgcggcgatcactctgaattcgctgggtatcccgcagttggggttacgcgaacatattcagctgcgcaaagccttctttaccgtcaagcgaactcagatcctgaagggatgggttaccgaacgggaaacggaaaactctcttgataaaaaaatgctggcggtggtggccggggccagtacctttgaaaccaaagagattctgtttgctctgattcagcagtttgtcgcggcacggcagcaggatgatagtgcgctggagaacacctttgctgtgctgaagaaacttagcctcgatgaggtactctgggaaattcttcgtgttgagctcgggtaccagtttgaatctccgtcactggaaaacctgcttctgaaactgttctgtaccgatctctgggcacagggtgatgaagcgcatcgtgactggttgagcaaaaatgtactggctaccgcggctggccgagcgtcttcactggcctttatgggggcgtggcgtaacgatcgccgctataaagcagaatatgattattgtgcagaggatttgcagcagacgctgcagccaaaagagcactatagctatagttctccgtacgccctggcaaaatgtgaaaccttcgaagccattgaacaactgattatccgtggcctagtgacacagctgcaggaagaaagcacgaccctagacagggacgcgtttaaagcattggtgtcagaacgtagtgcgaaatactggagccagacccgcccggagtatctctccatttggaatgcgctacgccaggctgagcgcctgctgaatcttcgtaatcattatactgacgggtttaatttccccaatactggcgtgttctggaaagcctactgcgacgaaatttatcgcttcgatcagacctaccgcctgttcaatgaatatgccgcgccggtgcacagtaaaggggcgatgatcctccatgagctggataaattcattgaagagctttacagcaattggtatctggcagagctgagccgtggctggaacaaactgctggaagcggaaaatcgcatgcagacctggcaaattagcggtgtgccgttgcagcgtaatttctataaagagaatgtgaaacggcaatttgacacttcgcaggtgaaacgtgtttttgtcgtgatttcagatgcattgcgctacgaggtagcagaagaactgggtcgacacatcaatcatgagaagcacttcagtgccgaactgcgctcccagacgggagtgttgccaagctacacgcagttaggtatggcggcattgttacctcatgagtcattgagttatcagcctgacaattccggtgtggtgtatgccgatgggatgtctacctccgggtttgaaaaacgcgccactatcctggcaaaagtgaacggtgtggcattaagcgcgaaggaattgcagagtgccaataaccaggatgtgaacgatcaaattcgcaacgcctccgtggtttatatctggcacgacactattgatgctatcggtgataaagcggcaacggaagacaaaacttttgaagcctgtagaagtgcgatcacggagttgaaagatctggtatcacgcctgcgaaatcgctttaacgccagccgaattttcgtcaccgccgatcatggtttcctgttccaacaacaagcgctagtggagcaggataagactaagctggagagtaaagctgtaaatgccattgaggcgaagaagcgctacatcgtcggccatcagttacctgtgaacgaattttgctggcacggcaaactgtcggatacagctgggacaaatgatgagagtgaattcctgctgccaaaaggcgtacagcgttttcactttgccggtggcgcacgtttcgttcatggcggagccatgttgcaggaagtatgtgtcccagtgctgaaaatccgggcgcttgagaaaaaagcagccgagaagcaaccacagcgccaaccagtgtcagttgttgcacgggaccacgtaataaaactggttaacagtattgataaaatcggctttatccagactacagcggtggacgacctcaatgaaccgcgcacgctgaatatctttatcgttgatgaaaataatcaggttgtctccggcatggaaacggtttgcttcgatagcgacaatgacgatatggggaaacgtacccgcgatgtgaccatgaaactcatgggcacagcattcaatcgtaaaaacaaatatgtgctgatcctggagaatgcggacagcaccacagagtatggccgctatccgattacaatcgacctggctttccaggatgacttcttttaa

SEQ ID NO: 128568 - DNA, 2070 bp, Enterobacter cloacae
atgcagcagcaggataactcggcgaccaacatggaaatggcctctgttcaggacctggattctttgttgaatcagcactttcgtggccgcgtggtccgtaaagacctgactaaacaacttaaagaaggggcaaatgttccggtctatgtactggaatatttgctcggtatgtactgtgcatccgatgacgatgaggttgtcaatcaggggcttcagtctgttaaacgtattctttctgataactacgtccgcccggatgaagcagaaaaaataaaatcgctgattcgtgaacgcggctcctacaaaatcatcgataaagtcacggtgaagctaaaccaaaagaaagacgtttacgaagctcagctatctaacctcggcattaaagatgccctggttccatctcaaatggtgaaagataacgagaaactgctgaccggcggcatctggtgcatgattacggtgaactacttttacgaagaagggcaaaaaacatcccctttttcattgttcacactgaagcctattcagatgccgaatatggacatggatgaagtctttgaggcacgtaaacaatttgatcgcgaccagtggattgacgtgctgctgcgctctgtagggatggagcctgctaatattgggccccgcaccaaatggcatctgattgcccgcatgatcccgtttgttgagaataattataacgtctgcgaactcgggccacgcggtaccggtaaaagccacgtctataaagaatgctcaccaaattcattgttggtttcaggtgggcagaccaccgtggcgaacctgttctacaacatggccagccgccagattggtttagtcggcatgtgggacgtggtggcgtttgatgaagtggcagggatcaccttcaaagacaaagatggcgtgcagatcatgaaggattacatggcgtccggctcgttctctcgcggacgtgactccatcgaaggaaaagcctctatggtgtttgtcggcaatatcaatcagagtgtcgatacgcttgtgaaaactagccatttgctcgcgccgttcccggatgcaatgatcgatactgcattttttgatcgcttccacgcctatattcctggctgggaaattcccaaaatgcgcccggaatttttcaccaaccgctatggtttgatcactgactatcttgccgaatacatgcgagaaatgcgcaaacgtagcttctcagacgcgattgataaattcttcaagctgggtaacaacctcaatcagcgtgatgtaattgctgtacgccgcactgtatctggcctgttaaaactaatgcatccggatggggcctacgataaagaagatgtacgcgtatgcctgacgtatgcgatggaagtacgacgccgggtgaaagaacagctcaaaaaacttggcggcctcgagttctttgatgtgaatttcagctacatcgataacgacagtctggaagaatttttcgtcagtgtgccagaacaaggcgggagcgaactgattcctgcggggatgcaaaaacctggtgtagtacatttggttactcaggcagactcagggatgactggcctataccgatttgaaacccaaatgatggcgggaaatggtaaacatgccgtttcaggcttgggatcgaatactgcagcgaaagaagctgttcgagttggtttcgactatttcaaaggcaacttgagccgtatcagtgcagcagcaaaattctctgaacatgaatatcatctgcatgtggtagaacttcacaacaccgggccaagtacaaccaccagccttgcatcgttgattgccttttgctctatgctgctggctaagcccgtacaggaacaaatggtcgtcctgggtagcatgacactgggaggcgtgattaaaccagtgcaggatctggcagcatgtctacaggtagcattcgatagtggagctaagcgcgtactgctgccgatggcatcagctatggatatcccaacagtaccgacggaattatttaccaagtttcaggtaagcttttatgcagacccggtggacgctgtttataaagctttaggcgtcaactaa

SEQ ID NO: 128569 - DNA, 627 bp, Enterobacter cloacae
atgacatacgatagtgaattcggatcacacgtatccctatatcgggatagaatacaacaggttattgatgtctccctcaacgaacatcctaactcaatgattcttcgtgttgatctgcatgatccaattgatacagaaaatatggataacccattctttcaacccagagttgactctggtgctatatctcgctttaccagtgcgttaaaagcaaagcttaaacacgataagcatattaaaactcaacggaaagactggcctgatagtcgacattccactttacgttacgcatgggtcagagaatataccaaaaatggaaagcggcattaccatttgatcctgtgtttcaatcaggatgcttattatcatttaggtgattacgacttaaaccgtaacacgttacgtacaatgataacgacagcttggtacagtgcacttggcatccctatagatagctcggggaagttagttaattacccgccaaatggcaaataccttctcaatcgtaaaagggagaactttgaggaaacttataacgacttattgaatagggtagattatatgactaaggtgcgaacaaaaatcttcggtgatggagaccgtaatttcggttgtagtcgaggttga

SEQ ID NO: 128570 - DNA, 1416 bp, Enterobacter cloacae
atgtttaacggtcatccttttcctgtaaatgcgttccctcagattatcagaaatgcaatttatgaagtggaacagcatacgcaggcccctcaaggtttgattgctgcttctgctcttggggtaatatctcttgcctgtcagaaccggattgatgtttgtcgacttactaatctacgtagcccagtatcactttacttgctgacacttgcagaatctggcgaacggaaaagtacggttgataaaatgctgatgaagccattatatcaactggaggaagaattatttgataagtacacgcatgctcttaatacctggcgaagtgatgaagaaatttttaattttgaaagaaaagcactgatgtcaaaactcaaatcagatattcgccgtaacaaagatcatctggcgacaaatgaacaacttaaagcgctgttggcgtcgcaccagcaaccaccgatcaggttcaagcagatatttaatgatgccactcctgcggctattaaagattacctctgtggttattggcgatctatcggtatcatgtctgatgaggctggcactatttttaacggttacacgctgaacgaactgcctttcatcaacaaaatgtgggatggcgcaacattttcagtggaaaggaaaagtgagccagagaaattaatcagagatgccagactgacgctagcacttatggttcagcctgatgtgtttaaaggttatctgcaacgtaaaggcgatacagccaaagggatcggttttttcgctcgatgtctcatatgccagcctgattcaaagcaaggttccagaagaatctccagccccgttgtttcaagcgaacatttgccggtattccatcaacgactgatggagatagttaacgaaagtattgccagagataatcaaaatgatcgtctttgcctgcgattttctgtagaagcagaaaatcgctggatcgaattttataacaaggtggagtcagatatgggcttactcggcaccttatcagattttagagactatgcatctaaggtcgcagaaaatatggccagagtggcctctctgctgcattattttaatggcaatgatggagatatatctctttctgcagtcgaagatgctgtgaagataactacctggtatgttaatgagtacatccacatattttctaaacctcaggaattaacgcccgcaatctcggaggcggatgagctttattggtggataaaaaatcattgtaaccgccttgttgtaccttacattactaaaaatactgttctccaatatggtcctaataaatttagaaagcgtagtaaagcaaatgaattactcggtatgttgtactctcaaaatagaatactagtggcaaagaaaggcaaaaccacattgataaccatagctggtttaaaccccgtgctttga

SEQ ID NO: 128571 - DNA, 738 bp, Enterobacter cloacae
atgcgagatcagttctggaattctgataaggtaggaacacgtgtggttttgtatagtgctccatctcatgaagagtataaatattgtactggtgacagagtgggtcaattaatagaggaatatgctgaattatatgatccagttcaggaatgctggaaagagttaaagtcacgtattttcaggggaacattttctcatcttattcaggatccttttttaattaatgatgtgtttaaatcacatctattttttgcctcgatgtcttatcaatggggaaaatcagttatgtcagagaatgagtgtgttgctattaaagcattcattaaatcttctgaattatttgatagatgtattggtatgtcatggtttcatgtttctgtatgtgctcaaaaaaaattatcccatgttagagctaaagccggaaaacaaggtgggagcagtaaagcggaagtatatcgagtaattcaagataaacttgtttatttgatcaatgaatctgttcctgaaggtgggtggaaaagtaaagcagctgcggtaaatgctctcattgatcctttgtgggactttattaaagagtcaaattttgacattaataatgaaagtaaaaaatatcgtatcgcaacaatgagccaagatgctttggaagataccattattaaaaactggtcaagaaatattgaaagtatcaaattggctttagataatacagttgctagaaaaaagaaagtcacaggataa

SEQ ID NO: 128572 - DNA, 957 bp, Enterobacter cloacae
atgtcaccacagcaaatggataagaaagacttagatgacaatctgagttattatataaataataaagatgatgtttctgtaattatttacgctattcttaaaagcagccctgacgcatatcgtatggatatcgaagcgagcgctcaggatagcttaaaagagttatttttagatagtattaagaataatatcattgatgatggcgatcttagtgttttgcctctatcgtcagcggatgaaagaaataatgttatttatcaatatgatataggatggcctgatgagttaacctctatgcaaaatatgcttggacaaccaggtgaagccgtttttgatttcaaaacacaacaaatagaagatatcagagtattgctagtttgcattggtaatgcagatcagcaaattgtactctacaaaaccatggctccagttaatattttctctcgtactggtttttttctaaaaaaatcagctacaagacttgaagaaattaaggatgacttcttcagggtaagtgataacttccaaattattaaagtagaaaatgatttatatgtagtggatcttaaattaatcgaaaaaatgtttggttttcatgaggttattaaaaaagaagccactcttggcatgactgccattgaagggatgaatattatcactgatatagaggtgataaaagagttaatagatgatataaaatatgcgcgaaagttaactagaatagcaaaatcttctccagttatattagccaagattgaaaatgaaaaaattattgagttttgtaagacctatcctgtattaatcaacagaataagatttaacgaagatggtacaaaaatcgcccttgatactaaagtttcaaaagatctgtttattaaaatattgatggatgactttttaacttcgcaactgactcagttctattatgaaagccttgcaaaggatgcggtaaagtag

SEQ ID NO: 128573 - DNA, 603 bp, Enterobacter cloacae
atgaaaaatgattcaaaagaaacaaaggagtatgttaggcgtaaaattgatttatatattctatcgctggctattttattctgttttttcatttttattacattaagattccctgtatgttttggtgctaaatgtgagtttatcggctggtctttgttattgaaaaataatgttgttcccttggtatgtcttgggttgctcatttattgttggattgcctaccgtagatttaaatatgatactaataaaactgtagagctcccattaaaaataataaagatagagaaaataaattacgagcatctaactttcttagctacatatattattccgttaattacctttgattttgaaaaagagagatatgttatcgttctggcagttctcttaataatcatgggggtgatttatattaaaacggatttgttttatgccaatccttccttggctttattggggtttaatatttataagttggacgttagtataactggaggtattaataaaacagggttgatattaattactaggcgacaattgaaagaaaatgacatggtaagttatattgtgcttgatgaaagagtttactattctggagattaa

SEQ ID NO: 128574 - DNA, 2688 bp, Enterobacter cloacae
atgaaagttcagtctgtatctgcggtttcgggggcagcaaacgggcgatggccacacatcctttccgcattagggattaatgttccttccgcccgacgccacggtgcctgtccggcctgcggcggaaaagatcgcttccgtcttgatgacaaagaggggcgcggaacatggttctgtaatcagtgcggcaatggcgatggccttgatttagtccgtctggtgacagggcgctcagtgaaggaggtcgcgggaatggtctctgaggttctggcattacctgaagtacaggataaacccgctatgccagccaggaaaaaggtggcgggaaaagagaccggagcagaccgctatcagaaacttaaaaagttgtctcaaaacggtgaatcagcctatctgaccggaaagggattgcagggttactctttaccgcttcttactgctgccataaatctggcggggatgacttttccagccgggtcgctgctgctgcctttaactgacatcaccgggaatgttacaggcggtcagcttattaactctgatggtgataaaagtcttttacccggcagtcagctgtcaggcgcgtttattgccgtggctgatgttccgtctgatgctccagaacaggtcattatcactgaaggatatgccactgcgttgacggtcagcctcctggctgacggttggatcgttgctgccattgcggccacaaatttggtgaaggttgcggagcaaatccggattcgatggccggacacccggattatcctggctggagataacgatcttgttgacgggaaagagaacactggccgggtatgggctgaaaaagccgcgaaagccgtagatggttgggtaacgcttcctccggtacgtcataaagccgactgggatgattatcgtcaggaaaccgggaaggaaagggcgcgtgaagccttccgggaggaaatgacgttgcacggaaaagggcaaaccagattaccgcaggggttcaggctcacgaaagaatatttgtggtatgacaagctggtgaataaatcagatggtgatactgagatccgtaatatcaagatttgcagtccgctgcgtgtgactgctatcaccagcgatgctgacggcagtaattatggccgtctgctggaatgggaggacaccaacggcattagccgaaaatgggcaatgccgatggaaatgctgggtggtagcggagaggaactgcggcgcgtactgctggtcaatgggctttcttatatcaatatcaacgggatggccagagcgcacctgatggaatacatctccctgtgcaagcccgacagaaaagtgacctgcgtgaataaaacaggctggcatggcggcgtttatgttcttcaggatgaagtgatcggcagagagtcacagtctgtcatcctccagacttccagcgttcaggggcgtgattttcgtgttacgggcaccacggaagaatggcgggaaaatataggccgctattgcgtcaataatgcccgactggcctttgccgtaagcctggcattcgccgcgccgcttctgaagctggttggtataggtggcggcggttatcacctgaaaggtgaatctacagacggtaaaaccacgaccatgaaagtggctgcttcggtgtgtggtggtacggatttctggcatacatggcgtgctaccgggaacgcgctggaaggaacggccagccgccgcaatgatgccacactgatgcttgatgaaatccgcgaggtggatggcagagaggcggggaatattgcctacatgctggcgaacgggcagggcaaagcccgcgcccgaactgatggttcggtacgggaaacaaaccgctggaatttgttgtttctttccacgggggagctgtcactggtcgagcatgccgccagtgccggagagcgaacctacgccggggttgaagtacgcatgatccagatcccgagtgattcgggcaagcatggggtatttgaggagctgcacggctttagtggtggtaaagcgctggcggagcatctggaacacgccgttattcattatcatggctcacccttccgcgactggctgcattgtctgacagccgatctccaggaactgaccagccaggcgaaagcgttgctgaaggactacacccgcaggctgaccccagcggatgcaggaaaccaagttgggcgtgccgttacccgttttgcgctggttgctatggctggagaacttgccacacaagccgggataaccggatggcctgaaggtgaggcgttcagggctgctgagtgttgcctggcctcatggatggctgatcgagggcataccgcgaaccaggaggataaaaccgcactggagcaggtcagggattatatgacacgtaaccagttcagccgctttgctgactggcacgacgacaagaaccgtccactgtcgatgatggggttcaggaaagtggacaagggcgacaacgtgacagaatccactgtgaccttctacgtattgccatctggctggaaagaaatttgtaaagggttcgattcgcgaaaggtagccagattgtgtgttgaggcgggctggctgaaagccggggaagacgggagaacgcaaaacagcgttcgcctgccagaaatagggcttaagcgggtttaccagtttaatacgcaagtactgggtagcgccgatcccgaatag

SEQ ID NO: 128575 - DNA, 240 bp, Enterobacter cloacae
atgagccatttacctatcactaaacatggttgcaccttgactgaagcgggcgaaagccgtcttttacgagttgctcaggccagcgattttcttgccgaaattctttcaatgcctgtaatgagcggaacgaaaacgatttcagctgaaggtgccgcagcgctaatggcatgtattgcagaacagctggaaggtgtagtgaaggaaaccagcaccatgaaaggagaaagcgatgcacgctaa

SEQ ID NO: 128576 - DNA, 432 bp, Enterobacter cloacae
atgatgatctcatatcaggaacttgttcgcaccttccttgcgcacctgctatttgtacagtggtgtctatgccgctgtagctttagtgtaatggtggcccaggtggggctgacttcggtcaggccggtatccgttagagccggtatttccacccccgtctgggctaccaccagtgagcgtggaaactccggtggtagcgttacccgctatctaacggagactgccaccatggctacgatccctgctttgcctcaccctcaatttacctttgtatttctcgctgttcgccgttctgactgtgccgcacgtccattcgctgtgcgtactgttgcaacctgcgagcgtgatgcacgtctgaaactcgttgccgattttgtactgagcttcgccgcacgtattccgatgaacaatttcggagaggtgaacgcatga

SEQ ID NO: 128577 - DNA, 873 bp, Enterobacter cloacae
atgaaaaatattaaaagcatttcattcactataattgtatttgtaatatcttgcgctgctatttatataatatcagactctcaaataaatggattatggacaagagacggaagagtaagagctgatgtaattactatggtgggggaagtcgacggctatattacagacgtggcagtaaaggataatcagcacgtcaagaaaggacagttacttttcacaatcgacgatagcgactatacaatcctggccgaagaatcaaggcaagacatacagtcgaaaaaatacaatatggataaacttgccaaaacatatcaccgaaaaaatggattatctggcacagttttgagcaatgaggaggtcagcaatgctggttttgattattatattgctaagtcagactatcaggaatcaattcataagagtcggcgtgacgaactcaacctgtctaagactaaaatttttgctcccactgatggatatataacaaatttgttagttcatactggcgactacatcgctaacggtaaaagcattgtttctatagttaaagacaacagcttctatgtatacgcatattttcaagaagatcaacttaatcgcataaagaaaggacaaaaaactgtagttactcttttaaatgataaaattagatttaatggaagcgtagaaagcatttctaaagggattcttgattatagtaacaagggctctcaaggcgaactacatgaggtcaacccaacttttgaatgggtacggctacctatgcgtattcccgtaagaatcgcaattccttctaatcaagataattatgatcttcttgtatctggtatgacttgcactgtaactatatctgaaaaccatgaaaaactttga

SEQ ID NO: 128578 - DNA, 981 bp, Enterobacter cloacae; identical to SEQ ID NO: 82814

SEQ ID NO: 128579 - DNA, 360 bp, Enterobacter cloacae
atgtccaacacatcagattgcggcaacgtacgaaactgttccgcgacagattatggcacagagccagatctatcaatgctctcgcaaaatgaaattgggctactttccgagattttccatctactgggggaccagtcaagactacgaatcctgctttactgtatgcgtggttcggtctctgtaggtgacattgctgagtcgctccagttatcacaatctctggtcagtcatcatctgaggttgttgcggggtgcaagactcgttcgaggagagagaaagggcaagtacatcttttatagcattatggatcagcatgtaagccatgttcttcaggatatggcatttcacatagcagaataa

SEQ ID NO: 128580 - DNA, 1011 bp, Enterobacter cloacae; identical to SEQ ID NO: 82785

SEQ ID NO: 128581 - DNA, 2499 bp, Enterobacter cloacae; identical to SEQ ID NO: 82786

SEQ ID NO: 128582 - DNA, 465 bp, Enterobacter cloacae; identical to SEQ ID NO: 82787

SEQ ID NO: 128583 - DNA, 453 bp, Enterobacter cloacae; identical to SEQ ID NO: 82788

SEQ ID NO: 128584 - DNA, 2535 bp, Enterobacter cloacae
atgagtggttccgtaaaaaacagcaaaactcaagtaagagaggaatctgctggttgttgtgaaaaaattaacttgatagtagggagcaaaatgcagcgttctgaagaaccggctaaggctcatggtcacgcacatgaccataaagattgcagcgctgagctctctcataaggagcatggtcatggaagtgacaaacatttacatcgcgagcaagggcatgtgaaaggtgggcatgcacatgaaggatgcagccatgaacatagtcatactgatgaagaacatgatcatggtgaggaagaacatagtcatggcgatcatcagcataaggggtgtaaccatgaccacgctcaggatgatcaggctgatgaacatcatggacatagcggtgactgctgctcaggtgcgccaacaaatttaagtaatctaggtggttctaaagttgtagctggtgggttacgaactgaaatacgtattatgcagatggattgccctgttgaggaaaatctcatcaaaaagaaactgggggcaatgacctctgttaaagagcttgatttcaacctgatgcagcgtgttctgactgtaacccatacacctgattcgcttgaacctatcttggttgcaattcgctccttgggattcgtacccgaagtttcggataacaatggtgaaaagaaaaacatccaggagaaaaaaaagccttggtggccgttagctctggctggtgtggctgcacttgcggctgaagttatgcactgggctgatatgcctgactggcttgaagcgggattagccttgatagccgttcttttgagtggtttgacaacctataagaaaggttggatttcaattcgcaatggtaacctgaatataaacgcactgatgagtattgccgttaccggggctttggttcttgggcagtggccagaagcagcgatggttatggttctatttaccatcgctgaactgattgaagcaaaatcactcgatagagctcgaaatgccattggttcactgatgagcctgacccctgaaaccgcaatggtccaacaaactgatggatcatggcaggaagttgatgccagcagcgtacaaccaggaagtattgtaagggtaaaaccaggcgaacgaattggtcttgacggtgagattgttaaaggtcaaacaacgattaatcaggctccaattactggtgaaagtttgcctgtcgataaaatggcgggtgactccgtgtttgccgggacaataaaccagtcaggttcttttgaatataaagtcactgcagctgccaataacaccacccttgctcgcatcattcatgctgttgagcaggcgcaaggcgccaaagcagctacacaacgttttgttgaccgcttttcccagatttacacgccagtcgttatggggatttcggttgctgttgctgtattgccaccattgtttggcgcaggtacatggcaagagtggatctataaagctctagtcatgcttgtcatcgcgtgtccatgtgcgctggttatttctacaccagtaacaattgtcagtggacttactgctgctgctcgtaaaggaattctcattaaaggcggtgtttaccttgagcagggacgtaaattaaaagctttggcgcttgataaaactgggacgattactcatgggaagccagtacaaactgatgtcatggttttcaatggggaaagtgagcttgaggttcgtacagttgcagcaagtcttgctagctactctgatcatcctgtctcacaggccgttgtgaatgcttctgttgatttgaaaaaacagagtgttgaaaactttgaggctattgtaggtcgaggtgtgcatggtgtgattgccggcaaagacttttatcttggtaatttgcgattggcagaagacctcctgagttgtccgttagaggttaaagctacagtacaaagtctggaaagcctaggtaaaacagttattttgctcaatgatggaaagcaagtgcttgggttatttgctgttgcagatactgtcaagaacacgagtcgcgaagcgattcaacaactccatcaccttggtgtcaagacagttatgttgactggggataacccgcatacagccaaagcaatagcatctcaggtcggtattgatgaagctcgtggtagtcagttacctgaggacaaacatcaagtagttcaagagtattcacgtattggtgttactggaatggttggtgatggcatcaatgatgcgccggcactggctgcggcagatataggttttgctatgggggcaatgggtactgatacggcaattgaaactgcagatgtggccttaatggatgatgacctgcgtaaaatccctgcctttgtaaaattgtcccgacagacgtatagcttactcgtgcaaaatatcagtctcgcattaggtattaaagctattttccttgtattaacgctcatgggaatggggactatgtggatggcggtatttgctgatgttggtgctagccttctggttgtagcaaatggtctgagattgttacgtaaatag

SEQ ID NO: 128585 - DNA, 264 bp, Enterobacter cloacae; identical to SEQ ID NO: 82816

SEQ ID NO: 128586 - DNA, 942 bp, Enterobacter cloacae
atgattaagcaaaaaaccatcaaaaataatgtcgaactaagtggtattggtttacatagcggcagcagcattcatatgaaaatcatgcccgctaccgctaatagtggcatacggttccgtagaacagatttaaatccttcagttgatattcagcttcgagctgagcaggttcatgacaccatgctggctacaagtctaattaatcctcaaggtattagggtttcaacgatcgaacatttcctttctgctgtatccagtctggggattgacaatctcctggtagaactggatgcacctgagctccccatacttgatggaagcgcaagagaatttattgattctcttatcaacgctggttcgatagaacagtgtgcacttaaaaaatatcttcttattaaaaaaactgtgtcagttaaagacggtgataagtgggctcttttacatccggactctaagttttccgtggatttcacgattgatttcaagcatcctttaatctcggctgatactaataaattaaatattgaaatgtcgaaagaaaaatatatagaagaaatagctggtgcacgtacttttggatttgttcatgatgtagaaaaactgcaaaaaattgggcttgtactaggggctggtttgaacaatgcgataggtctcgatgaatatagcgtcctcaatcctgaaggtcttcgttttaataatgaactagttcgtcataaagtacttgatgcaattggagacctctttgtttctgggtataatatcatcggtgcttaccatgcatataaatctggccatgctttaaataataaactaatgcttgctttattaaatgataccgatgcatgggaattcgttaatttgcatgattacagcagggggaaacttaaagttaatatgttgcctgcgattaataaagaatgcccagtatcattaactatctaa

SEQ ID NO: 128587 - DNA, 414 bp, Enterobacter cloacae
atgaacgataaacgcaccgtaagcatgattgacctggcattacagaaacatggtacgccagttggcccactgtacgtggcggtacgccacaaacgtatcaaaaaatgcttcacgcgagatacggcgatccgctatctggctttcttcatgaccaccgaggcttttgagcgttctggttttccgcagcgtcacccgagggtgcgtattgatcgcgatgatatggaggtatggcgagatggggaaacaaaagcggagtatctggccgcccaccagcgttgtgttcgccgtctgcgtcgtatcctggcgcgcaagcgagaaatggagaaatggtgtgcaaaatgggacgcgatgcacgagcgctacgtcaaagaacgtgacgaactcaaagcaacaaagcctgccggggtacgctga

SEQ ID NO: 128588 - DNA, 189 bp, Enterobacter cloacae
atgtctgatatcacattgcataaagcggcatcaaaggcatatcaggctgagattgtcgcaaggatgcttgagaactaccctcataagcttaccgactcagatgtagaatcagtcgcatcactattggcagacctcattggtccagttgcagcttatcttatcgaggcagagtccaaaaaccctgcttaa

SEQ ID NO: 128589 - DNA, 315 bp, Enterobacter cloacae
atgagtacagagaaattttttcaacttgtagatattcccgattaccgattctcttctgacaaagagaaatgtcatgacattgattttgacaaaattgctactgattgcgatacaaaaacaatctctattttggaggccatcaatcatataggggtaagcattatgaatgaggttgaagaaaagaatttgaataaaaataaaataatgactttatctggcgtgatttccgacctcgctgaattagcaatggctactaacaaaattgccatatcagcgacctactcttctggttataaggatgcagaaaatgtctga

SEQ ID NO: 128590 - DNA, 612 bp, Enterobacter cloacae
atgactcaagaacagctggcagaggcgctcggcataacgcagggcggcctaggccattggctaaatgccagacgcgaaccaaacctagaggttatagccaagatttttaacatattgaaaatgccaggcttcgtagtaaacgctgatggcacggtcagcgactcaagagccgatcacaatgtaagttttaatagcattaacgaatccaagggaagttaccctgttattagctgggttagcgctggagactggatggaagcagtagaaccgtatcaccgtaaagcgatcgatagatggtatgacacaaccgtagaatgttctgaggattcattctggttagacgtccgaggcgattcaatgacatcaccagcagggctgagcataccagaaggtatggtgatacttgtcgatccccaggtggaagcaatcaacgggaaattggttgtagcgaaactcgacggtgacaatgaagctacattcaaaaagcttgttatagatgctggtcaaagatttttaaaacccctcaacccccagtaccccataatccctataaatggcaactgccgtattatcggggttgtggtcgacgcaaaaatcaccaacctcccataa

SEQ ID NO: 128591 - DNA, 222 bp, Enterobacter cloacae
atgagtggaatcaagagccttagacgcaaagcaaaggtaactcagggagagctggctgcgttgatcgatagctcccaaggggccgttagccactacgaaacaggaagaaggattcctgatgttgctgtcggaaagcggattgtcagtgcctttaaacagcttggtctgaatacaagtttggacgaggtattttcagatgatgtcgcaagggatgaagcgtga

SEQ ID NO: 128592 - DNA, 591 bp, Enterobacter cloacae
atggtggaaacacaagtgaagtatatcgtggttggtcaccattcccgttgtgcctcagctgcattgctggctggcgaacttggcgcgcaccttcttatcgatgaagggaatcacggggctaactggaatcaccggcgcgctatcgaatgggctgctgagcagccttgccgggtggtggttctggaagacgacgcgctgcctgtacgtggattcagagacaagattacgggctggctggctcgtttccctggcgacatgcttagtttttatctgggcaccgggcggccaccgcaataccaaatgcagatagctgaacgcctgattaatgcggataaggtgcggtctgacttcattatgctgcaacgcctgatacatggcgtgtgctacagcataccgcctcaaagcatcagccgtgtgctgtctcaatgggactgcagtaagcctgccgattatgccgtgggcgatgcttatggtggcgttgtcgtctatccctgctggtcgctagtggaccatgctgacggcgaaccggttgagcgtcaccctgactcagcgccacgcacagaacgccgacgggcatggaggttagcctga

SEQ ID NO: 128593 - DNA, 261 bp, Enterobacter cloacae
atgaccgacttaaatgaacgcgttgagaatcttgaagaagttatcgatgaattggctcttgatctgcatgcgtcaaaagttgcgataacaattttatcaaccactctaaacagcatgagtaaagaaccaggactacttgccaattcatttttagaggcaagaaagttttctcccccgatagagtttgaaaatcctacgcaagagggatatgaagaaaagctaattgaaaaggttgctgccctgctttcgaaagttaactag

SEQ ID NO: 128594 - DNA, 978 bp, Enterobacter cloacae
atgaaaacggtagaagcagcaaaaggccaatgggccatgatttttgagcattacggactgccgccgatcaccgggaaaaaccactttagagggaaatgcccgctctgcgattcgattggtaaattccgtatcgatgaccgtgacggagctggaacatggatctgcacctgcggaagcggtgatggcatcaaactggtgacccaaacccagggcaaaccatttaatgaggtttgccgcgaaattgatgagctgattggcaatacgttccgccgcgaaagtatccctaaaaccagcaacgctggcagcctgcgtaaaagagtgctgagcaaatttgcaaaactggcgccgctgcgaggatcttctggagccgactatctcaatgcgcgcggcatttaccagcttcctcaagaggctatcaggtttaatgacaaggaacgctacggagggaaggtttttcagtcgctgtattcgctcgccactgatgacaaaggagaactttgctatctgcacagaactttgctggacggtaatcggaaagctcagctgaaggattcagttggtgcaaaacgccagaaatctcttcaggaagagagctatctggatcacgctcgttcagttgctatccggatgttcccggtcgccggcactcttggcattgcagaaggtatcgaaaccgctttgtcatgcaagcaactctacaaagtaaacacatgggcaaccatgaccagcggattcatgaagaaattccgtgtgccagctggcgtaaagaacttcatcatttttgcagaccgtgacatcaacagtgctaccggtttagcggctgctatggaatgtgctcatgccaatttgatggcaaaaaacgacctcgataaggtcagtatctactggccggataacggggactttaacgacatgctcatgaacggcgatcaggttcgtgaaatggttttctataaaaaacagcaggtggccgcatga

SEQ ID NO: 128595 - DNA, 1620 bp, Enterobacter cloacae
atgcagctgacgatcacacctaattttgcacaggaacgagcccttaaccagctgcgccgtaactggaaggatacagaaaccttcatggtgtactcgccgacgggcagtggtaaaacaggacttgccgccttcatcgttgccgggttcgtcagtcgtggcatgcgggtaatgttttgcgcgccttaccagatcctcattacccaaaccgcaaagcgttttgtggagtacgggttgccgggtgatgaaatcggctatgtctgggcggatcacccaaactacgatccttccctcaaaatacaaattgccagcgctgatacgcttattcgtcgcgtgttccctgacaatatcgatctgctgattatcgacgaagcgcacctgcgaaaaaaacgcattctgaaggatatcgaacgcctgcgcgaaaaaggcgtgaaagtgattggcctttcggggacaccattttccccgttccttggcaaatactatgaccgactgattaagccaaccaccatcggcgagctgatccagcgtggcgacctgagtaaatacgaattttacgcgccaactaagccggatctgaagggcgttaaaacctctccgtctctccaatacggtaccgactacaacgaggctcaactggcggagatcatgtgtggttccacgctggttggcgatatcgtccagaactggcttgagaatggccgggatctgccgacaatcgctttctgcgtcaatgtggcccatgccaattatctgaccatccagttcaaccaggctggtgttaatgccgaggtgatgaccgcagacactcctgccgaagagcgacagaccatcatccatcgctttgagactggggccacaaaaatcatagtcagcgtgggcgtgctggtggccgggttcgacagtgatgttcgctgcattatctacgccaggccaactaagagcgaaattcgctggttacaggcgatcgggcgaggcctgcgcacggcgccaggtaaagattcctgccttatcttcgatcacagcggcactgtgcaccgccttggttatccggactctatcgaatatgacgatctcccgggcaaatctgacgggatggaagagggcgcgcgccgggccgctgaggaaagggcggagaagctgccgcacgaatgttcgcaatgccacttcatgaaaccagctggtgtttatgtatgcccgaaatgtggccacaaacctctggccggtgaggacattgataccgacaccgggcgcaaacttaaaaaactgggtggcgagcagcgacagccaacgaaggcagagaaacaggcctggtggagccagatcaaattttatcagcgccagcgcgtatcgatggggaaaaagcctgtcagcgatgcctggtgtgctcacaccttccgcgaacgctttggggaatggccgaacggcctgagcgattaccccatggatatcacaccgacagtttcaaacttcattacgcacaagctgatcgccttcgccaggcaacgcgaaaaagagcagcgcctgcaaaagcaggcagaagagcagccgaacccggcaagagttcagcaggcgcttaaacacgtcagcgacatcagacagcagttaggaaaacgagcatga

SEQ ID NO: 128596 - DNA, 549 bp, Enterobacter cloacae
atgaaaaataatgataccaaccatcagatagtttctacggtaagcatttctcaagaacacataacaatcctcaacgatgttctaacggcgcatactgaggtaggcttgcataaccatgcgtggggacagcttaacgttataaattcaggtatgattgaaacagatattgagggtgatatcaccttgctggccccttggcaatatgctatttggatccctgcggggttgaatcactctagccataatctcaaaaccactgaatattgttcaatctgtatacctctgaagctttgcaacaacctacctgaaaaagcctgtattataaatcttactgaaataggtagagccataataaatacgattttgacaaaaaatatttcttatctttccgggagaaagggtgagagtttagccacagtttttattgatcaacttgaggatgcctcaaaggcgatgaattaccttccaaactcaaaagacaagtatttacagccaatcttgagttatctcaaggttaaccccggaagtaatcgcacgctaaacgaatag

SEQ ID NO: 128597 - DNA, 153 bp, Enterobacter cloacae; identical to SEQ ID NO: 82800

SEQ ID NO: 128598 - DNA, 987 bp, Enterobacter cloacae
atgacctgcttattcgcaccttccttaggtcttgcggcgacaatttctcatacctctattgtctggctcattgcactgggcgggatgtatatccgtcagaaatttacggcagaatcagccgaaccctggttccagctgatttcagccatcattattcttgccactgcggcatggatgttctggcgtacatggcgcggagaaaagctttggaggatggagcaggaagatgagcatggccacgttaatcaccctcatgatgaaacccgcgtcattgataccggtcatggcagcgttgaactctcaattttcgaagaaggtcagccaccccactggcgtttacgctcgctcagtggcaggaaatgggaggccagcgatattactctggtcactaaccggggtacagggacattttcacaggtgtttgatttcgtagaaaaagacgggtttatggaatctgcccagccgatccctgagccgcacaactttgaggtttgtctatctctaggccatcgtggtcatgtacacgactatgatgtggagttccgcgagcatgatcataaccacgatcactccgcacttgagggacttgatgttagttcactcgagtatcaggacgcgcacgaaaaagcacatgctaacgacatcaaaaaacgctttgctaatagcagcgtaacaaccggacaaattatccttttcggcctgacggggggtctcattccttgcccggcagccattacagttcttttactttgcattcaggtgaaagaatttacgttgggagctgtgctggttctttgctttagtatcggattggcaatcacactggtagctatcggtgctgttgcagctgtaagcgtacgacaggcatcaaagcgttgggacgggttggatgttttagcccgaagagcaccatacttctcaagtgctttgattgcgttagtgggaatttatatgggttatcacggatggttgggcataacaaattga

SEQ ID NO: 128599 - DNA, 258 bp, Enterobacter cloacae; identical to SEQ ID NO: 32109

SEQ ID NO: 128600 - DNA, 402 bp, Enterobacter cloacae
atggattacctcttagataccaatatcttaatattcatgggttatcgtcctgatcgcttaaagcaagaggttgtagagctgttggaagacaccgaaaaccgcctgttcttctctgctgccagcgtttgggaagtcgtaattaaaagtagtcttaacaagccctttgacgttgataatccaacgctgtttagagatggcctgtttgaagctggcttgattgagatacctgttaaaagcgagcatacgcttgttgtagccgatttgccggagaagctacacaaagacccgtttgaccgtcttatcgtggctcaagcgaagcataacaagcttcctttgattaccagcgatagcaagctgattgagttcgttagcgactacattaccatcatacctaaccgataa

SEQ ID NO: 128601 - DNA, 1248 bp, Enterobacter cloacae
atgagctatcagtttatacatatagaggcatatgctagagtcggatctaatcaaaaaggtaagtcggaaaaatggaatatacatcagatcgcaggtgaagctatgcgaaatgatgaagattgcaaacatgtagcacagccaaaagaaccagcggttatttttggcgtagatgcatatgaagctgcagcaatggctcagaagtgggctgacagctccatagacgcttcaggcagaaagttaagaaaagatggctcctgtctgttggcaggtgtcatatcttttcctgatggccgttctgatgaagaatggaaggcttttagagatgatgcagtcgaatacttgaagaataagtacggtgagaatttgaaatcggtgatcgagcatacagatgaagattacaaccatattcatttttattcggttcctaaatatggtcagaagtttgatgaaatacacgatggtaaaagagctgtattagaagctaaaaaaggaaactcaaaggtacttaaaggcgaacagaataaagtctatattgaagctatgaaagagtttcaagaagacttttataaagaagtagctataaaacacggaatgaccaaaactgggccaaagcgtgaacgcttgacccgtgaagaatggaaagcaagaaaagaatacgcattaaaacaatcagaagaaatacaaaatattagtctattaaaagatcaagctattcaggcaggtaaagaagaaggttttgactattcagtagaacagtcaaaaggctggggctggatcgcaaaaataggagctaaatataaatattacactgatggttttaaaaaaaagctagaggaaaaagatgaagaaatagtagttgttaaaagccaaagaaatgaacagcaaaaaaagcatagagcatttaaaaaagaatattactctcaaaaaaaagaaacagaaaaagcagttaacgaaaaaaaagaaaaatcaaaagaagtttactttttaaataatgaaaataaagagcttaaaaaaaacaatgatgttttagaagtggaaaacttatcattgagagaagaaaataaagagcttcagcagtataaaataacaagtgaaaaaatgaaggatcgttttcctgatgaatataaaaaaatggaagctgaaataaataaaccaagaccaagaggagaaagttataacaatgagccgaaagctcaggagctttctattcagcagcaagatggatacagaaaaagacctcgaatgtag

SEQ ID NO: 128602 - DNA, 507 bp, Enterobacter cloacae
atgataactaaaagtagagttcacgaaaatgttgaagatataactgaagttttaaatagtaaaaaaataaaagataaaatagatgaaatgcaagagcgtggagatgttaaagctacagtaataatacaagatgataagaaaataagtttaaaaaatgagtttgtaatattatttttagaaaacttcgatcgtttaataacagagttaaaaatcaatacttctgagcttcgtgtattgatttatattttaaagaaaatggagtttggtaacttggtttcattatctcaaacatcaatagttaaagcattagatatgaataaatcaaatgtctctattatatttaaaaagcttttagctaaagatgttttaataaaagatgaagacggtaatatgtacgtaaactctaatattgtaatgaaaggattaaaacataaactatcaggaaaaaataaagagaacttacagaagtctcaaaagcaaacagatttatttgataaatcacattaa

SEQ ID NO: 128603 - DNA, 252 bp, Enterobacter cloacae
atgaatgagaacagtataattgaagaactctttgggattgtagaaaacaataaaagacatagccatgatgatttaatcagtgtgattgatgaaaagattaaaaccatagctgaaataactttagaagcaaaatccaaagataaagagattgaaaaacttaaagagagaatagagatcctatcatttttgttagttaaacgtgatttgaaaatcagtgctcttgaagatgaaatagaagagttaaaaatataa

SEQ ID NO: 128604 - DNA, 273 bp, Enterobacter cloacae
atggaaaataaaactgttcgctgtcctttttgtgatcatgaaactaagcatggtttaggtgtgtgcttaccatgtggcgcgagcattacatacggtaaagcgccgttatggttcggtcaaattggagctttattatctgttgtattaagctttttagttctgattttttcagagaatatgtttgttggtttagcttctctttttgtattcttgatattaactattgttctctccaaaaccatttatgcggatagagttgtattcacaagataa

SEQ ID NO: 128605 - DNA, 294 bp, Enterobacter cloacae
atgaaaaaagacataatgatagatttgaaaagattaggtttacataacggaagtgagtttatatcaagcgcatttttaataaaggataacagattagtatcaataatagcattgatagacagacttgaagcacgaaagattataccagcccacattaagcatggtttcaatcagattagagcatcatataaaagatctggctacatcaatcaagcccttgctgttataccgttcaaagcttatgtgaacgagccagcagagcattttaaagcagatatacattggagtatttaa

SEQ ID NO: 128606 - DNA, 966 bp, Enterobacter cloacae
atgaatctacccggtcagcagtcgcctgacagcacccttccctcttatgatgtctctcgaagccttggcctacaggccggtactgatatcgactttaaaaagctagccgcgcagctcgactgtacacgtaacttttacaatgtcggcatcattttcgatgatggcaagcaacgctggctggttcgtccgtcacgacgcattgctgatgtgaatcagagcaccgtcagccatgtggtcatcagtaaaattccggatgctaaggaaaccagtgcggaaaaagccgtggtggcgacgttaaccacgccgtcacttgcgactgaaatcacttcaaccggtttcgcctgtggcgcgatgattgttacgcttgtcatggcgtttggtgctggtgcggctgtgccttttaccgctggcggatccggcgtgattgcggcgattagcctgtccggctcgttggctacgggagcacaatgcatgattggcgcgggccgtctgctggctatccataacgaccatggttccgatgttgcctggctcgacagccaggactggtacgttgccaccacgacggttctggatgtcatttcgctgactgcggcaggaaccgcgctacgaggtactttagaaacgtacaagctgatgaaagcggcatcttcaggtaaagttaccgcctggttccagagcatgagccgtgccgagcgtaagcgcatcacggaagagattattaaagcgcagaatccaggcatctccagtgctggcgtaaaggccgcgatccgtgcaggtgtttatccgaaacgtttccccagcgaatcgttacaaaaatcactgcagcgcgagttaatgagtgcggtcaacaacgcatcggcctttgtggggagttcactcacagggactatccgcaacccacaaaataccgtccagtcagggcgttatgtggttggtgtgctgcagtcatttttacctaactaa

SEQ ID NO: 128607 - DNA, 441 bp, Enterobacter cloacae
atgacggcacacgcagcggagtttttcactatggacaaagttaaccgactcaaaatcattcaggacgttgtcgtccagcctctgaccacactgatggccgcgcagcgccttgatatttcagacagtcacagccaacgccttctgttgcgttacaatgaatctggcccactgggtatggctggccgtcgtcgcgggaaacccggcaataatcaactaccggatggtcttgcccggtacgcattcaatattatccgcgaaagctatactgactttgggcctacgctgccagcgaggaacacgaagaactgcacgatgttcacctgtcaaaatattgggaagtacattgaggtctggcattacccggatggccggaaagaactcaggctaaacggagtcatccttccctacttcacttataatcgtattcaggaaattgattag

SEQ ID NO: 128608 - DNA, 447 bp, Enterobacter cloacae
atgaaattttatagcatagattatctacaaatgcagtctaatatcaatgattatttaaaatacatagttatatttagtactttatttatcttgatcgttgtttttagcctgtatatgcgtcatcgcctgcaaaccaaatatcgtgacttaacaattatagttttcttgtttttgctcttcatttctggtgttcagtatgctgattatactgatagtcaaaatatacattcccaatcctcgcaaatggttaattttgttaggctcctatcacaaaaaaaagatgtgaatgtaaatgctatattttccagttccgtacaactctctgatggcattatcgttaaaattagtgatgttttttatcgcgtcaatttgagcccggatcaaaaaacatacaatttagtagaggtttcgttagtaaacccagaaatagaaatcataacaatctga

SEQ ID NO: 128609 - DNA, 636 bp, Enterobacter cloacae
atgataatttatttacctatcattataaagttgggcctggggatactgtgtttaattgttcaaataaatcttatgggaaaaggaaatctggccccctcatctgcaatggaccaggttcaaaactatgtgctggggggaattataggaggcgtaatttacaacgaatctatatcggttcttcaatttattctggtactaatcatatggactcttttggtcttcgctcttaaattcctgaaggaaaacaatcgattaattaaaaggataattgatgggaaaccgattaccttagtacacaatggcagtgttaatgttaaggagtgtttacggaatggtgtttctgcaaatgatctaatgttcaaattaagagcaaatggaatttatgagatagaacaactaaaacgcgtcgttctcgaacaaaatgggcaattaaccatcatacaaagtggcgatgaaaatatacgctatccaattatagtggacggtttggccaaccatgacctgctagaaatccttaataaagacagtgaatggttagaaactgaagttacaaagaaaggcttcagtaaaattagtgaagtatatttaggtgagtacttgtcaggtaggattaatttatacggatatgaaaaataa

SEQ ID NO: 128610 - DNA, 132 bp, Enterobacter cloacae
atgaacgttgacgcactgacgcaaaaggcagaagaagaaatttcagcgcttataaccaaaaaatttcagagttacgtaaaaaaacagggcaggaagtgtctgaaattgagtttatcgctcgtgaagccatga

SEQ ID NO: 128611 - DNA, 321 bp, Enterobacter cloacae
atgggattcgcatcaccagcagctgattatgttgagcgtcaactttccccagcaatcctgtgcaacatcggggctgaaagcagggtgctcgaaactgatatggggtttgcggtcatagagccagcaacgaaaaagacgcctggagatgtgttgttaattttgtgcgacggccacacacaatttgcaaaactcatgggcaaggcgctcattacggatgatggtgaagcgattgagggtgcagcgcttgaagaagtggaagtgctgggtagggtgacattcttcatcaatcgtgcattagatgatgattgccctgcaatatag

SEQ ID NO: 128612 - DNA, 1356 bp, Enterobacter cloacae
atgctttataacactggcaccatcgcagttaacggaaacaccgcaaccggcactggcacgaactggacggcaccggccagccagattcgggttggccagacgttgtttgttctttctaacccggtacagatgtttcagatcaccgccatcaacagtgcgacatcactgacggttacgcctgccgcgtctccggcgttgagcggccagaagtacggcattctggttacggatagtctctcggtcgacggcctggcgcagagcatgtctcagctgatcaacgagtacgacgagaatatcggcgcgtgggagacgttcgccaccacctcagcaaaccagagcatcaccgttaccatcaacggcgctcgtgtaaccattccggcgatcggcaaactggtccagaaagggagcaatggggcggctggagtttcggacggtgggaccggggcaacgaatgccgctggcgctcgcacaaacctcggtttgggaaatagcgctacacgaaacgttgatgagcagttttccccaggttccgcgtatctgaacggagcagctgtaatggcgcaatgccatcgcgattatcgcagtctcggctcttatgacgctatatcccagtacccgctcggtatgtcttttggtatacagcttggaggaaacgcctggggaggaggaagcggagtagatacatacacgggtatgttaacactccgtggctggcaggattcgacgggtggtggctatgcgtcgtggcagcttgcgtcaacctctcaggggctcaagtatcgtcagggtaatggaacaattcagggcaatgctaacgtcgggttctccacgacgcataccctttattcgacgcagaacaccacaaaagccagcgatggaacgctcaaggctgcatctccgatcgccagaatcgtaaaatctcaggaagagaaccagcgtaccgatgttgacgaagtaggcttcacctggtgcggctgcggtacggcgaacgccgaggctgaagggatcaatatctcgcggatggatgttggggtgtatgttcttatcggctcggcaggcctggcatcagaaggttggcaattgctgccgccaatggacccgggtggaatgggagaactgggtgttgttgaagcagagcagacggaaagcggtgggctgacgattcggctttttaagcggaaatacatgctgagcgatgaaggggagatcgtcaaaacaaaaggggctcctatggatgttccggccaacagctggatcgacgtacgcctcgacatgcctgatgatagcatttggaatacaagatcttctgaagcttctctggaactgacagagcagccagcagtcattcagccttaa

SEQ ID NO: 128613 - DNA, 366 bp, Enterobacter cloacae
atggtgaaaattttaatactcataatatttctgattgcgggttgtgctggtgatacaaggaacgatataaagaataataaaaaactttctttctcatcaagcagaagtgcagatgacgtaagtggttgtatactagataaactagattttttaataccagaaaaagttgttaccaataacttagttgatggggaaggtttggagatttatattggtgcgattcagttctcccgcatgaagtattttcatagggtagaggttaaaaaaaacaatagtcaatctttaatctcttatcaacgttctgaaactgacttcgtaccaatttctgaaaaggaagttttggaaataatcaaagaatgcaaatga

SEQ ID NO: 128614 - DNA, 327 bp, Enterobacter cloacae
gtgattgaacttgtgacactggatgagataaaggaacacctgcacattgatcatgatgctgacgacggcccacttaaggaaaaaatacaggaagccagttcggtgttgctggcttttattcagggaagccgggacaaggtcgttgatgagaaaggaaagttaatagagggtgaagcgctcagtcggatgaaggccgccacgatgcgtctggtgggcatgttgtaccgaaatcccgacctggctgataaggaagatttacttcatggagagcttcctttctctgtatcgtttttaattcatgatctccgacttccgacaattatttga

SEQ ID NO: 128615 - DNA, 219 bp, Enterobacter cloacae
atgagtagcaatatccgtgctcgctatgaagcttcgccgcgctctgctaatgcacaggcgctgcgcgaactggctgacgttgccggtacaaacgatgctgttgatgttctttgcctgtgccttgatgtcgctgacaacgacggcatcggggaagaagaagagaagcagctcaagaaaatcgctcaggcgctgcaacttccactggaccagtacctgtga

SEQ ID NO: 128616 - DNA, 198 bp, Enterobacter cloacae
atgttcggtatcttcaaaaagaaagcacgtaaagctgttgtcgaagttaagaaaatggaaaaccgcgacgcggttgaagctacggtgtggggtgcttactccattgcgtatgccgacggtacatgcgacgcgaaagaaatcgccactctggaaaaaaaccatttcagcattgcctgctttcgcaccgttcgctggtga

SEQ ID NO: 128617 - DNA, 996 bp, Enterobacter cloacae
atgtttgagcagcgtaaagctctgtacgcgcaactggaacaagcacgtaattcaaaagtattatgctatgtcacaggtgacagaccaaaccaagaagctcaaatcagtgctgatgtattcgatttgttcgtcaatcatttagatgtgatcggtgatgttcaaaaaattagtcttgtgctttacacacgaggcggggatactttgacagcatggagccttgtaaacctgcttcgtcagttttgcaaagagctcgaaatcataatcccatccaaatgtcatagttctgggacgataatgtgtcttggtgctaacaacttggttatgactaagcaggcaaccctggggccaatcgatccgagtgtgaacacaccacttaacccttcgaccattatcaatgggcagcaacttcaacttccagtgagcgttgaagaaatcaatggttatcttgaagtagttaagcatgatttgagtatcaaagatgacgcctcacttgcaaagatcctccttgcattaagtgaaaaggttcacccactggtgcttggtaaagtctatcgagctaaagcgcagattcaaatgctcgcaagaaaactactttctcatcaactcactgatagtgaaagtattgagaaaattgtaagtttcctttgtagtgattctggtagccatgactacactataaatagaatcgaggcagtaaacgatctgggccttactgtggaaaaaccagatgagcatctttacggcctgattaaagaaatttatgaagatttcaaaactgagatgcatctgggtgaaccttttgacctaaatgctatcttaggaacagtgaaccaagcatcatacgtatctgtcagaagcattttagaggctccagatacgttttcatatcaattccgcactgaggggatgttacagcgttttcaagttccaggcgccccaggtcagttcggcataaatcataaccttatctcagaagggtgggctcgacatggataa

SEQ ID NO: 128618 - DNA, 150 bp, Enterobacter cloacae
atggaacgaatcatcgaaatattgcaatacacattacgcaaaggcaccggagtcacttttcacaatatcatgcgggaaatcagcattcccctacaccagcgccacgggatcgaggttatttcgttcggacactccatgcataacccgtga

SEQ ID NO: 128619 - DNA, 414 bp, Enterobacter cloacae
atggaatcacgatacactctggttgatgcagtgccacccgcagaggacttttgccgcttgcgcatcatatccggtttaaccccccgccctcttgaggccgcaaaacaagccctcccaagaagctgtcatggcgtatatattgaatattctgatcttattgtcgacatggggcggattgtcggagatggagcgctcaacttcgaaatcgtagatgttgcagtcgatccagaacatcaaggtaaagggctgggccggaaagtcatggaggcattaatgtcctggctcgggcaacaagcaccagttggagcatacattaccttgatcgcagatgttccagagctatatgaaaaattcggttttaaaaccgtccgtcctgaaagcgaagggatggcgctcatttggggatcgcattaa

SEQ ID NO: 128620 - DNA, 129 bp, Enterobacter cloacae
atgcctaaacaaaaggtagttcgtgatgcgggtactggtcagtttgtaaagccggaagaggctaagaaacgtccagggacaactgttacggaaactgtaaaaatcccccctaaaaaagggaaaaagtaa

SEQ ID NO: 128621 - DNA, 468 bp, Enterobacter cloacae
atggaaaaccataactttgaaaggctaaaagaacatattttgtcgttatctgtttcaaaaaacttcgaagttgccaaaacagagtggagtctacattcgatagaagtttctgaagaaatggatttctgtccctgtggtcaagatatcaaagagcattgctatattgaaaataaaaaaaatggcaataccacgtatgtcggtaacgtttgtataaataggtttttgaatatttcaactggaactttgtttgaagggttgaaaaggattaagaaaaatattcatgccaatccaaacttggcattgattgagtatgcaaatgataaagggtatttatacgataaagagtatgatttccttgttgatacgatgaagaaaagaaatcttagtgaaaaacaaaggttgtggaaagagaaaataaataatcgtatccttaaagaagtcgttgttaagaatcgtacagcaagatga

SEQ ID NO: 128622 - DNA, 576 bp, Enterobacter cloacae
atgaaaaaaaatctttatagcctgtcagtcgttgccgtaacgatgctggcgttatcaggttcggcgctcgccgagggcacgaatctcgatgttaactttacggccaatatccgtgaaaccacttgtgatatgaaactggttggtggtacgggatccgatgtacagcaaacgctgcttcttggtaagaatgggcaggtacgacttgacgatgctaaagccggaacggcaaatgccaatttcaaaatcgtgatagttgaatgccctgcgtcccttacctcactgaaaaccacagttagggggaccccgtcaggctatttgcctagcggacttgtgaaccaaatattaaaaactagcggtggcgccgatttctctgctgtcgaaattgccagaactgatacaccggatgctccctttatcattaactctaaaatggatgaagagcgcctggtctggacctcgacagaaatccaaaataaggaagttcctttggtagccacattacgtgaaacacagaccggcaagatgaccctaggtgacttccaggccgtggcaactttcgaattcagctacgagtga

SEQ ID NO: 128623 - DNA, 660 bp, Enterobacter cloacae
atgacaacctacgacaaattccccacggtggcgatacagggttttgatgacagcgcctggcaaggctgggaagcaataacccgcgttcttgagtcaaaaacccaacagcgcagccgcacggtgctggtgattgactgctatccgggcgtgcgcatgaccgagcttgaagagaacgtgctgccgcgtctacgcccgacgctggcgatcaatgctgaacaggtgcgacgggatgagtgtgccattcatgagatgctggcacgcaacctcacagacgatcgcgtctttggcgttctctcctgccaccagcttggagagtttttcgatcccgcgcgtctggaggcgttgcaggttcgggtgagccagtgttccggggggctgattgtgatctacggtcccggtgcgacgcttgtccatccgggtgatgtgctggtgtatgccgatctgccgcgctgggagatccagcagcgtatgcgccggggtgagactgggaactggggcgcagataatcagcaggaagatatgcttcgtcgctacaagcgcgccttttttgtctcgatcgccacaaaacgccgctgctcaggcgcaccgattttttactggatacaacccagacgaaccagcccgcgatggtcagcggcgaggccctgcgagccgggctga

SEQ ID NO: 128624 - DNA, 2091 bp, Enterobacter cloacae
atgtttgctaaatcgcgtctggcactgctggtgggatgggttaccggtagcgttgcttttcctttactggcgcaggatgcccaaaaaactgacaccgtggtggtgacctcgcagatgcagtctgcggccaccaagcttgaaacaccggatattgaaaccccgcagtcggtctctatcgtcactcgcgagcagttcgaagagcagggcgcaaccagcgtgcgtcaggccgtgagctacacgccgggggtctacagcaaccagatcggggcgtcaaaccgctttgactacatggtgctgcgcggcttctcggacggcagcctggataacgtctacctcgacggcctgaagatgatgggcgacaccaactcccacagctcgctggtggttgacccgtggttcctggacagtatcgaagtcgtgcgcggtccggcctccgtgctctatggtcgctcatcgccgggcgggattgtggcgctcacctcccgtaagccatcgttcgatcctggcggggagatcaagctcttcgccggtaacaataaccagcgtggggcgatgttcgacgtcactggcccggttgatgataacgaccgcgtggcggtgcgcctcagcgggatgacccgctatgccgattcccagttcgatccgctgaaggaagagcgttacgccctgatgccgagcctgacctggcgtatcaccgacaacacccgtctggatctgatggcctacctgcaccgcgatccggaaggcggcagccactccggcctgccatatgagggcaccgttgtaccgcacagcggtaagaaaatctccaacaccttcttcgagggcgaggacgattacgacaagtacgatcgtcgggaaaacatggtcggctataacattgagcacctgtttgacagcggctggtccgtgcgccagaagctgcgctacctgcacaccaaagtcgagctgaaccaggtgtatgccgcaggctggctgaatgacaccgagctgaaccgcggctattccggctccgacgagaagatgaacgccatcaccctggataaccaggtcgacggcagcttcgataccggggcggtaaaccaccgcgtgctgatcggcatggactaccaggaccgcaccaacaacgtcaccggctactacggcggcttcccgccgattgacgctttccatcctgtttacggcgcgaagccggactacatcacccagtacagcagggaaaaacacaagctgcgccagaccggctactacctacaggatcagatgtccattgaccgctggcgcctcacgctgggcgggcgttacgaccaggtgagcgtgtcgaacgtcgacaacttcaaccacacccgcagcgatctggataaaaataacttcagcagccgcgcggcgctgctgtatctgtttgataacggcgtcgcgccgtacgtcagctactctaccgcctttacgccgaccagctttgccgacgagcagggcaacattttggatccgatgaagggcaagcagtgggaggcgggtgtgaagtatgagccggaggggatgaacagccagttcagcgcctcggtgttccgcattaaccagaagaacattgccactaaagaggagccgaccgatccgtaccgttccatcggtgaaatcgaatccgaaggcgttgaactggaggcgattggtcagctgaccgacagcctgcgtatgcaggccgcgtacacctacacggatattcgctacaagaagagcagcccggaagaggagggcaagcgcgccgtttatgccccgcgtaacatggccagcgcctggctgagttacgacgtcaaaaccggccctctggacggcctgaccgtcggctccggcgtgcgctatgtcaacgggatcgccagcgatcgccagaacacccatacgcttccgtcgtacacgctggtggatatgaccgtggggtatgacctgtcgaaagtggggctcacgggcgtgagcgcgcagttgaacgtcaataacctgacggacaaaagctacgtcgcggcgtgtaactcgctctcttactgctacttcggtgcagaacgcagcattgttggcagcgtttcgtggaagttctga

SEQ ID NO: 128625 - DNA, 648 bp, Enterobacter cloacae
atggcgcgcaaaaagaaagaagaggctcaaaagacccgccagcagctgattgaagccgctatcgggctattcgcgacgcgtggcgtgtccagcaccacgcttaccgacatcgccgatgctgctcaactcactcgcggggcggtttactggcatttctcgagtaaagcggaaatattcaatgcaatatgggatcagcaattgccgatgcgtgagatgattcgtgacaggttaatactttccgaaaatgacgaccctttgttaatgcttcgtgaacaatttattgtcgcactacaatatattgcgagcgagccgcggcaatatgcgcttttacaaattttgtatcataagtgtgaatttcatgacgatgtgatttcagaatgtgaaatacgcaagcggatcggtttaaacgatgattatcttcgcaagacgctaaagcgatgcattgctcgtaacgttatctcttcgcaaaccaatattgaactggcgctgattgttttccacgccttttttagcggtgtcattaaaaactggttaatggatagcaacaattttaatctgtacaaacaagcaccggcgctggtggataatattctggcgacactaaatatcacccgagtggcaccagtggtttacgatacagcctcatga

SEQ ID NO: 128626 - DNA, 1221 bp, Enterobacter cloacae
atggctggcgaactcaacaaactgagcgacaggaagttaaagggattacatggcatcccggccagtaagattgagttttatgctgatggtgccgggttgagtgctaaggtaacgaaagctggaggcattagctgggtgtttacttaccgactcgacgggcagaagctgcatcggctgactctggggcgctaccctgatatgagtctcaaagaggcccgttcctcgcgtgataaatgtcgtcagtggctggcctctggtaaagacccaaagcaccagttggcgctaactactcaggaaacgcttaaaccggtcacggtgcaggaagctatcgaatactggatacgcgaatatgcggaagaaaaccgtgcgaacgttgagcggcataaagcggagctgcgcaaacacatttacccttatattgggaaaatggcgctcgctgactgcgaaacccgctactggcttgactgctttgacaggatgaaaaagaaaacgccggttgctgctggttatgtattccagatgtgtaagcaggctctgaaattctgccgcgttcgccgttacgccgtcagtaccgcccttgaagatttgagtattcccgatgttggtaaaaagcaggcgaaaaaagatcgggtattgaaagataaagaggttgggggattgtgggctgctatatcgtccggcgatgtttttctgccttactacacaaacttgctcaggatcaccactttgtttggttgccgcacccaggaggccagattatccgagtgggctgaatgggatatggatgcatgggtatggactgttccgaaagcgcatagtaaaggtggtgaaaagattgtgcgcccagttccagaggcgatgcgttcatttattgaagttctccacgatgaaacaaaatcatccggctaccttcttggggttgtgaagaatagcgaagcggttagccagtggggccgtagtgtttataaaaaactggggcattctgaaccttggacattacatgatctacggcgaacgcttgcaactcatatgaataatatgggtatcgctccgcacgttgtcgaacagttgttggggcactcaatgccgggagttatggcgatttataaccgtagtctgtacttgcctgagaaattggatgcgttgaataaatggtatgacagacttgatattttatcaggtggattcactaacattgttttgttgaatagggctgaataa

SEQ ID NO: 128627 - DNA, 651 bp, Enterobacter cloacae; identical to SEQ ID NO: 20389

SEQ ID NO: 128628 - DNA, 285 bp, Enterobacter cloacae
atgcaaaatataacctttaccccgccaaatcctgaacagcgccgcacccttttagaagagtacggctttaagtttgatcgccgaatccgtgaagatgaatgcagcgagatcaccagtctttcccgttccagccgctggaagatggagcagcaggggcgcttccctccgcgctgtcactttggccgcaatagctgtgcttggcttctttcggatgtgctctggtgggttcgtaatccgccagcagtagagaacgtcaataacccatacagccgtaaatctgcttaa

SEQ ID NO: 128629 - DNA, 693 bp, Enterobacter cloacae
atgaaaaagattaatgccctccacgggcagggattcgctcaccctgtagccagccagcacgatatttcagcgaaccgtaaacaggttatttccggtgactggtcgcccattaatcgcggtgaatttacgcttgccgatctggggttgcgccacaacggtaacgggctggtgtggctgcgttccggcgtgtccgtgcatgaggcataccatgatgcagggataagcggcaaggacaagaccaaaggaagggttaatggtcttccttttgaatttgtcggccagtggcaggaatacccgactaaacgcagctttgccgtttcagtatctacggaactacgccgccagtattacccggacgatgccacttttggtaaggcgatgcgtgaggcgggttatatacccgtgcgcacccgtaaattgaccgggaagctggcaagttactggctgtatcgagtaacgggtgatgataagggggtatgcacagcagaacccacgctccgcaaggcttccgagccagttgtccagaccatatctaagcctcatccgtggtttaagcgtgtggcactcgatggtaaatggcagtacgtctacgcagatcacatccgctttctgactaaaaagcgtcatcgcgtcgatggtgttcgggttcaggggtataccgctggcgggctgaaagtggaggctattgtatga

SEQ ID NO: 128630 - DNA, 1092 bp, Enterobacter cloacae
atgacaggcaaaacaaaggcggccatgccgggccgcctgagtctcaacgctttactgaaacatcgccagattaccaggcttgccgctggtggtcaaactttgcactcgcccgttttggcgaggtcaaattatcaccagggattcaaaatccgagctggagttcaaaatctgcgctcccccgtttgggggtgctcaaatcatgatgaggcagccgcaagcgatttgcataactcaatcatggttgcgcagaatttgagccgacgaaatccgtacgcacaaattaaccgcgtacgtttaacgtacggagatcgagacaaaggcgaacagtattcgggttcatggcaaaacaacgttaaacgtggtttagaggctccgacgaaaaacgtagagagctgcgaagataaccaaccctctttaagaggggagcctctgcacaactcattaatagttgcgcaaaacagaccctttttaagaggggcagtccacagcattacggggagtaaccctgttcagctttcaggttccgatctggctttcttgcgctgctcagatttgagtttgcgcccgcaggcatccagaacccaagcagagaaattagcaccggagttatctgccttctcccgttctacgcttgcgtcaatctcttcaatcaggtcatgcggaaagcggatttttttagtagctgattttgcattaacggacttggtagccataagtcttcctcaaattagtgtgggaacaccatacattaaaaaagaatgcaaaaacagtcttgacgtgtggccgcactttaaactagattggtgtggccgcaccttgttttctcgatgcggaaatagcgaagcccggcagtgcgctaacactaaccgggcctcttaccacaacgtaactgaggcttacatcagggcttgtatacagcatacccaaactcgccccaaatatcagtatcgatttctggccctcagcgccactgaaagcaacgtcattcacatcaccgctaccactgagcgcgaagcccgtgagcaatcaccggcaggctgcgtgatggtattcgctggccgtctgccagttcgggaggctcgctatgcgtga

SEQ ID NO: 128631 - DNA, 195 bp, Enterobacter cloacae
atgcgtgagccaatcagcttagacaaggcagaatacaaatcagcgctggctgcttcacttttcgaaaccattttggaaaaagcctgtgctgagtgttcggaaaccctgctgaaccatatctcactggcatgtgaccttaatcaggaaattcaccgggcattaatcgccgagctgggtatgggagaagcgaaatga

SEQ ID NO: 128632 - DNA, 213 bp, Enterobacter cloacae
atgagacaagttccttttgaagtcctgatgcacgctgaaaatgccctttcagagagtgagtgcgcaatgtctgtgctgagcatgtggattgacagcattcccgacggtgaagaacaccgtgaggaagcgtgccgtgtcggagcaattatgtctctgctgcacaaatctatcggcgagctggtgaaggcgcgggaggcttacagtgcaaaatga

SEQ ID NO: 128633 - DNA, 2664 bp, Enterobacter cloacae
gtgcaaaatgactttgtaagcgatgtacgcagcaaggcaaacggctactggccgtcaatactggagcgcctggcgattccgacgaatcgcggtgaggggccgtgtccggcgtgcggcggcaaaacccgctaccggttcgacaataaagataaccggggaacctatttctgttcgcactgtggcgcgggtaccgggctggatctggtgatgaaggtcaatcagtgcggtgcgagagaagcggctgagatggtggccgaagcgatggcgctgcctatgccggaaccgaagccagccagagaaaagcctcaaacggatatcgccgggaaagttgcggcgctggctgctaaagcctctccggggcagtctgcttaccttacatcaaaggggcttcaatgccccttcccgatgctgaccgatgggtcgctgctgctggtgctgaaaaacggtgctggcgcgacgacaggcgcacaggtgattaagcctgatggcagtaagcggctggtggccggaacggtgaagaaagcctcttttggtgtggttaattccgttgaattgacggaaacggtgattatcgccgaagggctggcaacggcgctttcagttcagcagttccgccctgatgcgacaattattgcagcgattgacgccgggaatctgctgccagttgcgcaggtgatgcgacagcgttacccgaatgcgcagatcatcatcgccgcagataacgacattaagccgggagagccaaacacaggcaaaggggctgcagagaaagccgctaaagctgtctctggccgggtggctttacctcagtctgaggaaaaggccgactggaatgattttcaccagcaacacgggctggaagcagccgcagcagcatttaatgattcgatgtaccagccggagggcgaaaaggtggtggtaaaacttaagtctattgacggcggtaaaaaagagcaaaaatcagctctgcaaggtgacgaactgaaaccacgcgtggagagccgtaacgatggcttgtactggattacgccaaaggtggacaaggacagcggagaaatcatcaataacgaagcgtggctttgttcgcctcttgaggtagttggttcaggtagtgacggggcagaacgctatcttgttttgcgctggcgttcgccgcgtggccacgaagatattaccagggcgatcccttgcgctgatgttggagagcgtgagggatggcgctcacttaaagctggaggggttaacgtgaccactaaaaacacctttcgtgccattctggccgattggctgcagcagtgtggatctggtcaggaatggattatcactcataccactggctggcataatggggcatatatcatgcctgatggcgaagttattggtgatccagagacacccattctctttaatggtcgcagcgctgcatcttccggttatgccgtttctggtacggctgagggctggcgggattcagtggcttatctggccggtggcaacccatcaatgatgctgggagtggcggcggcattatccgcgccgcttattgggctggtgggtgctgatggtttcggtgtccacttgttcgagcagtcgagcgccggtaagaccactacagctaatattgcgagcagtctgtggggagagccggatgctctgcgcctaacgtggtacggtactgcgcttggtatcgctaacgaagcggaggcgcataacgacagtctgttaccgctggatgaagtggggcaggggagcagcgccaaagacgttgccacttcggcatacaccttgtttaacggtgctggaaagctgcagggagccaaagagggcggcaatcgggagttgaaacgttggcgcactgtagcaatcagtaccggggaaatggatatcgagacgtttctttctgctggtgggctaaaagttaaggcaggccagttggttcgcctgctgaatatccctatggagaaatcgacggcctttcatggcctgcagaacggcaaggctcatgctgatgcactgaagcaggcatggattgaaaatcacggtgcagcgggccgagagtgggttaaatggttggcggctcaccagaaggaagctaaacaggccgtacatgacgcccagacgcgctggcgcggactcattccggctgattatggcgagcaggtgcaccgcgtggcagaacgctttgcaatccttgaagctgcgctggtgactggtgcatcaatcaccggatgggatgaacaggccagccgtgatgctatccagcatagctttaatgcctgggtgaaagagttcggaacgggaaataaagagcaccagcagatcatcgagcagtgcgaggcgtttcttaatgcttatggtctgagccggttcgcccctttgccttatgatcctgcaagcctgccaatcagtaatcttgccgggtatcgtaagcgtaagagcaaccatgatgatgcgcccatggtgttctatacattccctgcaacgtttgagaaggagatagcgcagggatttaatgctaggcagtttgcccgtgcgcttgccgctgccggtttgctctctgagccatcaagtgggagaggatatcaacagaaatcaccgcgaattgatgggcgccaaatcaacgtttatgtacttcaacaagttgcagaagaaggggcggaataa

SEQ ID NO: 128634 - DNA, 303 bp, Enterobacter cloacae
atggacaaaaaaagcagtgatgacctggtatattcgaaggtgctgatccagaaactggttgagcacaaagatatgtttggggttccagacagcaaaacggatttgcagcttatgccgcttagcgaataccgggaactggtgaagcgagaagctttcttttttgtggatcacaatggtttcctgcgccatcaattttctggtgatgttatggctgccagcaaagaacaactggatatccttatcggcgaattgaaagcgaagcgtgagctgcttgatgatgctctggattgcgctaaggaataa

SEQ ID NO: 128635 - DNA, 1167 bp, Enterobacter cloacae
atgaagaaactactcgaattacgccagcagaaagccgcactcaaaacacagatgcgttccatgctggacaaagccgacaccgaaaagcgcagcctgaacgaagaagagggcaaaaagttcgacgaactccgcgcccaggctgatgcgcttgaagttgaaatcacccgccttgaagccgtcgccgacgatcagcgcaatctgcctggtacttccgtcgaaggtgagccagtaagcaacgacgagctgcgccactacatcatgacaggtgatacccgttctctctccacgctggtgcaggctgacggcggttataccgttatccctgagctggacaaagagattatgcgccagttgcaggatgatagcgtgatgcgctccatcgcaacggtgaagaccaccaaaaccaacgaataccagaagctggtatctgtgggcggcactaccgttaatcgtggtaccgaaggtgaggcacgtaccgaaaccagcacgccgaagatggaacgcgttgatatcaaactcaacccgatctacgcctacccgaaaaccactcaggaaattctcgacttctccgaggtggatattctgggctggctgtcttctgaaattgccgacaccttcaccgctaccgaagagagtgacttcgtaaacggcgacggtgataaaaaatccaaaggcttcctgtcttaccctcgcgcggccactgccgataaaacccgtcctttcggtacgctggagaagatggaagccgctgacgtttcctctgatggtttgatcgacctgctgtataagctgaaagccaaatatcgcaaaaacgccgtatgggtgatgaactccaacaccgccgccaaactgcaaaagctgaaaaatggcaacggggattacatctggcgcgatcgtctggttgccggttcccccgatacgctgctgggccgtcctgttcagtatctggaaaccatgccggatgcggaggcgggtaaagcgttcctcgctgtgggcgacttcaagcgcggctatttcatcgtggatcataccactggcgtgcgtacccgccctgacaacatcaccgaaccgggtttcctgaaaatccatacggacaagtatttaggtggtggggtggttgattcccgtgcaattaaaattctcgaaatgtcaggttcaggctcctga

SEQ ID NO: 128636 - DNA, 540 bp, Enterobacter cloacae
atgaacgaacctgagaaagaatattttaattgctgtctggcttaccaacccaacggctcacttatctggaaacaaagacctgaaagccatttttctagcgttgctcaggccaaaacatggaatgcgcggtacgccggaaagtctgctggttgttattccaatggttacagagttgtttctgtaaataaaaaactgcaactggcgcaccgggttatctggattatgcatttcggctctatacccgccggaatggaggttgatcacattaaccatgttaaaagtgacaaccggataacgaatttgcggctggttactcatgccgtgaatcagaagaatttatctatccagaaaaataacaccagcggcatgacaggcatacgccgtgataagcgaagcaataaatggatagtccagattaaacctcgcggacaaaaaacaaaacatattggctcgttcgatgaattagatcttgccatttcagcccggaaagctgcggaagttaagcatggctttcataaaaatcatgggagcctgaattaa

SEQ ID NO: 128637 - DNA, 561 bp, Enterobacter cloacae
atgaaaacaatcgattttgaaatccgtacctctgagcttaccgccaaagagcgcaagctggtgggctatgccgtgcgctggaacagtctctcagaaattatctgggatgaattccgggaacagttcgcgccgggggcgtttaaagacagcctggcatctggtagcgatgtgcgtgcgctgtatgagcataactacacccaactactgggacgcactaaatccggcacgctggtgctgtccgaagacgataccgggctgcgcttcgagctgaccccgccgaatacccagcttgggaatgatgtactggagctggtggagcgcggtgacatttccggcatgagctttggtttccgtgcgtcaaaagatttctgggatacagcgaaattaccttacacgcgaaccgtcatcactgctgaactacgcgaaatcaccgttacttctatgcctgcttaccctgagtccggcgtggaaattgcgcaccgttctctgttctcccaacatcctgaactgcgccgcgctggtgataaccgccgacgctgggctgacttagcggggctgtga

SEQ ID NO: 128638 - DNA, 1236 bp, Enterobacter cloacae
atgtggaatatctggccttttggccgtaaatctgagccatccgaacagcgcagcatgacgattgatgagtttctggcgatggcagggattccaaataccggatcaggcgagtatgtgtctgcgggtactgcggaatctctgccggcggtcatgaacgccgtatcagttatcagtgaggcggtggcaacaatgccatgctatctctaccgcgtccgtaatgataatggtcgtgaggcgcgagaatggctgagtaatcacccggtggattttctcctgaacgagcagccgaacgactgccagacgccttatcagtttaaacgcacgatgatgcgccattgtctgctgaacggtaacgcctatgcggtgatccagtggggccgcgacggccagccgcaatccctgcacccgtatgcgccggtggcggttgttcctgagcgtatcggccagcataagtacaaatacaccgttacagagccgtttaccggggctgtgcgcacctatctacaggaagagattctgcacctgcgttacttcaccgatgatggctttctggggcgttcgcctattactacgtgccgtgaggcgctggggttaggtctggcccaacagcgccacggtgccagcattatgaaagatggcatgatggcggcgggcgtcgtcactactgctgaatggctcgacagcgtgaagggtaagcaggctctggacgcactggagcgctacaaaggtgccagaaatgccgggaaaacgccgatccttgaaggtggcatggactacaagcagcttggcatgagcaatcaggatgccgaatggctggcgtcgcgccggttctccattgaagacattgcccgcatgttcaacgtgtcccccatcttcctgcaggaatacagcaacagcacctacagcaactttagtgaggcgagccgcgcatttctcaccatgacgatgcgtccgtggctggcgaacttcgagcaacaaattaaatccgcgctgctggtggcctctcccgttccgggaacccgctatcaggtggagtttgactctgctgaccttctccgtgccacacctaccgagcgttacgccacttatgagcgcggtatcaagaacgggattatgaacccgaacgaagcccgtgagcgtgagggtatgccgccgcgtgaaggtggtgacgaattcagtcaggcatggaagcaggaagtgaagatcagtaaagatagcaaggacggtgacttatga

SEQ ID NO: 128639 - DNA, 339 bp, Enterobacter cloacae
atgagagccggaggactgagaagccgcgtcactatccgggtattcactaccgaccgtgattcaactggtcaggttattcaggtgtgggaagacggggaaaccatctgggctgaggttaaggggatcagtggtcgtgaactggtggcggctggtgctgaggttgccgaagcaacgatccgtgtctgggtgcgtttccgtcgagatattactgctgccaaccgtctgaaggtgctgactggcccgtttgccggggcaacgctcaacatcattggaccaccgataccggactcaggcatgacgcatcttgaaattctctgcaaacaggggaccgagaaatga

SEQ ID NO: 128640 - DNA, 294 bp, Enterobacter cloacae
atgacaactgaaatcaccctggctgaagcaaagctgcattgtcgtattgatggcaatgatgaagacacgctgatacaggcgtacatcgatgcggcgctggaggtttgccagaagcatatcggtaagcgatttgataacggtctggagtttacccccgctatcaggatcggctgtctgatgtacgtctctcagctttatgagtaccgcacgatgattggcgacactgaggcgaaagaggttccgctggctatatctgcattgtggtcggtctatcgtgatgtgggggtgtactga

SEQ ID NO: 128641 - DNA, 444 bp, Enterobacter cloacae
atgccgtggcagccaatgcgccggtgcaccgaaccgggatgtaataagcgggtaaggtccggcaagtgtgacgagcacaggcgggaagcgtggcgggagcaggatgccagacgcggccatcggcgcgcccgtggttactctgcctcatgggagaagtaccgcgctcagtatctgaaacgtcaccccctttgtgttgagtgccagaagctgggcctctacgttcctgcaaagattgtcgatcacatcatccctatcaatggcggtgatgatgttctgttctggccggagtggaaccaccagccgttatgccagacacatcataaccagaagaccacgcagcaggaccccatcaccaaagcgaatcgtaaagcagggctctacatcgagcaggaagagcgggcagcacagcgtaataactggatgtatgaggccagcgatgaatga

SEQ ID NO: 128642 - DNA, 192 bp, Enterobacter cloacae
atgcttccgcaaccgctgacaggccgcaaggacggggtgggggaggttttcaggacaaaaccccagccgcaaggcaccacccgccccctcaaatttttacgcacggtgatttttttggaaataaaacgcgatggaaacgagaaatttttatggcaagaccacccaaaccgccagcctaccttgatgagttag

SEQ ID NO: 128643 - DNA, 1662 bp, Enterobacter cloacae
ttgaccgtctggaatgagtacgcaaatgcgataaaaacgggcgaaattccggcctgtaagcgtgtaaaacaggccgtggaaaggtacttttcagacctgaatgacccccgttatgagttcgatacggcgaccgtagagcggtttatcgccttctcccggctctgtccacacgtcaaaggcccgttgcgtggccagccaatcgagctggagccttggcagcagttcgcctttgctaatctgctgggctttaaggtcagggagtcaggccgccggaagtatagcagcgcttttattgaggtgccgcgcaagaacgccaaatccaccgtagctgccatgctggctaactggtttctggtgatggaaaagggtcagcaggatatctacacggcggcggtaagccgggatcaggcccgtatcgtgttcgacgatgcccgccagatgtgcctgctgtcaaaaccgctgaaaaagcgcgtcaatattcaggcgcataaggttatttttccgaagagcaacagcctgttaaagccgctggcggcgaaggcggccaccattgagggaactaaccccagcctggcgattgtcgatgaataccaccttcacccggataacggcgtttattccgcacttgagctgggcatgggcgcacgtccggaggcggttctgttcgccatcaccaccgccgggagtaacgttgtctccgcctgcaaacagcattacgactattgctgccagattctggccggggaagagggaaacgattcgctgtttgtcctgatctacgaactggacgacgaaagcgaggtggataagccggaaatgtggatcaaggctaaccctaacctgcatgtgtctgttgacgcggcgaagctggaatccaccatccagaaagcgcggggcataccgtcgcaatgggtggaaatgctgaccaaacgtttcaatatctggtgtcagggctccacgccgtggatgggggccggggcatgggatgcctgtgcgatcgactataccgaagacgatctggccggaatggagtgctacgccgggtttgacctgtcctcaaccagcgatatcaccagcgtgagctacgctttcccgttcgacagggagatcaggctcctgacccgtcattatctgccggaagcgcagctacttaacgttgctaacaaaaaccgcgccatctatcgccagtgggtaaaagcgggctggatacgaaccacccccggcgactgtatcgactatgaccgcatccgtgacgatatcctgcgagacgctgaaacattcaatatccggctggtgggctttgatacgtggaacgccacacacttgcgcactcagttgcagggggctggcctcgatgtggagccgttcccgcaaacctatctgaaattcagcccggtagcgaaatcttttgaggtttttgttaaccgcaaggtggtgcgtcatcgtggcgatccggttctggcctgggcgattggtaacgtggtgatggagtccgacgccaatgccaatatcaaacccaacaaaaagaaatcctccaacaagatagacccggcggtttctgcactcatggcgttcggcacattccaggcagaacacgaagattttgcattcgatatgagcgatagccataagcagcgacttgccgaatttaccgggatttga

SEQ ID NO: 128644 - DNA, 192 bp, Enterobacter cloacae
atgcttaaacacaagaaaattgagtctgtgatcgacgaaatggcacgtcaattgggccatgaacttaacgggcaggataagctggtaatccgcactaaaacagctatggtgttggccgctaaacagcggcaccgccagcgcatggaagcgccaccctatcagtggcgaaagccagataaattaaggcgttga

SEQ ID NO: 128645 - DNA, 816 bp, Enterobacter cloacae
ttgcagggggcgaacggctgggcagtctatgatgatacgctgccggagaaagggcgcggcaacgtgcgctggcgaaccctgattgaacagatgctgagccggggcggaccgcgcatctatcaaaaaccggcggtcatgaagaatggtcatgttcatcatcgtgagctgatgtgccgtatttttgatggcactgaagaggttatctccgcggaatatctgcccatggtgttgcaattcggattgtccgaagagtatgaccgtcagcaaatcacccgtctcattccgtttttatcgtactggcctgaagaaaatctggctttacaggtgaccgtcgaatcgctgatccgtccgcgtttccagcgctggttacgtgacacgttaatgcaatgcgaaaaatcgcaacgcaaacgcattatttttgaacttgcagaggcagatgtaggtcaacacatcagccggttgcgcccggtagtgcgtttaatcaatgcgcttggggctcgcgtggcggtaacccaggcgggtttgacgctggtgagcacccgctggatcaaagagctggatgttgaattattgaagctgcatccgggtctggtaaggaatattgaaaaacgcacggaaaaccagctgctggtacaaagcctggtggaagcgtgcaaaggaacgcaaacgcaagtatttgccacaggcgtacgttcacgcagtgaatggcagatgttgacagagcgcggcgtgacgggcggtcagggggatttttttgccgcctctcagccgcttgacaccaatgtgaaaaaatatttgcaaagatactctgtttga

SEQ ID NO: 128646 - DNA, 207 bp, Enterobacter cloacae
atggatctgcataatgtgctgctcggccaggcgctgttgctcaagctcttgctgcggctcttttccttcaacaagccaggctccatattttttcgccagctcattggccgtcaccagtttcatctcaggccagatgcccaactgaatgaatttctctttcttccctttctcaacgtagtaacggaaataaaaaactttgctgcctga

SEQ ID NO: 128647 - DNA, 2304 bp, Enterobacter cloacae
ttgagcgagctggaccacatccagatattcgaccagccgaaaggcattgtcggcgacatcctaagcccgatctttaaagtagttggccaagtattttcgttcctggcaccgaaaccggccattgcaaacagcggcggcaatacggtcgactcacccaacaatagtctgaccggtcagacaaacaccgcgcgcgtttacaaggccaagccggacatttacgggcagattcgttctttcccggatctgattcaggagtcggtatttgaatacgtgcaccagacgtctacagacggcggcctgaagtacgttacagagtggatgtgcgtcgggatcggcaaatacgattacgagtccgtgcgctactcagaatccagcctgggctctctggccggtgccgaattccagttcttccagcctggcgaagttatcccgcagatcgtcgaaggttacgggttcgatgacgtagacggccaagaggttccagggcagaacgaagccagcgacttccctatagaaacagcaacggcaaacacggtggtcagcggaacgtattccggcggacagatagcgatgaaaatcgtgaaacaagctgagttcgattactttatgggcctggtgctgccgcacgctgtgacttttaccatcaacgttacgtacaacacagcatcaggcagcgtcaccactgacgcaaatttctccggcacgttgatttccgccgttgaaacaaacgatggcgctgtggttaacccggtgcgctggtacacgtttacgatgaaccagctggaggggccgcaggacatcccggctaacgccacgatcaacacaacgaagttcatcctgaacgataacgaggcactggtggtcggcccgttcttctccccggtagagtcgacgcagctgtggctgcacacgcaatccagtctgggcgggaagaaagagacgaactggaaggttgtcatctggaaaatcgacgacgactacaaccaggtgccgggaacgcagcagacgtttacgtaccggcagacgacgccgcaccagtcgacgagtgaggtattttatcgcactgacaagatcacaccgacgggcggcttcgggaagtacgcggtcagcttccagcgcacggacaactctggcgacgcgtcacttctgaaggtcgaagagatccacagcattaacatccgtacgaatgtcgtccacccgaccgacacgctggtgcgcgtaaaagtcagggcgacagagaatgccctgggcagccgcgagcgcaaatataacgccctggtgacgcgccacaccatcacttacgacctggagacgcaggcagtggattacacactgcggccgtcgcgctcgttcgctgatgcggttgcgcatacctggctgattatgggcgagcagccggtaagcagcattgacctgtacgggctgtattcgatcgctgaaagccttcctgatgagcgactgggttacttcgactatacgttcgacgacgagaacgactcactgggcgaccgggtgcaggcgatctgcaatgcggcatctgttgtggcgtactgggatgacggcgtactgacatttacccgtgatcagaaagttgactacccggcggccgtattcaaccgggccaacatgaagacggacgagtacaaaatgacgtacgaggccacgcttcctggcggctacgacggcgtacaggtgtcctacgtccacccgaccacgaacaataagacgtacatcaactaccgcgtgctgaacggcgccatcgttgagcaggaagcggagaatccgaacaagctggaaatagtcggcttccgtaatgaatatcaggcccgggagcgcgcattacgcgaaaccaagcgcctgatctactcccgggtgaagatgaacgcaaaggtgttcgaggacgggattatccaggttgggagcgtcatccagatgccggacatctacgatagcaaccagcagcaaggatacctgaaagggcgaactggtaattatttcgataccagcgagccgattactttctcaggagagatgtttgtgctggtgactgacagtctaggaaatccgacactgcgttatccagcctcgcctcgacctgataccagttatggatttatcgcttctgttccagatatcgacctaaatttctgggatggggatgaagtgcagcttccgtctcgctatctcatagcgacggtggaggaactggacagtcagctatggacggtcaacagcatcaaaccgaacacagataacactgtatctctgacagtcgcggaatacagcgacgccatctacgaataa

SEQ ID NO: 128648 - DNA, 1311 bp, Enterobacter cloacae
atgatcagcaagttgataaaagaaaacattctttccttagttgtaatatgcactgtctttatattgatttattcattgaatcatatgacgctttatgttgctgacgactttgtttatagatttgtataccaaacaaacccatctccaagcgccgttccaattaacggtatcatttcaatactttactctcaaattcgacactatgagatatggaatggacgattcgtggctcactcgcttgttcaatttttcatgcaattcgataaatcaatattcgatattttcaatacaatcgcttttattacaataggtatactagttttaatggtagtaaagtcaatttcaaatattaatgaaactggctttgcagttctaattacattcatgacgttatggcttattgttccggaatttggctcatcggttctttgggtttctgggtcaatgaattacttgtggatgtctattatttacacaacattcatactgataagtatgcgtgagaagaggcctggagcattaacacttattttgtacctagctttgagcttccttgctggggctacaaatgaaaacagtgggccagcatcagcccttatcgtcttaatgatagtatttttagaatacattagaaatggaaggattagttggtggaaattgatcggaaccgctctttcaattgcgggatttgcactaatgatgagctcccctggatcgcaaaagagaggaggcagtcacttctctttagaaatattcgcctctcatttttatgatgtgttgcaatcaaacatttctttatttttgccgttttatacgctgtttatattactatttgttgtatgcatatacaaaaatatagtttccaaaagagatgtggatttcaccataatatttcttactgggcattttgcatcaatatatagtatggtggctgcgccgtcatttcctgaaagaactgcttttggggcagctatcatgctttcaatattattgattcattacatatgcaagattagcccttcctctgtattatttaaagcattagcattttctttatacacatcatttgttgctacctatacctatgcagcaactgatatttacaacacttataaagaactgatgattcaggtgaatgtaatacatgattcccaacctggttctgacatagttgttccgatgatttccaaacctaaatcacaagctaacgcttataaaaatgcaatatacttaacacatcgtaaaaattcatggatgaatatgtgggcggctagattctataatatgaactcaatatcaggtaaggactaa

SEQ ID NO: 128649 - DNA, 927 bp, Enterobacter cloacae
atgaaaatttctctcgtcgttcccgtcttcaacgaagaagacgcgatacctattttttataaaacggttcgggaatttgaagggcttcagcagcatgaagttgagatagtcttcatcaatgacggcagcaaagatgctacagaatcaattatcaacgcgcttgctatttcggatccgcttgtggtcccgctgtcattcacaagaaacttcggtaaagagcccgctctgttcgccggccttgaccacgcgaccggtgaagcgattatcccgattgatgtagatttgcaggaccctatcgaagtcattcctcatttgattgagaaatggcaggccggggctgatatggttcttgctaaacgttctgaccgctcaacagatggccgactgaagcgcaagacagctgaatggttctataagctccataacaaaatcagcaacccgcagatcgaagaaaacgttggtgacttccgcctgatgtcgcgtgatgttgttgaaaatattaagctcatgccagagcgcaaccttttcatgaagggagtgttgagctgggttggcggccgcaccgatgtcgttgaatatgcacgcgcagaacgcgtagcaggaagtacgaaatttaacggttggaagttgtggaatttggcacttgaagggatcaccagcttctctacattccctcttcgtatgtggacttacatcggcctgctcgttgctggggtggcattcatctacggggcgtggatgattttcgacacgttggtgttcggtaattctgttagtggttatccatctttacttgtatctattcttttccttggtggcattcagttgatcggtattggtgtgcttggggagtacattggaaggatatacattgaagtgaaaatgagacctagatacatagtcaaggatggaggaaaaatgaaatga

SEQ ID NO: 128650 - DNA, 657 bp, Enterobacter cloacae
atgtcttttttgaacgtgattagcgattttttaaatagccttcctcaatggttatcatcgtttattatcgctttaatgggcgcggttgttggaggctggtttactcttagaggtgttgatcgcgaggcaaagattactcgcgcagaggctgaaaagaactcccttgagttgcagttgtctgtattaaaaggaataaaaggagagatttttactttgattactttgtataataaaagaatgcaaaatcatattgataacattgggccgggaaaaatactgcctattaacttccctgttggtgatgataattttacgttttacgagcaaaacgcaaagatcattgcaaaactgaatgatgaagcaagagattcaataattaacatttacacatatgctcgctcattaatacagtccttcaaaggaaataatcagcttgtcgtagattacgaaaaaattctatttgatatggctgataataataaagataaagatatgtatgaaagattgcatgctgcaaaaattgaagtgatggtggattatgcgcaaggaataaaaaatattgatgcagagcttagatgtgctatcgatgagggatttaatgttattaatcaagaaatagcggcgctacaaataaaattaacaagcttagagttataa

SEQ ID NO: 128651 - DNA, 267 bp, Enterobacter cloacae
atgcaacgtcaaaactggcatcctgccgatattgttgcggcattaaagaaacaaggaacaagcctggcagcgttgtcacgcaaggccggcctttcttcatccacattagcaaatacactctcgcgcccgtggccaaagggcgaattgattatcgctcaggcgttgaacattccaccggatgtgatatggccggaaagatattttggtaaaaatggtgaacgcatattccgtcagatgagagcgaccaggaaaaaaacgtgtctttga

SEQ ID NO: 128652 - DNA, 126 bp, Enterobacter cloacae
atgtccgatatctaccaaatcaccctgaccacccaaacaggcgaaaccttcacgggcaagatgtcacgacgtcagcctgagctggtaaacggatttgtgccgctggcgactgagacgggcgagtga

SEQ ID NO: 128653 - DNA, 528 bp, Enterobacter cloacae
atggacgaaaaacaaattgcattagaggctatgttggcagctaaggactctgcacattgggcgtggtggacaatggctgcgactatattcagtgttctgatttccttgggtactctaggtatggctttcagcgccttggatacttggcgtcagcaagagatgttaaagctgaagatggaattcaagaggtctattcttgaattaatttatgctatggactctatgccaagaaattggtcttatcatcagatcaatttagctcgggcaaggttacaagcatcgcctgaggttgcaaatagagttgctgaccctgcgcagatatacatcaataaaatggctctcaaggatgcattcagtggctcaaccaaagcatggatcatgtgtgaacatctcttctctgaaacagagatcgaagtcttatggaataagtttcgaggtgagtttcgagattacataatgaggggcggcgataccaatcgccttgcaggcattctcgaatcactaaatgtaaaactaaaggttttataa

SEQ ID NO: 128654 - DNA, 471 bp, Enterobacter cloacae
gtgattggcgcgctgctaaggcgttactggttgcagttgctggtgttggcggtaatcggcgtgctggtgttcttcgtgaaccactaccgcgataatgccatcacctacaaagaccagcgcgataaggctaccgaacagctcagccttgcgagcgccacaatcaaagacatgcagacgcgccagcgtgatgtcactgcactggatgctaaatacactggagaactggctgatgccaaagccactatcgatcagcttgagcgcgatgttgcttctggtaaacgtcggttgcagctcaacgcaagctgtcccgcgaacggagcgaccagcaccggcagcctgggcgatgcttccagccccggacttactgactccgctgaacgggattatttcaccctcagagagcgaatcgtcacagtgacgaagcaggtcggctatttgcaggaatacatcaaagagcagtgcttaaattga

SEQ ID NO: 128655 - DNA, 441 bp, Enterobacter cloacae
atgcaaaccagtaataaaggcattgacctgatcaagcagttcgaaggttgcaagctcaccgcgtaccaggacagcgtcggagtgtggacgattggctatggctggactcagcctgtcgacggcaaaccaatccgcgctgggatgacgattaagcaggaaacggctgagcgcctgctgaagaccggactggtcagctatgaaaatgacgtgtcccgtctggttaaagtcggtctgactcaggggcaattcgacgccctggtgtcgttcacgtacaacctcggcgcccggtcactgtcgacatctactcttctgcgaaaactcaacgccggagattacgctggcgctgccgatgagttcatgcgctggaataaagccggtggcaaagtcctgaacggtctgacccgtcggcgtgaggcggagcgcgctctgttcctgtcgtga

SEQ ID NO: 128656 - DNA, 243 bp, Enterobacter cloacae
atgaagaacttccagctttatgttggcggcactaacaacatcacctatcgttacgaaatcagaaaggtggatgatgcttttagtgttcgaatattcaacgtcaaaaacaagttgcacaaagaggtcggttgtaagtcgcttcgctttgtgtcagctcatgatgttatcgatgagtgcacatcgcattacaggaggcacgctgaaggcctaagaggctttttgcgtgggctcaaaatgtggtga

SEQ ID NO: 128657 - DNA, 171 bp, Enterobacter cloacae
atgtctactccactttcccgcgtcattaccaacgaaatcttccgcgttccggcgcgccgacagcgcaagcccgcggttaagccgtccgacatcccgaccctgaaaggctacaccgcccgcctggtggatcagaaatggctgcgtctcgcggcacggaggaaccatgcgtaa

SEQ ID NO: 128658 - DNA, 456 bp, Enterobacter cloacae
atgactctgcccgtagacggtatcaaactccatcgcggcaacttcgcggccatcggacagcagattcagccattgctcgatgccgaacaatgtttccgccttcaggttaagccgtggcgcgagaaacgcagcctgtcgcagaacagcctttcacatttgtggtatggcgaaattagcggctacctcatcgctcgcggtaagactttcgccacgccagagtgggtcaaggacgcgatgaagcacacctatctcggatacgaaagcaaagacagggtagacgtcgtgtccggagaggtgaccacggttcaatcgctccgccataccgccgatctggaaaccggcgagatgtacatcttcctgtgcaaagtcgaagcttgggcgatgaatatcggctgtcacctgaccatcccccaaagttgcgagtaccagcaactgcgcgataagcaggaggcctga

SEQ ID NO: 128659 - DNA, 273 bp, Enterobacter cloacae
gtgagtgatttatataccgagattgatgatccagattttattcaagtcattgctgagcagttttatttatatattcagaccacagatgatgacgttgtagttagtgatttccagataaccactggccagagtgcaatcgaggttgctgacagaatggtagaggttatcaccagccaggaataccctcagcctcgaagtataagccacgacgcaaccgctggcagaatgcatgatggatacccaatcttcacactctctgccgagaaaaaataa

SEQ ID NO: 128660 - DNA, 219 bp, Enterobacter cloacae
atgaaagctaaatacttggtcataatctctacagatgaagagcaatatgatttcgaaactgtaattgagcgaggagatagaattagcgacgaggaactaattgctgcactttcacctgaagcggaacgttatcttgaatcacttggaaatgagggcgcttatggaaagcgtaggcagttcagaagtcttagttacaattttttaggtttcattgattag

SEQ ID NO: 128661 - DNA, 303 bp, Enterobacter cloacae
atggctaacctgcaattggcagttaacggtgaatacttcgaccagatgaagcgcggggagaaggttgaagagtatcgcctggttaatccgtactggtgccgcaggctatctcaaggccataatcaacagttaccgcggcgctttgaccgattgatcatcacgaaaggctatccaagaaaagacgattgtgagcgtcggattgacatcccgtatgctggatacgaagtgaaggtgatcacacataagcactttggtcccgaaccggtgaaagtattcgccatcagggtaaatatttgttcataa

SEQ ID NO: 128662 - DNA, 693 bp, Enterobacter cloacae
atgagcactattaccagagaacaggctcagaaaattattgaagcagccgatgaggttattaccgcgctggccggaactaacgaggatgttcaccctgagagcgataacatgctccgcctgtgggatgaccttaatgaccgttacgcgccgccggaagttgtgcgtgaactggcgcgtatcgcgctggcatcgctcgaagcagagccgataggagctttccacatctctgaacagcaggtaggcggaaccacggattacatcaaggatggcgagtggcccattgatgacggtgttattgaggtctacaccgccccgccagcgccggtaactttgcctgacttgaaagagcttgaggcgattctcgactggattttgatgcttccatgcccaacaccaaaggcaacacatttcgctaagcgtctcgcagtggtgatagatacatgccgcgccgccatgcttcatggtgccgctggcaactctccggcgattccggatgggtacgcactggtgccggttgagccgacggagaagatggtaatcgaaggcttcgagtctgagccagacgagttctttagcgatgcaaaagtgtgggaggcttacgacgccatgagtggatgtcagcaggcggcacaccgtgcaaaattgtgctgggcggcgatgctcgcagcagcaccgcagcaggaggttaagtga

SEQ ID NO: 128663 - DNA, 198 bp, Enterobacter cloacae
atgcctatcttgaccaacgcagacattgaagcgctaaacaggctcccttccggctggttcagggctgagcaccttccgttcaatcgtcccatgtatcgctgcgaacggctcgagcagcgtgggaaattgcagcgccgggtggtgggtacttacccaattatctggtccgagtacaaacgcattgatggggaggactaa

SEQ ID NO: 128664 - DNA, 489 bp, Enterobacter cloacae
atgagcaacatcgacaaacaggctctcgcagatgatgaaagcgtgaaaacttattacatccaccggatggcattcggtagcacgaaaaaccccggctatgggcatgttcctgttgtacatgctgatgacttcgagaagctacgcgtcaagctggaagccgcagagaagcggattgctgagctggctggtgaaaacgaatacatccgaaaacgctttatagaatctgatctcctgttcggaaagaacctgctggtaatgcaggccgccattatcgaatggcagggaactggtgatgcaagaaagggactggcatggatttataacacgctgtgggggccaggcgaactgccggacgaggcggagaaagatgcccaggcatacttcgaccggaaatatggcccgcttgacgaagaactcatggctcttcatcggtggttctgggaacaaagcgaagctgaacgcgccgccacagccggtaaaggagattga

SEQ ID NO: 128665 - DNA, 285 bp, Enterobacter cloacae
atgagcaacgctatcgacgcgcatctctcagacgaagtgatcaatgctgctttcgaaaacacgaatttcggtcgctctgatttccgcaccatcctggctgaaacagtcatgaagcgcgcggccgggtaccactcaggatggatcgcaacgacaatctgcacgcgcctcggcctactcgggaaacaggagcggccaaccaagctcgggctgacgttcgctttccatcactactacaagtcatgcgtgcgtgaagcgctgatgcctgcccaggaggccgcacaatga

SEQ ID NO: 128666 - DNA, 198 bp, Enterobacter cloacae
atgagcgaaatcactaaagcactaaactatgaccctactgacccggacaaaatgcgtttgccaaagggttcgagctgcggtgaatgccatcacatccggcgctgtaaggccatgttcggccacacggaggcggatacatattgcgactggtcaccatcgcgtttcatcccggtacgcacagaaggagccgcccaatga

SEQ ID NO: 128667 - DNA, 462 bp, Enterobacter cloacae
atgaacgtgaaacgttatgagtgggtggcctgtgatgagcatgcgtgccattgcgacgtggtagagagtgctgaaggcgatatggttgattacgaagactacgccgcacttgaagccagatgcgcggcgctggctgcggagaatgcgcttctgaaaaaatcggagccagcaccattcagtaagctgatgatggaggcgcttgatgtttatcaggcgggcgctgatgaagtgccggagctggcaatgctaagcgcgtacacgaagctgcgagatgggctaaaagccccggccaccgactctttcctggctgaagtgcgtgcgcaagaatctaagcgggtgtatgaaagcattctggacaacccagccgtaactgacatggagtcacttgttgattggcttgagcaaaatgccaatgactctgtggctttcgcagcaggccttagcaaaggagtgcagtcatga

SEQ ID NO: 128668 - DNA, 300 bp, Enterobacter cloacae
atgaaaggtaaacaggaaattctgcgttatctcgaaacgcaccggactttcaccgcgaaggatgtggcctcagagtgcggcatgaccatcaactgcatcacgaagaacgcgctcgatctggagcgggcccggaagattgtgcgggtgagcaaggtctggcgaacggtgacttatcgcctggcgacacccgaagaacagggtggtaccgcgcgcagctgcaccaacggaatatttcaggagtgccgcaacagcgcggcgatgaagcgagtattgatggtttgggggagggtaggggtatga

SEQ ID NO: 128669 - DNA, 969 bp, Enterobacter cloacae
atgagcgaagtaacggatttagtcgtcattgagaaacagaacgcaatggcggtattcaccaccaaagagcagctcgaccctattattgaggcgatcgagaaagaagctcgcagcctggtaccggatgtgtcgacccgcaaaggccgcgacgcgatcgcatccatggcgcataaggttgcccgctccaaaacctatatcgacaatgccggcaaggatctggttgccgagcttaaagccctgccgaagcagatcgacgaaagccgccgcattgtgcgtgagcggctggacgcgctgaaggatgaagtacggcgcccgctcacagaatgggaagccgagcaggaacgcattaaggctgaagaagccatgaacgcgctgcacgccgaagcgctggaaatgaacgaagagttcaaccgccagcgtgccgcgcagatcgaggcagaccacgaaatggccttgctgatgaacaaggatttcgaccgtgaccgcgaagagcagcgacgcctggcggaacaggctcaacgtgaacgtgaagaacgaatcaagcaggaagccgctgacaaagccaagcgcgaagccgaagagagacataaagctgaacttgatgctgcagcgcgtcgcgaagctgaagagaaagctcgcgctgatgccgctgagcgtaaacgtaaagaagacgctgaccgtgcagaacgtgagaagcaggacgccatcgcagaagaaaaacggaaagcgcaggaagaagcggatcgcatcaagcgtgaagctgaagcgaaagaaaaagcccgcctggccgaagagcagcgcaaagctgaagaagaagcgcgccgcgccgcagacaaagagcaccgccgcaccgtcaaccgtcgcgtcatcgccgaccttatagctcagggcatccccgaagaattcgcgcagaaagcaatgctggcgctcgctggcggcaaagtgcaggacgcgcacatcaaatattga

SEQ ID NO: 128670 - DNA, 531 bp, Enterobacter cloacae
atgggattagacattactgcgtacagcaacattaagcgcctggacgctcatctgaatgatgatggcgaggctgtctataacagcaatggagaggtggtagaagcgtattactttcacgtttggaaaaacccaagcttcccgggtcgtgcggatgagctggtcgatggggctgtttatacatatgaagactgcacaggtcacggcgtaggttatggcggctattactggtggcgtaacgagcttgcagaaattgctggctacccggttggtgaatatgagagtggacatggaaaagaagctaaccattttggtggtgtgctcaactccgatagcggcccattctatgaattgatcaacttcagtgactgcgaaggatttattggcacagctgttgcgacgaaattactggctgattttaaaaccttccatgacaaggctgaagagatcggcagcctcttcttcgagcaatacaagcactggcagtcagccatggaaatggcctcgaacaatggctgcattagcttccactga

SEQ ID NO: 128671 - DNA, 930 bp, Enterobacter cloacae
atgaaaatttctctggtcgttcccgtctttaacgaagaagacgcgatacctattttttataaaactgttcgggaatttgaagggcttcagaagcatgaggttgagatagttttcattaatgacggcagtaaagacgcgacagaatcaattatcaacgcgcttgctgttgccgatccgcttgttgttccactgtcattcactcgtaactttgggaaagaacccgctcttttcgccgggcttgaccacgcgaccggtgaagcgattatcccgatcgacgtagacttgcaggaccctatcgaagtcattcctcacctgatagagaaatggcaagccggggctgatatggttctggctaaacgctctgatcgctcaacagatggccgactgaagcgcaagacggctgagtggttctataagctgcacaacaagatcagcaatccgaagattgaagaaaacgttggtgacttccgtctcatgtctcgtgaggttgtagaaaatattaagcttttacctgagcgtaaccttttcatgaaaggtgtcttgtcatgggttggtggtcgcactgatgtagtcgagtacgcccgtgccgagcgtgttgcaggcagcacgaagtttaacggctggaagttgtggaacctggcgcttgaagggatcacaagcttctctacattccctctgcgtatgtggacttacatcggcctgtttgttgctggggtggcattcctttacggcgcgtggatgattttcgacactttggtgttcggtaatgctgtccgtggatatccatctttactggtatctattcttttccttggcggcattcagttgatcggtatcggcgtacttggagaatacattggcaggatatatgttgaagtgaaaaatcgtccaagatatgtgcttaaaaacaagggcaagaaagatgattga

SEQ ID NO: 128672 - DNA, 411 bp, Enterobacter cloacae
gtgacaagtgctaaactctttgcctttcagaatagactgattctcataatgttaaagctcttcgctaagtacacatcgatcggtgtcataaacacgctcattcactgggttgtgttcgctatttgcatatatgcgtttcacacaggccaggcacttggcaacttcgccgggttcgtcgtggcggtgtcattcagcttctttgcaaacgccaggttcacgttcaagtcttccaccacaaccatgcgttacatgctttacgttgggttcatgggctcgctgagcgcggctgttggttgggctgccgataagtccggcatggctccgatcgtaactctcattcttttctccgccatcagtctggtgtgcggttttatttattcaaagttcattgtctttagggatgcgaaatga

SEQ ID NO: 128673 - DNA, 678 bp, Enterobacter cloacae
gtgctcgccgtcgtagcggtagtgccagcgggtctggccgttatctttctccacggtgcggccgtggatgtcatagcgccagcgaatgccgttcagctgcgtcaggcggttgtgcgtgaccttctcagccgagccttcaagcgggttaccggcagcatcccagcgccactgctcctggccgggcagcgtgccgtcctgaaccagcagacgtccggcgctgtcgtactgccagcggtaccagctgaacgggttatcgtcccgctcttcgcggaccaggttattgcgatagtcgtaatcccagcggcgggaccagcggcgcggcgacgggcgctgggcattgccggtaaagacgtcccggcgatgcagtcggccaaggcggtcgtattcgctgcgggtggtcagcagcccctgcgtacggctggtttcacggtggagttcgtcgcgggtaaagtcggagaccgacagcttatcaagggcaatgctgagcagatgcccgctaccgtagtagaactgtttcagctcccgaccatcgggcagcgtgacggaggtgcggttacccagcgcgtcatactcccacgccagctccccgtgttcgcccgtttcgcgcgtgacgcgcccgagcgcgtcatactcaaacacaagctcctgctcggcctcggcgctccaggcatcttctga

SEQ ID NO: 128674 - DNA, 927 bp, Enterobacter cloacae
atgacctttgaacagatcctggaagagtatttttttgcccgcttattgcgacctgacacccagagctgttatcgcacggcagtaaaccaattcactcactggcgcaacgtgttacccgccgaagtgacatcgcatatggtgctggagtggcgtcattacctgctaaatgtgcgctgtatcaagccggtgagctggaaccactatatgcgccatatgcgagccttgtataacttcgccattgaacaggggctactggagcagttcatcaatccattccagaaaacatcgctgcgggaatctcgtaagaaaaagaaaaccctgacccgcgagcaaatccttgcatcccgcaaagtgctgaaccaatttatcgaacgggagaaaatgcagcgcggctatcgttcgcctttatatccggcatggttttggctgaccgtggttgaaaccttcaactacaccgctatccggctgaatcagcttattcacctacgggtcagggatatcgatttggtccatgacacgctgtttattcagagcgaaggcagcaaaagccatgatgaacacgttgttcctatcgcctcccggttacggccctatctggagcagatgcttgaagaagcgaaaacaaagggaatgcgggctgacgatcagttgttcaacatcaatcgtttcagtcggaggacgctgcgccagggtaaaccgatgacagaaaatcaggtgagttatttctttgccaaactcagcgatgcctgccacagccgcttttcatcacatcgctaccgtcataccgttgccacagaattaatgcagaaaccggagcaaaatttgtatgtcacgcagaaactactcggccatcgcgatattaaggtgacgctcagctatattgaacacaatgtcgagatgctcagaagttgcgtggagagagattga

SEQ ID NO: 128675 - DNA, 1620 bp, Enterobacter cloacae
atgcggatatggctgacgcgcaaaaagcaaaacaccacaccatccactggcgaaccagacgtcacggagggatggctgcatcctgaatccgcgcaaacgctactagctgaaactacccgccaacagctgatccagtttattcgccagagcaccgcccttcccgcctcactctttgaacgcttctggctgataccaatccaccgcttcgcagaactggcgcagtcgtttccggcctcggaaaatcaccaccatgcccacgcaggtggcctgctcgatcacagtctcgaagccgcctgctatgccgcacggctgcggcagagttatctttttccacctgatgcagcgccggaagatcaggccgcgcagtccgagcgatggacaacggtcatcatctacgccgcgctgctgcacgatctgggcaaactcatcaccgacatcgaagtggaagatattagcggtcaacgctggtttccatggcatggccctctgacccagtcttataggtttcgctatctgccgcaacgtgattacctgcgccatccggctgcggcagctcttctgctcacccaactactccccccggaaagcctcgactggctcgccgccgatgccgctgcgctatccactctgctgcactgcttgaacggacagtatcagtatgccgggctggcgggtgaactggtgcagaaagccgaccgggcgtcggtggcgtttaatctcggcggcgatccagtcaaggctatccatcgtccgcaaacctcgctaccgcagcaaatcatcgccgccctgcgcgacttgctggcgcatgagttccgactcaacaacccgaatggcggttctgacggctggctgacggaagaggcgctgtggctggtcagtaagaacgctgccgatgccgtgcgcggctggctgctgcaccaggggattgacgccgtaccgcaacataacgtgcggctatttgatgagatgcaggcacaccagttgctcattccctgtgaggataaagccatctggcattgccggattgaggccagcggcggctggagcagtgaactcacgctgttacgcttttccccttctctaatttgggaagatccacaacagcggcccgcaacctttagtggaaccgtcacaccgatagcggaggtccagaatgcgacagaaacagtgattgcaccggactgcgtagtagaacaaccatcccccctacccgaacaggacgatatcccactttcaggcgaagccttctggcagtggctgattcgtaatgttcaggctcaacatctggaagtcaatgaacctaatgcccgaattcataccgtcgccgggtcggtgtttctggtgacgcccggtattttcaaactctggcttagcacctgtggtcaggatgtccctgaagaatactggcgggaggtacagaagaagttccagaacctgaatcttcaccgaaaacaaaaaaacggcctcaacatctggcactgcgccgttgtcggcccacgccgttgttcacgtctgaagggatatctgcttgacgatcccacgccgctttttggagatgacgttccctttaataaccctcatctcttgctcaatgaaggaagtcactcaaatgacctttga

SEQ ID NO: 128676 - DNA, 912 bp, Enterobacter cloacae
atgaacagaagcaacgatctttaccagaaagtcaccgatgaaattatcgccgcgctggagaaaggcgtgatcccctgggttcgcccgtggcgggaaggggaaccggtggtgccgatgaatgccttatccgggcggttgtatcacggtatcaatattcctctgctctggaacagcgctgagcgacagggatatgaaagcgatcgctggctgaccttcactcagattcgcaatgcgggcggtaacatccgcaaaggcgaaaaatctacactggccgtgttctatctgccccaacaacgcgaggtagtagaccgcaatgggaacacggttcttgatgctgacggcaaccctaaattgacgtcctacgccgtagtacgcgagttccggctgttcaatattcagcaatgtgaaggactgccggaggtgttttcacagcctgtcgtgatggtcgatgatcctatcgccgccgctgagcaggttgcccggcaaagtgcggtggtgatcactcaccgacgccagaaccgggcgtattactcgccggtgcgcgactgcatcatcatgccgcatcctgagcagttcgcttcacgtgaggattattacggcacgcttctgcatgaactgacgcacgctaccggacatgcttcacggctgaaccgggacggcatcactgccggaaagcataccttcggcgatccgacgtacagttttgaagagctggtcgccgaaatgggtgcggctttcctgtgtgctcatgtcggtatccagtcgaagttacagcatgacagttacatcgcatcgtggctgaaggtgttgcagcaggacaaaaaagcgattttccgcgccagtggattagcgcgtcatgcctgtgaatatctgcttgaacgggcgcagcagccgttagcgctgagcgcatga

SEQ ID NO: 128677 - DNA, 294 bp, Enterobacter cloacae
atgcctacttcatcttgccctgaagcaaaatccttatcgttgtctgtctcaactgaggcctgggaaaaggtagtcagttttccacccgatccctctcaggaggatgaccgtctcgaaaacctgattgtcgccactatgctgacattcaaaagcgcaggcccggaccgtaagagcatcaatttcggtctgtactgtttgccctctgacggcagcagcaatgtaccgctgatgacgccgctacgcttaacgcttgaagataaccacctgttggttactgcccttcactcctgctga

SEQ ID NO: 128678 - DNA, 873 bp, Enterobacter cloacae
atgatatctctcgaagcactgcaatcagccatttccaacgtttctgtatggcgtcagggtgatgtgtgcgcgccacataagccgttgctgctgttgtatgtgttgtcgcagtacaaagcaggccacccgcgcctgtttaactacggcctggagatccacgaaccgcttactcgtctgctgaaagagtttggtcccaagcgacgcaccgactatcccaatatgcctttctggcggctcagaactgacggcttctgggaaataaccaacgcagaaggttgtaaaccccgtaaaggcaacacccagccgacaaaaaaagagctgattgataaccaggtagcaggcggctttgatgaagcggcttaccagcaattgctgactcaccctgaaatgattgaccaactggtccagcaaatcctgatggatcgcttccccgaaagtattcagcggatcctcgccaaccaactgggtctggattttatcgaccgttcaaagaaccgcgatccgcgcttcagagatatcgtgctccgggcttaccactcccgatgtgctttctgcggttacgatctacggctggatggtgcgttggttggtattgaagcagcccatatccactggaaaacctatggcgggccgtgtgtggtgaacaacggtctggcgctatgttcgctgcaccacgatgcttttgatatgggcgcgttcgggctagatgaaaaccttaccatccgcatctccggaggcgtcagccgtagcccggtagtggataacctgttctggcaacggaacggccagccgttgcatcttcctcacgacacatcgctgtggcccactgaacaatacgttggctggcaccgtaagcagatcttcaaagcctga

SEQ ID NO: 128679 - DNA, 1338 bp, Enterobacter cloacae
atgtcattttggcaaaaaccacttagtgaaacaattgtccaatcaaaaaaattaattggcagtgatgttaactttaacgtggtagctaattggtttgaaggatatcaagaagatgcacccacatcttctaatcagggtacatccaatttggcatttcagcggtggtttagattcaaagaagccttctcacctaaatttgttactgataccttaaattatctaccttacaaagttggcacttgtcttgatcctttcctcgggagcggtactacatcggttacatgtaagatgttgggtattaattcaataggtacagaggttaatccttttttggcagacttggttgaggcaaaattgaccaccgttgatactgatgcattttatgatagttatagccatcttataaaaaagttgactatcatggaatgtgattatcagttaacaccaggaatgcctttatcatttaatgagccaggaataaaggaacgttatgtgttttctaatagcgcttattcgactataagggctattttaagatgttcacacgcgttgtcgaaagaacaccatagattgcttaaggttttattgggttctgtattagtagagaatagtaatacgatagttaatggtaaaggaagacggtataggaataattggaatacacgtattcgaactggtttggatgttattaagtctttaaatcaagctgttgatgaaactatcaaagacattgctagctttagctattacaataacagttctcactctatattaagaggtgatacgcgagcacttcttcctactattaaccacgcggatgtggttattttttcgccgccatatcctaattctttcgattatacagatgtttataatattgagttgtggatgttagattatcttaaaagtagtgatgataatcgttcactgcgtaatagaaccctaagatcgcatgtccaggcgaaatggactgctaacccagatatagaattaaaatccaatttgctaatggatacgattacaacgctacagaatcaaagagggattctttggaataaaaatattcctgaaatgatttcttattattttgaggacctatattttatttttatgaattttaaaaggatcttgaaaagggggcatcatgctattgttgcgattggcgatagtcgatatgctggtgttcatgtagacgttggggctatcctagaagaaataattcaacctcttggcttcattttggttgaaaaaggtgagattcgttcaatgcgaagcagttctcaacatggtggtaaattcgaactatctgaacactgcctggtattcgaaaaaatataa

SEQ ID NO: 128680 - DNA, 1983 bp, Enterobacter cloacae
atggcaaatataaggaataaaatatcgttacctataataaaaagggttcaactttttaattttgatttgtataccaatactcctgatatagatactacgatatccaaagaggtttattgtctcataggcgctaatggcttagggaaatcgacatttttgaatacaattacatatgctataactggcgctattcctcttatagaacgtagtttcctttcggcccaggattattacaaaaatgcactaaaaccatcgcgaacacatgattattatgatggcagaattagtgaatccctaaggtctgatgcaagggttttagtcgaattagaatgtaataataataaaattaaactagaaagatatatcttcggtgattgcaaagtctctaatttaaccattaaagaaaataataaaattagtaattatactgcacctgaagttttatcatcgacaatagatgatatttataaaacaaaaatatgtgagtggtctggactacaagatttcagtcaatatgtttttctctttcacttcttgatggtttttgatgaatccagacatttactgttatggaatgataatattctaacgaatgccttatatatagcatttggaacagatcctagtatagctgctttgaccgataaattacaaaatgaaatggagaaggaaagttctcgaggtcgaaatgctaagtttgcagcaaggcagttaacgcaacaaatagatgaactacttaaactaataaaaaataatcatgataatagtagcttaactgatagcgaaataatggaggaacataaaaagctaaaagataattacgttgagtctcaaaagaggacgcaaattaagcaattacaaaagagagagcttgaaataaaatgtgctgaactgagctcaaaatattcggctcttgaagtgcaatatagaaaagcattttcatcaagattatctaatataagccatcttacccaccatccaataataaagcttagtattgaagataataaatgtgccttatgcaattctgatagtacagatgtatcacaaagaataaatgctataatatcttctgaacaatgccctttatgtatgtctaatgttagcaataaagacaatgaagataagcaggctctgcaaacattaaaagatattgatatagatagaaataaaataaaacatgaattggatagcacattcacaatactggaacgggtgacattagagctaaatattgcagaaaataatgagcaagcagcgctagatacaatgaatagttttgaaaatgttaatccagatttaaaatatcttgagaatatacctgatgcttcttatctcgggagtgaaataaataatcttaaaaatcaaagagataagttgaatagaataagtaaggaaaattatgaaaaaagagatgagttacgtgaaaaactccgtattcatgagaaaacattaaagtcaaattataataattatgcggactcatttgtctttcgttttagagagttggcagaagagtttataggtatgtctgtggatgttcagcttgaacatcataaaagtaaaaataacgcaggttttggtttaactttgaaaatgaatgataaactgaggccaacttcagataaattatctgaaagtcagcgtttctttattgatatagcattgcgtatggcaattactgaatttatgtgtgaaggccctgcaacattattgattgatacgcctgaaggttctttagatatagcatatgaagcacgtgctggttcaatgttctcaaaatatgcaaagatgaataattttataataatgactgctaatttacgaagttcgtatttagttcttcgcttggctaaacaacagaaattagatggtatgcaaattgttaagatgacagaatggacgaatttgacggaagttcagaaaagtgaggaagttttgttcatcgatgcctataaacaaattgaaatggctatggagtaa

SEQ ID NO: 128681 - DNA, 597 bp, Enterobacter cloacae
atggatagcttttcgccaaaatcttattatgactcgttattgattatggatgaattacctgaatctcttcgtccaatttctttcattgaatatcatcttttttcttacttaggctgtgttcttgccttatttcagggaaatgcagttagtaattgggggtatagctatactgttactgaaaatggctttccattttcgagagatctacaaaactcgatcgatatgttagaaaaaaaaggtttcatttttgttgatgaaaatgggcttttttcccctaaccctgagcttgtaactaaagaaattgaaaatttttattttgtagacgaaatacctaaacggcgtgagttaattaaaacatctttagaatgtgctcttagtataccaccaggagcaattaggtatgcgattaaagatactccaggtttcattttaaataaaacaatatctcaagcagcattattgttggaagaagatgatatcgatttattatataaagaatatgaagttatatcagaattaattggaaaggaaaataaagaccttttatctccagcggtaatttggctttcagctcgagttatgagaagtgaaggatga

SEQ ID NO: 128682 - DNA, 1098 bp, Enterobacter cloacae
atgaaaataaacatagataaacttcagaaaattattgcgggaaatcctaatttgcatgcctatcaggcttttggtaatgaaggaagagagtgtcttacatctttacaaaatcaacttaaaataatatatcagcattaccctgcagaaaatatttctttcaatttcacaattgtaatgagagtgactcagaactcttcgagttctctattggaagaatggcctgaatctattcatggtttcaatattgaagatatccaatttgaattggggaaaattaaaaaaagcaatgttgtaattgagttaatggaggggggagactattatctatatagctcagatgtgtgttttgaaacatatgagctagtcaatgattatattatatataatttctataaaggcgttgagaaatttataataaaaagtaatgaggattttgttcaccctccttcacctattatggttagcaattttagtattcctacatatcattctttagatgaagcattagatacttattatataaaaatggcaaaggaaacgacatgcaaaatccttcaaaatatctggcatggtggagtgacagggcctaggttaatacttagtaataaacctgaatcaattatgagggattcactcactcaggctttaacacttgttttaggcaagggggtggaagttaaggctgagcataatactgatgagactaaacccgttgatataaaggtgtcttggtatgggagtcgggcaacggctttgatcgaaattaaatggttaggttcttctattaaggaaaatccaaaagacgtcaaaaaaccatttactacttattgggattcgagagctcatgatggagcgcaacagcttattgattatattgaccgagaaataagaagttgtactgaaagtatccctcaggcttaccttgttgtttttgatgctaggcgagaatcgttaaaaaatatctctgataaggtctctatagatgatgcttttttctatgaagacaaagaaattacgtatgactctaaatatgatttattgccttactttaataaacctctaaggttttatctaaggcctagatattctagcttgtaa

SEQ ID NO: 128683 - DNA, 1791 bp, Enterobacter cloacae
atgacttttacttcggatcttttcctcgctagcagatggcaagaggcggcctcaagcaccacacatggttatcattcattaaaatgtaactttcaggaactggcggaggcttatcatagggaagcatcagaagtactttcgaatatgatgaattttttcgcaagtctctgctctatggcactgacaccagaaagccccaacgaaccttacagaccatttataacgtcttcaaatagtagcagtatgattccagacgatcttaccgaagaagatcttatatttatagagtctattttggttcatatagactttccaatacttaaagctcgtctggcagatatattgtggttatgtaaacgtccgagaagagttgaacatgccagaattgttatatcatcatacttagcccttccaataactagtgaggaatggaagaaaggtgaacagctatgttgggaaagggccatagcacttagttttcaagtaaaagacttcacaacaattgatataataaaacagcgcctcgcagaagcattgacattgagctatgaagattttccactaatgcgataccgcataggtgaatcaatcaatagaacgaatttattcgggaatgatacagatgcaattgcccaaaccctttttgaaataggggatgagatcaccgtacttgaaaccatgtcattagcctttcatatcaagcggtcatattttaaagtatcagagaagttatttagaaaagcaaaagagttcaatcgagctatcacctgccaagtaagaatcgccgaaacattcgtcaaggaagctgagcagcgactttctggtgaaaatccaaatcccggtgttgcgaacagcttttatgaagacgctttgcaagcctatcgtaaagttccacaagccgatagagctgaatataatgtagagcgtaaattagaagaaatcgaacaagccattctcagaacaggagccgaggcgcttgagaatatgtatgagattcgaacagatggtattgatttatcaacccaagctgagcaagctattgctcatgttacaaacaaacatccactggagatggcgattttatattttactggttttattacagaaagttatacgacgttaagagaacaggctagtgccagtttagccgaaccaagttttctaaatactattggaagaacaatagtatcacaagatggacgtatgattgccagaactccaagtatatcaaataataatagtgcatcagatgatgaattgatcatttttagtaaaatcatggagatatttaacttcaatctgagtattattgttaatgggactcttattccggctctcgatcaaattataatggaacaccgtataactaaagatgacatggaagcattgtgcttttattcgtcaataataccacgaagctataataaatctgttgccaacgcattatggtatggttttgaacgtgactttcgaacggctatatatctattatgtccacaaatcgagaatattatacgccaaaaattaaaaagtgctggagtaaacacaactaatacagatgaaaacggaattactcaagaagttggcatgggaacattacttaactttgattctgctacagatttatttggggagaatctttgtttcgagttgaaggctattttcactgacgcacttggtcctaacctgaggaataatattgctcacggcttactggatgatgatagttcaaactctgaggcatgtgtttatgcttggtggctaacactaaagacaattatagaacattaa

SEQ ID NO: 128684 - DNA, 1479 bp, Enterobacter cloacae
gtgacaaccaacagctatctggaatactttctgacgctgctcggctgggtggtcaataacgggctgtggaatgcgattagcgccaccgggttattcgccctgccgctgctgattaagctgctggcgctgtggctacaggccagaaaccagggagcggatgagggcaacaaagccgcgctgtccctggtatggaccgagcacctgatgtacacctcgctgctggtgattatgttcacctgcgtaccgatgttgaacatcgacctcgataccatcaaatatgacaccacgcgctcaaagctgtgcggaatgtcggtaccacaacccgccaataccggctatcagccgattattaactcactgggcggcaaaaccgccgccgtcccggtctggtggtactttattcatgtgatcagcaaaggcatcaccagcgcaacggttgccaccctgccctgccaacccgatctacgtcagatccgttttgaggtgcagcacacccgaatcaaggatcctgcgctggctcaggaactgcgggattttgtcgaggagtgttatgccccttcccgcgcccgtctgaaattccgcgccagagagctggacgatgacaccagtgacgatacggcctggctgggatcatcgtactttctcaacacggctggttactacgataccgatcatgcgctttcaccacatagcgactggtcgtatagcgcatcacgcgatgccgggttggtcgatacaggtgccggtggctaccctacctgtaaacagtggtgggccgatgacaccgttggtctgaaagcccggctactgcaactcccggccccggatatctggacggcgtttaaaaagctcggtcagtcgcagacagtatatgaagaggccgtgctgcgttcgttggtcagcgagcgcaatatgcaggtatcgcaggatggacgtgtttaccccggctacggcggtaatgtcgatggcaccgtcgccaatgccgccacccgactggcatccagcgccggaaatatcctcagcagcatagccgcgttcccggcattcgacagcgtgcgtcaggcgctaccgatggtgcaggcgctgctgcaaatggcgttggtgatctgtattccactgataacgctctgctcggcgtgggatgtgaaggtggtgatgacgctgacgtttgtacagtttgcgctgttcttcctcaccttttggtgggagctggcgcggtggctcgatagctggttgctggatgtactctacaacagcgatacccacagtagctggaatctggccgggatccagaatacgcaggatgacgtgattatcaatctggtgatggggtcgatgtttctggtgctgccgacgttctggctgggggcgatgacgtgggcgggagcgagggttggcgtggcagtgaatggggcgctggcgggtgggattaaggtggctcaggatagcggggggaaggctgggggacggttgttgtaa

SEQ ID NO: 128685 - DNA, 258 bp, Enterobacter cloacae
atgaaacggctgatactgtccggctccctgcttctggtctgcatggcagtgatgttttatctggctgctgacaatacaccgcagattaaccgcagcgacctgctgccctggcgcataatgctgtacggtgtgatttgtggtgtgggctggcatctgtatgaccgcttgccgccacatcgtccggcaatccgccgtatcgcgttgatatttatcgtactgattgtactcaacgaaatcgtgccggaggtgttccggtga

SEQ ID NO: 128686 - DNA, 1368 bp, Enterobacter cloacae
atgcgctcagcctggtgtcttctgttcgtcgcctttttcgccccggcggctgataaatatcagtatcagcaacagggggcgatcagcgactggatgtattaccgcatcggcggcggtgcggccattcccccttccgcaacccggcgtaacaccttcccactaacggcaggtgtaagctggaacagcgatatgatgtgcggcaatttcgatattgataccacggtgcgcaaccagctcaacggtgtgacggacggcttccagcagctgatgggagaggttatcgaaagcgcaaccagcgcggtcgccagcctgcccgctatggtgatccagcgtgccaatcctcagctctacgatctgctgaccaacggcgtacttcagggacggctcgacttcgataaatcactgttaagttgccagaagatggcgggcaagatgaccgattatgcgctcggtccagcttggacgcagagcgcccaagcggagaactatcagggcattgcggccagcgaaaaagacgccgttcgcgccgaccagcgagcagccgaagaagcggcagagaaaggcaaacgctgggttggtggcgaacgtcggggcggtaaaggccagccgcccattaaactggttcgcgatacgacggtcgcaggctacaacatcctcaataatcgcagcgcgaccagtaccagttcggtatccagcaacgactgtcagggtgaactttgccaagtatggagcaaacccgacgacgctgcgcaatggctgactcgcgtagttggcgagcaaaccattaacgtcgccccggataacgatcaatccggcgacactgaccagcaaagtggcgcacaatcgggcgtcgggctgacgccactgattcaggaagagcaggataagatccagccgctgattatcgatatggtgaaccacagccagcccgttaacgatgacacgctggcgcaggccagcggtggtgaactgcatctgacgcgaggcgtgattgaagcgctgcgcgacgatcccgatgcagcggtgcttatccagcgcctctccggcgaactggcgctctcccgcgtgatggaacaggcgctgatggcccggcgcacgctgctggctgggatgcgcgaacctaatatctccggtgaaaaggaggcgcaaaccgcactgacccagaccaccacccagctcgaccaggaactgtcacagcttaaactggaactggatatgcgccagtcgctggcagataacgccgcactgaccatccttgaacgccagaccatgcgggcgaagactaaaggtcaggctgtcggcgtagaggacgataccgacaaacggatggacgatctcagcaaacctactggcggggatacgcaatga

SEQ ID NO: 128687 - DNA, 933 bp, Enterobacter cloacae
atgctcaggcgtagattgttcttcataccgctactgtgcctgtccaatctcgcacaggccatcaccacgccagaaatcgccgtttccgcgctgtcgccggaatgcgtgcattaccagattgtgggcgtctgctactggctgttctgctcaccttttggctgctcggtacgcacgtcagtgaaggtacggcatttccgcccggacctggtggtatcagcctacagcgtaaccggacaaaatccgtggaccgagatgtcgccactcagctcgccgctgcccggtatcgctgaagccggtggtgataccaatccccgtgccgtcggccagcacagtaaagtccgcttcaagaacgcagatgcaataggctttcctgccggtgatgcgttggcaaatttcttctctcagtttggctatgtctgcgccccgtcatcacagcctttcctcccctactttctcagcacgctggatgcgctcgcctggcgcagcggcgtaccggagatgttttatccggaggcattaacgcccggactgcgcgaagtgagtaaagacggcgatatgtggggcaatatctacccgcgagccggagcgctcagccagacgcatgactacaagaccggggcagtcatcgcccaacgcgctgccgatctggtaacgcgcaatggtcagcagcatgtttatattccgctgactgcctcttcacacgacggttactggccgcctgatccagttacagagggcgacatcagtaatcatcagtggcagatgctggttccaaaaaaatccgcctcctgcgccatcttcccagatggctcctccaccgattcttacgccgataaactggcggaagatggcgcatatgtctggacgttgtggcggccctataaatgctgcccgcgtcgtgggcagacctttcttggcagcagcggaggttaa

SEQ ID NO: 128688 - DNA, 1608 bp, Enterobacter cloacae
atgacaacttatctatcaaagaatatcagccggtataaggggagtaatctgcggtacaggttattctttacggcactcacgctgttattttctttttccctccacgcacagtcactttatatagattgctccgctaccgttgacggtgatggcaccgccagcaatcctattaattcgatcagtacgcttaacaaccatgagttgcatccgggagacagcatactgtttcgccgtggcaccacctgtaatggcgaagtggtcgccgcaacttccggctcagagaatgccccagtgatctatgatgcctggggcgaaggaacggcgttacctcgcatagaagcaaacggcaacgaagcggctttccacataacagatgtcagttgggtaacggtacagaatctggaactttcggccagcggcgatggaaaatccccccgccggggattatgggttagcgccaccgacagtggagaacatcaggggatccgccttcagcacctgaatattcatgatgtccgtggagaaatgccagccacaaaaaatccttcggacagcagcatcggcaaatatgcccatgcgtccggcggcattgtggtggaggcgctcggtaacaccacacccacctggtttagcaggctggatatcagcgataatattattcacgccgtcgatcgcgaggggatctacacctggtccaactggtgtcagcgcccggaactggtcgagttctggtacagcttatgtactgcgaagtggcagccattcaacaatacccatatcagccataatatgctttctgacatcggtggcgatggcatcgcgcccatgaccagtacggacagtacggtggaatacaacgtactgaacggttttaatatgcgctccggctcgccaaacgccggaatgtggtcggccaacagcgacaatatcgtttaccaatacaatttcgcttcaggaggccatactacacaggacggtatgtcttacgatgtcgatcactcaacgaatggcattgtctatcagtacaatatttcctcgggcaacgaaggtggctttttcctgctttgtccctatgggtacgatgtacccggcaaatcgcgcaacttcgtaatccgctataacctgtccgtggcggacagaacccgcaccttccaggtatgcagcggcggcgtgattaacggccagatctacaacaacactattttgctgccgccagacacaaccagcgcccatctcattctgacagaaggggcaaccaacgatggtgcagttgagctgaagctgactaacaacatcctgatgggtgatggctctggcgttactccagtctgggactacaacgactccgctattactggcgaccacaatctctacaacaatgttccggtaatgccctcggatagctatgcgttaatcgacgatccacgactggctaaccccagcccagagaatgtgctctggcgggactatttaccgcaacccggttcaccggccattaatgcggggatcgctgttactggcgctcctgcacacgatgcgttaaatcagactatcggaacaccgccgactatcggcgcactggaaccggaaagtagctcccggcgataa

SEQ ID NO: 128689 - DNA, 1245 bp, Enterobacter cloacae
atgattaaaacacatgacacccgatggaatgtgatcctctggggattctttttcctgttctattactacaactggtcttcctgcttcttgtttttacccatgtggctaacccggatggtggggctggataaaacgcatattggtatggtgttttcctcctttgccgtggcggctatctgcctgcaaccgctgctgggttgggtaacggataagctggggccgaaaaaacacctgctgtggctgatcgttatcctgatggtgctcttcgcgccgttctttatttacgtgtataccccgctgctgcaaagccactttgcgattgggctggtggtgggcgggctgtatctgggatttatcttccacgcaggctatggtgcagtggaagcttttgtcgagaaagttagccgtaatcggggctttgagtacggacgtccacggctgtttggctgctttggatcggcggcctgcgccaccatctccggtattctttatggtttcgatccgacatggatttactggattggttcggcgctggctttattgctggtggtgatcctgctggttgctcgttctgagccgctgccgggtattgaggcggagcaggtccgccagcaaaaggtgagcgtgctggagctattcaaacttcgccagttctggtatttcacattatatgtattgggtgttgcctgtatttacgatgttttcgaccagcagtttattaatttctttacccgcttctttaaccatcaggaacaggcggcaagagcattcggttatatcactacagcagggaatcttggcgatgctgcggtgatgttttttattccactgctgattaataaatatataggtagcaagaatgcactattaattaccggtaccattatgacgattcggatcatcggttcctcctttgccactgggccgattgaagtgctcttcttacggatgctgcataattttgaagtgccttttctgctgattggtattttcaaatatattgctgacgtttttgatactcgtctgtccgggacgatctacctggtgggcgtaatgtttatcaagcagtccgccgctattattttatcgaccgtcgcgggtcatctctacgacaccatcggattccatagcgcctatctgatcctcggcagtatcactgccgcgtttactctgttgtccgctttcctgctgacttcaaccccacgccagaaaacggcagacgtccgcacgcccgccacactctaa

SEQ ID NO: 128690 - DNA, 1293 bp, Enterobacter cloacae
atgcaaccgaatattctggtctttttcaccgatcaacagcgctgggacacggtgggctgctacaattctgccgtcagtactacccctgtgctggaccagcttgcccgcgagggtgtgaagttcgaaaacgcttttaccgtccagccggtctgcggcccggcgcgttcctgcctgcaaaccgggcgttacccgacgcagaacggctgttatcgcaataatatcgccatgcgacaggatgaggtgacgctggcgaaactgttcaatcaggcgggatatgatactgcctatatcggaaagtggcacttggcggatctggatgaaaaaccggtgccggaagaactgcgcggcggatggcaatactggctggcggcagatgcgctggaacatacatcgcatccttatggcggtcacttttttgataacgataaccagccggtgcatttcgatggctaccgggtggatgaccagactacgttcgcgctcgattacctgaaaaatcgccagcgggataatccgttcctgctattcctttcttacctggagccgcacttccagaacgatatggcgcgttttgtcgccccggatggctacgccgaacgcttccagacggcatcggtgccgccggatctgattaaccgccccggcgactggccgcagaacctccctgattattacggcatgtgccagaacctggatgaaaatctcgggcgtattgtcgattacctgaaggccagcggcgaatacgacaacaccattatcctgttcttcagcgatcacggctgtcacttccgcacccgtaatgatgaatacaaacgctcgtgccatgagtccagcattcgtattccctgcgtggcgcggggcgggccgttcagcggtggcagaacggtggaacatctggtgacgctgctggatattccggtcacgatgctgagtgtggcaggtattacggttcctgatgccatggtggggcgtgatctgcaaaccgcccttgatgcaggtcactgggatgaagaagtgctgatccagattagtgagtcggaagtcggtcgggcgctgcgcacaccgcgctggaaatatgaaattgtcgcgcccggtagcgatccgtggaatgagtctgccgcgatgatttacgtggagagccagctttatgacctgctgaacgacccgtgggagcgccagaatctgattgccagcccggaacatgcgcgtatccgcgataaattacgtcaggatattggccgtaaaatgacggcgattggtgaagacctgcccgtcattgttccggtggagtaa

SEQ ID NO: 128691 - DNA, 801 bp, Enterobacter cloacae
atgactgcatggatgattgccgcactctgcggctgtggtctggcaaccagtctgctctcggcgctgtttggcgttgggggcagcattctgctcgtgccagtgctgcatctgttatttccgcaatgtgctgtgcaggtgctggccgcgacgtccctgacggtggtgatgctgagcgcgttgattaacgtctgcgccttctggcgacaagggatccgtttaaatccgcggctgctggtgctctggtcgctggggatggcaacgggaatgcaggcgggcgtgtatgccagctttttgctgtcggataaggtgctgctgatgttgtttgcgttggttctcgtggggctggcattacgctgtggattttcgcaccagacaaccagcgaaaacgtacagccagataaccggacgcgcagcgctgggatgttactgtgtaccgccggtggcgccgtggccggattaaccgggctgggtggtggttccgtgctcgcaccgctgatgtcgcagctctccgggatcccgcgccagcatatcgctgtgtactgcaactggatgatgctgttcggcagcgccggaacggtcgtcagctatctgtatcatactgcgcctgatactggtgcattaccaccggcgatgcagtttggttacgtcaatatggctattgtagccgtgatttttctctgcacactggcgttccagccgatcagcatgaggttgcgcactctgctacctgaatgctggctacagcgcgttttctccggagtgttgctgatgattgccacgctgattctggtgacgctatga

SEQ ID NO: 128692 - DNA, 1152 bp, Enterobacter cloacae
atgaaactcgcttttcatctgatggcgaagcctgcgggctggcgctgtaatctggcctgtgattactgtttttacctggcaaaagggcagggtgtgctgcgggatacctgcggacagcggcatatgtccgataaggtactggaaacgtatattcgccagtacatcgcggcatcacccggcacggaggtgaactttacctggcagggcggcgagcccacgctggccgggcttgatttttatcgccgggccgtggcgctccagcagcgctatgccgggaataagcgtattaccaacagccttcagaccaatggcgtactgattgacgacgaatgggcggtatttctggctcagcatcagtttctggtgggcatatcgctggatggcccggcgcatctgcacaatcattatcgcaagacaggcagtggtaagcccgtatttgagcaggtgatggcggcgctggactgtctgaagcgtcacggtgtggacgtcaatatcctgaccgtagtgaacaacgtgacggcacaagctccactggaaatttaccgttttctgacgcgtgaagtgggggctgaatttctccagtttattccggtggtggagtatgacgcccaatgcgggttgttgccctggtcagtgacgggggaagattacgggcgatttatgatcgccatcttcgatgaatgggtacgtcatgatgtcgggcgggtattcgttcagctttttgataactcactggcggcgtggctgggcgaacgcccggcgttgtgtgtgatgcagcctacctgcggacgagggctggtggttgagcagaacggcgatgtttacagttgcgatcactatgtggatgcggaacaccgactcggtaatctgctacagcagccgctggaaaagctggttgtgagtaaagcacaacggcggttcggccagcagaaagcgcagctaccggataattgccatcgttgtccgtggcgttttgcctgccagggcggttgtccgaagcaccgggtaaacgatcgattaaatcatctttgtgccggatatcgcatgatcttcagccatatggatccatacatgacctatatggtgcagcagattcgtgtgcagcagtctccggccagagtgatgacggagatagatagtctgaagaagtaa

SEQ ID NO: 128693 - DNA, 1203 bp, Enterobacter cloacae
atgatgtcggggctacattcatggcttttagataagtcaaccagtgacacctatatgttcatcaagcgcctgtcagccaacgatactggtgcgacgggtgggcatcaggttggcatttacataccttctggcattgttgagcatcttttcccttccattaatcatacaagggatcttaacccgtctgtgacgctgaatgcgcatacctcctcgcacagttgcccggacaccgaggccagggccgtttattacaatggtcgtttctttggtaagacccgaaatgaaaagcgtatcacccgatggggcggaggaaaaaatcctctgcaaaaccctgagaacacgggggcactagcgttactggcgtttgaccatcggcagggggcagatagtcaatttgtcgatatctgggtgtgttatgacgctgaagaagaagatattgttgagtcatcactcggagagattgttcccggttcgctagtctatggccctgcaaatgagattctgggcggcctggctttaaaagaacctgtctccagtgagtatcgtcttccggaagagtggagaacgcattttccttctggcaaggagattatcgagtatgcagcagctcactattctccaaatgttgttggcccggataagcaactgattgaacgtcgtcgtgttgagtatgaaattttcctgctggtggaggaaatgcatgttctgggtatggttcagtctgggtttgattcagtaaatgaatttattgcactggcgaattccgtaagcaacagacgaaaatcacgagccgggaaatcactggaactgcatcttgaacagcttttcaatgagcacggactgacaacttttgagactcaggccgtcacggaaggaaataagaaaccagattttttattcccctctgcgcaagcttatcacgatgaagcttttccagagcagaagttgcgtatgttagcggtaaaaacaacctgtaaagatcgctggcggcagatattaaatgaggcagacagaattcaggacatttacctctttacccttcaggaaggtgtttctgttgcccaatttcaggagatgcagcaggaaaatgtcaggttggttgtgcccagtagccttcatgataagtacccgaaaactgtccgggaataccttatttcgttagaaacatttatcgatgaaactaaagcattgtatgtcgattaa

SEQ ID NO: 128694 - DNA, 1425 bp, Enterobacter cloacae
atgtctgaattcgatttatttgcgcaggagctgctcgaaaaagcagaagctgaagaaaaacaacaacaagagcgcgacaggaagctgattgatcgggtacttgaaatttacgaccagaagtatgtcgcagaactgctaagaaaaataggtaaaaatgagtggagccgcgaaacccttaaccgctggataaatggcaagtgtgagccaaaatcgcttaccatggctgaagaagcgctgttacggaaaatgctgccggagcaacccgctcatcatcctgactatgatttccgctttattgacctgtttgccggtattggtggtatccgtaaaggattcgaggccatcggcgggcaatgcgtttttaccagcgaatggaataaagaagcggtacgtacctacaaagcaaactggtacaacgatgaagaagcgcacacattcaatctggatatccgggaagttacactgagtggagaagaaggcatttctgaagagaaggcctacgctcatatcgatcaacacatcccggatcatgacgtcctgctggccggttttccctgccagccattcagtctggcaggtgtaagtaagaaaaactcgctcggacgcgcacatggatttgaatgtgaagcgcaagggactctgtttttcgatgtcgcccgtataatcaaggcgaagcaaccagccatttttgtgctggagaacgtgaaaaaccttaagagccatgacaaaggcaaaacgtttaaagtcattatggatacccttgatgaattaggctatgaagtcgctgatgccaatatcacagggaaagatgatcctaaaattattgatggtaaaaatttcctgccacaacatcgtgagcgtattgttctagtcggattccgccgtgaccttaatatccatcagggattcacattaaagaatattcataaattctaccctgagaaaagaccaacatttggtcagcttctggaccctgcggttgacagcaaatatatcctgagccctaagttatgggaatatctctataactatgctaaaaagcatgctgccaaaggtaatgggttcggttttggtctggttgatccgaataatgaaaacagcgtcgcgagaacattatccgctcgttaccataaagatggctctgaaattctcatcgacagaggatgggataaagaactcggcgaaatcgatttctctaatccaaagaatcaggaacaaaggccaagaagactgacgcctcatgaatgcgccagactgatgggttttgagcaacccggtggcaagccattccggatccccgtttccgacacccaggcctatcgccagttcgggaactcagtggtcgttcccgtttttgaagccgtggcaaaactgcttcagccttatattatgaaagtcgctgcaagcaaggcgaccaaaaaataa

SEQ ID NO: 128695 - DNA, 738 bp, Enterobacter cloacae
atgactgttgccgacaccagcctgaacagcattcccccgccggttcagattcagcaggcggccataccaccgccagcagaaatgccgtttctttctgccccggttcataaccacaccgcttttcactacacccgatttacccgccacgccctgctgcgccctatcgcccgtgaaacgggaagtcgaatctaccttcaggaacaacccacctgtggtttctggtatctgaaccatggcgtcattggcctgcaccacacattaaaaaatggcaaagaactgctggtccgcgcctgccagcaaggtgaatggtttggttatctggggttgtttggtacggagttctatcactgccatgcctgcgttttgcagaccgcatcgctgtgccacgtcattccacattccaacagcgagttcctgcatcattacccgcagtttgctcatttcctgctaaaccaggtggtggcgaatctgtccgatgcggagcatcgcatgacctggatcgcccgttaccgcacccgtcaccgggttctaagcagcctctggtatctgacgcggtattttcccggctatgactggacgtggcgtgaagtggcagagtttgccgggtgtgagacagaaaccgcgttacggttcagtaaggaattaagacaggccggaatactggatgattcacagcgccgcctgcatgttcctcatccagaaaaactggcaacgttattggctaatacccatagttag

SEQ ID NO: 128696 - DNA, 261 bp, Enterobacter cloacae
atgattaaaaaagactggcaccctgccgacatcatcgccgccctgcacaaacgcggcaccagtatggcagcggtctcgcgggaagcggggctggcctcctcaacgctggcgaatgcactttcacgtccctggccgaaaggcgagtggctggttgcccgcgcactcaacgttcacccttcggaaatctggcccagccgttacgaggaagaaggcgaacagcggcaacccaaaaatccgctccccgtcaggtgcaggttatga

SEQ ID NO: 128697 - DNA, 1296 bp, Enterobacter cloacae
atgtctgagagcctgcaatctaatacaactcaaacgttacctgacgatagggaggggctgtatcaccttgtctggcgcgagcctgaggagcgtattacttctttctataacatcagcacagagcaactggcaaagcgatgcgctgaattacggataccgaggccgctcgccggatactggaaggcgctggcgaaaggaactgcaccggcggtgcctgctttgcctgatttgaagagtggcaaggtagtaaaatcccccagaaaaaccagccaggacattactcttcccacaaaaatatcatcgaaagtagcagcgccagcaccgcgaaagcgagcaaggacagcaggtagtggctatgcactgatcgatgatctcaaaacttaccttcccgtctcttccgtcacaaaagacagctactacaaaccaacgaaaaagaagctactcgatctgaatgtttcagaaacgggattcaacagtgctatcgattttctgagtcggttctttgccgcactgggaaagcaagggtattgggtacgattagctgaaagcggtgaggggcttcattgtcagggcatcgatatcaaagaagatccaaaagagggaggtttgcgctacgacagtttatggcgcccttgttcagccagtattatttgcattgaagatatgctgttcggctttagcttggctgaaatgacggaatatgtcccggcaaaggaggttaatggtcgatacattcgtgatgaaacaatgatccgctggatgcgaggaacttatgaaaagccatttcgctacgttatcaggcatacgttacctacggggcgatttctgctacagctctactcgccatactcgtcaactaactggcaggctgagtttcgccagacaaaacagtgcgggcttataagccagatcccgaaaatcatttccgcgatgcgtgatgctgttccgttgataaagaagcagcaggaagaagccagaattaaagcagaagaacggcgaatccagtgggaactggatgaaaagggatatcgggaaaaggagcgggtcagaagggaaaaagaggcatacaacgccagcttagccgaactggaagctattatggtgcagtgggcagaagataagcgtatagagcagttttttcgtgaagcagagttggatgcggtggattttgatgagcaacaaaggttaaagattatggagcgcttacaactggctcggcagttcttgtcggtagataaggcggctgagcgtttgatgaaatggaggattccgcaggaacggttagataaagcgtag

SEQ ID NO: 128698 - DNA, 978 bp, Enterobacter cloacae
atgagtcagaaagcatggtcttttaaagcagtaggtcaggatgatctccggtacttcgggaataacggttatcaagatgactcaactagtttttatcgatatgacaactttgtgccaaaccataagcaagtcaaaaaaggagatattgtcatagtaactgatagaaaaaatgttcagggtatatcagttataaccaatttatcttcagccccatacataaaagctcgtaaccgatgcccatatgaaaattgcacgccagcaaagttaatccttcggaaatctaaaaaaccaaagtggcgctgcagcaatggacatgaatttgaacagcctaaagtagaagacgttcctgcatttgaatttaaagctgaatataagcaaaactacatgcccattaattctatctccataatagatttaatatctcatacaccgcgctacaacgttcaaagttcaattcaagaacttgattttgaatgggcaaaaagtctattttgtagtgtcattcagttggattctactgaagcggacattgatgatattcctctcgatgtagatgatcagcgaaaggttattctacggcaaattaagcaaaggcgtgggcaaaaaacttttcgcgacactctgttatcccaagcagcaaaatgtgcaataagtggttgtgaaatcattgatatcctcgaagccgcacatatcaccgcatacaaaaatgatacacataaccatataagtaatggactattattgcgttgtgatatgcatactctttacgatctggatttatttgcaatcgatccggattcgttcgttatttactttgctccacagatccaagataaagagtatgtaaagtatcatggaaaaaagctacatgtaacgtacaagattaatcacggagctcttgtcgaaaggtggaaaaggtttactgaaaaatatgctttgactgtagtcaattcgctaaatcttaccatgcatgtttaa

SEQ ID NO: 128699 - DNA, 1527 bp, Enterobacter cloacae
atggttgagatttacttaaatgatatagatgtcgatgatataaaacatatccgacagtcagatgatattgaggtatttattcctttagagagtgttggtttctcaagctcatattttgacttatgcgatgactatcttgaggctatatgggcaggagaacgattggcaagcacttgtcaacacgcccgggcagtctcatattacaacagggaaaatcataaatcgttcattaaattatctttaacaaagccaaacgaaaaatttcatgaagcgctaagggattgtatagtactttataaacgatatgatgacagtctttatagtgaacctcccttagaatacagtaaaatcatagatgcagtactctctatagaaaatgatctagataattttaatataaaggtacctgccttgcatgatttttattatgcaaatttaataggaggtaaatattttgagatgatgtctgatgttccagatgaatatcgaagtgaaataaataagtatcctgagagagctttgggtttctggaagagcgcttacagtagcaagattggtgatagatgttatacatcaccagatgcttggattttaccaaatactgttgatataaataacttttttaaagttaccgagcaaaactacaattttgaaagctttataccctctagcattgtagtgttaaaaggggtctcttacactacctctgatgtcatcatttcttatttcccaatgaatcattactttaaatctaaagtttgtagtagtattgagttgtcaagagatgaatataggtggccaccagatccatttgattggtctaactctacatttacttattcgccctataataattttttgagggagctgatagaccatgatagtagcttactctcccaaaaaccgactcatgagcaatgttatgttgatccaaacggaactttagtaatagttgatgacggtaatttttaccatctcctttacgataccgctgagttgaaattatctcagataaaaaactttaacgaaacattaggtgaagtccttttatctaccggcattaatataggtttttccgctgggttaacatataattggtccgaaattgatgacgagcaatttgaacagctttgctatgatataatctatagccatccacgttttaataatgaaacgatcaggaaattaggtaagtctcgttcacgtgatggaggtagagatatacaagtatatgatattcctaccgaacgattaatggagcccaaaaaatggattttccagtgtaaattggtcaccggagcaggatcactttctgcaacgaaacttacagatgttggtgatatgctagattcttacgatgtcgaagggtttggtgtttttactaacactataatcgacgcaactctttatgacaaacttgataaagtatgttcaaaaaggaatgtagaacaactcaatttctccgcccttgaaattgagaaagaattaataaggaagccatatataaggatgaagtatttcaaatag

SEQ ID NO: 128700 - DNA, 2655 bp, Enterobacter cloacae
atgatgcgcagcggcaccctgaccgaacgaacggtggacagcctgtaccagaaaggcgcgtcgttcgtcgattttctgccgtgggtggagtaccagccggaaagcaaaacgttgctgctggatgacgggcgctcggtcggcgcggtgtatgacatcacgccgttcggcaccgaaggccgctctccggcacggctggaagaattacgcgatatcctgaaggacgcgcttcaggacagcttcacggaatacgaccgccatccgtgggtggtgcagttttattgtcaggatgaggacgacaccgcaaactggctggctgcactgcatggttacgcagtaccggaagcaagagactctgactttacacgagcctggctgaacgagatggaacgccacttgcaggcggtctcccgcccggaaggctattttctggacgatgccgtcagccatacccgctggcgtgcgcagcagcgccacacgcgaatggtggtctaccgctggctacccaataaatcccgcgattcgctggaagactccccggaagaggcgctgaacaccgtttgcgaacggatggtctccgcgctggcgggcgcaggcattcacgcccacagactggaatgtgaggctattcgccactggctgctgcgctggttcaaccccgccccagagatagccgactcgccccggcagttctggcaacaaatggcgcagcaggatgacacgccggagctgcacgactttgccgagagcctgctgtgtagtgaaccccgctcgcaggctacgcagggaacatggctgttcgaccagcgtccgcataaagtcatcgtgctggaccggctgcgcaaaccgcccaccgtcggccatatgaccggagaatccgcacgcggtgacggcattaacgcgctgttcgacctgctgccggaaggggtgattatggcgctggcaatcgtcgtctggccacaggatcggctggaggaacatttaagccacctcagcgatcgcgccatcggcgagaacgtagaatcggagtacacaaaaaaagactgtcaggaggtgcgtcactggctgaaagacggccacaaactctaccgcagcgcgctggcgttttatctttccgccccggataacggcgaactgacccggcgtgtgcgcagcctgaacagcctgctgctgaatgcgggtatggttccggtacaggagaatgacgaactcgccccgctcagttcgtggctgcgctggctgccgatgtgcttcgacccggctcgggacaagcgccagctctacacccgcttcagcttcgtacagcatctcgccaacctgctgccgctgtttggccgcgagagcggaaccgggcatccgggcgtcagctactttaaccggggaggcgggatgctgtgctgggatccgctcaaccgcgaggaccgcgcccagaacggccacctgctgctgctcggcccgaccggcgcaggcaaatccgccaccctgaacgccaaaatcgcgcaactgatggcgctgcatcgtccacgtctgtttatcgtcgaggcgggcaactcgttcggactgatggccgattacgcccgcgagcatggcctgacggtgaataaaatcagcctgaaacccggctccggcatcacgctgccgctgtttgccgatgcgtggaaactggcggaaagcgatgtaccttcagcagaaccgaatgatgacgatcccgaagataccgacaacgaacagcgcgatctgctgggcgagatggagatcacggcccgcctgatgatcaccggcggtgaactaaaagaggatgcccggctcacccgttctgaccgggcattaattcgcgaagcgattctgcacgccgcccggttcaccgcccgagaaaaaagacaaacgctgacacaggatatccgcgacgcactattcacactggcgcaggatgcagcgctaccggagtcccgccgtaatcggctgtgggagatgggcgaagcaatgaatatgttctgctccgggtttgaaggggagctgtttaaccgcgagggcgaggcgtggccggaggtagatatcaccctggtggatctggcgatgtttgctcgcgaagggtacgaagcacagctggcgatcgcctacatctcactgattaaccatatcaacaaccttggcgaacgtgaccagcatctggcccggcccatcgtcaatattaccgatgaggcgcatatcatcaccgtcaatccgctactggcgcggtttctgaccaaaggctcgaagatgtggcgcaagctggggatctggctttggctggcaacgcagaacctgagcgacttcccggatgatgcaaaaaagctgctcaatatgatcgagtggtgggaactgctggtgatgccgccggaagaagtcgagcaggtcagccgctttaaatccctgacgccagaacagcgccaactcctgctcagcgccaccaaggcaccggggaaatataccgaaggcgtagtactttcgccgcatgtggaagcgctgttccgggtggtatcccctgccctgtggctggcgctggggatgacggagaaacacgagaaggcggagcggatgcagattatgcgggagtttggatgtaatgaactggaggcggcaatgagggtggcggaaaggtgttgtttcaatgattga

SEQ ID NO: 128701 - DNA, 390 bp, Enterobacter cloacae
atgcgtatgctgattttgctgttatcgctgctgctgaccgcctgtagcaccgaccagaaaaccctgttgccggtggatgaaaacaccaccatgctgaacatctggggccgacagaataacgatgcgcaggcgctgtacgatgcacgctcagtcctgcgtcgcccactggatgacgccacgctgaccgggcaacagcagcagaccacacgcagcgacggcaatgccgctcagacgctgttccggcgactgccgaatccggatctggagatgtatatcttccctcatctggcaggcagtgaaggcgtcccggtaccgggctataccaccgtcttccccttctataaccgggtacaatacgccatgcccggcgagcggaccgatccgctgtga

SEQ ID NO: 128702 - DNA, 1338 bp, Enterobacter cloacae
atgaagctccaggcgaatatcctgctgcgggttctgacgccactcattctgctggcgggcagcgtcatgctgtttcatgcctgtcaggaccgcaaaaccacaccgtcaaaatcctcggtgcctgcaacgcccctcagccacgacgagctgaaagcgctggggattgaaggcgacacgcccgccgatactgtcgccacgctggtcggccagatgaaactctggcgcaaggagctggaaacggtgaaagccagcaacgccgcactggagcaggaaaaccagcgcctgcatgaacgcgagcaaaataccgacaaccgtatcaacgaggccattaaccgccagcaaaccaacacctcagagcagcaaaacgaattgctcagctcgctacagacgcagatccagcagttaaagggcaacagagcaacggatgactcgctggccgggctggggattgatgaaccggaagcggcctccagagaaccactgcgctggatagcccccgccgacgccctgccaacggataaaaacggtcgcccgctgcaacctgcactggcctttccttccacgatgcagaacactgcgccacaaccagaagtaccgcctcccgccgtcgtcaaaccggtctacaccctgccgcagaacagcacgttaatcggctcggtggcgatgactgcgctgctggggcgcattccgcttaacggcagcgtcaccgatccttacccgttcaaggtgctgattggccgcgataacctcaccgccaacggcatcgagttgcccgatattgaaggcgcggtgatctccggcagcgccaccggcgactggacgctctcctgcgtgcgcggcaatttaacgtcaatcacctttgtctttcgcgacggcacggtgcgcacactccccgccgaaggcgataaaaccggaagcggcacggaaggcaacatcggctggctgtccgatcctcacggcctgccctgcatccccggcgaacgtaaatccaacgccgccgaatatatcggctcgcagttcctgctggccggatcgtccgccgccgcgcaggcgctggcaaacaatcagaccacctccaccgtggaggatggctccatcaccaccgcgctgacgggcgacagcgggcagtacgtactcggccaggcgctgggcggcggtctgaaagagagcgccgactggtttaagcagcgctacggccagatgttcgatgccatttatgtaccacccggccaggccgttgccatccatatcacccgccaactcgccatcgactacgagcccaacggacggcgggtgaactaccgcacgtcgggcgatcgcactggagatctggactga

SEQ ID NO: 128703 - DNA, 789 bp, Enterobacter cloacae
atgaatgtccgcccactgctaatcctgctggttgccctgcccctgcacgccgtcgagctggtgaagtgggaacgtatcccgctgccggtggctttgaacatagggcaagagcagatcgtctttgtcgatcgcaatgttcgggtgggctaccccgccgcgctggaaggtaaactgcgcatccagagcagcaacggtacgctgtatttactcgccagccagccgtttgccgccaccaggctacagcttcaggacacagagaacggtgagctgattttgctggacgtctccgccagcaagggcgagcacatccgggagccaatgcgcattgtccgcgaagagaaaaaaacgactgacgcgaagcctgatgcagttccagcccccttaccctccacaccgcttccggtcgcgctcacccgctatgccgcgcagacgttatatgccccgctacgcaccgtggagcctttaccgggcgttcagcccgaaggcgtgcggctggcaaaaaccatcaccactctgctgcctgcattacccatcaacgccataccgatcggcggctggcggctcgatccttaccacctggcggcgatccggctgcagaataaaagcgccacccggcttgaactcgatccgcgccagcttcaggggcagttttacgccgcatcctttcagcatcgctggctggggccagcgggcagcgccgaagacaccaccgtgctctatctcattacccgcaatcatcgtcctgaacaggcaattctgccggagcctgcgccggagaagaaaaaatga

SEQ ID NO: 128704 - DNA, 627 bp, Enterobacter cloacae
atgagcgcctttaaacatgcgctggccgcacgggatgcgcatatccgtaccctgcatattgcgctggttgcgttattcctgctggcatcaggcatgggcttcggctggtacagcgccccacgccagctcacggtgtacctgtcaccggatcttcgcgccgccagtcagcgtccgtggtgggaagtgccgcccgccacggtgtacgccttcgcgttttcagtgtttcagcagatcaaccgctggccgaccaacggcgaggccgattatccccgcaacctcagtgcgctacgggcttaccttacccccggctgctacagccagattgaccacgaatttcgccagcgtctgcaaaacggcgagctgcgcgaccgggtacgtggcgtgtatgaaatccccggtcggggattcagcgataagcaggtgcagatcctcgaccgcgacaactggattgtgacgctggatctgaccgtcgatgagtatttccactccgaacccgttaagcgggcgatggtccgttaccccattaaggtgctgcgctataacatcgatcagcaaaaaaatccgtgggggctggcgctggactgcttctcatcgccgccgcagaagctggaggcggctaaaccatga

SEQ ID NO: 128705 - DNA, 354 bp, Enterobacter cloacae
atgagcaccattccctttctcccggaacggctgaaccgcgagcctgcgatgtttcgcggcctgacggtcagcgagctgctgatagcgctacttgtcgggctggctatcggcgcaattgcaggagccattccagcgatactgtggcgcaactggagccttatccccggcagtgctctgcccggcggggcgctggcgatcttctgcggcggtcgttggctggcgcggctgaagcgcggacgcccggagagctggctataccgggcgctggagctaaagctggcccgcttcggcatcggcactcagcgttttgtcctgcacgatggcgtctgggccattcgccggagccgacgatga

SEQ ID NO: 128706 - DNA, 327 bp, Enterobacter cloacae
atgaaaaaacgcatcttcagatggctgttatggttcctggcgctgcctgcatatggcgatctgccagagatggaagatccctcacgcggtcagggcgacggcatcatggagacgttgcagaactacggctatgacatcgtgatcctgatgacgctgggcatctgcgctgtgggctttctggtggtcgccaacaactgtatcgccacctactccgaaattcagggcgggcgcaaacagtggaaagatttaggcgcaatggcgggcgtcggtgcggtgctgctggtgatcaccatctggttgctcaaccaggcctcggacatcctgtga

SEQ ID NO: 128707 - DNA, 234 bp, Enterobacter cloacae
atgacccccgagcaaatcagcgccttccaggcagccagcctggtgaaacccgatgctgtcagtctggtgatgctcggcctgttcagcgcctttctgttgctgtgggtggtctgggtgctgaatgacgcttaccggggcgtggcgaccgcgcgggtaagctggcgggcgttgggcagtatcggcggacgaaccatcttactgttgctggtcagcttctggctggtactgagctag

SEQ ID NO: 128708 - DNA, 327 bp, Enterobacter cloacae
atgaagatcatttcagtgcgtataataacgacattaatcatcagcctgtttattaccagttccgctctcgccgcccccctcaccgagcgcgaagagctaaccctgtccctcaaccagcttagccaaatcgaagcctcgctccaccgcgcccagcaaagcgccagaaccggcatcaacgagcgctactactttgactatccacgcatccacggcgatatcaccactctgcgtagcgggattgaacattacctcacccctgcccgcgcccagccgcgagatacggcgacgcggcttgggcagtaccgtgaagagaaaaccacaccatga

SEQ ID NO: 128709 - DNA, 2760 bp, Enterobacter cloacae
atgagtctggcgttagttataaataggcttgatggtcatatcaatgatttcatgaacaataaaaatataaatagtgctaggaaagctggtgaagctatctgcaagattattcttggtgacacaaactctgccattgacacaaatgttaaatatgatcagttgatttcattattaaacaccaaaaatacaaatttacctaaatttttccttagtaaaattcaggctgaattgagagtgttacaatcatatggtaatgctgactctcatgatagcgaagaagctcttaacacaaatgatcttgtaaggatacagcgagcaattataggtttattaggttatttattcgatagtaaagatgactatagtttagattataaaattcctgattttatttatggcttattaaatgaatctagtaatggaaatgagaactggcgctgccaacaaataatatctacaatatatccaaatagaaatgtcattaagaatataaaagataaagattttgagtttcatgtcgtggaagatgctgatggtcggcacattgcttttcttggtattagtcgcaatgtgagttttacagatgtatttactaaatcattatcatctgaaaacctaggtaaaaccgatagtttgacttttttattccctctggaaattagcaaagcaacagggactccagttaaaaatagaaaggagtatattcagaaaaaatcaaatacttttttaccaaaggataaaaatattaaagttagttattatttttatgaggactatatttgggataaatgcctgccagcgcatataaaatctaacagtgacattgcgttgcgtagcgactttattgatcaaaatttgttcaataaagatgaagtacacatgagcttagactacgttgactctcttatttatgactatcgactagataaaaaacctttgcatgttatcttcgggcaaggtggagtaggaaaaactactttttgtgagcaagctgttcaaagaataaattctaaaatgaacgatgggcttaagaagaaagcgatattcatttcatctattgatataaatgatgataacttatctacaatgtcagaaataagtactattgaagatttatactctttagtatttaatagtgatgaggatacaaaaattgaaaaaaacagtttagggctaaatattagctgtggaaacttgattatcattatagacgggttagatgaactaatatcaaaacttaaagataaattcaatgtagatggttttttcgagtctatccataatttaaatgatacctatagtaattgcactataataattacgtcacgtgagatttcattagataaattagatcatcagaactctaacattcttcatcttaaaggatttgatgatagtctgattattaagtatctttctaaaagatttaagtctgataataacctgcttgataaagcatataaaaatatcaagagtattagtgcctccggagagataaccccactaattattcgtcttgtgtctgacttgactaatgaagatgggtctggaataaataaatttatcgaatgtccataccttgataaagaacaagctatggataaggttgttttattattaatcggtcgtgaaattcaaaagcaagtcttagatatggacggaagtcagtattttatgcttttgcagtctattatatttgaacatcaggggagaattaatgagtctgagttctgtgatcaagttcaatacattctccaaactggaaaagcaaataaagtttataatttcacgaaagaattttatgatagctacttagtttcttcattgctaagtagagatggagaagatatttatataaaatatgactcgattgagtttttgataaaggtgagatatttgactcatgttattaattctgaagataatcacaaaaatgatacaacgattaattctgcattgatacaagattgctttaaaggtggtgttttaattgaagagatttctaaatttaagaaaaatgacactacctttgaaaaagaaagattaacttacttgataaatttagcagaagaaagtcccagtaataggaaattaatttccgcattgttatacttatatttctcaacaaagaaagatgatagggttgctaattctgaacatttgatctcgttgtttaattctgaaaagttatctaaactctcgatcttcggtgatttttatccattggattttacaaatattactgttgatgatggatatttcgataacttctctagccttgggaagtccttaattccgcgaggaaaaacgatatttaataaatgtaagttcgtgaattttaataaaaaagatattagaaaaggtagtgtttatccagagaattttaattctgattgcgatttgtgtgatggaattaaaatagcaatggatattgcagttgaagctgatgttaaaaaacaaggcttgatcgaagatgatttgataaagatttttaaagtaggttttagaaatggttcatttatttggaagtctattgatgtgtataaacaacaatgctcctctcttaagacaaagtatagtttgatgcatttattagatcagattgaaggtgctggttttttagtgaaggaagaagcaagggcttcatcattatttggttataaagtaaatgttggacgcatacaggaagtaaaggattttgtgactcagagaataatcagtgcttcggtttctaatttgattgaaaaactggattcttaa

SEQ ID NO: 128710 - DNA, 681 bp, Enterobacter cloacae
atgcccgaccatgcgccacaccctgtgcgacaccccggattgctcggctggctcgcattattacccggcgtactggttggcttttgtctcggcacatggatgctggcgatagcgctggagtggctgggtgatgtgtttttctggcggaacgcctgcgccagccatagtgaacaggtattgaagtcaacatggcagtggtggcggagttccgctggcgcaccggtgtggttagtagaaaatctggcgattgtcagtggtgtgttgcagcaaggactcgcggcgctgattgcttctctcaacgggcaaagcgggttgttctggacagagacggtcactacagtgatccgctgcgcgttactgtctgcgggtaacgtcaccctcacctttttactgcggctggcgattttgttacaggctctgccgctgtttgcactcaccattaccattggccttatcgacgggctggtaagacgcgacttacggcggttcggcgcaggccatgagtccggttttgtttatcaccatgctaggcgaatgatcggccccaacctagcggcaacgggagtggtgtggctggcgatgccggtttttatcttaccgaaatatacattagtacccggaataattattacttcaatatctgtatctatagctatttggctgtttagaaaaattttataa

SEQ ID NO: 128711 - DNA, 267 bp, Enterobacter cloacae
atgacaccctggacacaccgccagctcgtcagcgttgaagtgatgtggcctgcgcaaacgctgccccttcccctacaacaggcggtggaagcgctgacgcagggagaaacacccgaccagattatcgcccggatgaatttgcagggctttcaggcatggcgcgaagctacgtcgccacagggcgaacacgacatttttcagatacgacttgatgacacgcacgaggctcggttcctctgccgctacattacgctaccgctgcactga

SEQ ID NO: 128712 - DNA, 2034 bp, Enterobacter cloacae
gtgaggctcgattttattctgcgcccagcggtggagctttacagcgccagtgcggccctgctggcggcattatggtgcctagtggctccacagacgctgctgctgacgccttattacggctggttgctggcgctggcattccttgcactttctaccctgcggctaaagcaggggctccgcatcctgcgctttcgccgtcgcgtgcgtcatcttccattctggacgctctctgcctgccgtatcccgctgttacccgacgccctttttctcgggcgcggctttcgctggctacccacgcatacccaacggctgtatctgtgtcgcctgccgcaatgtgagcactggctgcgcacggatcgtccttctaccagcggcggtgatccgttgctgcacggcgtggagttgcacgaaggccgcgttacgctgccgctgcgcgatcgaccggggcatacgctggtcctcggcactacccgcgtcggtaaaacccgactggcggaactgctgattgcccaggatattcgccgtggtgaaacggtgattattttcgaccccaagggtgacgccgacctgctgcggcgcatatgggcagaggcgcaccgtgccggacgggaaagtgtcttctggctgttccatctcggctggccggaaatttccgcccgctacaacgccgtcggacgctttggccgcatctcggaggttgccagccgcatcgccggacagctttccactgaaggcaactccgccgccttccgcgagttcgcgtggcgcttcgtcaacatcatcacccgcgccctggtagcgctgggccagcgcccggattatgcccgcatcacccgccacgttatcaacatcgacgaactgtttatcgactacgcccgcgtcttcctgcccggtcacgaccgtcaggcatgggacgacgtagtacggattgccggaggcatcaccgagaaaaacacgccgcgaaatcttcagggacgggacagctacgtcgtcgcgctggagcagtacctttccaccacccgactgcatgacccgatcctcgatggcctgcgttctgccgtgcgctacgacaaaacctatttcgataagatcgtcgcctcgctgctgccgctgctggaaaaactgaccaccgggaaaattgcccaactgctggccccggactacggcgatctcaacgacccgcgcccggtgttcgactggcagcaggccattcgccagcgggcgattgtctacatcgggctggatgcattgtccgatgccgagattgccgccgctgtcggcaactcgatgttcgccgatctggtcagcgtcgccgggcatatctacaaacacggcgtgatggatggcctgccgcaggcggaagaaaaagcggccatcaacctgcactgcgatgagttcagcgaactgatgggcgatgaatttattccattgatcaacaaaggcggcggcgcgggcgtacaggtcacggcctatacccagacgctctctgatatcgaggcccgaatcggcgatcgcgccaaagcgggccaggtggtcggcaacttcaacagcctgatcatgatgcgggtacgggaaaccgccaccgccgaactgctgaccagacaactgccgcaggtagacgtgctcagcaacagcgtcagttccggcgtcaccgacagcgccgacgcgcagggcaatatcggattttccagcaacacccaggatcgagtgagcagcgttcaggtgccgctactggaacccgcctcactggtccagctccccaaaggtcaggcgttcgccctgctggaaggcggccagctctggaaattacgtatcccgttaccggataccgcgcacgatccgctgatgccggagagcatcgcgcaaatagcccgtgatatggaaaaacaatacgacagcgctcccgtatggtggaaccgcccggaggcagttgtaacggcgaaaaacgaccctattttatggctgaacgacagcgaaaccacggagaaactgaccgatgacaccctggacacaccgccagctcgtcagcgttga

SEQ ID NO: 128713 - DNA, 408 bp, Enterobacter cloacae
atgaaacaccttattccagccatgctgttgtttactgccgccgcgattgccgggcctgccgttcccatgcaggcgctggacgaagcccggttactgccagtcgtcacccacaatctgcatcccggtcagcaaccccgtctggcgctgagcctgccgggaatgacgccgctgtttttaatcggcgacgatccgctgtccacagaatggctgcgccagcaccgggacgcattaaaaaccctgcacgccaccgggctggtcgtgaacgtcgccacgctggcgcggttgaatgccctgcgggccatcgctccagcgttaacgctgctgcccgtcagcgccgacgatatggcaaaacacctgcccatcagcgcctatccggtgctgattaccgacaaggggctggcacagtga

SEQ ID NO: 128714 - DNA, 534 bp, Enterobacter cloacae
atggcgtcccgtctctgctccctgatagtcggcctgcttatcagcgcccacgcctgcgccgtaccaccgctgtatgcgcaaatcgcccgccagcagcaggttccggcagaactactctacgcggtggcccgcgcggaaagcggctcccgactcgcgcaggggctgcatccgtggccgtggacgctgaatattgccggaaccggctaccgttaccccagccgttcttcagcctgccgggcgttgctggacttcgcccgtacccgcagcctgaaacgcatcgacgccgggctggggcagattaatctcggctggaacggccagcggttcccctcactgtgcgccagttttgatccgacggacaatctcaccgtcaccgccctgctgctgcgtcagcactacaacgcatcccccggaagctggctggacgccgccgcccgctaccaccatcccgccggaggcaagcctgccgccgtctaccgccagaagatcagccagcaaatacggctgatctccgcatcagggacgtcgccatga

SEQ ID NO: 128715 - DNA, 651 bp, Enterobacter cloacae
atgcgcagatacctgttgctgtgccttctgctactgccgctgtttgccagcccgcagcaaacccgtattgaagaacaggccatcacccacacgcaggcgcagcagtgggggctgacagacagcgaatggcagcgctaccagcaactgcgtcagggcgagcgcggcatctggtcgccggggctcgatccccttaccaccctcggcgtggaagctaacagcgataccgaacgccagcgcttcgccgagctgctggcccgtaaagagcatcagcgggtggagaaagaactggcattccagcgtgcctacgaccaggcatggaagcggatttacccgacgctgacgcccatccgtagcgtcgtccagccacgtctggcgctgttcgttagcgaaaaatgcccggcctgcgagacgctggcgcagaggcttatcaacgatgaccgcccgctggatatctggctggtcaacagccgtaacaacgatgccagcctgcaacgctgggcgcagcgccagcatattgatatgcgcaaagtcgaacgcgggcagataacgcttaatcacgataacggacgctggcaacgtctcggcggcggaaaactgccgttattgctggaacaacagggggagcaatggcgtcccgtctctgctccctga

SEQ ID NO: 128716 - DNA, 609 bp, Enterobacter cloacae
atgcttaaacgtctggcttacctgacaaccggcgctgctctcctgctactggcagcggcggtgttctggtgcgtcaaccgtctgaacaccctgacgctggcgcaacaacagacacaacgccagatggcgcaatggcacgaccagccacagccagacagcaattatcgcgagctggaggttgccgtaaaaaacattaccggacgcacagaaacccttgctaaacagcttaacgatgccgccagcgatcaggccgaacgacttcaccccattaacgaacagatcaatgcgctggagagacaggtccagaccctgagcgccagttatcaacacctgcaacaacagaccgccacgcgcagccgcgccacggcaaaacgtcccgtcccctctccgctttgggccgcaaaggcccctttttctcttatcagcagcgagttccgcgccgggcggcagttcgccgtcatcgcgccatccggctatcactcgctctcacagcttcagcttgtggcccccggcgacagcgtgcagggctggcaactgctgcaactggacggcagtcacgccactttccgtaaaggcgggcagcggttgacgctgaacgccggaggataa

SEQ ID NO: 128717 - DNA, 465 bp, Enterobacter cloacae
atggcgcgaataacaggatgggttatcacactgctgatgctgggcggctgcactacgccccaacagcccgttgcgcctgcacaaaaacccgcaacgccgcccgcacctgaagtcgtgcgctatgaccgttacctgttgatcaacacccaccccgacgaagcccagcgcaacccgctacaccagatagtcaacattaacctgccgctgaacctgaagctcaccgtgggcgacgcctttacctggctgctgaaacagagcggctacagcctgtgcgtcgatgaccatccaacgcagtttctggctggaaaaccgctgccgctttcgcaataccggctcggcccgatgcgactggaagaggtgctgaaaacgctagccggaccgggctggctgatgcagaccgacgtactgaaccgcgaagtctgttttcacctgaacataccgggaacgggagaccatcatgcttaa

SEQ ID NO: 128718 - DNA, 417 bp, Enterobacter cloacae
atgagcgagaaaacttacttcaatctgtacaccagcggtctgggttacgtaaaccgtgtccgcaccgtcaccccaaaacgcggcgaaccctttttatgttgtgacattgccgcattaagcggggctgccgatgacgtggactatgtccgctttgactgcaaagtcaccggtagcgaagcacgtaagctgattgcccgctgcgagcaggcggtcaatgaaaagcgcaaggtgctgatccacttccggttgggcgatttatacgtcgatatgttcacctacagcaaaggcgagcgtaaaggcgaaacgggcgtcagcctgaaagcccggctgctctatattggtcttgtcaaaattgacggtgaagtcgtctggcaggccggaaatcaggaagcagaggcagaagctgatgccgcctga

SEQ ID NO: 128719 - DNA, 495 bp, Enterobacter cloacae
atgatgaataaccccataaccggctatcagtcgctggctgatgaagactataaaatgctggcttacgtctcctcgctaaaaggccttttaaagccttttaagagtaagggggagcttgagctgctggagagcaacgcccaaagcgtgcgcgagatgatggaaccattgatgcaacgcctgatccagagcgccagacgctaccctgtgcgccagcttccgctgatattcaccatcggaccggcaccgtccggtgcaaacttcctgcgctggcggaaccagcaaaacaacaaatccggcaccccggcattctgcaacctgattggcgatcccaaaatcccgcaacgtgccagagatgccttgctggaaatcgagcgggatcgcatcgttttcaatatgcagatgtcggtactgaccttcatcatccgccaggcgcatgagtgtcaggaaaagatgaaccaggcagaaatgctgtatcaggggcggcaaaatagctga

SEQ ID NO: 128720 - DNA, 699 bp, Enterobacter cloacae
atgtcggactacaccttcaacatgggtcccctgcgtagtgcgatccatattcagcttcatacccacaatgccacccggctgtggaccgggcgacgggcgaccgagaacggccctgcgccaatcattggaatgccgcgctttatcgaaatccttaatcagatgcgcattgccgcagaacataacgatccttacgccgatctgtggatgctgcgtatggaagagaaactggcgcagtcgcgtaagttgatgcaagtgatgctggatcaggcaaaagccatgttcagcgaattgccagaaggcatcgatattgaaacctgcttcaatgttcagcctgcccgctttccgctgtttatcaacgccccgctggcctatcagggtgtttatctgctgaccgacttcgaccagctcgcacgccagcttctgctggcctctcatatcgccgtcatcttccgcagggagatgcacaaccggttaaataatggcgcaacggttattcgcagcgccttcggtctggcgcagaaatatcacggctccgggctgacccgtcaggattttatcgacgatacgccgcaggccagagccgccattgaacgtttaggcccgctaccggaagcgatactgagcggcaagctgcgctcatcgttttcatcaccattgcctggcaaggccgaaaatcccggagttgccgatgatgaataa

SEQ ID NO: 128721 - DNA, 1473 bp, Enterobacter cloacae
gtgaccttccggggagcgcgggattcccgcctgcatgtgtcggtccggggaatgccctacactgagcgctactgtttccgcccggcggatagcccgcgcccggaaattcacggcacgcttccggcgcggattgagagccgtgagaaaaatgacatttacgcccatctggatgagcacggacgctaccgcgtcaggctggactttgaccggaacgatgcagaacagggattcgcatacctgtggctgcggatggcgaaaccgtatgccggagagacgtacggctggcatacgccactgaccgacgggaccgaagtggcgattgcgtacagcaacggcgacatcgacctgccgtacatcgcgtatgcgctgcacgactcggaacatcctgaccccgtgacccgcgacaaccacacccgcaacgtgctgcgcactccggcgaacaacaagctgcggatggaggataagcgcggtgaggagcatatcaagctcgcgacggaatatggcaaaacgcagcttaacactggtcacctggtgcacgctcagggaaaagcccgcggtcagggaacggagctgcgcaccgatgagtggggaaccctgagagcagggaaggggttgtttgtcagtgcggatgcgcaggcgaaagcgcagggtgctgcactggacatggatgccgcactgaaggaaatcggtcggcttaaccagcaactgcaacagctggaaatggcggcagaacaggcgcaggcgctgaaggcggatgtcgacagccagatacagatgtttgagcagcggttgaagcctctcaatgaggtgctgctgatgtccgctccggaagggatggcgctgaccagcggggagcatctgcaaatgacagccacaaaaaacgttgccgttaacgccgggggcgatatcagcgccggaacaatgggcaatctgacgctgcttaccggggagaagctgggactgtttgcccggacaggtcaactgagcgtcaagtcaggggaagggccggtggaggtgcaggcgcagaacgccagcctgcggctgtttgcggagaagaagctaacgatgagctcggcgggtgacatctccctagccgggaaaaaacgtatcacgctgattggtggcggcagttacctgaaacttgaggcggggaaggttgaatacggcacgacagcaatatacctgcgaaaggtgaaaaggacgatggcggcgggaagcattaccctggagcagcgtccgactgaaatgcccgctccattaccaaatttatcatgtggtccaaatacagcgtatttcagggtcctggattccttaacaggatctgaaaatattgagtttgcatatcaattacagacatctaccggtacagcggcaggaagaacggattcagccctgacgcatgtagtaaattcagatacagaagaaaacgtaaacctggtctatgttttccagatcagagcggggacaaggtaa

SEQ ID NO: 128722 - DNA, 882 bp, Enterobacter cloacae
atggcagtttcatcaacaacaaccacaaaagagcaggagcagcaggaaaagaaggtcagtgttgatttctttcacattgatatgattcccaatgcaatgagaaagatgggctgggaaatggcacccaaattaatggagcattggttcagtattttcccagcttactcatttaataaagaatcaaaaacggaacttttaaactgcgatgcaagaagcatccctccatctaaggtgaatgataacattgttaaaatggcatgggcgaatcagtatccccaggttaaaaatggtattaatgagcttaggtcaacgtggcacaccataaatagccgaaagatattaaaaaagcatatatccaagttagatatctctgaaggggaaactattaagtttgggttttcagatgatgtgaaagaattagatgcgacagctcaggctaattttcttataattggcgataaattcgatacgataaatgattggtatggcgcaattggtaattgtaatttaaaagtatgcgtccgtgggacagtcaatctacttaatgatatacttactctgactattgagtctttagggttttatattaaagatacatacgactttctggataatcataaatttggtatcgatataccagagtcattaggcatttgggggaaagaacgaattctaaataaagtggaaacactttcgtatatgtcatcctacggatcaggtgcatttggacttttagttgaaatatttcccggctttgtgccagtgtttaattccgacttcaggaaatggcaaaaaaaacataacactggtggagactatatagttttttctgatttgctttggctgccaccattagataaagaccgtttggtgattctatga

SEQ ID NO: 128723 - DNA, 423 bp, Enterobacter cloacae
atgcgtattgcactgtatggtatgactcgccgcgccgccatgcttcagggtgccgaacctgtaagccagccttacaagttgcaagaagaaaccggttcatctttgcaattgcgtaatctcatccgtcagcgccatgctgagtggtcacaggccacgttcggtgatgttggtcctgtcggcccgctcaagcatctgtcgaaagaggcactcgaagcagcagaggaacctgatgatctcagtgagtgggctgacatgcagttcttgttatgggatgcacagcgccgcgccggtatcagcgatggtgaaattacagcagcgatggaagaaaagctgaaggtgaatatggcgcgccagtggccagagccgaaagatggcgagccgcgactgcatatcaaagcagcaccgcagcaggaggtgaagtga

SEQ ID NO: 128724 - DNA, 462 bp, Enterobacter cloacae
atgagcaacatcgacaaacgcgcattacgtgaagcggcggagaaggcgctaccggcaatgaagcgcctgcttatgatgccaaacgatgagttgtttgatgaggcgctgctgaacgtcgatggagatgttgacgcggcgaatgcattcaacctgctcaccgggccggaaaccgtgctggcgctgctggatgagctggagcgcaaagaagagcaacgtgctaactggtttcagatggcgcaaaaacttggttcagatctggacacagcagagaagcggattgctgagctggaggccatcgctaaatctgtaaaatttcaccctatcccaatggaagacttaggcaacaagagcgacggcaaaaaacacccatacatgtttggtgctggatataacagcgcagtggttcactgtgaaagtgtgctgcttcaggcgttcgcagccgcagccggtaaaggagcgtga

SEQ ID NO: 128725 - DNA, 360 bp, Enterobacter cloacae
atgaaaccgagttatgaagaacttgaagccagatgcgcggcgctggctgcggagaatgcgggactgacgaaattctgcaaagacgctgccttcgatgctgattacgaagctgaattaggcatggagcgtggcggattcactgatgcgcttaacaacatgaaaaccccggcgaccgacgctttcctggctgaagtgcgggcgcagggtgtggagatgtttgctaagcattgtcagaagcgtcacggcgaaatgatgaaatccgtgccaaatgaggcggcaagcaaccaggcgattaccgcaacgcgccgcgctggtgaatttgcattgtacttcgccgcccaacttcgcaaaggagagtag

SEQ ID NO: 128726 - DNA, 387 bp, Enterobacter cloacae
atgggtgaggttttccaactgccgctgtcgtccccctcggttgaaaatcgatcgcttgagcctcatactaaggaccgtggcggtaatggtggtggagatgacatgcttgaagcgcgggttgctaaattagaggctaatgtggaggatatcaaagcaaacctcgcagaggcgagggctgatatccgtgatctacgaaacgctgtcgccgataccaaacgagatgtcgctgttatcctacagaaacaggttgatattgatgataaattatcaaaaaaacctagcctatctgaagttaacagtgcgatttcatcagctgtaaacaaacagatagcgtggaccgttgcaactggcctcgcaattttagggcttgctaagtttattttttga

SEQ ID NO: 128727 - DNA, 378 bp, Enterobacter cloacae
atggtagccagcggatactaccatcccgatgcagttctatttgaaattaaccataaaaaaacatattccttagcaataacagttggtttgttgtacgaaaaagacgctatttattggaatgaaattgatgtggtctttgaaaataaatcagtaataaataaagagcatgatggtgaaagtacattcaatgtattagcctccagctcgccaaatgcaaatgatattgtgaatgtcgcatctttctatctgaggggggtaaactttccacgccccggcatgtacaccgccgttgttactctttatgacagtgatgagcagggggaaaagcggcagttagttgataaaaaagaatgttgttttatagtggcgggggagtga

SEQ ID NO: 128728 - DNA, 378 bp, Enterobacter cloacae
atgctttcggactatgttgaggtgctttatgccatcgagttcaccaccgaacacgcccgctctctctttggtaatcgtccgcagcaagacgtcaaggtgatgacggtaagcggggacagcatggccccaacgctagtgtcaggggataggttgttcgtggatatctcggtgcgacatttccagactgatggcgtttactctttcgtgtacggcagaactttccacgtcaagcgtcttcagatgcaaggtgacaaattagccgttctgtccgataacccagcttatgagaagtggtatatcaaagaagaaaatcaggaccaactctacgtaatgggtaaggcgttgattcatgagtcaatacattataatcgactataa

SEQ ID NO: 128729 - DNA, 891 bp, Enterobacter cloacae
atgagcactaaattaaccggttacgtttgggacgcttgcgcttcttcaggcatgaagctgtccagcgttgccatcatggcgcgcctggcagacttcagcagtgatgaaggggttagctggccttctattgctaccatcgcgcgccagattggtgctggtgagagcacggttcgcacagctatatctcagctggaaaaagacggttggttaacccgccagcagcgtcgtaaaggcaatcgcaatgcatcgaatgtttaccagctcaatgtttcgaaattacaggcagctgccttttctcacctgtcagaatctgacgcgtcaaaatctgatgcatcaaaatccgacccgtcaaaattcgatgcgtcgaaaaacagcaatgacggcagttttcacccgtcagaatctggtggggatccgtcagtaaaatcaactactgatccatcagatataaaaccttcttgtcaggttgccctgcaacccgacgatgagagtactggcaagaagactgaccctgaagttttgctgactgacaattccagactggtactgaaacatctcaaccaggtgagctgttctcgtttccagaattgctctgcgtcgctggataacatccgcgcaagacttcgcgagggcttcactcctgaagaactcatgctggtggtcgattacaagcacgagcactggaaaggactgaaggattaccagtacatgcgtccaaaaactttgttcacccccggaaacttcccaggctacctacagattgcaactcgctgggatgcgaagggcagaccacaacgcgaagattgggatgcagcacgtaagaaaaactcccttaccttcggcgggccagataaagcaatcccagcaggtttcagaggagctaagccatga

SEQ ID NO: 128730 - DNA, 495 bp, Enterobacter cloacae
atgagcctcttgaaagacattcagattttcatcgccactaaccctggcttaacgaacaaagagattgcggcatcaatgccacagtacgacgttcatgctgttcagcacggtgtatgccatctggtcaaactgaatcgcgcaacccgccagcataacggcaagtgctaccagtattttgccaaagcaccgggcggggaggttggcgaggggcgttctgcactgaaaatcaaccgggctgataaaccagctgtaccagaacaggaagaaggtctgaatccggctgtgaccacaatgatggataaggctcaaggcctgtttgaaaaagggctctaccagcgggcagccacggttctaatggatgccttcaatcgctctaagaacgaagagcagcggatgaagatactgattgagcgtcagcgttgcctgagcatggcgccgaaagtgaaagcgccctctgatgcatggtgtctggctggccgagcgaggaatgtctga

SEQ ID NO: 128731 - DNA, 660 bp, Enterobacter cloacae
atgaaatattcactgatttatgccgacccagcctgggaatacgggaacaccatcagcaacggcgctgcaaccaaccattacggcacgatgaagcttatcgacatgaagcgcttgccggtttgggacctggctaccgatgatgcagttctggctatgtggttcaccggtacgcacacccgagaggctatcgagctggctgaagcgtggggctttaaggtccgcacgatgaagggctttacctgggtgaagttcaacccactggcagagcagcacataaacaaagcacttcaggcaggccgtgttgaggatttttacgacttcctcgacctgctgaacgtacaaacacgcatgaacggcgggaactacacccgagccaataccgaagacctcttgatcgccaccaggggaaatggacttgaacgcaagtgcgccagcatcaagcaggttatttacagcccactcggtgagcacagccagaagccagcagaggcgcgtttccgtctggagaagctttacggtgatgttccacgcatcgaactattcagccgttgcggtgcgcctggctgggaccactggggaaatcaatctgaatcaccagctgttgagcttataccggcagttgccgttcccatgaaaaaactacaggagcgcgccgcatga

SEQ ID NO: 128732 - DNA, 558 bp, Enterobacter cloacae
atgacaactgtgatcggatatgtgcgagtttccaccagcgaccagaacgttgaaaaccagaagcagcagataaccgaagctggatatagtgttaatcgctggttcagtgataaagccgtgagtggtgcagtaaaggcatcagatcgtccagggtttggtgaactactcagctatgtgcgagaaggcgatacgctgattgtgattgccatagaccgcttgggacgtaataccattgatgtactgtcgacagttgaaatgttgcaagcgaagggcgtgaaggttgtcagcttgcgagaagggttcgacctgtcaacaccagtgggtaaagcaatgcttaccatgatggcaggacttgccagcctggagaaagacctgatagcagagcgcagaacggcaggtatcaagcgtgctcaatcggaaggcaaacattgtggcagaccgattaaagcaaccgctgaacaggtgagagagctattagatcaaggttgctctccagcaatggttcaagataggctggctatcagcaaagccaccttctaccgactaaagacctactga

SEQ ID NO: 128733 - DNA, 543 bp, Enterobacter cloacae
atgagcgcacaggcagaagaaggaacattacgccggatgactttaggcgagatagcaatggctcgtagggtgttcggtgattcgatagtgtatagccgtgtctggattcattgcgacagctatttaccattcggactacaaaaacagaactacgcgatgactccaaacggggagttatggtacagaaagtcgatgtacagggaagatttttccgcaaactcggttttcatcgaagataaatatgttttcatccatgagctggggcatgtctggcaacaccaacacgggcaatgggtgagaatgcggggagcttttagctgggctgctgaatatacctacaggctggataaagaaaagctcactgattattctcttgaacagcaagcctctattttagctgattactggttactgctggtttatgggatcagtaagtggtcttactatcagagaccagggcgcatggggatgtacaggggcgtagatttgttgcaggatgtcccttcgctttaccagaaaatcgtaacagggaaggggcgttaa

SEQ ID NO: 128734 - DNA, 147 bp, Enterobacter cloacae
atggctatcgggaacagacagattcaagatgaatcacctgaggaagagttagagcgcttgctggaagaacttgcactgacgcatgagcaacgagagtttattgagtccatgctacaagaggacggggatagtaccaatggggagtaa

SEQ ID NO: 128735 - DNA, 552 bp, Enterobacter cloacae
atgtgtattaaaggattatcactttttttctgtgccatttgcgtcggttgtagcgggggttctcagcggcaagagcacttagatgtgcctacttattcggagagttatgatcagagcttaggatggcttgtaaccgctcgttacagagacgtaagtaacgcggatattgtaatgtcactgattggggacttttgcaaaagcaaggggaaggaagcaactctatataagacgaatgctggtacttcatcctccattcaagatatttgggcttgtcagactcccccattgttaaatgatacagatgtactaagcgggatttattgccatttcattgctaacgcgccccgctactcggtagatttcacgaactcccaaaaggaaattgcagaaaaaatatttgttaaaactttcattaaaaaggggattgaatatccagttggtggcttttacgaaaagtacctgaataacttttctgtgtgggcagtagccaaacacaaagagagcgctactactgatgaggtacgtgagtggtttgacacacattgccagtag

SEQ ID NO: 128736 - DNA, 204 bp, Enterobacter cloacae
atgagcatcacgtataaaatcacatacgaacacagagacgggaaagaaaccagagcggagacggtgttacttcgctctgaccacgagccaacacaagatgaagtccaggacgcagtcagaagggattccgccagatttcactctggcagaggggggacggagattgctggattctctattatttcagttgtatctgaaccttaa

SEQ ID NO: 128737 - DNA, 777 bp, Enterobacter cloacae
atgaaaagtatctgtaagttatgtctcgaagagaaagaactactggaatctcatagcataccaagaagctatttcaaacgattgaagaagaatgattcgcagttgattatatttcaaaaaggtagtaaaccaaaacgagaaaatgttgatcctaaagagccacttctatgcttcgaatgtgagcagtttatcagccatgagtacgaatcgtatggaacaagattgttgagaaatcatcataatatacgtaaaaactctgaccatattatcatcaactctttcgattataagcgattttatcttttcttactaagtatactatggagagcctctatctctaaaagtgtgcattattcaactgttaatggagttcctgagttggatgacttgatgaggcattgcattaaaaataaacaggtgagaataaataaacttagtcatttgaaggtggataacttcatccgtatttgtgtatttagattgatcgatacaacgaataatattcctgatcacgttattaaatctattcttagtaactttgcttttataaaaagtgatgaggctgacagtgtactatggtatttcgttgtggagggatttgctatattctatgttttctctgcttctaaagattatcatgatgtcattagaatgagattaaaatcacagttaacttctggtagtcatcagaagatctttaagattgatatttttaaagacgctctcttctccgagatttttattgatttacttactgccgcgaatgaacagaaatga

SEQ ID NO: 128738 - DNA, 726 bp, Enterobacter cloacae
atgtcttcaaaagcaaatcgaacatacaagtatggcgaccaaccgataagaatcactactgtccaagtgattgaggaacagttcggaggggcggcaacggcgaagcaagtggatgcttatctgaaagagcgatttccacattataaagacgacacccacttgaatctcattgtcaactcagtcaactgcaatcgtagctactggagtttcaacaaaacagccaggcgaactgatgatgtaacccatcggcatcatgagtatgaccgattgttcaagcgagggaagatctttgaaatctatcaaccctctattcatggtatttgggagttgtatcaggatcagcaaggtaaatggtgttaccgtaaggtgaaatctgagtttgaaaaggctgttgatgatgcgtcagaactgcccccgtcagaacgcaaagagattttagacgctgagaataaaactcctgagctaatcgaggttacaacacgagtttataagcgaagcccctatgtggtagccgaagttctttcaagggctaatggcaagtgtcaaagctgtaagagtgacgctccttttctcaaagtagacggcacaccatttcttgaggttcatcacattgagtggctttcgaatggtggggaggattccgttgaaaatgcgattgcattgtgcccgaactgtcacagacaggcgcattatggcgttttggagttagtaccagttaacaaataa

SEQ ID NO: 128739 - DNA, 1275 bp, Enterobacter cloacae
atggcatctctgtattttttacttcctcttttatatattatttgcaccatatactttataaaaggcgtatatattcgcgtttttactattttttacttcgtggtgaattttgtatattatctatctgtctggatacagggtattccgctagaggagggatatactcaggtattttggttctcattcttaagtttattcgcaatccatttgtcatattttataacaccaataaaagtgtcctctcggtataatcattcagatgatttgtctaattcatggttcagaagtattaactcaaaaatatttgtcgtttgtggtctggttttatacatttttgctttgatgatttatgtgaaaaataatggggtcgcatttggtggtggttacgaagctcgtcttgaacagaattcgggtggcggcctgtcaattattttaatgtacgcatttgttccttcctcgattgtgttctttcttcgtaaacctactaaattacgttttatattggcaaccgcattggctattttctgtggttctgtttattactacgttataggcggctcaagaaatgtaatgggcgcggcagttcttgctataacttattttgcctatgagaaaaaagtactccgtataaatgaaatagctatactatcagcatgttgctgtgtagctttaattgtattgggtgctctgcgttatggatccagtcttgatgatgtgatcagtatgcttctgtctggctcatcagtcatgatttcattcgctttagattctttctctccgatttatgcaatcaaagatattattgaatatattgataaaacaggtaatattcagtatttttcaaccttcttcaatgagtttgcgattattgttcctcgttttttatgggagtcaaaaccgattaactttttgaataacggctatttttatacaacctatatcctgaatatggatacgcagttgaccatatcaccaacgatagtaggtagctttattattatgtttggcacaacctggttttggctttggggacttattactggaagcacattaaaaatcattgacgcagtaaccaaaaaaaccaggatgattacgataaagattacatttataacctgcattggctactgcttcttctgggtgcgtgacggtttagaagtgtttatgtatatctcatttaaattctttttatgtgtaatgatcattaaagcgattagcacgatagttggtagtctattgaaaaggccttcgaatgaaaattttgctcataagtaa

SEQ ID NO: 128740 - DNA, 1062 bp, Enterobacter cloacae
atgaaaattttgctcataagtaatatgtatcccggttcggatacgccacatctgggcgggttcgttaaaaacgcagctgattcgctccgtaataatggacatgatattgaattatgtgttcttaataaaatctcaaaaagcaaagttactaaaatttataactatcttgttttttatatctctattttggttaaagttcttttgaccaaaagtgattgtctttatttgcattatgcgtctcattgctatctgccggtaaaaatgggcaattgcgtcagaagaaaaaaaattgtggtgcacgtacacggcggtgacgttaagcggctcaacggaaccagtggaatgttctttcgtgttaagaaggcaattgtttctaatgcgttgaaaaatgcggtaaaaatagtgtttccttcaaagtcttatctggaatttaccaaaaatgaatatcaactcgatgaagttaaatgtgcaataagcccttctggcggcgttgatacccaactctttgcgtttaaaaaccgtgaattcggtgctccgcttaaactcctttttgctggacgactcatcaagagtaaacgtgtggatctggcaatacaggcaattgaaaacctgtccgacgatgataaaagtaaaattcacttaactattgttggggatggtccagagctgggttcgttagtgaaaagtgcagctcatttaccaaatattgaattttcgcctgctgtagggcacgttcgcttggctgaaatttttcaggaacatgatgtactaatctatccttcagaaagtgaaagccttggactggttcctttggaggcgatggctatggggatgattccacttctaagtaatatcccctctttcaacgagttcatcgataataaccaaaatggttttattgtttacgaggacggacactataaaattaaaattgagcaaatgctcaagatgtcaccacaaacgcttcaagcgatgtctcaccaggctaagcaaacggtcttaaacagctatacgaaagaaatagcgcaaacgaagctgcttgaggcgtttaaatgtttgtaa

SEQ ID NO: 128741 - DNA, 1221 bp, Enterobacter cloacae
atgtttgtaattaataaattaatttggcttggatatactgtatcttctggagcagcaagggttataatcttctttttattgactcttgtgtttgtccaaaaagacattgcgctctttgctgtttattattcattcttaactgttgcagtgatattcctcggtcagggacttggtacaacgctcattaaagatggctctgaagtgagcatgaaatactttaattacgttttactccttagtattgcagcagcctcggttattaccttagcactggcgactccaacactagacttaaatttaattgacaccttaatattcgctggctctcttgcatgcctggctatcaaccaaatctatcgttattattatatttattataaaaaggcactacctggcttaatttatgatttgctagcgctggttctttttgcggcaggaatgctgctgtgcaaactgcatcttgtctctttaaaacctcttgatattttcttccttgcttactttatcgcgacaataattaaccaaattatttactacatatatgttaagcgagcgtggataaccgtatctgatagcaaggctttcaatgggctagattggaaattctccctaaatgttggcttcgtggggctcatttctacagggatcgtttttctattaccttacttttcccgtgagttacttcccgatgaatcaatgtcggtactgggtctcacaattagcataattggaattatatctgtcttctcacgtgcatacatgaactacttttatcgagagttagtggagtgtgctaaatcaaaagaagaaaaagtttatcttgcgataaataaaaaagttatcatcatatcagcgcttgtatgctttggtagtatcctgccactaatcttttatgttaaattatcgctttcctatgtaacctttaatgaaatactggcaatcgtcgtgcctgtaatgctttttactctctcttcgcaactatcactagttcagtcaaatataatattattccttggtaaagaaaaaatctcactgatattcaacttttttgtatttattgtggttctgtcattgtttttggtatggcaatacttcattagtatttcggtgatatatcttatcccattaatgtctttattcctgatggttttatatttaatcagatacgcttattttagaatcctgatcaggacggcttttaagaatggagaagcagtttaa

SEQ ID NO: 128742 - DNA, 501 bp, Enterobacter cloacae
atggagaagcagtttaacatgaacatagaggatagtgctttattcatttacggcgagggaggacaccgagcccagatgaacagattgatgaaaagaattggtggagaaataaataaaaataaaatcagtctctcagattataaaattaaggaagaatggtctgataagcattatgtcactcgtgaatttagaaataaatattcaacgttcactagtgtgcttcgcttcaatcagttacatcagatcaaggtctgtttacagattcataaaactcatcgaataaaagtagtcgtttcaacgggacccggtgtagctcttattcccgctttttattttaaatatattgttggtgcaaaaataattcatctcgaaacatggtccagattcgaaacgaagtccttcactggtagaatcatgtctttaattgcggatgagttttatgtgcagcacaagacgcttttaaaacagtataaaaaagccaaattttccggagtgctatga

SEQ ID NO: 128743 - DNA, 468 bp, Enterobacter cloacae
atgaaaattttagtgaccgtaggcaccactcggtttgataaacttatcaagcagattgcatcaatttcagcgcttccacatatggccaacaatttttttatgtgccaaaaggcgaatggcctgtcaaaccctgaaacagaaaattacaaggaagttgaatttattcaatctattgagaacgaatattctcattatgatcttgtaatcagtcatgcaggcgctggatcaatattttctcttttagatcacgagaaaaaaatcatcattgccccaaatttagatcgtttggataaacatcagtctgacattgctaaatatatgggggaaaaggaatttgcaatgatttgttgggatatcgaagatctcgaaaatctaatcattaatgcaagttcattccagcccaagaaatttgaattagtgcgatttttcaagaatgatgagtttattgaccatataaataacgcgtga

SEQ ID NO: 128744 - DNA, 708 bp, Enterobacter cloacae
atgaacgcgatgtttaaaaaaggaatgctggcgtccgcgctggctgtcgtggcgtcctctgctctggcagcttccagtgttgatattcaggtgacgggtaaaatcgtcccctcttcctgtacgcctacatttattagcggtggtggtattgccgattatggcacgataagtgcgtcttcactgaattccacttcggctacaccattggcggatgttaaaattattcctgtttccattacctgtgaagaggccacccgcattgcagtaacgtttaatgatgcccatgcagactcaggaccaactcaagttttgccgaccagttttattgatacggaatttgggagagaggcgtaccaaaccgccgggctgggtatgtacaatggtaagaaaattggtgcctactcattagggattcagcttacgaaaggcgctgtcacgaacgacgcaggcgatgaactgtatcctactgcatcgcgcgataacggaacaacgtgggcaacaacaggcggacagcgctatttaaaagtaaacacagacaaaagcgaattatattccttcagtgacacattgggcggcacgcctgtcgcacaaaccaaggttaactttaatgtgggtgtcgccgcgatgattaacccaaccgatgatttaaatatcacggatgaagccaccctggacggcttaaccaacgttgagctggtttatctgtaa

SEQ ID NO: 128745 - DNA, 285 bp, Enterobacter cloacae
atgtctcaggttcagagtggcattttgccagaacattgccgcgcggcgatttggattgaagccaacgtcaaaggggacgtggatgccctgcgcgcggccagcaaaattttcgttgataaactggccacctttcaggccaaattccccgaagcccatctgggtgcggtggttgcctttggcaacaccgtctggcgtcagctgagcggcggcgaaggcgcagaagagctgaaagactttattccttatggcaatgacttgcgcccgccacccagtatgacgtcctga

SEQ ID NO: 128746 - DNA, 342 bp, Enterobacter cloacae
atgaaaactttacctgcaacaactcagcgggcggcgaagccctgcctgtcacccgtggctgtctggcaaatgctactgacccgcctgctgaaacagcactatggtctcaccctcaacgacacaccgttcagtgaggaacgtgttatacaggaacatatcgatgccggaatcacgctggctgatgccgtgaattttctggtggaaaaatacgaactggtgcgtatcgacaggaagggatttaactggcaggaacaatccccttatctccgggctgtagacattctgcgagcacggcaggcaactggcttgttgcggcaaagccgtaaaaatttggtacggtga

SEQ ID NO: 128747 - DNA, 222 bp, Enterobacter cloacae
atgaaaattatcagtaaacgcagggcaatgacgatataccgccagcatcctgagtcccgaatctttcgctactgcaccggcaaataccagtggcacggtagcgtctgtcattacaccggcaggtacgttccggatatcgccggagtcctcgcggtatacgccgaacgccgccaggaccgcaatgggccctatacctgcctgatgtgcatcaccctgaactga

SEQ ID NO: 128748 - DNA, 477 bp, Enterobacter cloacae
atgaaacagctttcctttttacccggcgagatgacgccacaggaccggcgtctcattcagcgggcgctcagggctctggaccggcacttgcatgagcccggggtggccttcacctcctcacatgctgtccgtgaatggctgcgactgcatatggccgcacttgagcgggaagagttccgggtgttgtacttggacaaccagaaccagcttatcgcccatgaaacgctctttaccggcacgattaaccgcactgaagtccatccccgggaagtggtcaaacgtgctctgcacttcaacgcggctgcggtgatattggcgcataaccatccttccggcgagacagctcccagccaggccgacaaagccctcacgcagcgactggtgcaggcacttcagctggtggatatccgcgttcctgaccacctgattgtcggcggcaggcaaatctattcgttcgcagaacacggtctgctttga

SEQ ID NO: 128749 - DNA, 459 bp, Enterobacter cloacae
atgacaacacagacgcagtacgacctcgcacccgctaaccaatcagaatttgaactgaccgtcacgcaggtacccgacgaacagcgtatcgatttctggccgcaacactttggcactatcccgcagtggacaaccctggaaccgcatatttttgcctggatggaccgcttctgttcgacctacagcggtggtatctggtccttttacaccctcagcaatggcggggcgtttatggctcccgagtctgacaatgatgagacatggcgtctgtttaattgcctgaacggcaacgatgcccaaatgagtgcagaagccgcaggtgtcgctgtctgcctgattgaatacagccatcacgcctgtcgcacccaatgcgatgccatgactgaacactattaccgcctgcgggactacgccctgcagcatccagaggcccacgccattctgcgtattatcgactga

SEQ ID NO: 128750 - DNA, 240 bp, Enterobacter cloacae
atgcctgaatctcacttactgccaccgggacccttcacccgaagacatgcgcaagcggtcactaccacgtacagcaatatcaccctcgaagacgaccaaggcagtcacttccgccttgtggttcgtgacactgaaggccggatggtctggcgggcatggaactttgaacccgatgccgctgaaagtcttaaccgctacatccgcacctccggcatccgtacaggcacctccacccgctga

SEQ ID NO: 128751 - DNA, 1848 bp, Enterobacter cloacae
atgccaccgacagagcgtcgctacgacagactggcggtcaggctgtcgttgattatcagccgcctcgtagcgggtgaaacgctggataccaccacatttggcgacggtgcatcgctgacagggagtgccaccaatagcggacaactgcacttcagcaacggtaacgcagccatcagcggttcggtaagtggtgacgggcaattactcaaagagggtaacggtaccctgacggtcagcaatggcacgttgtctcagtcacaggtaaccctgaatcagggaacgctggcgctgaacaatgcgatcatcaacagcgatatcatcgcacagtctggtacccaagtgcgcctgactggcaactcggtgatgaacggcgcgattgacccgactgacgtcaccctcgacagcgctgccagctggaatattcagcgtggggcggcagtgaaatcggtgctcgataacctcgataacgccggaaccatcagttttactccagccaccggtagtcaatttgtcccggaaacactgacggtcaccaatctgacgggccgtaacggcaccatcaacatgtcgattcgtcttgatgacccggccttcccgaccgatatgctggtcattgacggcggacaggcaaccggcaaaacttggctgaacttcacccataccggtgatgcagggctgggcctagcaacaaccggcaacggcatcaaagtggtggatgcgattaacggagccaccactgaagccggagcctttgcgctgggccgcaaattgcaggccggggcgtacaactacaccctgagccacggcagtgccgatgaaaactggtacctcaccagtgaagcgggttaccgtgccgaagtggcgctgtacgcctctttgtttgcgcagagtatggattacgaccgtgcattggcgggaacatacagtcagcgcagcagcgccgtgaacgaccaagggatctggggacgtattcagggcgggcataccgggcgtgatggtaacggcggcattgcacagggcgacaccccggaaagcagcggcagctacggttttatgcagcttggtggtgacttgttcaagcatgataccggtacactttccctaaccactggtctgtatggcgcagtaggccaatcgtcggtggatgtgaaaaacgacgatcgctctgcggcaggcagcgtgcgtgacacggtgtacagcatcggcggctatctgacagcagttcatgatgccagtggattgtgggcagatatcgtggcacaaggctcccgtcacagcctgaaagccaactcttcggataaccgttttgatactgacggcactggctggctggcctctgtggaaaccggtctaccgtttaacatcagtcagggattggtgctggagccacaactgcagtacgtctggcaaggactgtctctggatgatgggcatgacaacggcggttacgtgaactttggtgacggcagtgcgcagcatgtccgcgccggtatccgttttggcagttcgtctgaaatggacttcggtcagggtacctctgcggtcacagggtttgctgacagcatgaagcgcagcgcaagtgagcttccggtgaactggtgggtacgtccgtcggtcatccgcacgttcagttccgatggcgatatgagcatgggcacggcgactgcaggcagcaatgtcagcttcaccccgtctcagaaaggcacgtcgcttgacctgcaggcgggtattgacgcacgagtacggcagaatgtcacactgggcgtgcagggcggttatacccgcagcgtcagcggtaacagcgttgacggttacaacggtcaggccacactgaaagtcaccttctga

SEQ ID NO: 128752 - DNA, 648 bp, Enterobacter cloacae
gtgattcaaacgctctttgatttccctacatatttcaagttttttatcggcttgtttgctctggttaacccggtagggatcatccctgtcttcattagtatgaccagttatcagacggctgcggcacgaaataaaaccaacctgacggcaaacctgtcggtggcgatcatcctacttacctctctttatctcggagacgccattcttcaggtcttcggcatctcaattgattcgttccgtatagcaggcgggatcctggtggtgacgattgccatgtcgatgatcagcggcaagctgggggaggataaacagaacaagcaggaaaaatcagagacagctatccgcgagagcatcggggtcgtgccactggcactgccgctgatggcgggcccgggggcgatcagttccactattgtctggggaacgcgctaccacagcctgatgcacctgattggcttttccgtcgctattgcgctgttcgcgctgtgctgctggggtgtatttcgtatggcgccatggctggttcgcttgctgggacaaacgggcatcaacgtgattactcgtatcatgggtctgttgttaatggcgttgggcatcgaatttatcgttaccggtattaaaagtatattccccgggttagtacactga

SEQ ID NO: 128753 - DNA, 345 bp, Enterobacter cloacae
atgcgtgtccgacagtggttcggccaaggcatcatagatgcgccggttggcgcgagtgatggcctcggcgctagcgcgctcgatggcgttgagcgcgggcaggatgatcgactgtcgccgcagatgctcaaccaaggtgctagccagcacgatgcctttgtcggtttgcatggccaggtcggtcagcgtgtgcacggcctgccggtagtggctcatggtgaacggctggaagccaaacaccgtttgcagctcgaccaggtgctcgcgccgggtctgctcccgctgcccgtagtcgtcccagctttcgacgccgaccttgagctggtcggcgaccagtttcagtag

SEQ ID NO: 128754 - DNA, 546 bp, Enterobacter cloacae
ttgcagggtcaacgcatcggctacgtccgggtcagcagcttcgaccagaacccggagcggcaactggagcatgtcgaagtcggcagggtgttcaccgacaaggcgtcgggcaaggacacccagcggcccgagcttgattcgctgctggccttcgtgcgcgaaggcgacaccgtggtggttcacagcatggatcgcttggcgcgcaacctcgatgacttgcgccgcctcgtacaaaagctgaccaagcgcggcgtgcgcatcgagttcgtcaaggaaagcctgaccttcaccggcgaggattcaccgatggcgaacctgatgctgtcggtcatgggggcattcgccgaattcgagcgggccttgatccgtgagcggcagcgcgaaggcatcgcgctcgctaagcaacgcggagcctaccgaggccgaaagaagtctctgagcggtgaacagattgctgaactgaaaggcgcgtcacggcgggcgagcaaaaagcgaagctggcccgtgaatttggtgtcagccgggagaccctgtatcaatacttga

SEQ ID NO: 128755 - DNA, 990 bp, Enterobacter cloacae
atgagcgttttccggccggatggatggacgacgccggaactggcccaagcggtcgagcgcgggcagcttgaactgcactaccagcccgtcgtcgatctgcgcagtggtgggattgtcggcgcggaagccctgttgcgctggcgtcatccgacgcttggactattgccaccgggccagttcctgcccgtggtcgaatcgtccggcctgatgcctgaaatcggcgcttgggtgctgggcgaagcctgccgccagatgcgtgactggcgaatgctggcatggcgaccgttccggctggccgtcaatgtttcggcgagccaagtgggaccggacttcgacgggtgggtaaagggcgtgctggctgatgccgagttgcccgccgagtatctcgaaatcgagctgaccgaatcggtcgcgtttggtgatccggcgatcttccccgccctggacgccttgcggcagatcggtgtgcgcttcgccgccgatgacttcgggacggggtattcctgtctgcaacatctgaagtgctgcccaatcagcacgctcaagatcgaccaatcgtttgtcgccgggctcgccaacgaccgccgcgaccaaaccatcgtgcacaccgtgattcagcttgcgcacgggctgggcatggatgtggtggctgaaggcgtggaaacatcggcgagtcttgatctattgcgacaagcggactgcgacacaggacaaggcttcctgttcgcgaagccaatgccggcggcggcattcgccgtcttcgtcagtcaatggaggggtgccaccatgaatgcaagtgactcgaccaccaccagttgctgcgtgtgctgcaaggaaatcccgctcgatgccgccttcaccccggaaggcgcggaatacgtcgagcacttctgcgggttggagtgttatcaacgcttcgaagcgcgtgccaagacagggaacgaaaccgatgccgatccgaacgcctgcgactcgctaccgtcagattga

SEQ ID NO: 128756 - DNA, 237 bp, Enterobacter cloacae; identical to SEQ ID NO: 96025

SEQ ID NO: 128757 - DNA, 366 bp, Enterobacter cloacae; identical to SEQ ID NO: 96026

SEQ ID NO: 128758 - DNA, 1686 bp, Enterobacter cloacae
atgacccatctaaaaatcaccggcatgacctgcgactcgtgcgcggcgcacgtcaaggaagcgctggaaaaagtacccggcgtccaatctgccatagtgtcctatgccaagggcgcggcccagctcgcccttgatccaggcacagcgccggacgcactgaccgccgccgtggctggcctgggctacaaagcgatgctcgccgatgccccgccgaccgacaaccgcactgggctgttcgacaaggtgcgcggctggatgggtgccgccgacaagggcagcggcggcgagcgcccgttgcaagtcgccgtgatcggcagcggtggagccgcgatggcggcagcactgaaggccgtcgagcaaggcgcgcaggtcacgctgattgagcgcggcaccatcggcggcacctgcgtcaacgtcggttgtgtgccgtccaagatcatgatccgcgccgcccacatcgcccatctgcgccgggaaagcccattcgacggcggcatgccacccacaccgccgacgatcttgcgcgagcggctgctggcccagcagcaggcccgtgtcgaagaactccgtcatgccaagtacgaaggcatcctggacggcaattcagccatcaccgttctgcacggtgaagcgcgtttcaaggacgaccagagccttatcgttagtttgaacgagggtggtgagcgcgtcgtgatgttcgaccgctgcctggtcgccacgggtgccagtccggccatgccgccgattccgggcctgaaagagtcaccctactggacttcgaccgaggccttggtcagcgacaccattcccgaacgcctggccgtcatcggctcgtcggtggtggcgctggaactggcgcaagccttcgcccggctgggtagccaggtcacgatccttgcgcgcagcacgctgttcttccgcgaagaccctgccatcggcgaggccgtcacagccgccttccgtgccgaaggaatcaaggtactggaacatacgcaagccagccaagtcgcccatgtggacggcgaattcgtgctgaccactggacagggcgaagtgcgcgccgacaagctgctggtcgccaccggccggacaccgaacacgcgcagcctcgcgctggacgcagcgggggtcactgtcaatgcgcaaggtgccatcgtcatcgaccaaggcatgcgcacgagcaacccgaacatctacgcggccggcgactgcaccgaccagccgcagttcgtctatgtggcggcagcggccggcacccgtgccgcgatcaacatgaccggcggcgatgcggcgctcgacctgaccgcaatgccggccgtggtgttcaccgatccgcaagtggcgaccgtgggctacagcgaggcggaagcccaccacgacgggatcgagaccgacagccgcaccttgaccttggacaacgtgccgcgtgcgctcgccaacttcgacacacgcggcttcatcaagttggttatcgaggaaggcagccatcggctgatcggcgtacaggcggtcgcgccggaagcgggtgaactgatccagacggcggctctggccattcgcaaccgcatgacggtgcaggaactggccgaccagttgttcccctacctgacgatggtcgaggggttgaagctcgcggcgcagaccttcaacaaggatgtgaagcagctttcctgctgcgccgggtga

SEQ ID NO: 128759 - DNA, 1023 bp, Enterobacter cloacae
atgatcacttttgagattcgtatggaaattaaagtcctgcacaagcggggaatgagtatccgggccattgccagggagctgggtatttcgcgcaatactgtccgcagccacctgaaagccaaatctgaaaagccgcagtattcaccacgcccggcaccatcatcactgctcgatgaataccgtgattacatctctaagcggatcagcgatgcgcatccctacaaaatcccggcgaccgttattgccagggaaatcatggagctgggctatcgtggagggcttactatcctgagagagttcatccgtaaacagaccctgccagcacaggcagaaccggtcgttcgcttcgaaaccgagcccggacggcagatgcaggttgactgggggaccatgcgaaacggcaagtcacccctgcatgtgttcgtcgctgttctgggatacagcagaatgctttacatcgagttcaccgacaacatgcgctacgacacgctggaagcctgtcaccgcaatgcgttcagcttcttcggcggtgtaccgcaggaagtcctgtacgacaatatgaaaacggtggtgctgcagcgtgatgcttaccagaccgggcagcaccggttccatccttccctgtggcagttcggcaaagagatgggcttctctccccgcctgtgccgtcccttcagggcgcagactaaaggcaaggtggagaggatggtgcagtacgcccgcaacagcttctatatcccgttaatgacacgcctgcgtccgatggggatcaccgtcgatgttgaaaccgcaaaccgttacggcctgcgctggctgtacgatgtggccaatcaacgtaagcatgaaactatccagacccgcccctgcgatcgctgggtggaggaacagcaatccatgctggcactgccaccggagaaaaaacagtatgatgtgcaggttgatgaaagcctgatgaccttcgacaggcagccgttgcatcatccgctctccatctatgacacgttctgcagaggagccgcatga

SEQ ID NO: 128760 - DNA, 780 bp, Enterobacter cloacae
atggtcgaactgcaacatcaacggctgatggtgcttgccgaacagctccagctggacagtcttatcggcgcagcgccggcgctgtcgcaacaggcggtggatcaggaatggagctacatggacttcctggagcacctgttacatgaggagaaactggcccggcatcagcgtaaacaggcgatgtacacgcggatggcagccttcccggcggtaaagacgttcgaggagtacgacttcaccttcgccaccggcgctcctcagaagcaaatccagtcgctgcgatccctgagcttcatagagcgtaacgaaaacatcgtgttgctggggccatcgggcgtgggaaaaacgcatctggcgatagccatgggctacgaagcagtacgggcgggcatcaaggttcgcttcacaacagcagcggacctgctgctacagctgtccacttcacagcgtcagggccgttacaaaacgactctcaatcgtggtgtcatggccccgaagctgcttatcatcgatgaaataggttatctgccgttcagtcaggaggaagccaagctgttcttccaggtcatcgccaaacgttacgagaagagcgcgatgatcctgacctccaacctgccgttcgggcagtgggatcagacgttcgccggtgatgcagcgctgacatcggcgatgctggaccggatcttacatcactcacatgtcgtgcaaataaaaggggaaagctatcgactgaagcagaaacgaaaggccggggttatcgctgaagctaatcctgagtaa

SEQ ID NO: 128761 - DNA, 228 bp, Enterobacter cloacae
atgaaattaaaacaattagccgttgttagtctgatcgcgtctactctcgctctgtctggttgtggtgccatgtccacagcggtgaagaaacgtaacctcgatgtcaaaacccagatgagtgaaaccatctggctggagccatcatcagagaagactgtttatttgcagatccgtaatacctctgacaaggacatgtctggtctgctgtcaacaacgggtaaaaagtga

SEQ ID NO: 128762 - DNA, 597 bp, Enterobacter cloacae
atggcattctcaaatggtgatgcaaaaaaagaaattgctgagattatctcagggattagcagtgatgaacgtccagtttcatcgccgaagaaggctttccagattgtagctatataccctgtaattatgatcctcacagccattctgatgtggtttgcttattatgtcagtctgattcaagcaggagataatagcgggctaggctggaagttctatcttgaagcagcacagctcgttttagggtatggaggatggatatctataggggcgacagctgttgtagcaatattcttcatactcataaattattctactgtactggtatatctatctatacctgaagatatcaggaatcgttcgacattaatcacttccttaaggtccacagttaagaaaatagccttgtacctatggggtagtgccaccttgttatctgtcgtagggatgataactgattggggggttttactggcagggagtattccagcagttttattcatatcaatatttgttactaatggatatcttggaatacagagcactcgttacggtctggggccattgatgtcaacggccagtaagatgatgagtagatag

SEQ ID NO: 128763 - DNA, 405 bp, Enterobacter cloacae
atgaaattcaccagactgaaaacctgtgtccgcaatggcttcattaaacagatgaaggactctgaggggagcaaagagtcccggcagtgggcgaatttattcacgctgaaactgctgtacagccttgttttctttatcttcgctgaaagaatttatgtgtggtgggctgacaacacgctggctgccatgccggagccgcttgttcgttctgaacagtttacactctcgctgctcatccattatccgcagtatctcctgtgggcgatcatgagtggtctgtttgcagtactggtactgcactgcattctgtgctgtgtgggcaaacttgaggaatccctgtaccgccggataacccgaaaagacagcggcttggagcctgagagaacagaggtgccccatgattaa

SEQ ID NO: 128764 - DNA, 264 bp, Enterobacter cloacae
atgaatacaacatcgtatgcattatcgcgtgccgagcgcgtgtggctgctgttcagcatgacgttgctggtatctgccgcgttttacgggacgctggcccatcgcgtggtcagcgcactgtcccgcccggaaatgactctttaccttcaggacgtgccggtgctgctgctcatttcgctgagtgtcggcttctttttcactgccaccgggttgtacatctgccgtctgaccctgtcccggaaaccccgtgaggagatcgcatga

SEQ ID NO: 128765 - DNA, 468 bp, Enterobacter cloacae
atgacaaaaatgcttttacccctcatccgtgatgcagggcgttttgccctgttcacccttgtcttcggcccggcgctgttgctgtacggtattgtgatagccatatcgctggagggctcgctggccgggcagtttgtgaaagaggcgcaaacgctaaccgaaggcgcgcccgacggtaaggtaatgcagtgcgttacgcattatgaaccggcaccacgaccccggctacctgaacccggcgaggaggccagtcctccttcttatcagctcccgccgatgtcgatttgccatcgtgaaccggttgacagcgaacgctggacaaagccgatggatgccacgcttttcaacttatggctgatagctgcgctcttcggcgcaactctgggttttctgacccatctgtatattcatcgtcgcgcctctgtgcatgaggggcgtgatatcttccaaaaggaaacacatgtatga

SEQ ID NO: 128766 - DNA, 1011 bp, Enterobacter cloacae
atggcgttaatcagctgcttcaccgaccctcaggggctgcaggggatgctcacctgtttgcgcgataccgagggcatgaccggtattctggtagtggttgcgctactcgctggctggattgttgttcagcatcttgcagatgcacgccgcgaacgccgtgcgcgggagatcagaccgggaatacccgcccctctggcgcaatttggcggtgcccgacatgccgaagcggttcacgcctttgctaaccgggaatgctatcaggtgatgctggctgagctggagaaaggcctgactgaagcaggttacctactgacgcgggataaatcacagcgctggatattgccagaggcagaccggcataagctcagccgccgggttttccgggcgcgtctgctggagatgacgccgagagtgactgagcagcaggtaaaagacagtgaagacgcggcggtgaacgatggttatgccggcatgtggcttcgtgtgttgattcgcggaagtgaaagtgcagggtggtacatcacaaaaccggtgcctgaatttgtcccgacgaactttccgttaaaacaggtcaccataactgtcagtgcaaaacagtctgtccttacgcgggatgtcgtcagaatcatcaacgatgtggctgaaaaagtgaaaaaacagcgttcatttcctgaaacaccggaacgtattgcaggaaaggtaattaacagtgaactgtgttatggggccgatcagagacaggtaaaagtggcgccaggctggtttagttcaccgtctggaaatgatgttcctgacgatatctccgaaggccaattccctccggcggggatgtcagaataccggcatttcattgtccgggcgcaggcaggaaggttttataccccggctgcacttgccttctatattgatgaagcgggacgcaggatagaacagggggaatccagcggagcatgctacgaagatgacagcggctacgctttcgccgtgacgcctgcaaaaaacacgccctga

SEQ ID NO: 128767 - DNA, 465 bp, Enterobacter cloacae
atgcgtgacgaagagcgtaataacaacctgctcaggagcatgcggatgcatattgctgactgggaggctggtcggcccactccggcagcaagcaggtacatgttcttgggggttgccatctttctcggtgttggggggccggttctttcgtactacctctcactgtgggcgctggttttcctggttttctggctatttctgactcaatggatatgcaggcgaattgtcccccgctacaaccaaagctgggcgggggtgttcgacaggatgctttctgagtatgaacccttaaatcttcccgcctgggaacatcttaagcaccaggccgaaacggaggggctgacggtcagcattgtcagcaactggtatcaggaagaagtgaggaccgtctggccagaaaagaaacctgacctgaagttcctccataaagtcactgacggtaacgagaaaatcggagaggaatga

SEQ ID NO: 128768 - DNA, 1404 bp, Enterobacter cloacae
atgagtctgaataaaaacctgaaaacccggcgcaaacagctggccattcttgccgccgttatcacgggaggcgccgccgccacgagcggcgttatctggtacgggcaacatcagcaggaacagaaacagcccgcgccggtcgccaccccaaacatgaccggtgtggtcacggcagcgtttaaccagcaggttaatgatgccgcactggcacagcagcaggccaagacctccgcacttgaggacaggctcgccacgctcacccagcagtttgcacagaacaagctcaccaccgagcaacaactggctaaaaaggatgaagaaattcagcgcctgaatgaccagctaacgaaagcccccggcagcaaaacgaccactggccagcagacaccacctgccggacagaacggaacaccactccccggtcccgttgctgccggtcaggcccggccacccgaatatactgtgacccccgcaggcacaccggccgccactggtgtgaatatggggcagggcgcagcgttctacccgggcggctctggccagagaatgacaggcgggctgagcaccacaaagttcagctatgaaagcctgaagaaaaagccaacgaaactgccatggattccgtcaggctccttctctgacgccatcatgattgaaggtgccgacgccaacgccagtgttaccggccagcagaacacccagcccgtcactatccgcctgctgggcaatatccagatgccgaacaacaaagaatacagcgccgacggctgctttgtggtgggggaaatctggggtgacatctccagcgagcgcgggattgtccggacgaaatcactcagctgcgtactgaaaaacggcaagcacgtcgatatggagttcgatggccacgtcagttaccagggtaaaggcggtgttcgcggcaagccagtcatgcgaaacggcatgattgtcggctacgccggtgcagcaggcctcctgtcaggttttggtgaaggcatcaaatctgcggcaacaccttctgtcggcctcggtgccactgctgatgttggagctgcggatgtgtttaagcagggctttggcggcggagccagtaaggcggccgacacgctgagccagtactggattaagcgcgccgagcagtatcaccccgtgattgatatcggtgctggcaacctggtaactgtcgtgttccagaagggcttccgccttgaaaccctggaagacgctgaggacgctaaagcgaaagaggaactgcagaaagccggcaacgccgcgcagaacgccgtgactcctcaaccggcgagccagaccactgcatccagcaccacctcagtcggcaacatcaaccctgatgatgttctccgccaggccagccagctgcgtctgggtgacaccatcaactaa

SEQ ID NO: 128769 - DNA, 1218 bp, Enterobacter cloacae
atgttgatgcagcatatcggtgtcggctattttgggtattaccgagcaactgcttatgcgatgaaacactctcttatgcccgagattgcgaagttaagaatgaaggctctgaacttctgggataagcacgggatccgtgccgcagctgatgctttagacgtatcaacgcgaacactctactggtggcgccggttactgcgcaccggtggtccagaagcactaattccaagaagcaaagcccctctggttcgccgttcaaggcactggcatcctgatgtactcaaggagatcaggcgtctgagaactgagttacccaatctcggcaaagagcagatttttgtcaggctgaaaccatggtgtgaagcgcggcattttacctgtcccagcacgtcaaccattggaagaatcattgctggtgctcacgataaaatgcggatgatccccgtacgcctcagcgccaggggcaaagcccggttgataaaaaaacgctcagtgaagcccagaagaccaaaacaataccgcccggtaaaaacaggcgaactcatagggatggacgcgattgaactcaggatgggggacctacgccgctatatcattaccatgatcgacgagcacagcgactatgcgctggcccttgcggtcccttcactcaacagcgatattaccagccatttcttcagcaaggccacaaagctctttcctgtcgctatcagacaagttgtcactgacaacggtaaggagttcctcggtaactttgataaaacgctacaggaagcctcgattaaacacatctggacctatccgtacacaccgaaaatgaatgcgacctgtgagcgatttaaccggacacttagagaacaatttattgaattcaatgaattgttgctttttgaggacctgaatttgtttaatcaaagaatggctgaatatctggtgctgtataacagcaaaaggccacataaatcactcgaactgatgacgccagtggactatattttacgtgagagtaaaaattgcaatatgtggtggacccatacatctcctgtcaacgcaaagcagaagtgtcaccatcggtgcgaaacagagatgtcatgctttggttcagagaatgcgtttgaccgcctcgctatatacttccgagcgttctcttttcccaacagaaatcacgaaaacgacaactttctcgtctataacctggtatacaaggcgatagcctga

SEQ ID NO: 128770 - DNA, 1320 bp, Enterobacter cloacae
atgaatatttcttctaatgctctacacgcggacattccgcgccagcgctggctaaggatcattccccctattcttatcgcctgcattatttcctatatggaccgcgtaaatatagcttttgcgatgcccggcggtatggatgaagagctgggcatttccgccacgatggcgggcctggcgggggggatcttttttatcggctatttgttcctgcaagttcccggcggcaaaattgccgtgcacggcagcggtaagaagtttatcggctggtcgctggttgcctgggcggtgatctcggttctgactgggcttgtgaccaaccagtatcagctgctggtactgcgcttcttactcggcgtggcggaaggtgggatgctgcccgttgtgctcacgatgatcagtaactggttcccggatgccgagcgcggccgcgccaacgcgattgtgatcatgttcgtgcccatcgccgggatcatcaccgccccgctgtcgggctggattattaccgctctcgactggcgctggctgttcattattgaaggtctgatgtccgttgttgtgctggtgctgtgggcgttcaccgtctacgaccgaccgcaggaagcacgctggatctctgaggccgagaaaaactacctggtacaaacgctagcggcagagcagcaggccattgcgggtaaagaggtgaaaaacgcctcgctcagcgcggtgctgtctgacaaaaccatgtggcagctgatcgccctcaacttcttctaccagactggcatttacggttacaccctctggctgcccaccattctgaaggagctgacacacaccagcatcggccaggtgggaatgctcgccattctgccttacatcggcgccattgccggcatgttcctgttctctacgctctctgaccgcaccggcaagcgcaagctgtttgtctccctgccattgattggctttgcgctctgcatgttcctctccgtggcgctgaaagagcacacctggctggcctatgccgcgctggtgggctgtggcttcttcctgcaatccgcagcgggggtgttctggaccatcccggcgcgtctgttcagcgctgagatggcgggcggcgctcgcggcgtgattaatgccctgggcaacctcggcgggttctgcggtccttatgcggtaggcgtactgatcaccctgtacagcaaagacgcaggtgtttactgcctggcagtttcgctggcgctggcatcgctgctggccctgctgttaccggcgaaatgcgatgccggagcagagcccaaccccacggtgaactcgcataagcgtgcggcctga

SEQ ID NO: 128771 - DNA, 1413 bp, Enterobacter cloacae
atggcaagtatttcatcattggggattggttcgggtcttaagttagcagacattctggatagtctgaccacggccgaaaaagcacagctgacgccaatttccaaacaacagacatcgtataccgccaagctgagcgcttacggcacgttgaaaagttcactggaagcgtttcagaccgccaacaccgcgctgaataaagccgacctgtttacagcgaccagcacgtcgagcagtaccacggcattcagcgccaccactaccggcagcgcgattgccggtaaatacaccatcagcgtgtcgcagctggcgcaggcgcaaaccctgacgaccaaaaacgcgcagccggataccaaaacggccattgccacggctgacagcaagatcacctttaccgccggtaacggtaaagatccggtgaccgtcgatatcagcgcggcaaactcctcgctgaccggcattcgcgatgcgattaacaaagctgacgccggcgtgaccgccagtattattaacgtcggtaatggtcagtaccgtctgtccatcacctccaccgaaaccggggcggacaacgcggtcagcatcagcgtgagcggcgacagcgccctgcaatcctttatgggttacaacggcaccagcaccgacgccagcaacggcatgacagaaagcgtcaccgcgcagaacgcgaagctgaaggtgaataacgttgatatcgaaaacagcagcaacactatcagcgatgcgctggaagatatcaccctgaacctgaacgacgtcaccaccggtaaccagacgctgacgatcgctaaagatacgtcgaaagcggaaacggcgatgaaagcctgggtggatgcctacaacacccttcaggacagctttgcatcattaaccaaatatacggcagttgatgcgggtacagatgcgcaggactccagcaacggtgccctgctcggggacagcacgctgcgtactattcagacgcagctgaaaaccatgctgggcaactccgtcggcggaaccgcctataaaacgctgtctcaggtcggcattacttcagatccaagcacgggtaagctggagctggacagcgacaagctgaaaaaagcgctgacggataacccgtctgcggtgaaagatttggttgtgggtgacggtaaaaccaccgggatcactaccaccatggccacccatctgactgactggctttccagtaaaggcattatccaggcggccaaagatggcgtcagcaaaacgctgaacaagttaacggatcaatataacgccgtgagcgaacgtattgacgcgagagtggcgcagtacaaagcccagtttacccagctggacgtactgatgacctcgctgaacaacaccagcagctacctgacgcagcagttcgaaaatacgtccagcaacaagtag

SEQ ID NO: 128772 - DNA, 426 bp, Enterobacter cloacae
atggccggaaagcgtaaaaaccccgccgataactggatgccaccgcgagtatatcgcggcaaagctgcctatgagtttcggaccaaagataataaagccgtacgcctgtgttcccttgaagaaacacaggcagctgtctggttggcatacgaaaaagcagtgggcgaagaagttaggaaaaataccttccaaaaccttgccgatatgtttatggcctcccctgactttatggatttgtcaccggagaccaggaaggattacacgaaatattcgtgtaaggtattaccggtttttggcaaaacagacccaaaaaaaaataaaacccgagcacattcggcgttatatggatcagcgtggtatttccagccgaacgcaggcaaacagggaaaagagtttcctttcgcgggtatttcgttggggttatga

SEQ ID NO: 128773 - DNA, 195 bp, Enterobacter cloacae
atgttaacaactgatgcgatcaaatattttggcagtaagagaaaactggctgaggccgctggcgttaaggctcctactgtctatgcgtgggggcgtttggttcctgaaggtaaagcggctcgtttgtctctgatgactgatggcgaacttgtttatgacccaaaggcttaccaattgtcagcaaaatcagcttaa

SEQ ID NO: 128774 - DNA, 447 bp, Enterobacter cloacae
gtggaaaacctcgaagaactgaaacgggagatattcaactgggcagtagagcgcgggcaggaacatgttgccatcgaaatcacgcgcatgtggtttcgattgggtggtaacaccagcacggtaaagcttcaccagatggaagatccaatgggtaacgccgactggcgggccataaacaacaatcgccagcaaatttttcgctggttacgtggcgacaccaaagcggcaagagccaaaacaagagcgctggcaaaggcgatggaagctgcattgcccgcagaacgatacgcgcagctgggaatgactactcagcatttgatatgcgtagcgatacgcgagtttgccgcggcgatcatagcgctactgctggatgccagggatagaccgcagaagatagcccaggcattacaagccatccaggaaacacagcgcctgaccagcgtttaa

SEQ ID NO: 128775 - DNA, 225 bp, Enterobacter cloacae
atgcttaattcaattgaccgcattacctggcggaacggcttccgtttgaatggcgcaccggctgtcatggaagacatcgaagatattttcgaaggtcgccgtgcagctgcgttatctatctgggcgcagtatgaaaaactgaaagaagaactccgtgaaatggaactgtcacctgaggagtatcaggcggcatgtcgtcaaatcgctgaaacattggggatctga

SEQ ID NO: 128776 - DNA, 990 bp, Enterobacter cloacae
atgagtatgaccctgatggcccgtgcgatggcaattaaaaccggaaacccaatccgcaaactagtgctgatcaaactggctgataatgccaatgacagcggtgaatgctggccgtcttacaaacatatcgctgaacattgcgagtgcagcaagagcgctgttcgtgatcacatcgatgcgctgatcgctatgggcttgctggtgaaagaaaaccgccctggcgtcaaaaatggcaagggtaatgcgtcgaatctgtattacatgaaactcgataaccctatgccgccaaaaagcatagcccctatgccgtcaaaaagcacaggtgtgccgccagaaagcacaccccctatgccgtgtggcggcaccagaaccagtcactcttttgaaccagtcaatgaacctaaagatccccctaacccccaaatgggggagagcgaggaaattattctcgctgacgcgaaaaaagcgctcgagttttataacgactgcaccggtacccgttgccgtgacgttaaaccatttgtgctgatgctgacgccaacccaaactcgtgaaggttacaccctggccgagttgcagttggttatccgctgggttctggctacatggcatcgccgcggctctggcgcgccgaagccagcaaatatctgccgggtgaaccggttcgacggttatctcgctgacgctgaggcctgggccaccacagaggcgagtattgatccggttgcggttgttgatgcctacaacgagattttcgctgacgtacttcctgctgcgacccttgacgctgatcgccgccagaaaattacgcggcttgcggctcacatgatgaataaaaccactggtgcgtttctggggtacctggaaaagttccgcaataccgcgccagatttttactttgggggtgagcaccacgacggctggcgcgccagttttgattacctcatgaaaccggaaacactgcgtaaaacaagggaaggtgcactgtga

SEQ ID NO: 128777 - DNA, 1389 bp, Enterobacter cloacae
gtgagtcctcaggatctcgaagcctgtgtgctggctggtctgctgaatggcggtgcaacgccagacgcgttcgatgtgatcgccagcacaccggaggaatcattcagcattggattccatcgccgcgctttcagtgagataaaaaaacaggcactggcgaacggcatgatcgatatgcttttcatcagcgaggcgctgggcggttcaagcctggccgatttgtcagaaatttcccgcatccccgccacggtaccaaacctgaaagggtatgcagggaaaatggtcaaagcatggcgtagccgtgcgctggcgaaactgctgcaagatggggctgacggcatccggcaggcgtcaaaccaggaacaacgcgatcaggtggtcgagaacgccgtcgcgcagctgctggacatgactgctgacactggcgacattcagccagtacatatcaacgagcttttgcctgtttacatggataccgtgcagaaacgaatggatggcgatgaatcgacccgcaatttgctgacgggcatttcggatctcgatagcgccactggagggatcaaccctcaagatcttattgtcgttgctggccgaccgggaatgggtaaaacagagttcgcgctcactgtggtggaaggtgtaacggctaaaggcggcggcgcgctgatttttagcatggaaatggcggctacgcagatcgttgagcgctctctggctggcgccggaaacctttccgtatcgcgtctgcgcaacccgcaggatatgtatgacgaagattgggcacgcttaacatcagcgatggccacactcaacgatcgtgatatctggattgttgacgctaccgatctgaccgtcgaacaaattcgcgccattgcggaaacgcacaaacgccgccacccgcatttagcgatgattatggttgactacctcggcctgataaaaaaaccgaaagcagagcgtaacgatctcgctgtcgcgcatatttcgcgaaacctcaaaacgatggctatgcgcctgcatacgcccactttcgcgctgagccagctatcccgcgcagttgatgcgcgcccggcagcactgcgccgcccagtgatgtcagacctgcgtgattccggctctattgagcaggacgccgacagcatcctgtttctgtatcgcgacgaggtttataaccctgaaagccctgccgcaggtattgctgaggtcattctcggtaagtgccgttttgcagcagccggcaccgtgatttaccaggaattcaagaacggccattttttaccaatcgatcagcatgtcgggaaggagaaaacccgtatccaactggaggcagctaaacccaaaaaacaacagcgtcggtattccgacaaatacaacaccgaaccgttttaa

SEQ ID NO: 128778 - DNA, 678 bp, Enterobacter cloacae
atgaccgatttattgtatgcaaaaactaccagtgcagatgatggttgtgactggggaccagtaatcatctggcgtatgaatgctggcgcgcgcgcccgaaaccgagcctgttacgttcccgcaccacgcccgatccaggtaaaccctgtttatcgcgtagcgaaaacaaaaaaagcacctgtgcaagccgttaacacatcagggcgctggctcaaaacccacaccgcgacggttatcactgctaaaggcgagaaaacggtaaaaatccgcgaaactgccaccgtctggattgccgggagcaaggagaattacgacaaacttaccgggcagcgagtcggcgcaccgggccgttgccgcctcctgttggagtcgatcaccccgattgtacgcaaagcaaaatcggcacccgaaaaggcctccggagagttatcagcacaaaagctggtggcgctaatgaagggcaaaacgctgtcttatcagggcattctcactgcgattaaaaaatatcacccggacatcaaaatcaccattgaccagttgcacaaacgtatctggggcatggttcagtccaaatacgtcggtattgaacgtcatgatgatatgccggtgactcacttcactctgaaaaacgttgatccacgtttttatgctcattccgaaaagaacgtgagggcttaa

SEQ ID NO: 128779 - DNA, 237 bp, Enterobacter cloacae
atggccgggcaatcggattatctcccgcccggtttaccgctcaatcgcgccaaatggccgcaggaatttcaactcaaagagcattacgacatgcgcgctgctgcgcttattcgccagctctatgagaagaaaaccacacgttacgcggtcgttcagcagattgaggcaacgccggagagtcaacgagagttttttagagagcgcttaaattactggcgcgcgcagagagaaggttaa

SEQ ID NO: 128780 - DNA, 276 bp, Enterobacter cloacae
atggtatattgtggcccggacagcacaggcctggtgacgctggatggggtggtttatcgcatagtcgatattggcatgcgcatgctgcaaccgcatgagctataccgggcgcagggcttcccggagtggtacatcatcgaccaggatttccggggcgtgaagtacgcgaaggataagcaggtggcacgttgtggaaacgcagttcctccgccattcgctgaagcgctggtgagggccaatttgcctgaattatgtcatcagaatgaggctgcgtag

SEQ ID NO: 128781 - DNA, 339 bp, Enterobacter cloacae
gtggctaaatccgcaactgagcgcaaaaaagcacagcgggcacgtcaggccagagccggtaaccgcaaactggagcttcagctcgatacccaggagattgaaatgcttgagcgcaactgcgccgcccggcgccctggtcgtgcgccgtatgatatggccgaatacgtcgcgctgctgatccgtcaggatgatgcacggatacgcaaccgcattaagcgtataagcgtaagcaaatgcactaaatgcggcgacgcgcttccggtaaaaagctgcatcatgtcaggtgattcgcagtgctgggttacaggtggctggaaaaagttcatactgacaatatga

SEQ ID NO: 128782 - DNA, 192 bp, Enterobacter cloacae
gtgattgagaaaacggaggttggggatcatcttcccgataacggacgcgtactcgtgaccctcagaaatggcaaggtttcttccataagattggctcatgacgacgagcatcttgctacacttaagtctttgtttgaattggctgaattgtccggttttaccattgttgaaaaggacaaaattaaggtataa

SEQ ID NO: 128783 - DNA, 597 bp, Enterobacter cloacae
atggcgcagtattcttttgtaaaatcagctggcggagtattaatcccggcaacgccggaagcgcgcgaatttatcgaaaaaaaatgccgcatgggcgctgtgctttacgccgactttaaacaagcacgtaatccggcatttcatcgcaaatttttcgcgctgctcaatcttgggtttgattactggcaaccgacaggcggtaccatttccccggccgataaaaaactggttcgtgggtatgtgcagctggtggcccattatgccgggcatgaagaaacactccaggaacttgccgatcagtatctccgcgacgaagcggaaaaacgagccggaaatattagcgcggtaaaatcgtttgaggctttccgtgcttgggtaactattcaggcaggcttttacaccgaatacgaaatgcctgacggcaccacccgcaaagaacctaaatccatatcgttcgcaaaaatggatgatatcgaattttcccagctctacaaatccgttctcgatgtgctctggaatttcatcctgtaccgcacattcccgacacagcaggccgcagaaaacgcagcctcgcaattattcagctacgccgcgtaa

SEQ ID NO: 128784 - DNA, 291 bp, Enterobacter cloacae
atgccgctggttgccaccttcaaaaccgactggttccgggtcattaccgacctgaccagaaaaaacctcacgacacaggaaattgccaacgaacttggcgtttcgaaatctgccgttctgggctggaagtcaggatctgaacctcgccacggtcatggcgaagcgcttattgcgttgtggtgcatggcgaccagctctgacaggaaaaaattacccacggttttgcatcgtcagtggttcacctttcgtaaatcgcgttttggtcgggaaactgaccaggcatgcaaataa

SEQ ID NO: 128785 - DNA, 486 bp, Enterobacter cloacae
atgggtcgaccaagaaaaaacgttgaggtaccagggcaggaaactgctggtaccgatacaaccaatatcgtggcggaagggcaaatgcttaattctgtccctgttaaacagaccgttgctgatgccccaattacagcgactgagatccagacgcttaacgcagaaggccagcgcgcagagcgggaggttatccagaagcgcgttgccagtctgctggacgatgccgcactcgctgagcgcaatactctgctgggtaccatcaacgagcagggcgcggccatcatcgcccgctttgaaacgctgggttacaccgacctggctgaccagcagctgaccgacaatctcgaattcctccagctcgtcaaaaaagccactacggcggagcctgccgcgccgctgggctacgtgacgaacgacgaaggcaaacgccagccggttacgggtaagcccgttctgactgagcacggctggcacgttccgggctaa

SEQ ID NO: 128786 - DNA, 231 bp, Enterobacter cloacae
atgtgtggaggtggagcacctaaggtcgtacagaccgacccgcaggccgaagcggatgcagctgccgatgcagcggcaaaagcggcaaacgcagatgcagcagcacgcaagaagcgcaagaaaggctcgtcccttctcgccagtggcgcagagggtgcagccgattctggcagctctctgctgtcctctggtgcgcaggcagcgcagcagaaaaatactctgggggcgtaa

SEQ ID NO: 128787 - DNA, 2289 bp, Enterobacter cloacae
atgtcggtccctaaccagacaccttatataatttataatgccaacggcctgacgaccgtttttcccttcgagttttacatcattaatgctggggatattcaggtctccataaacggtacaccagtttcaagcggttacagcgtttccggcgttggtaatgtaacaggcggagatgtgattttcattactccacctgctgcgggtacagtagtgatgctggaacgagtggtcccgacttaccgtttgaccgattaccaggataacggtgacctgctggccgatacggtaaacaaggactttgaccgtctgtggatggctatccagcgttcctttatctaccttggtctggcattacgtcgcccattgcttggagggccgtttaacgcagaaggttaccggattgagaagcttgccgatccggttaatccgcaagatgctgcgacaaaacgttacattgataatgtgagtcttgttcgtgcgctgcgtgtccctgaaagctccattccaacacttgcacccgcggaacatcgagcaaataagctgctggggttcaacagcgccggcgatccagtattcgtatcgccgccatcggggtctgcctcagatgtcatgttgcaactagctgcaagtgatggctacaaatatatcggagagtgtccagatatctcgactttacggtcgattgaaccaacaacactcggacagttaataagggtcaaaaattactactcagacaaatttggtggtgggggcttcttccgcagtgttaatcccggaacgctggtagaagatggcggtctttatatcaaaacgtccggcggagctgtgtggcggcggtgcgtcaaaaataaacaggtcagcacagaagaatatggatgctgggatgggaatacaggatctgacaactctgcacgcctgttgaaagcatgcgcctctggtcttgacgtgaaaatgatgggggagaattataatgtcgttagcatcccttcaagtcgattcagcctgaccgggagaatgaaagcctctactgctgatttttccacggcatacggtcgtacgctcctgacattgactggagcgaatgtaacttatgacatcgatatcgacatgcagaatttcggcgctggtggttttatcaaccagggtacagacactgttggtcgcatcaaggtttcgaatatctatggtgctaacagaacgacttatggcctccagaacgcagtaacggatgaaggaataagaaacaccatttctgccattattcgtaatattcagaagggggatactggcgttgatccgcagcctgctgcattcaccgtaggtgctacaactcagcgaggaaactacccagatgttaatatctatgacagtcaaggtggggtaatcgtcgcagccaccactgaaacggtattcggtgttatcactgccaggttgatccacgataatggaatttactgcctcgagggtagtcgcgtttcgatctctgaaatggttgttgataacggattaggcgagcccgttgtaaatgctggcggtatagtaaacataggggttctgcgtatcagagagtgctctggatatggcattacatactcgtacagtggaaccatgcgcatcgatgccttgtatatcgacaacaccctaagttcatctattatgccaattctgcgtagccgacctgataacgtgagcagcacaatcaggataggccgcattgaaggggcatgtgtacttgctggagttactgcgagcattcttcactctatgttctccattacgcaaggtgtgactgatctgtatattggcgatgtaaatctacgggtaaattacgtaaccggctcatatcttggcatggcggattttgcagggtgctcaaggatccagttgggtaactggacgatagatttcaatgacaccacagggacactcacatcagcaagcattgcttacttctctctgccttctacagctcagttcgctggctctcaggttgggtatcagaattacaggtcaaccacggcgacggtgagaatgactaatattggaaacgacacgatagactttgctgtgggccaggccgtgcaggttaacgcaggtccatatatcagcagcgctatctctgctaactgccgaatcttccatgccgcagcagtaccaacagcaggtaagtggtacagcggggataaaatattcatcatcacacctggaacatcagtgaaactaggctgggtatgtacacagtccggagatttctctggaacagcaccaacattccagttgatggtgtaa

SEQ ID NO: 128788 - DNA, 1206 bp, Enterobacter cloacae
atgcgattaattcttatactaattctctgcctttctgcaccggtagacatgctgaatgggtggctatcttatgagcgagacatagggtttgtgtcccctctctataaagctgctgtattaggtctgtgccttttgctgctcgcggcaaccagaatcaaacggtttttgttctattcattttttatgcttatcctgtgccttggtccgatactcggctatactacttttgaactcaatgagttcccggtagaaactgtgcagatagcaattcgatgcctgctaatgtttgtcgtttatgacaccctctcggcactgagagtttctcacaggatggccgcgttgggagcagtttcagcgctagggtttacgcttctcaatttccttatggcgcaaatgggttacggttattctgcatatggagacgccgccctaagtgatgcttacgctgaatactctgtcggcgctaaagggttcttctttgctggaaatgaagtaagcattttgcttatgttccttgctgcatttgtttcactttatttctatagatacttttggactttcttcctgcttgttgcattgcttggatgcagcatactcctttcaacaaaaacagctatgattgcttctctcgcaatggtagctgtatggttctttgttagataccgttcactttctgtaaagtaccttatacctgccgccattatcgcagtgttcgcgctggttttcataatcaacccagacataacactgagtggagctaaatggactcaattcgtttatatatatgagaatggcggaattactcgattaatattctcaggaagggatgagtttgtagacgcggcgtggagaatgattcaaggaaactccgcatttattactggtgaatatttcttcggttttaccaaagaatatcttgagtttcagagaataaaatcatcggtagaaatagatctgattgatatgtacctgtggtttggcgtagccggtgtcgttttcttcttctactatatgaagtttgtgtggtcaaaagtaaaatatggatgctatgagactcgcatgtccagactcatatcactttgcttctttaccatgatattcttcgtatcattcttctctggtcacgttgtttactcgggaacggcagcgatccctgctgcattgtgtctgtatgccatttatcaaaaaatgatgtctcacaaataa

SEQ ID NO: 128789 - DNA, 429 bp, Enterobacter cloacae
atgattgtcccggtggtttacgctttctcactttccgcagcgtatgggaatgcttcaaccatgcaaaaaaggcttgatgaatatcgggcaatagtaattgccaaagatattaacaatttaaataaaccatttaagaatcttgtttttataggcatgcctgagctttccaaggtgtctaataaatatgcagacaacttccctgtcattcgtcaactgattaccccatccataagagagaactgggttttcgcaaactacttcatgcggcagtatgggatctatctcaactatattcatataagcaaaggaagagcaaccagagatgctttatgcaaacaaggtgtattaattgctaatgatgactattttgttatgcacaattcagacgcggtaataatagactttacaaaatgtaaagacgtgaactaa

SEQ ID NO: 128790 - DNA, 432 bp, Enterobacter cloacae
atgaagatccccgtttatctgaaacataaacctgtcattactgtcgaaaattatgatcgtattgatggtccatacgctgacgacagtgatgccaaaggcctgtcagtcggcatcgcgcagtggaattcccccggctggacagagttgtcagctaaagtctggcgcaataccggagaaaaatggtcaaggcagtcagaagaacttcctctgcacagggtgatagaccttgcaaccctagtctgtatcgtgatggattacagcaggaatgggcgtctgtcttctgatgatgattttccggtcagtcgggcgggagataacccggacctggaacatcacacggaactaatgaaaaaagagctgaagcagaatcacagatatctggatgagagtcttaaacgacttgctgtcgaattaaaaagggccggctactga

SEQ ID NO: 128791 - DNA, 603 bp, Enterobacter cloacae
atgaccccaaggctgccgtttgcgtttgctgtatttctgggctcatatttgccacttagtatgatcctgctcattcaggattttgatgacagtaaatataaaaggcatctttgctttgatttattgacatctgactcctgtaacctgccgtttaaggaaccattactgtccgtcagtttatttctcatctgcctggtatgttttcttctttcatggcttatattaaaactggctaaaagcgatgagcaaaaaatcaggattctggaagtaaagtatacgccgtcagacctgatgaactatgttctcccttacattgtttcgttcatgagcattaattaccaggagaccaacaaatttttggggtttattgtatttcttctctggctcttctggctgtcttataagaccggacaaataatacttaaccctatacttatcgtattcaactggaaaatgtatgaagtaacttatcgacatccaggtagcaaaaagacacactcaggtgtggtattatcaaacctgagtatttcccctgattctgattacgaatatcagacaatacagtctgtcattattattagtggagataaggatgaaacttaa

SEQ ID NO: 128792 - DNA, 915 bp, Enterobacter cloacae
atgaaacttaaagaattacaggattttgatatccagagtgcaacactttctgtctgggtgttcaggaaacagacagtaaaaagtaactcggtatacagggggaaatggatcactgttgttcctgaactcaaaactgaactgacggaatttatttgtgctgaaagaggaaaatacacggagactattgagtattcactgctggcccagaacaatgaagccagcctgatgctgattggttccggagaaacctctgcggttgcaattacagcactatctgcggaccagacacaggccagaaaagtaaaagaaatcaaagaactggcgaactgtgatttttactctgtgaaactggtgtccggagatactgtactacattgtgtcaaaaaaacagatccatcatgggcaacgaaaaaacaatccggattacgatctgttgttttcaaaaacaataaattaaaaatagatgacacccctcgttttaacatagcaaaagattttgatttttatattcttggtgacaatgttttcatcaaaaacaaaaaaacgtttgaatcccttctgagttataaaaaagctcaccttactaactttaacgatctcgttgatgaaccagaattcagtcagctctttaccgatgccgagccactaaaaagatatgtcggaacaaacgcaatgcagctaagaagagcatcggccataaaagaaaaaggattctataagttaccggagtttatggcaagcctcagggaacatgcctcgcggttccggctgaatcttcagtttgatgaacagggcaggattattgccagtgatgcctgctgtgccgatatatttcaggccctgcttgaccatcgcctgcagtcacactttgccgcacatatctacgatgttccgaatgcgtcaccaattcagtaa

SEQ ID NO: 128793 - DNA, 975 bp, Enterobacter cloacae
atgagcacacattatcgcctgtatccaccattcctctgtgttcctgaaaagcataattttccggatgtctgggagcatttttgttgtaagttgctgaatcttcagcatggtaccagtgaaatttatgtccgaaatcctcctgagcaggggattgatctctggtatccctccgcccgaatagcttatcagtgcaagtgtgtggaatccggtaaggctggtgatttcaatgttacaaaagctattgagtcagtcatatcagccaaagcggcccggcatgtgctgggctgggaaaagtatgttttgtgcgtcaacgtccctgttaccgggggggcggaaaagaggctgaaagaggtcctgcctgacattgatgtcatgagcgaatcggtatggttgtctctgtgtgaaaagcatccccttgacgttgaacgtaatttcagaaagcttctcgatgttcctcaaaacagatttgtttcagccattagtaataccttttcagtacgctataccgaagagctccggcaacaactggaagattcaccttttgatatttttttgtattccagtcgacaggattccgtgtttcggatccctgtggcggggagctttactgcgggagatgtaatcaacattctgcggaattttttccgccttccgaaaccagcgacattttcagacgaaaacattcaggtatcgcttaatcattctttggtctttgatggcaaaaaagtccctcttaaaaagaccctgggagaggtgggggttgtccatggttctgtcgttactttctggactcaatttgcctggaaagacctggaagatttccggtttgatggcgatgttattcattatggcgttcccacattgagtaaagaagaacgcagggatagggcactggccagatataaaagaattatacaggaaggattccgtgaggctgagacaggtattataactgatatatccgcagaaaaatga

SEQ ID NO: 128794 - DNA, 1545 bp, Enterobacter cloacae
atgccgacagctccaatctctatgagaaaactcaaagaaatacttagacttaaatatggtgccggactcagccatcgtcagattggccggagtctggcgatctcaccttctgtcgtatcccgctacgccaatcgggcggctcagcttggtattaaacagtggccgttgcccgcagaatgggatgatgcagcgctaatgcatacgttccttcaaacgcaggtgaagatgaagaaacactccctgccagactgggctacggtatacaaagagctgcgtaataaatgcgtgacgcttcaactgctctgggaagagtacggagaacgcaatcctggcggctcttacagttataaccattattgccggatgtatcgcgaatggctgaaaaccacctcgccatcaatgcgccaggtccataaagctggcgaaaaactcttcgttgattactgtgggccaaccgttgacattaccaaccctgataccggggaaataagaaccgcgcagatcatcgtggccgttctcggggcgtcaagttacacatgggcagaggccacctggtcccagcagcttgaggactgggttatgagccatgttcgttgcttccggtggcttgacggtgttcctgagcttgttgttccggacaatctgaaaagcgccacgtcacgggcctgtaaatatgatcctgacgttaatccaacctaccagcagatgcttgagcactacaatgttgccgtgataccagcgcggccgcgtaaaccaaaagataaagccaaagcagaagtgggcgttcagatcgtcgaacgcaggatcctggcccggctccgtcaccaggtcttcttctcgcttgctgagctgaaccactgtatccgtacgctggtaaccgggctcaacgaacgtcccttcaaaaaactgccgggcaatcgccgtgaggccttcgaaaggctggacaaaactgtgctcaggccattaccggtgcagcagtggcgctaccggcacatcaaaaaagcgaaggtgaatatcgattatcacgtggaatatgaacagcatcactactcagtcccccatcagcacgtcggtaaaactgtggagcttcatgccttcgacaaccagcttgaagtctggtctgacgggcagatgatcgccagtcacccgcggcgtcttcatccgggcaacagtacggcagcagaacatatgccggagcgccatcgtcatcatcagcagtggacgccagagcggctgaaaagctgggcggccggtgtgggctccgacaccttcacgtgggtcagcgagcgtctggctgaaaaagcgcatccggaacaggcctatcgcctgtgtctggggctgctgagcctgacgcgtgaatatccttctgagcgcgtcaataacagctgtcggctggccaatgcagagggattaacccggctgaagcagataaagtcgatcctgaagaataaccgcgacctggttccggcggacaaagatctgcacccgtcccaggagcttcctcaggaacatgaaaacatccgtggcccacgccacttccactga

SEQ ID NO: 128795 - DNA, 615 bp, Enterobacter cloacae
ttgctggtcacgcgcgaatcactcgaaagggatcagcgtaaacagaaacgtctgctacaaaaagcccgcctgaggcttgaagcctcggtccaggacatcgactaccagccagcgagaaacctagaacgttctcggatcgctcagctaagccagaacgaatgggtggtcagggggcagaacctgctgataaccggcccctgcggttgcggcaaaacctatgtgggctgcgcccttggcaacaacgcctgccagcagggttacagcgtacagtactggagactgaaccggttgctggttgaactgacgcacagccgcgcagacggtagttaccgaaagcagctggctcagctgtcaaaaacgcagctgcttatcctggatgactggggccttgagccgttgctgccagcgcagcgtaacgatctgctggaactgatggatggcagatacggaaagaacgccacggtgatgataagccagctgccaacggatgagtggtatggctgcgttggcgataacacgctggcagacgcgatccttgatcgtctgatgcataactcccaccggctggaaatgaagggtgagtcgatgagaaaacgactggcacaggttgactga

SEQ ID NO: 128796 - DNA, 213 bp, Enterobacter cloacae
atgaaaaacatcaaactgcttgctgctgccggtatgctctccgtagtttctttctccggcttcgcccagtccgtcagcgttactgctgacaccctgaacaacgcggaagcgaaaattgccgctatcgcccaggaatccggtgcttcgtcctaccgcatcaccagtgctgaccagaaaaacgttgcccgcgtgactgcagtacttgataagtaa

SEQ ID NO: 128797 - DNA, 174 bp, Enterobacter cloacae
atgaaaaaatttagcgtgactgcagtactgattctgaatggcatgctctcatccggagctatggcaacctcgttcctgccggaaacttgctcggatatggacatctctgtccggacagactatgtcaaccatgaagacgtgagccacgtctttgactgtcagccagtgatctga

SEQ ID NO: 128798 - DNA, 147 bp, Enterobacter cloacae
atgcattcgagcctggcagtgacgacatcagggctcccgctgggtctgaccgcggtgaagttctggacccgaaaaaaattcaaaggcactaacgcacttaaaaggaaaattaatccgaccgtttttttacatcagatcactggctga

SEQ ID NO: 128799 - DNA, 357 bp, Enterobacter cloacae
atgattaatcaggaacagacttcgctttcatggctcgatgaggaaattaattcttctgtctttagcgatcgccgccgtgccagtcgttttaaaagtctcatgcaaaaactctggcgggggatgggcaacagcctcccttttgcctgccaggataatgcagcaacaaaagccgcttaccggttcctttccagtgacaggattgatgagcagcacctgctgcagggacattccgaggctaccagtcaaaggatatatgcgctgcaaggtgagaagattctactgcttcaggacaccacaacatttggctaccaccgggataaccctgatgcagtaggatttgcaggcaatcacacctaa

SEQ ID NO: 128800 - DNA, 1368 bp, Enterobacter cloacae
atgagaatagttacactcgtaatatctgctgtagctttgatgccgggagttacagtccctaatgcgatagccggttttattgaagacagtaaggccaatctcacactccgcaatttctatattaatacagataatcgcagtggggacgggttcagtaaacaggaagaatggggacaggggttcatcctcaattacgattcaggttatactgaagggccagtgggattcggactgagcactctggggctactgggcatcagacttgacggaggaggtaaagcaggctcaccggcgtcaggtcggcaacccggtacagtatttccgctagacaatgatggcagagcggttcatcagttcggtagcctgggggttaccggcagggcaaaaatatctgatacggaactccgttatggaacgcttcagcccaaaaatcccgtcgttatatacaacgatgcccgccttttgcccatgacatatcagggaggacaaatatcatcaacagatatcgacgatctgagtctgaccggcggcgttctcacacatacaaaaggacgtaactccacagatatgcgcggaatgtccattgccggagccaatggaagtggtcccacttcacggagcagtaatcgtttttatttcgccggtggtgactatactcttatgaaagacatgactctctcatactattacggtgagctggataatttttacaggcaaaactatatcggactggcacataacctgaaaatcgtttccgggaacctgaaatcagatattcgtatattcatcagcgatgcagacggaaagaacggaagtgctgcaggacggagtgccggatatgtaagtactggttattacggaaataatcgcacaaagggagaagtggacaacaatgtttatagcggtcagttgacatggtcttctggaagtcacagtgtgagcagtggttatcagtggctgacggggaaaagtgactttccatatctgaatcgtggtgatggagaaggaacaagcacctggttaattactgatgcacaattgctaaaattcagcagggcgggggagcgaacctggctggcacggtacgcctataattttgctgatgcagggctcaaagggctgaatctaagtatcctctatctgaacgccgataatattgataccggggatgggcgaaagggggaatgggaacgggatattgccctgagttatactatccccgagggaatacttaacggacttggcatctccgtaaaaaatgccacaatgcgcagcgctctgcctgacacaagtagaaaaggctctgctggacagcgtgaccaggatgaaacccgggttacagtcagttatacccttcctcttctctga

SEQ ID NO: 128801 - DNA, 486 bp, Enterobacter cloacae
atgccccgtctgaagggcatcgagcgtatccgcaaccagtttgatgtcgtgcgtgttcgctgctgcgacgaccagcgacagaggaagccccctggcgtccgtcagcaggctgcgctttacgccttgtttccctctgtccttaggattgcgacctgtttttttgttcctgacagcggcgatttggtcatacaaccgtccatcgacaaccaggaccagtcaatgctgtccagatgctcgcaggcaagcaaaccgttctgccagaagcgctcaaagatgcctgaatcgtgccactccttaaagcgccggtgtgcaggactcgatgaacatatcccggtggcgttcagacaaccagtcctgaggaagaagaatatggcatccatggcagcgcggttatcaacgcgtttccggtatgtatcgagtggatggctggttttgtgctcagggatacccggtcatttttttaggctcgatgcagaaaaacaatga

SEQ ID NO: 128802 - DNA, 3441 bp, Enterobacter cloacae
atgtcagatattattcccggatattgcacactttgccgttcgcgttgcgggacgttgaatgaagtagcaaatgaccacctgatcaaggtacgggccaaccctgaacatcctaatggtaaggccatgtgtatgaagggcaaagcggcacctgagctggtggacagcgcaaatagaattctgtacccgatgaagagaacccatcctaaaggtgccgagaacccgggctggaaacgtataagttgggaagaggctatgtcaacgatagccggacaactggaaaaatttaaacgagagaacggagctgaatctgtcgctttcggttttacgagcccaagcggtacccccctcagcgatgcaattgaatggttagagcgatttgttcgtatctatggcagcccaaacaccagctatggaactgaaatatgtaactggcataaagacgttgcacatcgatggacctttggctgcggcatccctgttgctgactattcccatgccgatcttatccttctttgggggcataaccccgcgaatacttggcttgcccaggctagtgcgattggtactggtcgaaataacggtgcaaaactgatcgtcgtggatcctcgcccgacacctttagcgaaagaagcaaatgcctggcttgatgtcaatcctgggactgacggtgcattagctttggggttaagccatctcctggtagaaagaaacctgtttaatcatgagtttgttcgaaactggactaatggtcctttgttggttcgaaatgataatggttattttcttcgggaaaaagatattaacccacttgccatcagtaatcgctatacagtttgggacgaacacaaccagcaagtcacatttatcgattccgagactcgaactgaagaaacgctgacgcctacagctgcacttgagggtaatgttgaagttgcaatagctgatggtgcaaaaatttcctgccaaacggcgttttcatcttttaaagatatgttggctaattatgacccagaaaacgtaagccgtatcaccggggtatctgttgcatcaattgaagccgctgcgagtttgattgccggggccaagaaaatcgcctaccacagctggtctggagtggcacaacacactaatgccacccaaacagaacgtgcgattgcgacactgtatgctttaaccggttgtttcgatcaggaaggatgtaatcgaatctatgccagccacccggtgaatgtggttaattcaccgacactgatgccaaaatcacaatgggataaagcattaggtcttgaagaaaggcctatcgggccgccttcacaaggttgggttcattctcaggatatctggcattcagtattagaaggtacaccctataaaattcgcgggttaattggctttggtgccaacatattactttcacaaagtgatacttctctcggacaacaggcgcttgaggcacttgagttttatgcccatgtagatttgtttgaaacgcctacatcaaagtatgctgatatccttctgccagtaaacactgcctgggagcgcgaaggcctaagaaccgggtttgaaagtagtgctgctgctcaggaccacattcagttgagaaaaaaaatggtctctccgcgcggtgaaagccgttccgaccttgagattgttttcgatcttgcatgccggttaggaatgaatgaagcgttcttcgacggcaatattgaggcagcctggaattatcaactagaaccattaggtttgactgttgagatgctcagaaataagccagaaggttacgatatcccgcttgagcataaagtcagaaaatatgctttcagagacccaaatagcggatatctggcaggtttcaatacagaaacaaaacgtgcagagttttactctgagatccttcatcgctatggttacaatcctttacctgagtatgtacagccgcaagaataccagcgcaacgatcctgattatccactaatgctgacatccgttaaaagcggattcttctgtcatagccaacatcgaagcctgactagcctacgaaaaaaagcaccttatccaacggtagacatttcggcagctctggctgacgaagaaggtatcaagacgggggattgggtagaaattgaaacgagagcaggtcttgctcgatttagagcaaaagtggaagccaaactctctcatgaaactgtaattgctgagtttgggtggtggcagtcttgtcctgattttggcaaaccttcatacccggttaaaggtgagtacagtagcaattacaatagcttaatcagcggtgatagctatgatccagtcagcggtgctttacctttgcgttcattccgctgccgcattcgccgcttgaatgattttgagctgataagacgcccctgggaaggtcgtaaaacattcaaagtcattgaactgaaaaaagaagcagataatgttacgacagttaccttccaatcgaatagtgaaggctacttacctgattatgaaccgggccagcatatcactgttagctgttgtccgatgagcgattctgaagagatcgttacccgggcgtattcgctgacaggccctgcgtttgttcatgaccgtaaaacctattccatttctgtccgtcatcagaaagcgactgatgagaaaggtgaatatgtagaaggaataatgtcatcctacataaacacgcatttgcagataggcaaggatgttgaacttacgcctcctggggggaatttcattgtcccgctcaatgccgtccagcctgtcgtaatatttgctggcggtattggaattactccattcatttcctatctggagtctattaacccccaagcggaaggtccggaaatctggcttttctatgctaatcaaaatagtaggctacatgcgtttaagaaaagaattgcggagctaaatgcgtctattgacaggcttaaagtaattaatatctacaaccagcccctcgactgtgatattccaggattggattatgatagagctggttatgttggtgcgggagatgtcgaggcatatcttattgagaataatgctcgttattacatgtgtggtccgcagcctatgatggatgcgatatcccgagggcttcaggagagaggtgtacctgcatttgctattttctacgagatatttcgttctccgacaaaaataaataatgatccctcattacgtcataaagtaatttttgcaaaatcaggaagagaagagacctggaccacggataaaggtactctgctgaattttggagaaaaacttgggattaaaatgcctagtggttgtcgtgttggacaatgtgaaagctgttcaactaaggtgattgccgggaacgtgcagcatctgaatggtgtggaaccctctgatgagggtgcatgtttgacatgccagtgtattcctgccggtgatatcactattgatgcctga

SEQ ID NO: 128803 - DNA, 435 bp, Enterobacter cloacae
atgaacattggtgatgctgcccggttatccggagtttccgccaaaatgatccgctattacgaagaggcgggattaataccggaagttgcaagaactgcagccgggtatcggatgtacagcgatattgatgtgtacaaattgcattttatacgccgatgtcgggagttaggtttctctctggcgcaaacaggagaacttctctgtctttggggtaaccattcgcgccaaagcgctgatgtgaaaaaattagtcgagtcacacatccgcgagttgactgtaaaaattcaagaatttcagcgtatggcatcaatacttacaacgctttctgattgctgtgcaggggatgataagcctgaatgccctattttgcgtgcactgtatcttgcagatgttaacggtttgcaggaatcagattctggccctgaaattacttag

SEQ ID NO: 128804 - DNA, 948 bp, Enterobacter cloacae
atgatcaagcaaaaaactatcaagaatattgttgaattaaacggtattggcttgcatagcggtaaaaccgttaacatgaaaatcatgcctgctggtgccgatagtggcatacggttccgtagaacagatgtaactcctgttgttgatattcagctccgtgccgatcagattcatgacactatgctggcaacaagcattatcaaccctcagggagttcgagtttcaacaatcgagcatttcctttctgcggtgtccagcatggggcttgataacctcctggtggagctcgatgctccagaacttcccattctcgatgggagtgccagaggattcatagactcaataatgcacgctggtttgatagagcagtgtgcgctaaaaaaatatcttctgataaaaaaaacggtttccgtaaaagatggcgacaaatgggctcttttgcatccagactcaaagttctcgatcgattttatgattgattttaagcatcccttgatttctgctgagactaatagattaaatattgaagtgtcgaaagaaaactatattagcgagattgctgatgccagaactttcggatttgttcgtgatgtagaacttctacaacaaaaaggtcttgggttaggggcaagtttgaacaatgcgatagggcttgatgaatatagcgttctgaatccggaaggtctgcgatttaataacgaacttgtgcgacataaaacactggatgcgattggagacctctttgtatcaggccataatattattggcgcctaccatgcttataagtcagggcatgcattaaataataagttgatgcttgcactgttgaatgatgtcgaatcatgggaattagtgagtgttggtgaatataaaaatgatgccactagagaaaccatcctttctaaacccaaagaagagtgttttgagtcattaagtatgtggtcataa

SEQ ID NO: 128805 - DNA, 264 bp, Enterobacter cloacae
atgttagttaatgaccccgtattaatttctatgatagaagagctggctgataactataataaaatgcaggattttttaatcgatgatgaaccttgtattgatatcgtacggtcggtgtatgagttggagtgtacagttagagaattcaaaaaaagaattatacttcaacatatttcctattgccattcagatgaatgtgatgaccctgacctgcatgttgccttaattgacaatataaaaaacatacttgactatcttgaatga

SEQ ID NO: 128806 - DNA, 453 bp, Enterobacter cloacae
atgaaaattggtgaattggcccgtaaggcgggttgtccggtggaaactattcggtactatgagaaagaaggattacttcaggctccattaagagatattgaaaataactatcgccgttacaacaatactcatctggaaaagttattatttatccgacgctgccgctctcttgatatgacccatgaggaaatacgtgcattgctactggcaatgaataatcacggtaaagactgtggccccattgatgcaataatcagtgcccatctcactcatgttcagcatcgtattaaagaattaatagccctggaaatacaactcaaagaacttaataactattgcagctcagaccggagcgtggacgaatgcgggatagtacagaaattgactgctgatgaagagaatggtgatcttcctttaaccgtaccaactgaccacttggggggggggcattag

SEQ ID NO: 128807 - DNA, 465 bp, Enterobacter cloacae
atgaacattggtaaagcatcgaacgaatcaggaatctccgcaaagatgattcgctattacgagcaaattggtctgattcctgctactggccgtaccgaagcgggctaccgtgattatgcacccaatgatgtccatcgtctgatttttatccgcagtgcgcgcgatcttggtttttctcttgaagagatagccgatttgctcaagttatggaatgacaaatctcgccagagcgccgatgttaaacgtctggcacaagagcatatggatgatttagagcgacgtatggaaaatatgcgacgaatggcagatacactcagagctctgatcaaaagctgtgctggggatgagcgagttgaatgcccaatactccagacattaatgaccgctgacgctaaaagccatcccggtaagagagaaggggcagtgcaacgtcgttctcgtggtaacgaaatggaaaaagcctga

SEQ ID NO: 128808 - DNA, 363 bp, Enterobacter cloacae
atgtccagcacatcagattgcggcaacatacaagactgttccgcgacagatcatgtcgcggagccagatctatcaatgctctcgcaaaacgacattgggcaactttccgagattttccatctactgggggaccagtcaagactacgaatcctgctttactgtatgcgtggttcggtctctgtaggcgacattgctgagtcgctccagttatcacaatctctggtcagtcatcatctgaggttgttacgaagtgcaaggcttgttcgcggagagagaaagggtaagtacatattttatagcataatggatcaccatgtaagtcatgttcttcaggacatggtatttcacatagctgaagaataa

SEQ ID NO: 128809 - DNA, 681 bp, Enterobacter cloacae
atgggcggattgacctttgtcccggcgatggacgtgacgcatgcgtgcgtccgtcgccgttttcgccacgcttcctgcctcgcctgcgcggacgtctgtcctgtgcaggcttttacttttaccgactcaagcgtctcggttgatgacagccgctgtattgaatgcggtgactgcctgttcgtctgccccgctgaggccatcaccggcatcacgccgcgaaaacgctttctgtgtggcgatacgcttgttgggccgtttactgaccgtgcgccaggggtgaatgagcttctgctgtggcacgcgcagtaccacgttcgttttatcagtatcgacgcggagcagaatcctgactggttgctggcgattgcccggctgaatctggcgcttcgccgacgcggtgaagcggcgtgggcgtttaaatatatacccgtcaacgaggttaataccgcccggcgtgtgctgatgcacgttccccgagaggatgtccaggcctgtagcgtcgtgcccggtcagcgtgaactgcgcagggcgttttctgcgtttagcgaggcagagataactctcgatgccaaatcctgcatactgtgcggcgcgtgctggcgaagttgtatggaaaacgcgattcggtttgagaacgctgaactgatcgtggaaaccggacgctgtacggggtgcggctga

SEQ ID NO: 128810 - DNA, 780 bp, Enterobacter cloacae
atgcatgagttaccgctgctgatttttacgctgttcctgcaaggatcggttggcgttacgctgtggctggcgttcggaagcacgcaacgcagcgcgctgctgccggcagccggagcgtttgtgctggcgagcctggggctgctcgcctccgcgctgcacatgggctatccgcttaatgctcttaacgcgctgcgccacgtatccagctcctggctgagccgtgagattatctttgccagtctttaccttgcggcgcttggcttcgcaacgctgctgatgtttgtcaaaaagccaggctggaagccactgttggttgtggcaggtctggttggtttagtcgatgtgttctgcatggcgcagatctacatgcacgcatccgtggtgacatggcagcacgttaacacgctggtgctgtttatcggctcggtaggaataatcggctcagcctgcatggcctgtgcgccgcatgcccgcatcaacgtgcgtgcggcggttgtcattatcacgctgctggtgcttgtgcgtctggtgatgcagcccgtctggctggcagatattacggctatggacaacaccgtggtgacgttccctcacgcaccgctacagatgctggagcaactgcgaaccgtgcatctgctgagctggtgcgtatccgttgcgggtatgctgtgctttgctgcgggcggtctgaaagcggcgcgatctcccatgctgctgggaagcgcgttgctgattgtcggtgagctgatgctgcgcttcgttttcttcagtattggctga

SEQ ID NO: 128811 - DNA, 2379 bp, Enterobacter cloacae
atgaaaaaaaataaacatcagggagaaaggcttattcccgccatatcccggcgtcagtttattcaggcagggtcggcgctcgccgccctgccgtttgtcgtcaaaaccggcaaagtacaggcacagggcgcggcggtttcagacgctacgcctgaagaaaaagtggtgcaaacctgtagtacgtttgactgcggcggcaaatgtgatattcgtgctcacgtcagtgatggcgttgtgacccgaatttcaacgcgtccggataacgcgctggatccgcagatgccagtaatgcgcgcctgcgttcgtggtcgggcttatcggaaatttgtttatcaccccgatcgactgaaatatccaatgaaacgcgtaggtaaacgtggcgaaggaaaatttgagcgtattacctgggatgaagccactacccttattgcgaatcaattaaaaactattacgcaaaaatacggtgctgcgtcacgctatgttcatgtgggcaccgcggtgtccggcgggaccttttccggcgataaaatggttcgtcgtctgctcaacttaaccggcggctatctcgaaagctatcattcggtcagtatgggtaacacggcggcggcaacgccgtatacctatggcaccgccgccagcggcaactctctggacacgctgctggacaccaaactggtcattctctgggggcataacccgacggaaaccatcttcgggcacagcaaccacttctaccagaagatgaagcaaaacggcacgcgcttcattgttgtcgacccacgctattccgatacggtttcctcccttgccgatcagtggatcccattgcttcctgccacggacaacgccctgatggacgcgatgatgtatgtgatcgtcacggagaatctgcacgatcgcgactttattcaacgctacaccctgggctttgacgaagacgccatgccagagggcgttccggccaatgaatccctgatggcttatctgagcggtgcaaaggatggcgtggcgaaaacgcctgagtgggcagagaaaatcacccacgtgcctgcacaaactattcgtcagctggcgcgtgactacgcaaccaccaaacccgccgcgctgatccagggctggggaccgcagcgtcacaactgcggcgagcgcaccgcgcgcggctcgacgatactggccacgctaacgggtaacgtcggggtgaaaggcggctgggcagcaggctatggtggctgcgcaaaccgcaaatttgcggccgggccagagatgccggacaacccggtcaacgccaaaatttcggtcatgaactgggtgcaggccgcggatgatgcttctaaggtaaccgcggaagatggcctgaaggatgctgagaagctggacagcaatatccgcatcctgttctcgctggcgggcaattatctggctaaccagaacccggatcttcatcaggcaacccgtgtcctggaagacgagtcgaaaatcgagtttatcgtcgcaagcgatctgtttatgacgccgagcgccagatacgccgacctgcttttgccggaaaccagcttcatggaacgctggaatatcggcgaaacctggggtacggcaagctatctgatcctgtcagaaaagctgattgaacctgaatttgaacgccgttcagactacgactggctgcgggaggtcgctgctaagcttggcgtcgagccagcgttcagcgagggccgtgacgaaaaagcgtggattgagcacatctgggagcagacgcggctgtccatgccggatgaaaacctgccggacttcgcgacgctacagaagacgcgtcagcatcttttcaaaagcgcgccgtacgttgcctttgaagacaacattcgcgatccgcagaatcatccgttcccgacgccgtccggaaaaattgagatcttctcgaagcgtctgtacgacatgcatcacccggaaattccggcgctgtcgcactacgtgccagcccatgaagggccggaagacgagctggcgaaaaccttcccgctccagctgatcacctggaaagggaaaaaccgcgctaactccacccagtatgccaacccgtggttaattgaggcgcagcagcaaaagctgtggatcaacccgcaggatgcgcaaaagcgcggcattgcgcagggggataccgtgcgtattcataacgcgcgcggcatttgtgagatcccggcggaggtcacgccgcgcatcattccaggcgtggtggccatgcaggcaggcgcctggtggcagccggacgcgcagggtatcgataaaggcggctgcgcaaacgtgctcagttccgcccgtattaccgcgcttgcgaaagggaattcccatcaaaccatgctggtggaggtagctaaagcatga

SEQ ID NO: 128812 - DNA, 258 bp, Enterobacter cloacae
atgaatttatcccgtcaggaacaacgtaccttacacgttctcgccaaaggtggccgtattgtgcacgtccgcgatacctctggccgcgtcaccgccgttgaatgctatagccgcgaagggctactgctggctgactgcaccctcgccgttttcaaaaagctcaaaaccaaaaagctgatcaaatccgttaacggtcagccctaccgcattaacaccaccgggctgaacaatgttcgcgctcagcctgataatcgttaa

SEQ ID NO: 128813 - DNA, 630 bp, Enterobacter cloacae
atgatgaaaacatatcaaggtactcatggagttcatatccttgaatatcagagcaagattaataaattattatgttacttgactaaccgttaccccaggctaacggcggtacgtgtcgatctccactatccgaagatagttgatgacggtgacaatatttgttgcttccctaatctggagcctggggtgatatcccggatgcgtgaatccctcagagctaagctggaggctgatcgtacccgtaaggagcgtgaaggtaaacgcatctaccgttgccctttattcattatatgggcgaaagagtattctgagtcaggtaaatgccactatcacatttgcctgttgttcaacaaagacgcttactaccacctcggggattacgatcaggacgataaccttagagggatgatcacaggagcctggtacagcgccctgagactggagagagacgatcaccctggtctggtccattttcctgaaaactgtaagtatgtgctagacaccaatagtactgacttccagcagaactaccaggcgctgttaacccgactggactacctgaccaaagttgaaagcaaagtgtttggtgaaggagaccgtaacttcggctgtagccaaatcgaactgtaa

SEQ ID NO: 128814 - DNA, 732 bp, Enterobacter cloacae
atggaggctcgtgttaccgttgctggcatggggctggtgatggaggtgcaggattacttagatggcgaggccgatagactggcgaaggcgtggctggccgagtacacaccgcaaatcaagtcgttgaaagatgagcgtaaagaggcctatcgtcaaatcgtcgaaatgagtaccgaaccgcaggatgtggatctggtcaggccggcgaacaagtttgaaatgaccagggtgcgtgaaggtgaaaaggaagctgaccttccagtctggaaacaccatttgttgtgtgacgaaaacgggaactatccggctctgttgaaccattgggaaaccaaggtttttgagatcgaaaccaaacgtgaaggatttgctttctggtatcgtaatccacagtacacagggcagtcgtcactgggaatcgcttatgttgaagctgaacagtacaagattgttcgtcccgatttcctgttctttgccgaacaggatggcaaaatggttgtggacctggtagatccacatagcctacatctggctgatgctttgcccaaactgaaaggacttgcgctatatgccgaacatcattctgatgcttacaggcgaatcgaatctgtcgccgaagtaaagggtaaattacgagtgttagatttgaaacggcaggatgtgcaggatgctgttgctaccgctgaaaatgcagaaacgttatttagtagcggacttgctgatgactatcagtaa

SEQ ID NO: 128815 - DNA, 1650 bp, Enterobacter cloacae
atgtctcaattcttttttaaccagcgcgccagcctcgttaacgacgtgatcgagggaaccattattgccagcccgtggaacaacctcgcccgcctggagagcgacccggcgatccgtgtagtggtacgccgcgatctgaataaaaacaacgtggcggtgatttccggcggcggctccggccatgaaccggcgcacgtcggctttattggtaaaggcatgctgaccgccgcggtctgcggcgatctgttcgcctcgccgagcgtcgatgcggtactcaccgcgattcaggcggtgaccggcgaggcgggctgtctgctgatcgttaaaaactacaccggcgatcggcttaacttcggcctcgcggcggagaaagcgcgccgtcttggctataacgtagagatgctgatcgtcggcgacgatatttcgctgccggataacaaacagccgcgcggtatcgccgggactattcttgtgcataaggtggcgggctatttcgccgagcgcggcttcaacctcgccaccgtcctgcgtgaagcgcaatacgccgccaaccataccgccagcatcggggtggcgctggccagctgtcacctgccgcaggaagcggaaagcgcgccgcgccatcagcccggccacgccgagctggggatgggcatccacggcgaaccgggagcctcgacgatcgcgacccataacagcgcggaaatcatgcagattatggtagagaagctgaccgccgccctacctgaaaccggccgcctggcggtgatgctcaataatctcggcggcgtgtcggtggccgagatggcgattctgacccgcgagctggccaacaccccactccatgcgcgcgttgactggttgattggcccggcttcgctggtaacggcgctggatatgaaaggcttctcgctgaccactatcgtgctggaagagagcattgaaaaggcgctgctgtcggatgtcgaaaccgccagttggcagaagccggtgcagccgcgggctgttaatatcatgccgtccgcgctcgccagcgcacgcgtcgcctttacgccatcggccaacccgcaggtgggcgattacgtggcgcaggtgaccagcaccctctccggcctcgaaacccatctcaacgcgcttgacgccaaagtgggcgacggcgataccggctccactttcgccgctggcgcgcgtgagattgccgctctattgcaacgccagcaactgccgctcaatgatttacccacgctgttcgcgctaattggcgaacgcctgacggtggtgatgggcggctccagcggcgtattgatgtcgattttcttcaccgccgccgggcagaagctggagcaaggcgccagcatggcggaagcgctgaacgccggtctggggcagatgaaattttacggcggcgccgatgagggcgaccggacgatgattgacgctctacagccggcgctggcggcgctgctggccgaaccggataatctgcaggccgctttcgccgcggcgcaggccggcgcggatcgcacctgccagtcgagcaaagccggcgccggacgcgcctcctatctcaatagcgagagcctgctcggcaatatggaccccggcgcccacgcggtggcgatggtgtttaaggcgctggcggaacgctaa

SEQ ID NO: 128816 - DNA, 153 bp, Enterobacter cloacae
atgacagctcagactcagggtgcggaaaatgaagtttcagccgttatcagccagtcgtggcatcgctgcagcaaatttatgcagcgtgaaacctggcaggcgccgcatcaggcgcaggggctgacctttgaatcgatctgccgtcgcaaataa

SEQ ID NO: 128817 - DNA, 1098 bp, Enterobacter cloacae
atgctaaaagttattcaatctccagccaaatatctccagggtcctgacgcttctaccttatttggtcaatacgctaaaaatctggcggacagctttttcgtgattgcggacgacttcgtcatgaagctggcgggagaaaaggtactcaatggcctgcacagccatgacattagctgccacgcggaacgcttcaacggtgaatgcagccatgttgaaattaatcgcctgattgccattctgaaaaaacacggttgccgcggcgtggttgggattggcggtgggaaaacgttagataccgccaaagcaattggttattaccagaagctgccggtagtggtgatcccgaccatcgcctcaaccgatgcgccaaccagcgcgctgtccgttatctataccgaagcgggtgagtttgaagagtatctgatctacccgaaaaacccggatatggtggtgatggataccgcaattattgccaaagcgccggtacgtctgctggtggccgggatgggcgatgcgctctcgacctggtttgaagcgaaagcctgttatgacgctcgggcgaccagcatggcgggcgggcagtccaccgtggcggcgctgagcctggcgcgcctgtgctatgataccctgctggcggaaggcgaaaaggcacgcttagccgcccaggctggcgtggtgaccgatgcgctggaacgtattgtcgaagccaacacctacctcagcggtatcggctttgaaagcagcggccttgcgggggcacatgccatccataacggctttacgattctggaagagtgccaccatctgtaccacggtgaaaaagtcgcctttggtacgctggcgcagctggtgctgcagaacagcccgatggaagagatcgaaaccgtgctgaatttctgtcagaaagtgggcctgccggtaacgttagcggaaatgggtgtgaaagacgacattgacggcaagattatggccgtggctaaagccacctgcgcagaaggtgaaactattcacaatatgccgttcccggtgacgcctgaaagcgtacatgccgctattttgacggcagacctgctgggacagcagtggctggcgcgttaa

SEQ ID NO: 128818 - DNA, 531 bp, Enterobacter cloacae
atgtatcgcatctatacccgaaccggtgataaaggcacgaccgcgctatttggcggcagccgtatcgacaaagacgacatccgcgttaacgcctatggtacggtggatgaactgatttcccagcttggcgtctgctatgccagctcgcgccaggcagaattacgccaggatctgcatgccatccagaagatgctgtttgtgctgggggcggaactcgccagcgatgagaaaggtctcgcccgcttaacgcagacgattaacgccgaggatattcaggcgctggagcaacttattgatcgcaatatggcgcagagcggccccctgaaagaatttgtcattccggggaaaaatctggcatcggcacaactacacgtggcgcgcaccctggcacggcggctggagcggatcctcatcgcgatggacaaaaagctgacgttacgcgatgaacccaggcgttatatcaaccggctgtcggatgcgctgttctccatggccagaatcgaagaaactactccagatgtttgcgcttaa

SEQ ID NO: 128819 - DNA, 354 bp, Enterobacter cloacae
atgtcactttcatcaccgggcgtacatctgttttatcactcacgctggcaggatacgcgcgtgcttgatgaactatgctgggggctggaagagcaaggcgtcccttgccggacaatctgttgcgacgagcatgactgcgcgctggccctcagcaagctggcggctaaaagctcaacgctacgcgtgggtctcggcctcagcgccagtggtgatattgccctaacccacgcccagctacccgaggatcgggcgctggtctgcgggcatatcgccgctgggatagccagcatccgcacgctcggcgccaatgcgggccaactggtcaaagtgcttcccttcagcgagataaaataa

SEQ ID NO: 128820 - DNA, 429 bp, Enterobacter cloacae; identical to SEQ ID NO: 77556

SEQ ID NO: 128821 - DNA, 585 bp, Enterobacter cloacae
gtggaatgcacaactgaacgtaagccggttttcatcttacaggtgagcgaaggcgaggcggctaaagcggacgaacgcgtggatgaagtcgtgataggcgtcggcccggcctttgataagtatcagcataaaaccttgattgatatgccgcacaacgcgattttgaaagagctggttgctggcatcgaagaagaggggctgcatgcgcgagtagtgaggatcctgcgcacctcagatgtttcttttatggcatgggatgcggcaaatctcagcggctcaggcattgggattggtatccagtcgaaaggaaccacggtgattcatcagcgcgatctgctgccgctaagtaacctggaactgttttctcaggctccgctgctgacgctggaaacctatcgtcagattggtaaaaacgccgcacgctatgcacgcaaagagtcgccttcgccggtgccagtggtcaatgaccagatggtgcgccctaaatttatggccaaggccgcgctgtttcacatcaaagaaaccaaacacgtggtgcaggatgctgcgcctgtcacgttgcatattgcactggtaagggaatga

SEQ ID NO: 128822 - DNA, 429 bp, Enterobacter cloacae
atgaacgacaacatcatgaccgcgcaggattacccattagccacccgctgcccggagaaaatccggacgcctggcggcaagccgctaaccgacattacccttgagaatgtgctggcgggccgcgtagggccgcaggatgtgcgtatttctcagcaaacgctggagtaccaggcgcagattgccgagcagatgcagcgtcatgccgtggcgcgcaattttcgtcgtgcggcagaactgattgcgatcccggatgcccgcattctggagatctacaacgcactgaggccgtttcgttcttcgttcgccgagttgcaggccattgccgatgaactggaacacacctggcacgccacggtgaacgccgggtttgtccgcgagtcggcagaggtataccagcagagaaataagctgcgtaaaggcagtcagtga

SEQ ID NO: 128823 - DNA, 1317 bp, Enterobacter cloacae
atggccgctaatcttaccgagactgctatacgtggattgaagacaaaaagcacgtcgtactacgtgtggagcaacagtgctcagcgtggtaccggcaggcttggcgttaaggttcagccttcaggcagcaaagttttttatttccgttactacgttgagaaagggaagaaagagaagttcatccagttgggcatctggcctgagatgaaactggtgacggccaacgagcttgcgaaaaagtatggtgcctggcttgttgaagggaaagaaccccagcaagaacttgagcaacaacgcctggccgagcagcacattatgcagatccatcgctctcaaggatcgtttgaggagctggtgcatggctacgttaacaagatgaagctcgacaataagcggacctgggctgatgttctgaagcgccttgaaaaagagtgctacacggttatccctcgcgaaactaaagcgaaagatgtaacacctcttcaggtcaaaaccatcctctcaggcattatccagcgtgatgcggtagtccatgcaaaccgcattcgttcctacctgatggcggcatttaactacggcctgaaagccgataacgatccgatgaataccagcgtgggtattacgtttggtcttgaagtaaatccggtatcggccataccgaagcagtcctcggcggagaaagtgggtgatacatggttaacgctggaagaactgcgttttgtcatggagcagttcgcacaggccactaatgttgggccgctgatgcagcatcttatccgcttctgtgtctatgctggtggacagcgcccgtttgaaatgattgccagccagtggagtgctattgattggcaacagaagacgttgctggtcatagccgatgtatcgaaaaacaagcgtgagcacctgatcccgctgactgaatcggcactacaggaattagcctcagttaaagagctgactaaggaaagtaacagtccctatatttttccgttatcaacgaacggtgagcgcccagtgcgcacggatagtctggcgcgttccatcatgtattttcgggcctttaatcctgagtttaaagttttcacggcgcgagatttacgccgtacctgtaaaacgctgatgggggaggcggggatcagcaaagagatccgtgaccgtattcaaaatcacgctttgaacgacgttagctcgaaacactatgatcgttatgattacctgcctgaaaagcgtagggcgcttgagatctgggaagaccgggttaataactatcagcggcagcatgaaaacaacgttgtgaacctgtttgggcggaggtaa

SEQ ID NO: 128824 - DNA, 615 bp, Enterobacter cloacae
ttgtcaaaatatgagcttaattcagcagaagagcgatatcagccaggctcaaacgacctagtgcttgccaataagctggggatcattgatgagcaggaaatggaggcgctggagtctggcttgctgctgatgttgtatgagcagctatttattgagggccagccgcctgaggcgctggcttttgagcacgtcagcaggtggcatcgccagtggctagggaatgtgtacgattgggcagggaggctacgtaacgctaacctgactaaggacggctttcagtttgcggctgccgacaggattccgctgctgcttgatggtttcgagaagcagtttctttctcggtctggtgaactgaaatccctggctcgtccggagctggttcgttatctggctgaatgtcatgtggaatttattttgatccacccattcagagaaggtaacgggcgtctgtcgagattgctttgcgatgtgttgtcggtactggcggggaagggcttattggactacagcctgtgggatgagcacaaggtgttttacttcaaggcaatacaggcaggtgtctcagggaactacagccctatgatgcagctgatgagcgatatcttgccagactag

SEQ ID NO: 128825 - DNA, 156 bp, Enterobacter cloacae
atgagaaaacatacatcatctcaagtaactaaagcaaaaatcctccgtgccgttgccagttcaactgcaatcgaaacgggtgtttctatcccaaaaattgagcagcaactgaaacaaaatcaggcacaggcgaaagccgttggcctcgcccgctag

SEQ ID NO: 128826 - DNA, 441 bp, Enterobacter cloacae
atgtttgataagtctgatttgacacgagaaaattttgaggaactactgaggataaataatgctttaaaaagcgaaaacagtaatcttttagatgacataaaaaagtatcataaagatatggaaaacttccttgttgatagaggaaatttcatcaaagatattgaaatgcttagaagtgaaaataatgagttgaaaaaagggttgtcaaataatggcgcgacatcaaaagttaaaagctctgtcccaagagcaggaaaggcaacagtaaatgcaatttatcttctcattaaagctcactatggaatggataagtttgttgcaaaggatttaattaaaaaattcgattccatagcaaggtcacatgatattgtttactccttccaattaaagactgttgagtcttggtgtacagaattaaaaaaaatggatgctaaacagtaa

SEQ ID NO: 128827 - DNA, 231 bp, Enterobacter cloacae
atgatgcctttcaagttaacaaatgaacaacgtataaaagtattaagagattatggtgagacttgcgatcgattagtacgagaaaaagaacggcaatatattacttcaatttcccgctctaccgcgtggaaactggaacaggttggtaagtttccgctacgtaagcctattggcctgaaatcctgcggatggctattaagtgatctgctctattggatcaatgaacgttag

SEQ ID NO: 128828 - DNA, 1425 bp, Enterobacter cloacae
atgtttaacggtcgtcctttccctgtgcatgtgttcccgcagatcatcagaaatgctgtatatgaagcggagcagcagacccaggctccccaagctttgattgctgcatcggtattgggagtaatttcgcttgcctgccagaaccggattgatgtgtgcagattgaataatctgcgcagccctgtatcgctttttttactgacactggctgattctggtgagcgcaaaagcactgtggacaaactactgatgaagccaatgtatcaactggaagaagaatggtctaaaaaatatacccaggaccttattgtctggaggaatgaagaaacggtttttaatattgaaaagaaagcactgatgtcaaaattgaaatccgatattcgccgtaataaagatcactccacaacgaatgaacggctgaaagtgttactggctgcgtctccaaaagcaccggtccggttaaggcagatatacaacgatgccacacctgcggcgataaaagactctctctgtggacgctggcggtccataggacttatgtctgatgaagctggcactatttttgacggctatgcgctgaatgaactgccgttcatcaataaaatgtgggatggcgcaatgtttcccgtggaaagaaaaagcgagccagataaattaatcaaagatgccagaatgacgctggggttgatgattcagcctgatgtgtttaaaaaagggtatctggaacgaaaaggcgatgccgcgaaagggatcggattcttcgcccgatgtttgatatgtcaaccgggttcaacacagggcaacaggcaaattaccagtccggttgtctcaaatgagcatctgccggtatttcatcaacgactgatagacattgttaatgagagcattgcgagaaatgaggaaaatgagcgtcagtgtctgcgtttctctcccgaagcagaaaaacactggctcgaattttataacaaagtcgagtcagaaatggggttgcttggcttcctgtctgattttaaggattatgcatctaaaatggcggagaatatggcgaggcttgctgccttactacattacttcagtggtgatgagggcgatatatctattgccgctgtaaaagcagcagtggatataatggcctggtatattgaagaatacatccgtttgttctccaaaaaagaaaagttttctttagatgttgcggaaacagatgagctttactgctggataaaaaactattgcattcgttattgtaaaccttttattacgaaaaacaccatactccaatatggtcctaataaattcaggaatcgtagtaaagcaaatgaattactcagtacattattctctcaaaataaaatccttgtaggaaaaaaggggaaaaccacattaatagctatcgctggcttgaactcctcaacttcattctga

SEQ ID NO: 128829 - DNA, 1167 bp, Enterobacter cloacae
atgagtcgctatatacaactgggctttagctcagagactcgtaaaaagctatttggtgaaaagtggctaggatttccagaagattttgatgcgatcaaatgtgctatagaaactaaacctgatacagacaaaaacccgacgctacgggaaattatcgaaaagcgacgttttcatcacaacgatgacaacgatgaaaaagcaaaagagcagcgatttgattcgatcatcgatttttccaacttcttactgcatgtactgaaaataacagtagatgaagttgtatctctggatgataaaaaactacttcaatcgtttgatataataaaaaatgacagggaaaaaattacgctgtttgccttccatctgctgaagttcagagccttgtttgaccgttatatcattaagcgcgatcatgatgagaaatggagcctgctgacacttgagtactatagcaattcgagctttagctataacaactctttcggcaacgacgaacggtctggtttaaacacgcaactgacgatgatcttgtcgatgtttcatgtctcgcacccagcttatgtttacaagcgatggctcaatcgctcgctagccattttaaatactctggcattaagcgaactaaacgttgacggaaaagcttatctcagtgcacttgagcaactcagccatgagtttctctctgatatttgtggtgaaaaagagcaattcaacgctgatactttgcatcgtggtaccggagtacagaactttgtgttcaatttgctcgattatcgtttgtggcgtgatcttaatgctggtcaatcattcgatggtaaagggattaataatcccgagattaaaaagcattttgatgaatttcagttttcgcagagtcgaacgtcggttgagcactacttccctcaaaccgatccttctggcgcaaacagaatggagggtgatgtccatcgtttcggcaacctctgcctgatctcgccaagcagcaactcaagactcagtaattattcaccagcggacaagaaaaaattctacatcgaaacagaacgagcagagagcttaaaacaagcaatcatgatgagctatgatgaatgggggccagaaggacaaggcatcaaaaacatagcaagccatgaacactcgatgttgacattgctcaaagggcattga

SEQ ID NO: 128830 - DNA, 570 bp, Enterobacter cloacae
gtgattgattccaccgggatgaaggtctttggtgaaggcgaatggaaagtcaaaaaacacggcaaagaacgccgtcgtatatggcgaaagttgcatctggcagttgacagcaacacacatgaaatcatctgtgcagacctgtcgctgaacaatgtgacggactcagaagccttcccgggtcttatccggcagactcacagaaaaatcagggcagcatcggcagacggtgcttacgacacccggctctgtcacgatgaactgcggcgtaagaaaatcagcgcgcttatcccgccccgaaaaggcgcgggttactggcccggtgaatatgcagaccgtaaccgtgctgttgcgaatcagcggctgaccgggagtaatgcgcggtggaaatggacaacagattataaccgtcgctcgatagcggaaacggcgatgtaccgggtaaaacagctgttcggaggttcactgacactgcgtgactacgatggtcaggttgcagaggctatggccctggtacgagcgctgaacaaaatgacgaaagcaggtatgcctgaaagcgtgcgtattgcctga

SEQ ID NO: 128831 - DNA, 1065 bp, Enterobacter cloacae
atgatagagatcgtcaaaagccgcgcaccgtcggtccctgtaaaggccgcctgccaggcgcttggcctcaatcgaagcacttggtaccttcgtcatcagccagcggaaaccaagcctgtcacaccgccactgcagcgcccccaaccacgggccctgagtgttacagagcgacagactgtggtggaactcatgaacagtgaacgcttccgggaccaaccgcccaccgagatttaccacacgttactcgacgaggggcattatgtgtgctcggtaagcaccatgcatcgactgttgaggtcgtcgcaatgcaacggtgatcgccggcagcaggtctcccacgggtcccagcccattccgcgcctcaaggcttgcagacccaatgaagtctggacctgggacattaccaaactgccactgaagttccgtggcatctacctgtcgctgtatgtggtcatggatctttacagccggttcattctggcgtggatggtgtcacgcaaggaaaacagcggattgtccagacaactcattgccgaggcgcatgatcgctatcgcatcagccatccgttgacgctacaccaggatcgtggagcccccatgattgcacaaacctatctggatttgctgggcgagctgaccatcacagccagtcactccaggcctcgtgtcagtaacgataacgccatgagcgaaagtcaattcaagaccatgaagtaccagccggactacccacggcgattcgacagccttgaccatgcccgtcgctggtgcgaagaatatgtcggttggtacaacttccagcattaccacagcgccctggccggattcacgccatcccaggtttttacagagcagcacctgagcattgccaagttacgccaggatgcgcttgatacacagtaccagtctcacccggagcggttcgtcaaggggcgtcctctcgtcagactgccacccgctgaggtgttcatcaacccattgatcaatgaggacaacgttccggacccccacgcagcagtgaacttcccgacgctaaatcgttgcaaaaataagttatcttcctag

SEQ ID NO: 128832 - DNA, 405 bp, Enterobacter cloacae
atgccgaagcccacatcaaaactgcctagaccggaagtgatacctgacccgaagctcgagaagcggtcacgtcgagcgtttcctaccgagtacaaacttcgcattattcagcaggccgatgagtgcaaacatggagaactgggggaactactccgccgggaaaaactctatcacgcgcaacttgcacagtggcggcgcgagtttgctgaatccggtgtcgccggattggccaagacagccccaggaccaaagccgctcatgacggctgagcagaaacgcattgcccaactcgaaaaagagatcgaaaggctcaaaaaacaggtatttatcaaagaccaatgcctcgatctccaaaaaaaagccttggcattgctgaacgggctggagcaggagtcgatgccatga

SEQ ID NO: 128833 - DNA, 669 bp, Enterobacter cloacae
atgccaccgagtaacgatttgaacttgctgaccatcgaacagttattcagcgaaaatagccattatattattcccatttatcagcgtaactatgcttggggggccccggagatcgagcagcttattagggatattgccgatgcttctgagcatagggctgagcagaagtacttccttggaagcttggtcgtgtatgttcgagataacactgatagcgcgcatccaggtaaagtgatctatgaaactatcgatggtcagcaacggcatactactctgtcgattttgctggcgtacttaacaaatgttgttcactgcagcgaacaagagttaagccggcttcaccttaatcttggttttgacagccgtcctaaatcaacgaaaacgcttcaaaacctgtttaagccagcagaggattttgatccagaagaaccttcgatcagagctgcgtttaccgttatagaacgctactttgagaacccgaccccgcccatagatatccccgagttttttcagtatttgctcaaacatgtcaccatcttgcgggttgcggtgccaaaagataccgacctcaaccactactttgagatcatgaataatcgaggggagcagctagaaaagcatgaagtgctgaaagcgaatttgatgtcagttttcaacgggctttgttga

SEQ ID NO: 128834 - DNA, 249 bp, Enterobacter cloacae
atgtacagcgcatgttttgatctcgcggattacgctgaggcaaagaaatggggagagacgacattacggacacgtggatcggatatagacactgcacccttaatcgatctcggcatggtctgttatgagttgaatcaattcgaggaagcgtataaatattttaacgatgcttataactacggcaaagagcgtgcgtttcaggatagacctaaaaaatatctagagttctatctgcgcaaaaggggataa

SEQ ID NO: 128835 - DNA, 150 bp, Enterobacter cloacae
atgaaagaccttgaaaacccaaaaattgaatctgaaattaactcctttgttgaacaaggaaacgagtttcacgatgataaaaaatacgtcgaggctttagagcaataccaaaaagtctggcaagctcttcctgagccaaagttcgaatag

SEQ ID NO: 128836 - DNA, 228 bp, Enterobacter cloacae
atgtattttttagaaagaaaagatgcagagaaaatgctctttgaattcttaaagagaactttaataaaagaatctgatatcgatgagttaatgagcatggcaattaaacatgagtccggccctcctatgaaaggcataatgtttaaatatgataaaatggagagaaatgaactcaccgcacaagatagagatgaccttagtacattgatgcatttttatggtccgtga

SEQ ID NO: 128837 - DNA, 204 bp, Enterobacter cloacae
atggataaaataatatttaataattatggagtgatccttatcgagagagaagggcgtttatttattaggttttattcaggggggatggttatgaaagaggaggaggaagaagtgagtattgatgcggctaaaaaagttcaagtgagtgaaaaagatgcttgtgaggttttaatttctatcgaaaatagaaaaaataaagtatag

SEQ ID NO: 128838 - DNA, 276 bp, Enterobacter cloacae
atgtgttttagccacgcaataaaaaaatcaaacgttaaacaagaagttcatcacgtcgccatctttaacgatgtaatctttcccttccgcacgcatcttgcctgcttctttcgcaccttgctcacccttgtaggtgataaagtcttcaaacgcgatagtctgcgcacgaatgaagcctttctcgaagtcggagtggatcttaccagccgcctgaggcacagtcgcaccgacagggttggttcacgcgcgcacttctttccgcccgcggtgaagtag

SEQ ID NO: 128839 - DNA, 366 bp, Enterobacter cloacae
atgattgcttacttaagattcattagagaaaacaacgcgctcgaatggattcactgttcaagaaatataagtctaaacatacctcgcttagatatcgctatggtcgatcctacacgccagttagtctttgcattaagcgaaccaaaatcattaccaaccgttttgaccatcttcaatgctcatggcgaaaaactattttggtctgcacctcctgaaggcgcgactttttattacttaacattcaacctgtcaaatgaagtggtcgttgtctgtagttatccagtaaaacaaaatggctggcatgattggttttattcctatgatatgaagcgtaacgcattgtctcgatcaggccctgcgtattaa

SEQ ID NO: 128840 - DNA, 372 bp, Enterobacter cloacae
atgactttaattaattttcagaaaagaaaagaacttatccatgatgggcttgaagatgacttcttaaggaacgaaaaagaaatatcctgtccatgttgtgatgctgtcgttcgtttcggtttatataactctaaaagttttgataagcttgaggactgcaaaaaaacaaaaatggtaagtaagatgcgaggcgtaaagttatcagatggtttaatcccgggctatagatacaaagaaagcccactaaggatatcagaaaaaaaatgttcaaaaggaatccatgatatttttgtcatctttacttataaagagatacaacccgctcgttatgaatcttatttaataggtgtttttaatagtaatgatgtttag

SEQ ID NO: 128841 - DNA, 834 bp, Enterobacter cloacae
atggcagatccagcttgggtgggagtaggaggtcttgttgctagcacattatctgcctttgcagcttatttagcgatacgacaaaacattatccaacggagaatagcaaataaggttcaaataacattaaaaggtgtcgaggttaacctagcgagaagaaaaataataaaatttattgaccttacaaatggtagtagtgagttcaccataaatccaccactcattaacattgggttagggccagcgttaaaatttgaatactcttgggactttgattacttcaaacattttaagaagatcggattgaaatatgtaagtgatgaaaaaaacttaagcacaaaagagtatttagactatatccattcaaatagttacgcatttcaatattcaaaggagattaactcagaactcataaatttgttaggaaatggtaaaactgcttggtttagccatgccaataaatataaagatgtagattacattttgccatggtcagttagcagcaaagagacatatttaacattaccaaatataattccaatgcttttgacatattatctttgggagcactcaaagtctccgattggaatgtacttgcccattgtgggccccactttaacattaagttatgaagatatcactggtgtaaaaagaaaggaggtgtttacctccagttttgtatgtaccagaactagccaaaaaaacgatactattgaagccggattcagattaactttttcaccaagtctcagtagaacagcgcaacgaattcaaagaatacgtaaaagctacgcagaattcatggatgaacatgaccacaataaaaacaagtag

SEQ ID NO: 128842 - DNA, 918 bp, Enterobacter cloacae
atgaatcaactgcaagaaatcattcagatactcagttctggtgatgaaggcacaactaatgctctcatgaaaacgaagatccttctcttctctatcgggaagaaggagcttgcggcctgggtaaaccatgaaattgatggttatcctgattcagttcccctacccgattatcgatttgttggcacaagaattcttgcagatctgaacaacagcgttcgtctttatagagcttttccgttgccgattggctatctaagtgaagatgactataacgatgctacaaggagcgaagtgcggctttcaatcagtcaaattgaaaacttggtaacaaacgccggtgatagccaaactcttcagcagccaattcctttggattacgcattagttaaatattgcaaaggtatagataaaggctatgagttaacacgctgttataaagagattccgctacataacttcacctccatattaactcaggtcaggtcgcggctgcttgattttatacttgagctttcggatcaagtttctgaaatttctgacgaaaaaaacatgaaagaacaacttaaaaatattgatacgtcttcattgttccgtaactcaattttcggagacaataccgtcataaacttcggaaatgaaaactcattttcagtaaataacaacgtagtaaaaaacgacattgcgtcattaaaagagtatctttcagctcagggtttccctaaatctgatgttgacgatttagaaattgctattgatgaagatggcccgatagctaacaatcgtggtgaatatggtcagtctgttagtaaatggatggctaacattgcaaataaagcagttcatgggactttaggtatagaaattgcggctgcaactcaagcagcaactgaggctcttaaaaaatattacaatctatag

SEQ ID NO: 128843 - DNA, 504 bp, Enterobacter cloacae
atgatgatctcatatcaggaacttgttcgcaccttccctagaacgggcgcttacaccaaagcggagagtgacgggcgtttccagccaaaaggcaattacaccccggcgggtcaggcttacaccaaagcggagagtgacggacgtttccagccaaaaggcaattacaccccggcgggtcaggcttataccaaagcggagtcggatgcgcgttacggagtcggtaaaacgacgacaggtaataacagcgcttactacacgcatggtaatggcgctgtattcatgcaggcagtaagaaatattgctgtcggtaataatgctaccgtaactgtgacactgccaacatctttccctaacggcattctcggtacagggctcagcttttacggttcgggtggcaacaactccgactcatattatatgtgcacgccggtcaataaaaatcaggtgaaaatccagacccgaaactgtaacggaacattttcacttatcgtgtcgggatattga

SEQ ID NO: 128844 - DNA, 465 bp, Enterobacter cloacae
atgagtaaaattcacgagttaaaaattgcgcctgtccattttaacgctgtgcgggatgagtcaaagcgcgctgagtttcggcttaatgacagggactatcaatgcggcgatgtcctccggttgatggaatgggagcccgaacgcgggtatagcggcgaaagtgtatcggtgagggtcacggatgttacggatttaaaggagtgggctggaaattatgtgatgttgagtattgaggttttgaaagcgccggtatcgaaattgtttgaggtgattggctggaaagagttaagcaagcgaggtcttttattcagaattaaccatgaaattttgcatcctttggggctggccgtttcatttgactctctaaacgatacctcgcccggtgcgctagttgcacccgatggcgtgtgggagttttcggaagattcaattttactggctaagaataaagggtggataaaatga

SEQ ID NO: 128845 - DNA, 237 bp, Enterobacter cloacae
atgactaaattacatcgagaggcaccccggcacagaacctacagtatcaaattgatggcaatcgtccatcgcctacaacagattatgattaatgaaaatttgacccctgccgaactggtcgggtgcgccgaaattgtccgtgatagctacgggaaatgtctcgatattagcaatccgaaaattgaggtgttcgcacccgcgagaggtccgataatcccgccgccacgtcgacgatag

SEQ ID NO: 128846 - DNA, 258 bp, Enterobacter cloacae
atgggcggtaaggactcaaactatcagattgtctatcgcggtgagatgctggagtactttaagccgggcgggtgggtatttttccagcgtccaaaagagtgtggcggtggttactggttaggacgaacataccacgatgtttttatgattgagtacgaacgaccggtttcgctgagcgaggggatgatttacttaacctcgctgaataaggtcgaggccagaagtaacgattttgacgagaatttttcgttgttttga

SEQ ID NO: 128847 - DNA, 624 bp, Enterobacter cloacae
atgggatggcgactggttggagtgattttgttatgcatattgacgtttattgcgggattgatggttggtgggattgattcatcttggatgaacagcggccattcctccgaggttgcgttctggtctatgttgggtgggtgggtttcaggtatagctactgtagcggctgtcatagtttcgcttttcatggcttatcttgcatcgcaggccaatgttgaaaagataaaaatgattttcacgcctaaaggacataatcagtttggagattatgttttcaaaaattcattaacaataaagaatttaagcgcggtaaacactccgattatgaagttttttattcaaatagatggcgcttatgctgatttgtacccgactcagatggggatttttcagttaccctacacacttcaacagcaaggagaaagttgggtgtacgaaactcatttggtgccctcagcaggttgggtgtcagtattttcctcgctggcgcagcaaaaaataatcaagttcaaaagtggctacttcatagttgagactgcattaaaacaacatcgcttgaaaatccctaaagagatgctttcggatattaaagaactcaaagaaaaaatagatagagtaagttaa

SEQ ID NO: 128848 - DNA, 909 bp, Enterobacter cloacae
atggcaattgttgaccttaaccagctcgccgcgcctgatgtcgtggaagtgctggactatgagaccatcctcgcggagcgcaaggcgacgctcgtctcgttatacccggaggaacaacaggaggcagtggcgcgcacgctgaccctcgaatccgagccgattgttaagctgctggaggaaaacgcctatcgggaagttatctggcggcagcgcgtcaacgaggccgcgcgtgcggtcatgctggcttacgctgccggaagcgatctcgaccagattggggctaattccaatgttccgcgacttgtcataaccccgccagacgacacgacatttccccccacgccagccgtgatggaatcggatactgactatcgcctgcgtatccagcaagcccccgaggggctaagtaccgcaggctcaaccggcgcatatcagtttcatggccgcagtgccgacgggcgtgtcgcggatatttccgtcatcagtcctgagcctgcgtgtgtgaccgtgtctgtgctgtcgcgtgaaaataacggcgtggcctctgacgagctgctcgccatcgtgcgcgatgcgctgaacgacgaggacgtccggccggttgccgaccgcgtgaccgtgcagtcagcgaaaatcgtcgactacaaaatcactgcatcgctttacctttaccccggccccgaaagtgagccggtgctcagtgcggcaaaagcaaagttacaggcgtatatcaccgcgcagcaccggctcgggcgtgacatccgaaagtcggccatctatgcggcgctccacgtcgagggcgtgcagcgtgtcgagctggccgcgccggtggccgacattgtgctcgatgacacgcaggcgtcatggtgcagcgagtacagcgtcaccatagggggcaatgatgaatga

SEQ ID NO: 128849 - DNA, 1284 bp, Enterobacter cloacae
atgagccagaaaaccctgttcaaacaaactgctttagcagttgcagtggcaatcgtctcaacgtccgcctggtcagcgggcttccagttaaacgaattttcttcctctggccttggccgtgcgtattccggggaaggtgcgattgccgatgacgcaggcaacgcgagtcgtaacccggcactgatcatgatgtttgatcgccctaccttctctgccggtgcggtttacatcgatcctgatgtcaatatttctggcaaatctcagttcaccggcgcagatctgaaggcggataacattgcgccgaccgcgtgggtgcctaacctgcactttgttgcgccaatcaatgaacagtttggttggggtgcctctgtcacctctaactatggcctggcaacggagttcaataacaactatccggccggtgaatacggcggtaaaaccgacctgacgaccctgaacctcaacctgagcggcgcatatcgtctgaacgataactggagctttggtctgggctttgatgctgtctacgccgatgcaaaaatcgagcgttactccggggagcaaactgctgcactgccgaaaaacagcaataaaattgccagcctgaaaggtgatgaatggggttacggctggaacgccggtatcctgtatgaactggataaaaacaaccgctggggtctgacctatcgctcagaagtgaaaattgatttcgatggcgattacaaaagcggcatcctgagcccagtcaacggtatggtcccaggcgcgggcaccaccattccatggggtacctcgaatcaaaccgtaccgggttcactgtcgctgcatctgccagaaatgtgggaagtgtcaggttataaccgcgttgcgccgcagtgggcaattcactacagcctcgcgtataccagctggagccagttcgaggagcttaaagccaccggcagcaacggccagacgctgttctataaagacgaaagcttccacgatgcttaccgtatcgcgcttggtacgacctattatatggatgataactggacgttccgtaccggcgtggcatttgatgacagcccggtaccggccgataaacgttctatctccattccggatcaggaccgtttctgggtgagtgcgggggcaacctacgcgttcaacgagaatgcctctatcgacgcgggcgtgtcgtacatgcatggccagaaggtgaccttccaggaaggcccgtacgagttttcctctgaaggtaaagcctggctgtttggtaccaacttcaactacgcgttctaa

SEQ ID NO: 128850 - DNA, 1380 bp, Enterobacter cloacae; identical to SEQ ID NO: 115730

SEQ ID NO: 128851 - DNA, 1785 bp, Enterobacter cloacae
atggatattgaaagtcttattgccgcagcaaatcgggcccagcaggcagaagatgcaggtttaggtaattgctcgcggatatggcatgtggggttcttttttgatgggatccatcggaatattgaacaggatgcaccggagcatcgtctcagcaatattgcgcgtttatttcgtgcatttcctgatgatgcacaaaaaacaaacaaagagtaccactcaaaattttatatttctggcctgggtactccttttaatgaaactctcgttgaaaaacttcacactatcatggacagcggtctgggcagtataaaagataatttaaaagaacagcccggtgaaatggctaaagaagcggcctgggattccataaaaggcaacaactggtacgagatattcaaaaatcagggaaagaaacttcttaaccctacagaatggaaaaaactggcttccgatacggcaaagaaagcggttaaaaaagtcagtatcgaagcaaccccctggcttcgtgataaccctgcgatagcagatatgctggtaacgggtgctgatacccgtattgcatcgaccaaaatatcgtttgaagagggatataaggaagccgttaaaaaaagcccggtgcccattaaactcatttctgtctcccttttcggttttgacctcggcgctaccctggcacgtaaattcctggacagtctgctgaaagatatctgtaagaaagagggggataaatacacctaccagggcatacccgtcgatatcgtctttaccggcctgtttgactgctcgcgacgcacgtcggccagcaacaacaacggcgtggattactttatctctgcgtttggcgggccgataaaagggattagcgtgttgctgggggacaagtccatcgatcaggacacccccttgccaaaggtagtgaagaaaagcctgcacctggttgccgcccacgagacccgcgtctggcgctgcctgtaccgcaccggcaataacccggcgcatatggaagaactctatcccgggtgcgcggaggatatcggcgggggcctgacaccggacgaacaaaagcccagtgcggaactctgtcgcgtggcgttgcacagaatgtaccgtgaggcgaccatggcgggcgtgcctttccctgattttcagacgctgaatgaaagcaaccccgtagttgctgaatatttcatcatccaggataacgttaaaaaccggtccgtccttcaatgggcagaagcataccggagtgcattgcccttttcctcattaagcaccgcatgccagaaccgtcatctggacagctatatcgactggctgggccgtcagtactatcagtaccgcacggaatgtatgaaatatgaaaaacagcgcggggacacgctggcctctgctggcgcatcggcagggtttgcaggcatcacgcaggaggcgaaagagaccgccgggcagtacgcaaatgaactgtcagtattacaacaaaactggggctggcttgatgacttgaaggatgcggccataagaatgcgaaacagtatggaacaggaccccatggacaaacgcagggaaatcgttccgaacgtgtacgggcctgcgctgtggcgtgcgaagcgatttcttgactattcccatgcagcatacctcggtaagccccagccgattcccatagatacggttccgccagaaatgtatgcgtggtttgtacacgacctgcaaaccgttgaaaaaggaacgggtatctcgcaggacttttttgtgattcgctcaatggaaatgcctaaagcctga

SEQ ID NO: 128852 - DNA, 519 bp, Enterobacter cloacae
atgggttttttcagtgcgtataaaagaatagacggtgcggttaaccggggttatgcccgctggggaaaatggctctggggtgcactgttactgccggtagtgatatatcttggctggtcggtgtgggctgcggtctggggaccaccatcggggccggtaacgctgataattcacagtgaaattgacaggccaataagaggatttagtgtaaatggcgtggcgggtgcgaatgcatatgcttatggcggaggcggagccacctgctgtggaagcatcagtggagataaagcagaaattatctggactgtcgattacacacttgcgcaatataaagcgggtgtgcgaacagaagtccacaaaaaaatatttcccatgccgcagcgccagtggggcgaaaactatcttcatgtctatttcctgcctgaaaataatgtccggttatggtggagtaccggattcaatcatcctgactctcacgatattaaagaccaaactacagaattaaataaaggaagataa

SEQ ID NO: 128853 - DNA, 828 bp, Enterobacter cloacae
atggatgtcacaaaaatgatgcatatgctacctgaatcaactcacacccatctctttctgttgctggaaggtggtgcgcaaacatcggacgcttttcaggctttttataacgaacatgcgtcatctctgtattcactttatctccatccgcaagttgcagaattcagaaactatggcccctggttatttgctttagaaaataaggaggcgctacagcgttatatttattctatgccaggtttagtggctgttattgcctcttcacgttcaggatgcgctttagccgttcagctttccgcggcatgcacaattatttcgcctgatggatcagcgactttagtgcgtttttatacccttgatgccatgaatctgctgacgagctgtaacgatcgggaatggtacagtatgttattcagaggggtttcacagtggtggacatctggagaaaatggatggcatccagtagatattcccccttcacgggtaataaatgcgagagacagcaccatacgattgaataaagaagaatggctatatatcgcggatgaaccggttgtgactagtgtgttaaccgcatggcaaaagttgccctccagcaagcatttttctccttgcgcacaacgcgatatggtcaaaaaagcactgagcaaagcctgcgaagcgaaaatgaaagcgggcacagaacaaaaactgtatgcccttttttatcttactgctggtaaaaagttcgtggagtctggatcgatacaatctgcattagaagatgtggctcagggaaaaatctcgctggagcaagtcttaaaaaataacattcaacatcagggatga

SEQ ID NO: 128854 - DNA, 1341 bp, Enterobacter cloacae
gtgaccttccggggagcgcgggattcccgcctgcacgtgtcggtatggggcatgccctacactgagcgctactgtttccgcccggcggaaatcccgcgcccggaaattcacggcacgcttccggcccgcattgagagccgggagaagaacgatatctacgctcacctggacccgcagggccgctaccgggtgaagctggactttgaccgggaagggacagagccgggctacggctacctgtggctgcggatggcgaagccgtatgccggagagacgtacggctggcacaccccgctcaccgacggcacggaagtggcgatagcgtacagcaacggtgatattgacctgccgtatatctcccatgccctgcacgactcagagcacccggaccccgtcacccgcgacaaccacacccgcaacgtgctgcgcacacccgcgaacaacaagctgcggatggaggataagcgcggcgaggagcatatcaaacttgccacggagtacggcaaaacgcagcttaacactggccacctggtggatgctcagggaaagacccgcggtcagggcacagaactgagcaccgatgagtggggaaccctgcgggcagggaaaggactgtttgttgctgcggatgctcagatgaaagcgcagggtgatgcgctggacagggatgccgcgctgaaggaaatcgaccggcttaatcagcaactgcaacagctggaaatcgcggcagagcaggcgcaggcgctgaaagctgacgtggacagccagatacagatgtttgagcagcgcctgaagccccttaatgaaaccctgctgttctctgccccggaaggcgttgccgtgaccagcggagagcacatgcagatgacggccacaaaaaacgtctccatcaacgccgggggcgatatcagtaccggcgtcatgggcaacatgacggcgctggcgggggaaaagctcgggctgtttgccagaaccggacaactgagcctgaaggccagtgaaggcccggtggagatgcaggcgcagaacgggaaaatgcagctgttcgcggagaaaaagctcaccctgtcgtccgcgagtgacatcacgtttgcgggcaagaagcgcatcaccctgattggtggcgggagctacctgcggctggaggcggggagaattgagtacggcacgacggcgatgtatatacggaaggttaaacgaacaatggcggcagccccagccacaatgccgctatccataccgcttctccctggtcagtatccaccacttaatggcaagatatgtattgagtgtctcctcaatgccattaaagccaacgacactatcgtgcagggagcgtag

SEQ ID NO: 128855 - DNA, 177 bp, Enterobacter cloacae
atgtctaattcttcctttcagtccgaaatccctaaagcgcgtattaatttaaaacttgatttgcataccggtggtgcgagcaagaaaacggagctccccctgaaattgctcgtggcgggcgacttcagtaatggtcaggagtctgccccttgtctgagcgcaaaaaagttgatttga

SEQ ID NO: 128856 - DNA, 129 bp, Enterobacter cloacae
atgtccccgttctggatgctaaatgttctgaacagcgccgaactggtactggggcagtatcagcgcctgcagcacagcccgccaagtactgtggttccgaccttaatgggggccgccagctgtcagtaa

SEQ ID NO: 128857 - DNA, 240 bp, Enterobacter cloacae
atgcagcaattgagctcaccgctgaagactcacgccagaccttcccccttctcccgggatagccgcctgcggcagcatgtcattcgtcatcgcgctgccaacctgaccattcagaaccagcggcacaacatgccgcatttctttacgcaactggctgatttgatagcgggggaccagcagatgattggtaggtgcttggctgtccgcgtgtctccggggtcagacactgacctttactga

SEQ ID NO: 128858 - DNA, 1215 bp, Enterobacter cloacae
atgaaaatgaaaattggggttctgattgtgtcggccgcaatcatcgccactgccgggattgcgtttgcccgggatagtggcggcaacgatgagccggccgcagcggccgcacctatggctccccaggttcccgtagccgaagtgctctcgcgtcagatagtcccttcggcagagtttaccggttcattggcggccccaaaaaccgtagagctacgcccacgcgttggcggtgctatcgacgctgtcagcgtacctgaaggcagcatagtacgtcaggggcagttgctgttccaaattgatcctcgtccattccaggtggctcttaacagcgcgcaagcacgactcaagcaggcagaagcgctggctatccaggccaatcgcgattttgagcgagttggccggctggtgaacaatggcgcggtatcccggaaagattacgatgacgcaacttctacacgtcatgctcgtcaggctgaggtgcaagctgcaaaggccgcggttgcggcggcgacactggacttgtcttattcgcgcgtggcggcaccgattaccggccgtgtggatcgcatgctggtgaccgagggaaatctggtcagcggcggtggtacgggatctgcgacgctattgacaacgattgtttccgtcaatccgctatacgcttactttgatattgacgaggcgacgttccttaattcggtcagcaaggcacgtcctgacgccgcaaataaggttgaagagcgtttacctgtacatgttgggctggcgacagaaaaaggtttcccgcatcagggaacgctcgattttgtcgggaatcagatcgaccgtagtaccggtactgtcagggtacgtgccgtaatccctaacgaagatgggaaactgacgccaggcgcctttgcccgcgtgcagctggccaccggtgcagcacatcaggcgattctgattgacgatcaggcgatagggagcgatcagggacgcaactatgtcctggtggtgggtgcggataataaggcgcagtatcgcccgattgagctgggcgcggtggttgatggtttgcgcgtggtcaagagtggcctgaaagccggtgagaacattattatcaaggggctggtgcgtcccggtatggcggtgacgccgcgtttgaccccgatgcaggcttctggcgcgtcggttagcgagggggaaaaagccggctccgttgaagggggaggccaataa

SEQ ID NO: 128859 - DNA, 3174 bp, Enterobacter cloacae
atgaaattcccacacttcttcatccagcggcctattttcgcgattgtgttatcggtgtttatgctgatagctggcgctctggctttctttcagcttccgctgagtgaatacccatcggtaacaccgcctaccgtgcaggtttcggcaagctaccctggtgctaaccctaaagtgattgctgacaccgttgctgctccactggaacaggcaatcaacggggtggaaggcatgttgtacatgagttcccagatgtctgccgacggtcgaatggtattgacgatttcattccggcagggaaccgaccccgatattgcgcagattcaggtgcagaaccgggtttctcgggccttgccgcgcttgccgcctgaggtgcagcagatcggtgtcgtgacggagaaaacgtcaccggatatcctcatggttgtgcatatatttgcgcagggcgatcgctacgatccgctttatgtttccaactatgccatgttgaacgtgcgtgatgagctatcacgcttgccaggtattgccagcgtcacgcttggaggcgagggtgaatacgcgatgcgtgtctggctggatccgaccaaagtcgcttcccgtggtttaacggccagtgatgtgactgctgcaattcgtgagcagaatgtccaggtcgcggccggttctgtcggtcaacagccgaacagctcttctgcctttgaagtcagtatcaatgcccaggggcgtctgaccaccgttgagcagtttggcgatattgtgatcaaagctggcgctgatggccaggttacccgcctgcgcgatgttgcgcgtctggagttgggatcggacaactattccctgcgcagcctgctggatgataaaaatgccgtgggtatgcacatcgttatgacgcctggcgccaatgcgctggacgtctctgcctcggttcgggcgacgatggcgaggttgcaggccaacttcccggaaggtatcgaatatcgtatcgcttatgacccgacagtgtttgtcagcgcctcgttgaaatcagtggcaatgacgttgctggaggcaacggtgttggtggtactggtggtgatgctgttcctgcaaacctggcgggcttctatcatccctctggtcgcggtacctatttcgttggtcggtactttcgccctcatgtatttgttcggcttttcgctcaacacgctgtcgttgtttggtctggtgttatcgataggtatcgttgtcgatgatgccattgtggtggttgaaaacgtcgaacgacatattgcgcagggccgttctccgaaagaagcggcaagaagggccatggacgaggttaccggccctattttagccattacttccgttttggcagctgtgtttattccttcagcgttcctgtcaggattgcagggggaattctatcgccagttcgcgctgaccatcgccatttcgacgatcttatctgcgatcaactcgttgacgttatcgccggctctggcatcagtgctgcttagacctcatcaggatatggcgcaggccgacaggttgacgcgcgtcatggatcgcgtattcggtggtttcttccgtcgctttaacgctttcttcgatagattgtcgaacaactacgttggtgcagtccgccgggccgtacgcggtagtatcatcgtgctggtgctgtatgccggtttcctgggcctgacattgttggggttccagcaggttcctaacggttttgtgcccgctcaggataaatactatctggttgggattgctcaattaccttccggcgcttcgttggatcgcacggaagccgtagtgaaagaaatgtccagaattgcgctggcagaacctggagtggaaagcgtcgtggcgtttcctgggttgtcggtaaacggcccaaacatgcctaactccgcattgatgtttacaatgctgaagcccttcagtgaacgtaaggacccttcgctgtccgcagcagctattgccggtagtctgatggggaaatttagccagatacctgacggctttgttgggatcttccccccaccaccggtaccggggctgggcagtatgggaggatttaaactccagatcgaagaccgggcagggcttggctttgaagaactgacccgtgttcaagggatggtcatggctaaggccatgcaggcccctgaactggcagggatgatggccagtttccagactaacgcacctcagttgcaggttgatatcgaccgcgtgaaagccaagtctcagggcgtcgcactgaccgatatctttgatacattacaggtgaatctggggtcgctgtatgtgaatgactttaaccgcttcggtcgtacgtatcgggtgatcactcaggcagatgcgcaattccgtatgcagcctgaagatatcgggttgcttaaagtgcgtaatgccacgggtgaaatgatcccactgggaacgctggtgaacattacccgtacctctggaccagaccgtgttatgcgttacaacggttatccgtcggcagatattacgggtggcccagctccaggctactcctccggacaggcaacggcagctattgagaagatcgttagtgaaacgctgcctgaggggatgacattcgaatggaccgatctgacttaccaggagaagcaggctggcaactcggcgctgtatatcttcccgttggcggtattcctggcgttcctgatcctggccgcacaatacaacagctggtcactgccgtttgcggtgctattaattgccccaatggcattactttccgcgatcgccggggtttggctatcgaatggagataacaacatcttcacgcagattggttttgtggttctggtgggcctggcggcgaaaaacgcaatcctgatagtcgagttcgctcgtgccagagagagtgaaggcgtcgatcctctggctgccgtcctggaggccgctcgcctgcgtctgcgcccgatactgatgacttcgttggcatttattgcgggggttgtgcctttggtgatcgcgagcggtgccggtgcggaaatgcgtcatgccatggggattgccgtgtttgccgggatgctgggggtgacgctgttcggactcttgttgacgccagtgttctatgtcgtggtacgtaagctggttattcgccgggaaatcaagcaggcacagcgggcaatcagtgattcacgaccatga

SEQ ID NO: 128860 - DNA, 1470 bp, Enterobacter cloacae
atgaaagcagagtatgaaatgaaccatcgtattaataaactccaggtgctggtgatggcggtggtattggccggttgtactatggcgccggactacgaacggccttctgcaccaacgagctcgagctatccttcgggagcggcttatgctcagggcacggtttcacgggttcagactgccgtggctgatatcggttggcacgatttttatcgtgatccgttgttgcagcaattacttgaggtcgcgttggcaaacaaccgcgatctgcgcaagtcggtgctggatgttgaggccgcgcgggcccagtaccggatccgtcgtgccgatatgttgccaacactgaatgtggatgcgggctctgctatgcagcgtctgcccgcagatgtcagcccgagtggttcaactcagataacgcggagttatgacgttaatggtgcagtgtcagcctgggaactggatttgtggggacgggttcgtagcctcagcgatcgggcgctggcaacttacctggcgttggatgaaacacggattgcggcaaggctgagcctgctcgctgaggtgacaaacgcttatctgacgttgcgtgcggatcaggagttgctgcaactggctcacgatacgctgaccacgcaaaagaggacttacgcattgacccaggcgctgtttgatgcgggtaatgcaacgcaaatcgatttgcggcgtgcagatattgcgttgcgtactgcggaagtcagtcaggcggcttatacgagggtggcggcgcaggatcgcaatgcactggttctgcttttagggcagccattgacggccgaactctcggccagcctggataaagcgaataccttgcccgatgacatcatcccttcagcgttgccggcgggcttgccggccgaattgatggtgcgtcgtccggatgtccgtgcggcagagcagcaactgcgtgcagctaatgccaatatcggggccgctcgcgcggcattcttcccggcaatcagtttgacaggatcggctggtacggccagttcgagtctggacgggttgttcgatccggggtcagcggcctggagttttgttccgcaaatctcgttgcctattttccgggggggcgcgctgcgcgccaatctggacctggcccaggtacaaaagcgcatcgaaattgcgaattacgagaaggcgattcaagttgctttccgcgaggtggctgatggcctggcgggcagacaaaccctggatgatcaattccgttcagaacaattgttggtgcaggccagccaggctaactatgaattggcctcacagcgcttccgggccggtattgacgataatctggcggagcttgacgcacaacgagctctgttcagtgcgcaacaaactctggttcaaacccgactggcgcgaatgagcaatttggtcaatttgtataaagcgctagggggcggatggacagaaagctctccggctaagccataa

SEQ ID NO: 128861 - DNA, 237 bp, Enterobacter cloacae
atgagaaatatcgccttattccttacggtatgtaatgggattgtcagggcatcgtacaatagcgtgttcgacagcgtgatgaactactgtccagaagagcttgaccgtacgctcgatataattctcgatagcgtggaggctcatataaaggtctatgtgtcggtcaagaatcttgatgccagtatggtggtaaaagtactcaatgaagtaatgtcagaaaatattattgccatctaa

SEQ ID NO: 128862 - DNA, 207 bp, Enterobacter cloacae
atgtactattacactttcagtggggtggattataagcgcaggataatagcatatgaggacagcattaaaattcattacctttccaaatcctttatctatattctcggtagtataaaaccatgtatagcgaaagaaaaccttagcatattaaataagactgcacggactatattcccgccgtggttcttctgcccccataaacaatga

SEQ ID NO: 128863 - DNA, 786 bp, Enterobacter cloacae
atgatggcaacgtgttcgtctgtaacagggtgtactatgatcctgctggcagcgacctgcgggtccgctattgccgacagcggcaatcaggatggagtgacggtggggataataggagaaaacgccccccgctacagtggcgcggataagcagcactggacagtgatgccttccctgcaggcccgtaaaggcgcgtttttcttcggctcaacaaaaggtatcggttatgacctgcagacggataatgggctctattttgaaaatgcgttcggatacagttttggccgtgccgatcaaaattcatcgtggcgcgatggttctgacaaactgaaaggaatgggaaacatccgtggtgcactgaacacgcaggttgctgttggctggcaggtgaacagctggtttaccccggaaatccgtgcaactctgccgctgacggattcacagggggtacagtaccaggcctcgctgacgctcgtgccctggcagaacgacacagatacggttgccttgcagggcgcggcactttttggtgatgcccggtacattaatacctggtacggcgttaatgctgcccagagccgcacaaccggttttcgggaatacaaccgtagcgcaggattttacgctacgcagaccaccctgagctggcagcatcagtttaatgaacactggggcaccctactgggcgcttcatatgcctggcttgcggataaaaccagtgacagtcctgttgtgtcagcgcgagacaatatcagcggttttgctggtatcaactggacattctga

SEQ ID NO: 128864 - DNA, 696 bp, Enterobacter cloacae
atgaacacaaaacgtattctgattatcgaggacgaccgggatgcggcgaatgttctcgaagcctatcttcgccgtgaaaacttcggggtcatactggcccatgatggaaaagcaggacttgaagccgcccttacccagcatcctgcacttattctgcttgatatcatgctgccgggtatgaccggaacagaaatactcagccggctgcgccgcgaatccgatgttcccgtgataatggtcaccgcaatgggcgaggctccggaccgtatcggggccttacgcttcggtgcggatgattatgtcgtcaaaccttatcatccgggtgaggtcgtggcccgggtgcaggcggtgttacggcgtggggcggcagcgcatactgacgctgaaaattatcgccgggtgggggccgttgaactcaaccgggacaccatgtcagtcgctattattcacgatgaaaaccgggtgcaccttgagctgacccccaccgagttttcactgctggacatgatgatgacccgcccccggagcgtctgttcccgtcagaccctgcttgaacactgtctgccggagagtgatgccctggagagggtggttgatacacacatctataacctgcgccgcaaactggaaaaagcgggggtcagcggtgtgctgaccagcgtgagaggggtcggttaccggtatttgcagccatga

SEQ ID NO: 128865 - DNA, 1167 bp, Enterobacter cloacae
atgaataaaagagagtcccgttcattatggcgctggatttgcgtcagggtgttgtcgctggcggccggcagtgtcgtgcttatcgccctgtgcatgtggctgcgttttgccctgctggatgcctgggtacagaatcggatgccggagccggtacgacaggaatttctgcatctgcgggaaaatcccgatcttaaccgcatccgttaccatgaaattattgatgactggtacggactgcagttctcagacccgtccattgcgtcaacagactggctgacgctgggagggctggtcctgtttgtgacgccgctgataattatgctcggtttgctggccgcccgacctctcgcccggcagttcggtctgctgacgcgggcctccgcagcgatagcgcaggggcgttttaccactcgctcaaaactggatgcaagtgcgccctctgaattgatgttgtttacgcagaacttcaataccatggccgaaagacttgaacgttatgaccgggaattacgggcatctcatgttgcggccgcgcatgaactgcgctctccactgacggccgcggtgggccgtctgcagggaatgatggacggcgtattcccgcctgataaggcgcagatgaatatggtgatgaaccagctgcagagcctcagccgtctgattgatgatttgcacctgctctcactggctgatgcagggcaactcacgctgaataaacaacgcttctcacccgccggattactgcaggaaaagattgcctggctacggccacaggctaccgccgggcatttcggttacgacacggatatccctccgggagaatgttgtgcggacccgctgcgaatcggacaggtctttaccattttaatggagaacgctctgcgttacgcgacggaaggcgggaagcaaacgatacaggggtacgttcagtcaggctactggacgttctccttccgggattacggcgcgggcgtcgaaccggattttctgccggtgatgtttgaccggtttacccgttctgatgtttcccgttcccgtcattcaggaggcagtggactgggtctgtcgattgccagagccatttgtgagtctcacggcggaacgctgaccgccagtatcccgcaagaggggaacggactcctgtttcaggtgaaactgcccgtatga

SEQ ID NO: 128866 - DNA, 1116 bp, Enterobacter cloacae
atgccatcatattcattcatccccctgatagcatctttgcctttctggcgacggggctcagccctggttttcgccctcgccctgcaactgaccggctgtgataatgagccggtatcccgccatgtcccaccaagaccggtgatgaccacggaggtatctgccggcaatcatggtgggcagacgcttatgaccggtgaaatattgccccatgaagagacgattatcggcttccgtaccgatggccggatggtgaaacgactcacggatgtggggcagtcagtggttgccgggcaggtactggctgaactggatgataccgatttgtgtaatcagtaccgcagtgctcaggcggtagtacaggaagccggggcaagcgtcaggcttgctgagataaacctgcgacgcatgacgctgcttgccccgcagggtgcggttgcccgggttcagcttgacgaggcccgcacaaaccgcgacacggcaacagcaaaactgcagagcgctcaggccgacctgagcagtgcaacggaccgtctggggtatgcgcgactggtctcaccggttaccggggtggtcaccaccgtcagcgccggtccgggacaggtagtgaccaccggacaggaaatcctgcgggtggcgcagtcaggggcccgtgatgcggtcttcagcgtaccgggggctctggctgacaccctgaaacagcagcagacactcaccctgcgtatggcggataacccgtcggtgtcggtaaccggaacgctgcgtgacatcagcccgcaggcagatacacagacccggacctggcgggtacgctatgaccttgagaatgcacccgcagtaatggctatgggggcgacggtcaccgggtcattaccaatgggcggcagtgatgtgtttcaggtaccggcatctgccctgacgaggaaagaacagaagccggcagtgttcgtggtggacaccgacaaaaatcgcctgcgcctgacacccgttgacattgcggcctatatgaccgattcggtgctcatccgaaaagggctgacagctggtgaacaggtggtcactgccggggtcagtcagttacgtgacggggaaaacgtgctgacggaggaccaaaaatga

SEQ ID NO: 128867 - DNA, 3060 bp, Enterobacter cloacae
atgaaaaatgttatgcacgcttccgtcggttttaatctttctgcctgggcactggcccaccgacaactggtggcttttctgatgctgatgatcacggtgacaggcgtcatgagctttctgaatctgccgcgcagcgaagatccggcgtttaccattaagaccgccgtggtgtcggcacagtggccgggcgcaacggtaaaagataccgtcagtttcgtcaccgacacgctggagaagaagctccaggaaatcccacatctggattatatcgagagttacacgcgtccgggctcgtcggtgatttttgtgaacctgcgtgatgacacaccgccgtcagaggttgcgggtatctggtatagcgtgcggaaaaagatggacgacatccgggcatccctgccggacggcaccaccaccccggccgtggatgatgaattcgatgatacatacggcacaatttatggcttcacgtcggacggcttcactccccggcagttacgcgataccgtcgatgatatccgggcatctctgctggctgttccgggaacagggaaagttacgccgctgggtgacagcgaacaacaggtggtgattgcttttgatccactgaaactgtcgggaatgggactcgatcttcagcaggtgacggcggctctgcaggcacagaatgccgtcacgcccgccggacgtatccggacatcacaggaaaatatgtcggtggaagtcagtggcgccttcacatccgtggacagcctgcggcaaattgtgctgcataccggaaaccgttttatccccctcaccgatttggccacggtcacactgcagcaggcagatccgccctcaccggagtttagggttaacggtaaaccggcactcgggctggcgatttcgatggctcgcggtggaaatattattgattttggtcgggcgctgaacgcgacgatggacaggatccgcacgcatcttccttacgggatcagtgtggagaaggtggcagaccagtcggccgtagtcagtgacgcggtgggaggattcgtccaggtgctggttgaggccgttattattgtgctggccgtttcttttttttcgctgggcagccgggcaggtctggtggtcgctgtggccattccgctggtgctggccatgacatttaccgggatggaattggccgggatagggctgcagcgaatctccctcggtgccctgattattgcactgggactgctggttgatgatgccatgatcaccgtagaagccatggtgtcgcggcttgaggctggcgatgccctgagtgtggccgccacgcaggtatttcgtaccaccgcgttcccgatgctgacgggaacactggtgatgattgccggatttataccggtgggatttgcggaatcgagcgcaggagaatactgctactccctgtttgtggtggtactgacagcgctgctgagctcatggctggttgcggttcttttctcgccgcttaccggcgtctggttactgccggaacagcattcacatcagtcacataagcacagtttctttcaccgtcattatacccgcctgctcgaccgggtgatgcagcaccggcgcaagacactcggttgtgccctggcgatactgatattgtccgggggcggggcccttctgatgcagggtgagtttttcccggcgtccgatcgcccggagctactggtgagcctgactctaccgcagaatgtcagccaggcacagacacaccacgacgtcctgaagtttgaagcgaaattgcgcgataatcctgatattgaccattactcaagctacatcggttccggcgctgtacgtttttatctgccgatggatgttctgctgcagaaagagaacattgcccagctggtcgtagtggcgaaaaatgaagcggcgagaaaccggctgcagaaacagcttgagcagatcctgtcgaaagatttcagtacgctcacaacccgggtatccacactggagttgggccccccggtaggctggccgatcagatatcgggtatccgggccggataatacccgtgtacgtgaactggccacgcaactggcagggatgattgcccgcaatcccgatactcggggtgtcaatctgacgtccggtgaaccggagcgggtcatccgtctgcgggtggatcagacgcaggcgcgtgccaccggcatgacgtctcagtcactggcaggaacgcttgccacgctgttctccggaaccaccgtgaccaccctgcgcgaccgtaaccgccagattgatgtggtgctgcggggaaatgaagcctcacgacaaaacccggcgttactgaatgctctgatgctgacatcatcgaccgggaataaagttcccctgggacaggtcgccacgccagaatggacgctcgatgacccggttatctggcgccggcagcggctgccgtttatcacggcccagtcggataccgcgcccggggtgcgtgcagaaaggctatcatcggcactgtctcctgtcgttgccggtttccgggagagtctgccgccgggttacggcgtggaggaaggcggggtggttgtggagtcggacaaagggaacagttcagtgtatgcggtattgcctgtcacgctgatggtgatgctgttactgctgatgatccagttacagcgtttttcctcgatgttgctggccctgctgatggcaccctttggtctgccggggattgttatggctatgttgccttttggcataccgatgggctttgtagcgctgctggggatcattgcactggccgggatgatcatccgtaatgccgtcattcttattagcgaagtggatgtggggatgaaaaatggtttcactgcggatgaggcgatcaaagtcgccgcgctgcaccgttcacgccccatcatgctgaccgcttcggcggccattctcgggatgctgccgattgcccgggatgttttctggggaccgatggcatttgccattattggtgggctgctttcagccacactggcaacgctgacactactgccggcagcaataagtctaatctttcactggaaaccgtatccctga

SEQ ID NO: 128868 - DNA, 261 bp, Enterobacter cloacae
atggagatgctccctgagaatatcgtgaagggactttccgaggccgaggtgcagacccggctgggtcaatgtggctataacgaagtgcgtgaacagcctccggaccaggtgcgtgctatcctcaaacgtctgctgggtcccatcccctggatgctcgaaattgcgctggtacttgaagtggttctgggaaagacgactgaaccagtgcgcgctcagacaacgacgaaccatccattcacctcattcggaggtcacagatag

SEQ ID NO: 128869 - DNA, 306 bp, Enterobacter cloacae
atgcgtctcaatgcacttttccccaatcttccacctggtaccctggtggttaatctggttggcggatttatcatcggtatggcactggccttttttgtccggcagcctcaccttgatcccgcctggaagttttttattaccaccggcatatgtggcggtatgacaaccttttccaccttttctgctgaggtggtggtgttacttcagaatggcaattatgcatgggctgtcatttccgtactgacgcacgtaactggctcgcttctgatgactgccactggtttctttgtgatgacactgctgtaa

SEQ ID NO: 128870 - DNA, 483 bp, Enterobacter cloacae
atggaagcgctgaatcaattgtggttaccggtggacaaatcatggcggttaaatgaacgtcattacggtgcgcttcagggaatgaacaaagatgaagccactcaacagattggccagaaaatcgtttatcactggcggaggagctatcgtggtatctcccttccgttgccggaagcacctgcttcacttcatcgtgaggcacgttatcgtcatgtgtccctgacggatttgctggggggagaaagtctggaaataacgcaacgaaggttgttgccttactggcaccacgtcattgtcctgcgcgtcgccagtggcgaaaccatgttgctggtcagtcatgctaatacactgcgtgcgctgaccatgtttattgagcagattgatgaaaataaggttcccgatctgcatgtcctgacgggaatccccgtactgtatgaaatgaatgaaaaacgggccatcaccgcacgttattcccttgaatga

SEQ ID NO: 128871 - DNA, 135 bp, Enterobacter cloacae
atgcatcagaagatgggcaccgctaccgatgaacagcgcgattacaacggcactggtatcatccggcagtatattaaaaaaggcatcagcgatcaggaaaaccagacagtttgcctggatccccgttgctgttga

SEQ ID NO: 128872 - DNA, 1287 bp, Enterobacter cloacae
atgagctttgaaattgaatgtatcatcgcaagagaaattctggattcccgcggtaacccgaccgtagaggttgaagtgacttctgtagggggcagtatggcccgtgcctccgttccttccggtgccagcaccggctcccgtgaagccatcgagcatcgcgatgatgacaagacacgttttggcggtaaaggtgttcaggatgcggtccggtgcgtcaataccgaaattaacgatgccctgcagggctacgatgtacgccgccagaaagaaatcgacaactgtctgattgcccttgatggcacagaaaacaaaggccggctgggtgctaatgcgatccttggcgtatcgctggcagtatcccgcctggcggcacaactatcctctaccccgctctaccgctatctgggtggcgtcggcgcgaatctgctgccggttccctgtatgaatatcattaacggcggagttcatgcccgctggcagggcgctgattttcaggagtttatgattgcaccatggggagcctcttccgtacgcgaagctattcgctggggcagtgaggtctaccaggccctgcgtcaggtcctgctggaaaaaggtttatccgccggcgtgggcgatgaaggcggttttgcaccggccgtttcctcaaaccgtcagccgctggagcttatcgtggaggcaattagcaaggcgggataccgcccaggcgaagatatcgttatttgcatggatccggcctccagtgaattctacgtcgatgggaaatataccctgcgtaccgaaaatacccggctcagcgccgacgaaatgacccgctactatgagcaactggtgaaggatttcccgatagtcctgattgaagatggccttgcggaagacgactgggccggctggcagctcctgcaccgcgcgctcggcgataaagttgagctggttggcgatgatatctttgtgaccaatgtgaaatatatccagcgaggtatcgatgaaaacctggccaatgccgcattgatcaaactgaaccagataggcaccctgagtgaaaccatcgaagccgtccagttgtgtcaggataacaactggggaacctttatttcgcaccggagcggggaaaccgtggacagcttcattgcagatatgaccgtcggcctgcgggctggtcacctgaaaaccggtgcacccagccgtggggagcgcattgagaaatacaatcaactgatgcgtattgaagatgaattaggtgatgccgccatcttcgccggtaaagccgccttcaaaaaacgctga

SEQ ID NO: 128873 - DNA, 429 bp, Enterobacter cloacae
atgcaaatttaccggcatgccttgttacttgtacagaatgaaaccgatggtctgctgttgcttgagcaggcagaacgtctggcaaaagagatgggcacccgtattactgtcgggcatctcagtgctgactatagggaactggattataccagtgactcattaaccaaagaccgtcagtcccgcgaagttattgatgcaaaggcaatgcttagccgtctggtggagtccagcagtattgatatcaacgtcaggtccatcgtcagcatccatcgtttccgggacgttgaggccgttgttcagcatgaagatatcgatctggtcatgctggggcatgaaaaccgcctgttcagggttttttcctccttttctttcgaattcatcaatcacctttctgttgatgttctgattaaacatattccagccccttaa

SEQ ID NO: 128874 - DNA, 963 bp, Enterobacter cloacae
atgcaaaataaaaccacattaccgcttaccgcagaatctctctcttttcaaagagataatccgatttatgtcttcggtcatcgaaatcctgacagcgatgctatttgcagcgcgctggttgtggctgactggcttaattacaccggtcgtcccgcaacgccctggcgcctgggggatatcaccccggaaacccgttatatcctcaacgctgcgggtgtttcacaacccgatttactcaccgtcgatctgacagataaaaccgtatggctggttgattttacggatgcagagcagggaccgtcttcgctgatggacagcaacgtcatcggcatcattgaccatcatcgtattggtacccttgttacccgcaatccaccggatgtctgggtgcgggcggtaggatgctgcggaacagtaattctctcaattctcatgcatgacattccgatgccgctgactgccgctcaggctgtgttgctgatgggggcgatcctcagtgataccgttgcgctgacgggtcccaccaccaccactcaggatcaggaatccgtggctgttttgcgggaaatcgccggtatcgattatgaccagtttgtgacagggctgctgcgagccaaaacagatataaccgggcaatccgcgtcggttttactcaatcgtgacgccaaaaattaccggatccatgatgtgccgctgttgttgtcacaaattgaggtccgcgacatggctgatattactcccctgttgcctgagctactgcaggaaatggataaaacctgcaaggacagcgtgctggacatggtgatcctgatggtgacagacattaccagccggaactccgttttgcttttttcagacagcagcctgacaggctcccgccaggtatcgctgcccggcatgacaagccggaaaaaagaaatcctcccctggctgaccaaccgcttcgcttcttataagaggtga

SEQ ID NO: 128875 - DNA, 231 bp, Enterobacter cloacae
atgatccaatgctgcctgcatatagatgctattccagagaacgactgcattggtcaccagtccgtgcgcacccaactgatcctcctgcccatcctgatagcgtttccttatttcacctttttgtccgtggcaaatcgctctggctacagcatgtcggctttctccccggttaagttgggtcaggatgcggcggcgataatcttcatcaccaatataattaagaaggtataa

SEQ ID NO: 128876 - DNA, 309 bp, Enterobacter cloacae
atgtcagaaacctttatgattaatcataagaaagtcccgcttaagtcactgcaatacaacagtaaagcgaatcagctggaagtgatgcgcaactggttttatgaacactacgaagacctagtgaatgcctatccttataactcccgggaaggtggatatgcgtatatttatggcggtccttatgacgcggatgaagagcatcaggcgaactttggcggattcgttaaggacgattacatcaaggacttagtaggcgaactccaggcggattgctttgaattgtcgggaaattcaaataacaccgactag

SEQ ID NO: 128877 - DNA, 657 bp, Enterobacter cloacae
atgtggcctaagggaggcgggagggttcgccctcccggtaacgatatgacgaaaattatcgaacgcggaatgatttttaacggtgagatggtgcgggcgatcctcgatggacggaagacgcagacgcggcggatcatcaagccgcagccagagggaacattaagcggaagtttatccggtatgtggttaagcaggcctcttaacggactgttgttgccgaaaattgaagatatcgcaatccattgcccgttcggtgtcgtcggtgatcgcatctgggtgcgggagacgtgggcagaggctggagcaagcgcgccggatctgaaactttatcgcgcgaattaccctgcgcatgttccaactcattacgagaacgtgccgccggcagaggatgtccgctggacacccagcatccacatgccgcgctgggccagccgtattctgctggagatcaccgatgtacgggtcgagcagctgaacgatatcagtgaggaagacgcacgttcggagggaatttctggctcctcggcacgtgacgttaaagaggcttacgcagcgttatggcggtctatctacggttctgacagctggcgcgctaacccatgggtctatgtgatcaagtttaagcgtatcgaaggagatggccatgcgactgattaa

SEQ ID NO: 128878 - DNA, 1005 bp, Enterobacter cloacae
ttgcgaacgtctctcgccggtactgaacggcctgaaaatctgactctgctccgcgatcttgagcttcgggtttacgacgttgaagatgaggaaaaccatcaggaatttacctgtcagtcggatatctcctgcgacgataaagggtgtcatctgtgcccgcgcggcttgccgccgcttaccaccagcggcacgaccctcaagtggcggctgatggacagccatacccagtacggtattttgctggccaccctgcccgccggacgtcacctgagccacgaccagcagcagctggtcgatacgcttgttgagcagctcacggccacgctggcgctcgaccgccaccaggagaaacagcagcagctgatcgtgatggaggagcgtgccaccatcgcccgcgagctgcacgactccatcgcccagtccctctcctgcatgaagatgcaggtgagctgcctgcaaatgcaggatgaaggcatgcccgagagcagcaaacagctgctcagccagatccgcaacgagcttaacacctcgtggattcagcttcgcgagctgctgaccaccttccgtttgcagctcaccgagccggggctgcgccctgcgctggaatccagctgtcaggagtttagcgcccggctgggcttcccggtgaagctggattaccagctgccaccgcgttttgtcccctctcaccaggcgatccacttgctgcaaattgcccgcgaagccctgagcaacgtgctcaagcatgccgaggcgacggccgtcacggtcaccgtcagctgccaggataatcaggtgaagctcagggttcaggataacggccgcggcgtgccggaaaatgccgaacgaacgaaccactatggtttaattattatgcgagaccgcgcgcaaagcctgcgcggtgattgccaggttcgccggggagagtcaggtggcaccgaagttgtggtcacctttatacccgaaaagcccctcataactgctcaaggagaaaaccatgactaa

SEQ ID NO: 128879 - DNA, 1419 bp, Enterobacter cloacae
ttgacgacgttgaaggctgtatcgtcccgcatccgttttttgctgttactccccctttttacggctggagccgttcatggtgcgccgaaatccttcgtgcagcaggcgcaaaatccgtttgataacaacggcgatagtctgccggatctcggcatggcgcaaccgaccagcgaaggcgaaaagcatctggctgaaatggctaaggccttcggtgaagccagtatgaccgataacggcctgacggccgggcagcaggcgcgacagttcgcgtttggcaaggtgcgggatgccgtgagcggggaagtcaacgagcagattgaatcctggctttcaccctggggaaacgccaacgtcaatgtgctggtggatgacgacggcaactttaacggcagcagcggaagctggtttatcccctggaacgacaacacccgctatctgagctggagccagcttgggctgacgcagcagacagacgggctggtgagtaacgtcggggcaggtcagcgctgggttgccggaaactggctgctgggctacaacactttttacgacaacctgctggaagacaacctgcaacgtgccgggctgggcgcagaggcgtggggtgaaaacctgcgcctgtcggccaattactaccagccgttcgctggctggcagccgcgttccgacatccgcgagcagcgcatggcgcgcggatacgacgtaacggccaaagcctggcttccctggtttcaccacctgaacaccagcgtcagctttgaacagtattttggcgataacgtcgatctatttaacagcggtacggggtatcacaacccggttgcggtcaacctggggctgaactatacccccgtaccgctggtcaccctgacggctgcccataagcagggggagagcggcgttagccagaataacctcgggctgaagctcaactatcgttttggcgtgccgctggcgaaacagctttccgccggggaagtggcggcgacgcgatcgctgcgggggagccgctatgattcacccgatcgcgataatctgcccgtgatggaattccgtcagcgcaaaaccctctcggtatatctggccacgccgccgtgggatcttaagccaggcgaaacggtgatgctgaagctgcaaattcgcagcacgcacggtatccggcagatccactggctgggtgatacccaggcgctcagcctgacctcaccggtaaacggcaacagcagcgatggctggagtgtgatcatgcctgcatgggatgattcggaaggggcgaaaaatacatggcggcttacggccgtggtggaagataaggatgggcagcgtgtctcctccaatgagatcacgctttccgtggtgcaaccgctcgtcgcaatgcctgccgacgatccacggtggaagttgctgccggatgagtaa

SEQ ID NO: 128880 - DNA, 615 bp, Enterobacter cloacae
atggctctaacagatatcaaagtcagaacagccaagccaatggataagcaatataagctgaccgatggcaacggtatgcatcttctcgtccatcctaatggttctaagtactggcgtttgcagtaccgttttgacggcaagcaaaagatgctggcacttggggtatatcctgaaatcacattggcggatgctagatcacgccgcgacgaagcgcgtaagctgttggcgaatggcgtcgatccaggagacaaaaagaaaagtgataaggttgagcagagaaaagcccatacttttaaagaggtggcgattgagtggcatagcaccaataaaaagtggtctgaagatcatgcccatcgtgtgctaaaaagcctggaagataatctcttcgcagagctcggggagcgtaatatcacggaattaaagactcgcgatttattagcacctattaaagccgtggagatgtctggacgtcttgaggttgctgcccgtcttcaacagcgaaccacagcaatcatgcgttatgctgtgcagagtggattgattataaccccgctcaggagatggctggggcagttgcttctggaaacaggcaacatcgtccggcactggagttaa

SEQ ID NO: 128881 - DNA, 885 bp, Enterobacter cloacae
atgaaaaacgcagatgcacctgatttacctacattaattgccgccattctctccaccaaaggcggcgtagcgaaaaccaccgatacggcgaacctcggcggctacctggccgatcaggggctgaaagtcctgatgattgacgccgatatccgccagccgacgctcagcagctattaccctcttgataacgaagcccccggcggtatctacgagcttatcgcgcagaacgaactggatccagccatcatcatctcacacacttccattaccggattggatatcatcatttccaacgatccgcgcggcgaactgatgagcctgctccaggctgcacccgacggcgtaatccgcctgcgccatctggtacgccagataaccggctatgacgtcattctgatcgataccattggcgcacgcaccatagcgctggaaatggtactgttagccagcgatcttattatctccccggtattgccggaaatgctctccgcacgcgagttcctgcgcggcacgctgcaaatgtaccgggatctccagcctttcacccgctacggtatctcgctgccgccgttgaaagcggtgatcaacaagctcgaccacactaacgatgcccgcgaaattcaccacaacctgcttcaggttctccagcacaaacagaaagagcaggagctactggtgcctaccgagatcctgatgacgccggtttacgccagcgtggcctatcgccgggcggcatcgctgggactaccggtgcatcgtctcgatacttcccgcgccagagggcaggcaaccccctgcgccgccgaaaccatgcagatgctggcgaaagaactgttcccgcagtttctcgccctgccccatcagcggatggagggtatcgcatga

SEQ ID NO: 128882 - DNA, 375 bp, Enterobacter cloacae
atgaaacggaaaatctggcgggcattctgctcttattacgcccaacatccctttgagcaagacgatgaagtgatcgtgttctttgaagccgccgatcgtgaagaagcgcgggaaacgctgccggtgttaatgtcgctgctctggcatattccgccggaaaaggtggactgctacaacctggaggatgaaaacgagctgcgagatacgtccggttcgctgaccgcccccagagactggccgctgtttgaaatcggctggtccaacaataagccgctctactccagcgatttgccgctattactgctgccgcctcatcaacagacccgactatgggaagcctttctggcttgtcaggagggtaatcgagatgagtaa

SEQ ID NO: 128883 - DNA, 1356 bp, Enterobacter cloacae
atgagtaagcgcaagcggccacaaccgccccactccgtcgaagcggaacaatcggtgctcggcgggctgatgttggataacgatcgctgggatgatgtcgccacgcagatttccgcgcaggacttctttatctccgcgcaccggacgatttattcccatatgcaaaccctggttgaacagggaaatcccatcgacctgatcaccctgagcgaaacgctggaaaagcaggagcaactcgaacaggtgggcggtttcgcctatctggcggagctttccaaaaacacgcccagcgccgccaatatcattccctacgcgcaatacattgccagctacggtgaactgcgccagcttctgttattaggcaatgaactgagcgatatggcaggccagccgcgcagcaatgtggccgatgtactgaactttgccgaacaaaagctgtttgccattgcgcagtcacatcaggagggcggcctgaccgacatcaacgcttgctttgacaacgtgctggcaggcatcgctcagcgctatgaggccgaacgcggtagcctcagcggtacgccatccgggctggaacagctcgacgccctgacctgcggcttccagcctgccgacctgattatcgccgccgcacgcccttccgtaggtaaaaccgctttcgccctgacgctgtgcgtcaacgcgctaatgctcctccccacccagccagtacaaatctacagcatggaaatgtcagcagagcagctactgctgcggctggtttctctgattggccgtgtctcgcagacccggctacgcagcggcgatctgagtgatgacgactggcagcagattggcctcagcgccagtatcctgatgaacgagtggaaagatcgtctgctgctcgacgattccggaatcctcaccccatccctgctacgcagtcgggccagacgatcgctgcgccagtacgggcttccctcgctgatcgtggttgattacttgcaactgatgcgcagcggcggagcggagaatcgcaatcaggagatctcgacgatctcccgatcgctgaaagcgctggcgaaggaactcaactgcccggtactggcgctgtcgcagcttaaccgggcgctggagtcacgccttaacaagcgcccctgcaatgccgacctgcgcgattctggctctatcgagcaggatgccgacgtgatcttattcctctaccgcgacgagctgtatgatcccaacacgctggatcggggtatcgccgaagtcattgtcagcaaacaacgcaacggcccggttggcacggtacgtacccgctttatcagcgatcaaacccgcttcgaatcgctcagccagcagggagtggggtcatga

SEQ ID NO: 128884 - DNA, 1485 bp, Enterobacter cloacae
atgaacaacaaactgacttcgacggacctccagtcccgcctgctacagggcaattttgatcggggaagatcgcccgatgaacggttcgccgatccactgatggaaacctcgatgatcgtcacgctggagcaacttcgcccttacgatctcaatccgcgactgatgcgtaaccccagctatgacgacatcaaggaatcgatccgtcgtcgcgggctggacacgccgccgccgatcacccgtcgtcccgatcaggagtggttcatcatcgccaacggcggcaatacccgcctgtcgatcctcaatgaactgtggcgcgaaacgcatgacgagcagttctggcgcattcagtgtctgtacaagccgtgggccggtacatccgatcaacccatgctgggcgaactgcgctgcctgatcggccatctggcggaaaacgatatgcacggcaaactcagcttcatcgagcgggcgctggggatcaacaaggcgcgggaactgtaccagcaggtggaaaagtgccagctttcgcaacgggagctggcggagcatctgaagaacgatggctaccccattaatcagtcgcatatcagccggatggaacaggctctggaatacctgctgccctgtatccccgaagtactgtacgccgggatgggccgctcgcaggtggaaaaattgctgtcattgcggtcagcatcattacacctctggcagcgtcacgctgatggagatgcctgttcctttgataatctcttttcctccgcgctgtcgctgttcaacgaccagcccgaagacttcgccatcgaacgggtgcaggatgagctgctggggctgatgagccaagagctgaacgttgactacaatctgctgttgctagacgtcgatccctcagagcaaaaacgtcaggccgtgctcggccctacgccggaaccaccgccttatgttccaccggaagaacccgaaccacgcccgataacgcgcaggcgtaaacctgaaacagatgaagaggacgttggcgcgcctgctcctctgcctgaaccagaggaagcaccatcgctattgtgtgaagggaccgaacccgtcacagatatctggcgcatcccacaactgtgggataccacggagtccttacgctcggtcagcgatcgcctggcgtgggatctggctgagcattacgtcatcgacgaccggataatttcagatgccgatgtaaatggcattggctttcatgtgatgccattcgcatcagatcaccccatgttcacccggccacagtcacgcgcctgttgggcgctgctagcggcgctcaatgagatcccgctaacggaagatctagcctctgcactgacgcctgggctcttttttcaacgtaatgcagacggcttcttcttcagcgatgaatttcttattaaagcattccggctgatccgtattgtccgccggatcaaagagttccagcaggaggcacaacatgctgccgacgattaa

SEQ ID NO: 128885 - DNA, 540 bp, Enterobacter cloacae
atgctgccgacgattaatcaggccgttttgtcacaggtgatacaggccctgaaggacggcaatgtgcgctattgcgaagcgctgggctttgaccgcgaggagctgaacgaactgaacgccctgacctttgaagagctaatgcacatgggcaacacctcggcgcagttcctgaaaatcaccatcaaccatgacgtgctgcgcaaaatgctggttcaggtgcgtcaggagcagaaattccagcaactggtcggccaggcggtacagcttggcggttcaatagcgttaatcagccactacttcgggatatcgactgctgaaatcagcgcccgccgtcggctgatggggatccacgttcgtcaggggcgcaaccaggttcccggcgaagaagaggaagccgcgctctggaaccgttggcaggagatcaaagtcgataacatcgactccatcccagcgctggaagccatgatgctgctggcacaggaacgttcgctctcactgaccgtggtctggaatctgatccgacagtgggaaaaaagctga

SEQ ID NO: 128886 - DNA, 1134 bp, Enterobacter cloacae
atgacaccgtatatccaggcgctgatcaacatgaccggcgataaactccagcaacggatacagaaggatccgacatccgcttccgatagcctgctgtttatgggcaatcaacatgacacggttccgcgtcgtctgttgcaagatccgctgttatcgcccagagataaatttgcctggcaggtgatccgaatgcaggcgcaggacaacggtggcgcggtgttcccctcttacagcgaattgcaggtgcagctatctaaccgcccgcaggatgaaaaagcctcgcgcagtaccgtcagccgggcattgctgatgctacgcctgacgcgctggctcagcctgtgccataaggcgcgggatcgggtatccgggcgcatcctcgggaatatctatgccctgcacgatgaaccgctgagcgtgctggacgccgtgcgctttgatgccagctatcttcatttgctggagcagtgctcgcgacatgaaaacaagtccatccgcgccactgcgcaaggtattttgtacgacattcgccaggacaccagtctgcgctatctatcctcgcgtatagagttgctggaagaacgcgcccgctggcagcagcgccagtctcctgaggagactaagccagaaacgtccggtctcaatacggtaccaggcaaaatttcaccgagtaccgaatcgggactaagccggaaaccggggcctggcggcttagtctcaaaccaggaccgggattctgtacgtactgtatctacagatatttgtaatagtactaccgcgcgcgcgaacaactcgccgccgaactggccgctggaaattccattaacccgtcctgaaaaacagcttgttttacaggccatgcagaatctgccgcctccgctgcgccaggaagtgctcaatgacgcagctcaacgcgttgcccgtggcggcatacaaaacccgctcgcctatctgctggcgacactacgcaaggctcagggcggtgagtttaatcagtatcggcgcggcaaagcgaaagtgccggagtttgtgcagcctgtggtttcagagccagacataccagcaaggccgcgtcaaaaacgggatatcagtaagttggttgcggagattcgggcgcagtgtttggggagtggctga

SEQ ID NO: 128887 - DNA, 528 bp, Enterobacter cloacae
atgctgaaaggcaatctgtttaaccagcacctgaatgcccgcatgagttccggcagccatgccgacggcagttacaccatccccggattaggtggcagcctggttgccgggtataacgccagattcgccaataccacactttctccctttgtcggtttcacgggcttcatcccgcaaagtgatgattactggctatcgaacggaatgcaggcacatcttggtacggctgaatctgcgctggggcaagtcgggtttcggctgcgccagaatattactactcacagtggtatgcagttcattccgtggctgaaaatcgcgctggagcaggagtttgtgcataacaacccggtcagggttaatgacgataattttaataacgatagcgccggaacacgaggaagctaccaggctggcatcagcgccactctcacgccgcacacgcatatttacgccagtatcaattacgagaaaggcgatgggatggaatcgccgtggaccgggaatgcgggtttcagctaccgcttttaa

SEQ ID NO: 128888 - DNA, 1806 bp, Enterobacter cloacae
atggaacttattgattttttacgtcaaacccagaatgagattcgcaaggaatatcaggatcaaatggctcagccaggggttgagtcaccttttccggagctgatttttaccgatattgttatgcgtcatatggccgatatcggtatgacattcgatgatgccgagacgtgtcactttatggcgaaagtcagtggacacaatgtgcgtctcagcggttatgctttctcagaagatggtgatcaacttgacctttttgtcagcatttatcacggtagcgatgagctttgccacgtcccggatgcagagacaaaagcgattgccggttactgcattcaatttttgcagaagtgcgttgacggtaaattatcatccacgctcgatcagtccaatgatgcctggcaactggtgacgaccatcgagcagtcctatgcagaactggagcaaatcagaatttatgtactgaccgatggtcaggtgaaaacccgctggtatcagtctcgtgacgtggccggtaaaaccattaaattagaggttatggacattgtccgcttgtttaaccactggcaggaaggtaagccacgcgatgaactgcaggttaattttgatgaggtggcagggggggcgcttccctgtgtctggatcccggatgaaatgggtgagtacgattatgcgctgacggtggttccaggagagacactgcgatttatctatgaaaaatatggcaaccggattctggaagcgaacgttcgctcatttctgagtcagacggggaaagtcaacaaggggattcgtgacactttacgtgagcagcctgagcgttttatggcttataacaacggcattgtgattgttgccgatcaggtcaggcttggtgaggcaccgggaggtggccctggtattgcgtggatgcaggggatgcagatcgtcaacggtgggcagacgacggcttccatgtttttcaccaaaaagaaattcccggcaaccaatctgcgtaacgtgcgtgtacccgcaaaagtcattgtgctgaaacagacgaataatgcacaagaagagatgttaattgcggatatttcgcgcttctcgaatagccagaataaagtcaatatttccgatctgtcagccaatcgaccggtacatgtacagctggaaaaaatggcaaacacggtgtattgcccggacggatacagtcgttggttttacgaacgagcaaacggcagttataaggtcatgctggaacgagaaggtaaaacaccagcgggaattaaacggttaaaagacgcaattcctccatctcgtcggataacgaaaacggatttcgcaaaatatcactgtgcctggctccagcgtccggatttagtcagcctcggcggacagaaaaactttgccgcattaatgacgatgattgacaaggatactgagcgttatggggatgaactgaacattgaaacttttaaaaattatatcgctcaggccattatttataagaaagcctataagttgattaattcacttttccccgcatttaaggcgaatatcaccgcctatactgttgccgcctattcacatctttatggtaacgaaacggatctggcagagatctggaatcaacagggcatcgaggaaacgatggggaatcgtcttgtcagcttggctcaccgagtaaatagccttctggctgaatcggcaaatggcaggatgatttctgaatgggcgaaaaagcctgaatgctgggactacgtgcgcagtaaaatctatttctccgcacagggaaaaaaggatgacttctcgcatgatgaaattgcatga

SEQ ID NO: 128889 - DNA, 1029 bp, Enterobacter cloacae
atggtgcggctgagtaaagacgatctgctggcggcctggaaagccttagatcgatctcagatagacgaactgcctggcgctcagggctggcgcgggattcggctttttacgcaccagggctgtagctttcatgccgggcgtcgtcagcctgataatgaagaaatgctgattgccgtgtttcctcatcctctttcgcttgggtcggcggcgctgccatcttgtaaaggattccgcgttgagatggccggaacagaggaggggtggcagaacggtttgatgatccgtcgccagcaaacagggaatgtggatgtctttacgacgatgattctggatattctccattcgctcctgaacgtttcgaggccgtgcctgtttgaaactctgcttcgtcggattcgtttatggcaggcgtttatggagcgcgatacccgtccactcagtcaagaagaagaagttgggttaatcggcgaattgacgtgtctggagcggttgagcgagagcggtcttgctccgtcaacggcagtcgaagcatggataggaccgcagcatgggctacaggattttgcactcgatgaacgcgccattgagataaaaagcaccacggcagcgcagggcttttgcgtaactatccactctcttgaacaactagactggctgcgggcaggatcgcttgtattgtgtggtttgcgcttcagcgagcatcccaccggtgcaaccctgaatgacatcattagccgtcttcgtcaacggcttgagggaaacgctacggcggcttgtctttttgagggatcgctttgtcacgtcggatatttcactgaacatgctgaattctatacacgtcatttcttgctgacagaggcgttcgcactccccattgaagcggattttccctctttgacgcatgcaaatgtcccgttgccggtggtgagtgcgtgctatcaactcgaactccagacacttattcctcaggcccaagattttaaccattgcttgtcacactttgcaggattaccgcatggaacttattga

SEQ ID NO: 128890 - DNA, 2859 bp, Enterobacter cloacae
atgagtcttaatcccttggatgacacgcaactgagtgtattgcagattgtgcaaacgttcctgcaaagtcaggataaaagcacgatcacgcccggtattctgcgccaacatattgatatggtttgtcagatgaaacctgagtggagccgccttgatagtcgggagatcttggtcgaagagttgatccgccgttacagcatctggatgggagaagattcttctctgagtaatgacgaagggcatcaaccctggctgaccgctgatgtgaaacgcgagtggcgctactggcatcgatatcgccagtggcttggcaaaacgatgccttggggagtcctggatacccttgaccgttcaacggatcgtgttctgggattacttgagcaaccggggcgggaagggcgttgggaccgacgtgggctggtggtcggccatgttcagtcggggaagaccagccactataccggtctaatctgtaaagccgcagatgcgggatataagataatcattgtgctcgctggtttgcataacaacctccgctcgcagacccaaatgcgtcttgatgaaggatttcttggttacgagacgagcccactcagagaaaaagtgaccatcattggggtgggcgatattgatagcgatcctgtcattcgtcccaattacgtcactaaccgatcagaaaagggcgacttcagcgccggagtggctaagaatttggggatcagccccgagcaacggccctggctgttcgtagtaaagaaaaataagtctattttgaagcgcctgcatacttggattgagaaccatgttgccaccagcgtcgaccccatcaccggaaagcgttttgtttcggaattgccgctgctgatgattgatgatgaagcggacaacgcctcagttgatacgggggaaattgtctacgatgacgatggaaaaccggatgctgaacatcagccaacggcaataaatagtctgattcgtaagctgttgatgcagtttagccgtaaggcgtatgtcggatataccgctacgccctttgccaatatttttattcacgagagcaatgaaacacgtgacgaaggtccggatttgttcccttccgcctttatcattaatctcggcgcaccctctaactacatcggccctgcgagggtatttgggcgggccaccgcggaaggccggagcggagagttgcctttgattaggcgagtgagtgatcactgtagcgatgacggaaaaagggggtggatgccggtttctcataagagttcgcactatcccacactggatacgctaactcatttcccggactcgctaaaacacgccatcgacagttttttactagcatgctgtgtcagagaattacgcggtcagggagaaaaacacagttcgatgctggtccatgtgactcgtttcaataaggtgcaatcggttgtttatgaaaatattgatgcctacattcaggacgtgaggcagcgactgacgcgaaggattggacacgaaccttttttacatcagcttgagtcactctggcaggccgattttttgccgacgaatcaggcgatccgcgacgttatgccgcagcaggttccggacgacgccttcgaatggcaggagatcgtcgacaagctgtataccgtgatagaaaacgtgtcggtacgaatgataaacggaacggcgaaggatgcgcttgattattcggacagtgcgacaggcttaaaagtcattgcgattggcggagacaaactggctcgagggctaacgcttgagggattatgcactagttattttttacgcgcctcccgcatgtatgacacgttaatgcagatggggcgttggtttggttatcgccagggatatctggatgtatgccggctttataccaccgatgagctgattgaatggtttgagcacattgcggatgcgtcagaagagctgcgggaagagtttgacaatatggtcgccagcggcggcaccccacgtgatttcgggctaaaagtgaaatcacaccctgtgttaatggtgacctcgcccttaaaaatgcgtagcgcgcgttcactatggctctctttcagcggcacggtggtcgaaacgatttcgttgtttaaagaacaggagtatcacaagcgtaactacgtggctttccagcgtctaaccgggcgcgtcggtgctggcgcgccgatacctgagagacgacgcggagataagattgaaaaatggaatggggtcatttggcaaaatatctcccctgagccgatcatcgatttcttaacggaatatgagacccatgctcaggccagaaaagctaacagcaaactactggcggattttgttacgcggatgaatcgcgttgatgaactcacccaatggacggtggcggtgatagggggcggcatcgatcgccatcacgatgtttgcggcttttccgtaccgcttatgatgcgtaaagcgtctgaaggggtcactgaccgttattccattggccgtttactttccccacgcgatgaagggattgactgtgatgaatcaacttggcttgctgcgctggaagaaacgcagcgtatttttcatgccgatcccggacgcaatgaagggcgagaggagcccgtcgttccaggtggcgtggtactgcgtcggattaaaggatttggcattaacgacattccagcacagcgtcaaaaaggtttattgctcatttacttactggacccgcagcaggcattgccggcagtggaatatcaggacgatgccttatctgtggtggcttttggcatcagttttccgggaagccgcagtggggtaacggtggagtacaaagtgaacaacgtactatgggagcaagagtatggtgcggctgagtaa

SEQ ID NO: 128891 - DNA, 1503 bp, Enterobacter cloacae
atgacgaccatgcgccatgcgccaccgaatgcagccattatgatcgaagcgctgcgagggctcggttacaacaccgccaccgcactggctgacatcatcgacaacagcattagtgccggtgcccgtaaggtcgatctgacctttcactggcgtgagtcggatagctatatcgtggttcgggataatggttgcggcatgtcggccgctgaactggatgttgcgatgcggctgggggtcaaaaacccgctgacaaagcgttcaggacacgatctgggccgcttcggtctgggactcaaaaccgcctccttttcgcaatgtcgccgtctgacggtcgcctccaaaaaagaggggataacgaccatcctgcgttgggatctggacattctcgccgccagtacggacgacggttggtatttgcttgaaggcgctgacccaggaagtcaggaggcgttagcaaatgcggaacctgactcccacggtacggtggtgctgtgggacgttttagaccgaattgtcacccccggctacggtgagaaagatttcctcaatctgatggatggcgttgaacaacatctggcgatggtatttcaccgattccttgaggggaacgctccccgactcactctcaccctcaatggtcgcaaaattaaagcctgggatccctttctcagcgggcatccttccaagccttggcattcgccttcggcaatggcgccaggcgctcctgccgtgaaggtagagtgtcatgttctgccgcatcaggatcacctgacgacgcaggagtatcaacaggctcaaggaccggcaggctggacggcccagcaaggattttatgtataccggaatgagcgattgctggtggcgggcaactggcttggactcggaagcccccgggcctggacgaaagatgaaacccaccgccttgcgcgaatccgtctggatatccctaatgatgctgacatagactggaagattgatattcgtaagtcgatggcccgcccaccggtttcgctgcggccttggttaacccaactggcgcaatcaacgcgtgatcgtgcggtacggacatttgcaaaacgcgggaaaatgaataagcgcaagcccggcgaggaacttgttcagctctggcaagcgcagaagacgccatccggtgttcgttatcagatttcgttacaacatcctgttatcagcaatgtcctttcgcaggccggtgagttatctccacaaattcaggccatgctaagactgattgaggaaaccgttccagttcagcaaatctggcttgatacggctgagacaaaagagacgccgcggacaggttttgaaactgcaccgcccgcagaggtgttgtccgtattgcaggtcatgtacaagactatggttggacagcaggcgatgtcaccggcgctggcgaaacagcacctgcaaaatatggaacccttcgataattatcccgaattaattgcacaactccctgacgatcaacatgagaaatcgctatga

SEQ ID NO: 128892 - DNA, 1770 bp, Enterobacter cloacae
ttgcgtgatctgttggcccgttatcgtcagcctctttcacttgccgaactggaacgctctgtggtttcagtcgaggactcagaaacagaggcagaattacccagcgctgaaatcccgatggattttatgctgtgggatgcagaagttgaattgaagcccgccgaagataatctgacgttaagacatgcttccgctgaagcccagcaattattatcacgctatcgcccgaaagataactctgctgagtggagcgatatcgaactcacgctccctgaaccactgacgccagtttctcactctccgcaaaattaccctcatctctcaacgttgctcattggcgcactggatacggggcgtatctctttgcgtgacatctggcatgccggggaagaggatttcggtatgcagtggcctgaattccggctcagcgtagaggcattgatcagggacttaccgctgattgtggatgacgatgatattattccgcctgacgctgctccggcgacattagctgtgagtgaacctcttgaaccctggtttgatgctttcaatgcattgcggcagttcggcatcgttgaaaactatctcgtggatatccgccagtgggatgtcgtggataaaacaaaagaagaacgactcggccagcgcatggatacggcgctaatcaatctgataaaaatcctggcgggtttatccgaagcggaatatatgcagttgctgcagcccaattaccttccggcgccagcgcctgagatttctgaagaggaagacgtcgcagaagaagcggatgaggaaatgcctcccgtatccgatgacgataacgatgacactatcagctttatcgagctgctcgttctgctgagaagtgggaaagcaggcgagtatcaggataatcatatcccccgcccggagtatgccgacctgcaacagatagttgagcgcgcccgaacgctcatccctgatgaaggtcataaaataagtctgtatgtcagcagttacagagaggcttgggaggggctgatccacgccaacttgcgtctggtcgtcaccatcgcgaataaatatcgcgggcggggattagatgtcgaggacctgatccaggaaggtaatctgggtttgatcaaggccgttgaaaaattcgactatcgacgcgggtttaaattctccacgtatgccacctggtggatccgccagaagatcagccgcgcgattgccgatcaggcgcagctcatccgtttacccgttcacttctatgagcaattcaggcgctggcgaaacagtcgggatcaattgctgtatcgccaggggataacgcccacgatcaaacggctgcaagcattgactgaccttccagaaaatcaactcaatcggatggcaaaatatgaagaacagacggtgttgattggcgattttcatgctgacgcccaggacagcgaagcggcgctgtcgggagacgcgatcctgaccagaaaggatttcaccagtgctcccgttcagtatctcgagctaagagaatgtgtttcattggtgctggaaacgttgttgccacgcgaaaagcagatcataaaaatgcgttttggcatcggtatgacgcaagattttacgctggaagaggtgggtaaacagtttgatgtcacgcgagaaaggatacgtcagatagaagccaaagcgctccgtaagctccgctatcacagccgggcgtcgaaattaggcggcttcgtcgaacagtgggaaaccgcattgagcgagatgcaggaagaagaagaatga

SEQ ID NO: 128893 - DNA, 606 bp, Enterobacter cloacae
atgaaaaaagctcacgataccttacccccggaacaaaccgtcacagcacttgcgcatttcgcctggtgcgcccttgtcgccttacgtaccgctcagcaggatggtcaggcattgtcgccactcagcacgcatgcatttatactgcgctggttaacggtggcgtataagcaaaaacggtttccacgtgcaatcgcatctgatattgagggattgctgacgctggggcgtaacaaaggccttgccgccagcttattcagtcgtctggaatatctgtggtcttcgtgcaccggaccggtgtcagcgcagtcggatttgtatcggctgacgtacgcaattgaacagcttaaatcgcggggctgggtcaatgcagcggtgagtgacagggactgggacaatgaaacgcttctggtcctggaatacagcgatgcgaatgcactgctggtaaggaagtcggcactgacctgcggattttcggatggagggaaactcgttgcgccggttgagtttcttgtgaatggcgacttgtcagcctgtatggctgtttttgcggctcatacactgtcggctgtcatgctggagtcgaatcggatcgtgttacaaccttga

SEQ ID NO: 128894 - DNA, 567 bp, Enterobacter cloacae
atgaatcattcttacatacgggcgtctgatgctgtcagcgcggatgccgtcagcacgcgtgcatttctgcaacaggccgttgaccattacccgcgactggcggcattcagctttacgctggcgctaccgtatcgtgaagccatgagcgaataccggtcattgattctgcgttttcactctgaagtctggcagcgcaccggcgaatattcgcgccagcgtcagcaggcacgacatcgttcactcccgacgctgttacgctggatatgggagacggccagcgcaccggagtgcaaaatggtgctgctgctcaatctcgatacgctgggtacagggcgaaacctgcaactgaccgacagtgcgcctccggggcttaacgccatcatcgccgacgcatggcaaaaggtgaccggtaccgcctgcactgacggcgtaacgagtatgacgcagatcattattaaccgcgtcgctcagggagtcttcgcaacaccctttaaccagcttaccgtgcatgttaaggccatgtcagagccaatagcaacggccagaacggggatgatttgtccgtga

SEQ ID NO: 128895 - DNA, 417 bp, Enterobacter cloacae
atgcgcatgctgaaatgttatctggccaatgaccgcgaaggccacttcgcgacagccggggaggccgtgagtgcgccggggcagatatggagctgcgcgtcctgcggctgtcgactggtgctccatgcggggacatacggggagccgccgtggtttgaacatgaccagcagagcgtggcccggcatgtgctgatggcctgcgcccaccttgacccggaagtgaaaaccgaagcccggcaccgaaagctgcgcagtctcatcaacgggctggaagcgacggtaatggtgctctcctggtactgcgtgtggtgcggcgaccattaccagggcgtgaagcactgtccccggtgtctgactggtatctacagcatcgaagaagcgcactggcagagaaactactgctgcagtaccagatag

SEQ ID NO: 128896 - DNA, 420 bp, Enterobacter cloacae
atgtatgcaaaatcgtttatggctctggacggcaacggccgtctcacgggagccataaccgcgcagaccgcgccgtatgaccgctacagctgccatctgtgtgccagtgccctgcagtaccatcctgaatacgacaccgaacgtccgtggtttgaacatcatgcagcaaagctttcggagaacggtcgacagcactgcccgtatgtaaagcccggggtgagggagacccgccatatccggcaactgcagtcttatgtaccggaagcccgtcccctggttttctacgcagactggcactgtcacggctgcggcagtgattaccacggtgagcgctactgcctcacctgccggacgggcgagcacagtgatgtgcgtgctgataccaaccggatagaggaagtgacggcatgcgcatgctga

SEQ ID NO: 128897 - DNA, 240 bp, Enterobacter cloacae
atgaccacgttgaatacgaatattaatgccagccctgacacactgctttcagctcaggacccgcttatcgacatgacctttatcaccacgtttaccgggatgaccgacaaatggttttacaaactgattggcgacgggttgtttccgaaacccatcaagctggggcgcagctcccgctggcgcagaagcgaggtggaagcctggatgcagcagcgtattgctgattcccgtggcgtctga

SEQ ID NO: 128898 - DNA, 570 bp, Enterobacter cloacae
atgagttacacatacgaccctttctggcagcaacgcatcgccgataccttcagttgtgcacttaacgcttacacccgattactggccctgcgtgttgacctccgtctgccggatacgccagcggccaccgatgcggccgttatctcccgtttcaccgattccctgaaagcccggattgatgcccttcaggcgcggcaacgtcgcgagggcaaacgcgtctggccgaccacgctacgttttgtctgggcgcgggagtttggtgaaatcaaagggaagaagcattaccacgcggtgctgttgctgaaccgcgatacgtggtgcggaccgggagattacaaagacccggattcgcttgcaggtatgattaaacaggcgtggtgcagtgccctgaaggtggatgcacaggcgcatgccgttctggcccgcttccctaagagcccggtgtcctggctgacgcgtggtaataccacagagcttcaacaggcgctggcgcaggccgcttatcttgccaaacgcgaaaccaaagtcaccggtgatggtgaacgtaatttcggttgcagccgcggctga

SEQ ID NO: 128899 - DNA, 1770 bp, Enterobacter cloacae
gtggagtttgatgacctgacaacctttgtcggacgcaacgacattggcaaatcgacgatccttgaagcgctggagatcttcttcaacaacagcgtggtatcaatcgaaaaaggcgatgcctgtattcacagcggacaggacaatgtggagatcacctgcgagtttatcgatcttcccccttccctcacgctggattccggcgcggaaaccacgctccaggaagagtttctgctgacggggaccggctcactgaaaatccgcaagatctttaactgcagtaacaaaaaaccgaccgcagagatttttgtcattgcaaaccaccctgctgctgccggttttcagaatctcctggaactgaaggaaaaagagcttcaggccagggtgaaagaactgggactcgatgtttcgcttaaggggaatcccgggatgcgaaaagccatatgggcggcatcatcagatctgcaactgacagaaacaggactcctcataagcaaagccaaagaagacacaaaacgcatctgggaccaaatcgagagctggttgcccatgtttgctcttttccagagcgacagaagcagcagggattccgacgatgaagtacaaagcccgatgaaagccgccattacggctgcactggccgaagtccaggacgacattgccaggatccagttgcgtgtccagcaaaaggctgaagagattgcccgaaacacacatgaggcgctgaaaaccattgaacccggcctggcgagagaacttactcccgagtttacacctcccactccggcaaaatggcaggggctgttctccgttggtctcaacactgacggagggatcccgctgaataaacgtggcagcggcgtccgtcgtctggtgctggtgagcttttttaaggccgaagcagaacgacgacttaagtccagcaatcgccgcagtatcatctacgccattgaagagcccgaaacttcacagcaccctaattaccagcggatcctgattgagtcatttaaatccctgtctctcgaaaccggctgccaggttatccttaccacgcacagtccgggctttgctgcagagctaccgggtgacagtattcgctttgtttcccgtaatgctgaaacgggtcaaccaaccattcaggctggcgctgatgttttcggcatcgtcacggatacgctgggcgtcacaccagacaaccgggtcagactgctgttctgcgtggaagggccgaccgatgtcgctgcctttaaggctctcagtaaagcgctgcatgcagaagacaacacccttcctgacctggagaatgacgaacgtgtggcgtttatcgtactgggtggcggaacgctcaagcactgggtcaatgaaaattatcttcgtgcccttaaccgcagggagattcatatctacgaccgtgatgtgcctgcttatgctgacgcggtgaatgccgttaatgcacgagccaacggatgctgggcggctcagacgctaaaacacgaggtcgaaagctatcttcatcccgatgccattcacgaagcctttggtgtgatgatcgacgtcaccgaccatcctgtcggcggtaaggctacccctaaagtgtttgcggaagcgtattcactggctcagcgatttgatggcgtgatgaaagataacgccgccaaagcccgtctcgcagagcgggcatttcccttaatgacagcagcacgtatccatgaacgcgatccggaaggtgaagtgatcggctggatgcgcaggatacgtgacatgatccagtga

SEQ ID NO: 128900 - DNA, 399 bp, Enterobacter cloacae
atgaaagcaaatgtagagtatgaatttcatcatttcggtataccggttcaggacggtgacaccgcaggcaagttcagtgcgaaagccgggatgtataccaccgataatccaggtaagtttcgggtgcagtggcatcgctttaccgatgactcacccctgcatccgttactgaaaacggttccgcatgtggcgtttaaggtcaacagtctggctgaggcgattgcgggtgaaacagttattctggggccttatgaacctatcgacgattatcaggtggcggtcatcgatgattgcggtgtgcccattgagctgattgaaacctcgctcagcgatgaggaactgtgggcgcgggcagcctccggtcaggggagtctgtaccgaaagccagaaatgcaatag

SEQ ID NO: 128901 - DNA, 969 bp, Enterobacter cloacae
atggctgtaaattatgatgatggcaggcgaggactcataacgagtcgggacctgagagtttgcgcgttttatgccggatggttgaatgccagcaacaaaattaacaccaacaatgttcccaggcaggatgcagaaagctgccgacaggcgttaaaccagctaattaatcaggccatcccggataaaaaccagcaggcaggactgctgtctgaaatggaaatagcccgtgatgaaaatgtgcttccactggattgttttgactggcttcgtcagaatgagcgggccacgttctggctatgggcgtatctctgtaaggccggggattatgagtttggcattggcccgccagcaaatgctgaattcgggaaaaactggtatcagcgaataaacctgagtttatccccggcaagtcatcaggagagaatgcatattctcatcgccttctttgacaacatatacatttccacacccccagtgaatcaccttaagaaacaggtgatggaaaaactcaaagaccggtggaaaatcatatacagtaaaccgctaccgttaaaatggctgccagatgaagaagacgcagtattatgggcctggaacaacctgcaaaaagttcagcaggagaaagccggtaatctcggcggactctatatgagtctatccacgcccggattaacgacctggctcacgccactgagtcattctgagcgcaatttagccctgcgagcggcgatcgatttatgggacgatgcaccagatacaaagcgtttattcctgctgaatcttaataaagcctggaatcagcagaaactgcgtcagtcccgcaccgataaaaaagcactcaatacgtatctgaagaatgaaaccaaaacacgactggactttatggctgaacgcagcggggttcgtatcagcgatatgctggaaacgctgattaatgaccattaccggaaaacctgtggtggtgagtag

SEQ ID NO: 128902 - DNA, 507 bp, Enterobacter cloacae
gtgtctgataagaaaaaacggggttctgatgccctgccgctccccttgttccgtctccccagtgaactgccctgcaaaatacccgcgtgcatgcttcccccgttccggcgctgccatcgccacattccctgttccggtatcagggccgtttttatacacggcccgcctgtttattcaggcggctttattgccagtaacaagggaaaagaaatgcattgtccgaattgcggttcgcaaaacatacgactgcgccatgtgggtaaaaagactggtggggtcattggcgcaacagccggaggtcttgccgggcttgaaggagcctccaccggtgcgctgataggttcagtcattccggttgtcggtacgatagccggaggcctcattggttttctgtccggcgcctgtgctggtgcggtggcaggctctctggccggagaacaactggacggtaccgtctttgatgaatacggctgcacgcagtgtgagcatatcttcagtgcaccgtaa

SEQ ID NO: 128903 - DNA, 729 bp, Enterobacter cloacae
atgcaacgacccgatgaagaggcccgctacgaccggctggccgtcagattgtcggtcattatcagccggttaatggccggagaaacgctgacccttcagacactgtctggtgagtttggtgtatcgatacgcaccctgcgtcgtgacttacatcaacggctggtccacctcgacattatcggggagaacggcacgtatcggctcagtgagagcgccacgcgtgatcactctccgggggccgtttcctttgcccgcagtaccggtatcgcacgcattatcccgtcgcagaaccggcaactgatgcacctgctgatgaatgaaacgggcacctcaccctgctttatctggcacgacttaccgtcagcatggacacaggctgacagttttcatcgtctggccgaagccatttgtcatcaccgggtggtcagtctgctggtcggcggtgtccgtcacgatgagcaggagccttaccgcctgatttaccggcatcagcactggtatctggtcgtctgttgccgggggagccttcgggtgttccggctggaagacattatctcggcctcactctcagagcaaaccttccgtcgccggagcgaaatcagttcgctcattactgaagagggatttatcagcgcactgccccactttcgctttatcagtgatgtcattcacaccttcagggaacaacaccctgaacatccatccagacccaaaggagtcaaatcgtga

SEQ ID NO: 128904 - DNA, 471 bp, Enterobacter cloacae
atgcgattcatgcacgccatcctgtcagcaggattactgacctttgccatcacggcacaggcggtccccaatatgtggagcagtggcttcggtatgggcgtcaccgagtacatcatcaccagccccgaaaaggtgatgctgaatctgaactgcaccggcaaccctgacgaccagaatatcctgcaacatcacgtcatgctcaccctgcctgacggcagcggtgccgattcacaggatgagaaaaccaccatcaccatggtgacggacgaccagacgttcccgttgccgtcatccctcggctggcgtaacggcgacaatgcctggctgtcgttcattgatgccatcagaaaggcaacgtcatttgacgtttacgtcaacgacaaacaggtggggcactttaccccttcggccggaaacgtccacaaggttctggctgatatgcccgaatgcacgacactgaccgccgggtaa

SEQ ID NO: 128905 - DNA, 513 bp, Enterobacter cloacae
atgaccgacatttcgacactcagccagcgactggcgacgccgaccctgaacttcgtgctgctcaccgtcgccacctgcggtatctggccgctgctctggctgtataaaaagcaggatattatgagcgacaccaccgggtatccggtttgcggcaacctgtttatcatctggctctccgtctgttttgggctcggacgacaattcggcgtgatggcctcaccggacctcgccggctacgacacgggcagcgatacacttctggccttaagcggcattctgtcgcttgcctgcggcgtgatgtacatcgtctgggcctttaaggccagggctgcactgcgacactatgcgctgaacaccttccgtttcgacctcagaatgaatgcgttctacaccgtgctgttcaacgtcttctacatcacctactgcatcaacgacatgccacaggcgctggcgaaacaccggattattcatggtcagggccccgtgccgccggagtctccgtcaccgcagtaa

SEQ ID NO: 128906 - DNA, 222 bp, Enterobacter cloacae
atgacattactgaaaatcgtgttcaacaccttatgtcaggtgctgacgtggtgcgccagcaacagggcacagcagtttgtggaagaccactttcgcgaagaagattacggcgaagacagcatttatattgccagacagacggcagccctgctgactggtgccttaatcgcagcgctgatggagcagatactgcagattattaccacacacttaacacactga

SEQ ID NO: 128907 - DNA, 225 bp, Enterobacter cloacae
atgcacacgttactgcccgcagacacatttacccgcaggcaggctgaggtcgtcgtgatgtcgcaccagaacgtcgctattgaagatgaccagggcacgcactttcggctggtcattcgcgacagcgagaggcacttgatctggcgtgcgtggaattttgaagccagtgccgggggatggcttaaccgctatctgctcagccacggtatcccccaccaggtctga

SEQ ID NO: 128908 - DNA, 255 bp, Enterobacter cloacae
atgccaccgctacctgataacgcccaccaggcaaccctttatccgaccgccctggagaacaatccctgcagccgctccatctccgatgacgacctgtgcgcctggtgctcacaccttctttatcgtcccggcgaactcagcctgtgcagcttaagcctcccggagggccactggccgtcacgctgtgatgaggacggctatgcgcagtcctgcccgtcactccggctgaaccaacatccccaacccgataaataa

SEQ ID NO: 128909 - DNA, 474 bp, Enterobacter cloacae
atgaccgatattattaaccttaacgatatcctcccgttaccgccacaacctgccagttcttcgccagcgctgaccgccacactcgtacaggacgagcagcgcatcagcttctggccgcagcacttcggcagcatcccgcagtggataatcctcgaaccgacagtcttcgcgtggatggaccgcttctgcacagactaccacggcggtatctggcagttttacacgctcagcaacggcggcgcgtttatggccccggaagcggagagcgataaactctggtcgctgttcaacaccctgaacggtaacggcggtgagctcagcgccggggctgccgggatcgcggtctgcctgatgacttacagccaccacgccatgcgcaccgaatgcgacgccatgacggagcactattaccgcctgcgggactacgcgctcagccatgcggaatgcagtgcgatcatgcacatcatcgactga

SEQ ID NO: 128910 - DNA, 480 bp, Enterobacter cloacae
atggaacaacagttaccgctgtttgcccgtgaattaccctctgccgaccagctgacggtcagggaagccttaaccctgctggaagggcagctccgtgaacccggtgcgtcatttacgtccggcaatgccgtgcgcgactggctgcgcctgcatctggccacgcaggagagggagtcgctgatggtgctgtggctggacaaccagcaccgcctcatcgcctgcgatacgctttttctcggcaccatcaacagcattaccgtccatccacgggaggtcgtgaaggccggacttcaccacaacgctgccgccgcgctactcgcgcacaatcatccttccggagaggctgaacccagtcaggccgaccggctgattaccggacgcctgaaacaggccctggagctggtcgatattcgcctgctggaccacctggtggttggcgggatggatatagtgtcttttgccgaacgcggctggctgtaa

SEQ ID NO: 128911 - DNA, 846 bp, Enterobacter cloacae
atgtcagaactcaccatcaccagacccgaagttttaaccgaccataccgatataatttgctccaccagcattgaacgtatcgtcaccggacgtaacgctgcgctggagcagattaagacactgatacgccagcttgccgacatctcgacgctgaccagcagcatcggtggtggggatgcaaaggactggggaatgcgacaataccgttatgactgctggctgatggaggacactgatacggctatgaaagccattacccgcagcatcgatcgcgatatctggcgagagctgatgcaacggtccggaatgctctcacttatggacgctcaggcgcgcgacgagtggcacaacagcctggagaaagacgatattcctgctatcagcgaagaaaatatccttagcacttttaaacaattacatctgaataaaggtgaagtttttgaacgtggcgtgattaacgtgtttaaaggtctgagctggaattttaagacaaacagcccttgtaggtttggcgggaaaatcatcgtgacgggactggtcaaatatgaccggtggggatttggtttgaactgggggtggcagcgtgatcgcctggctgaccttgagcgcatgctgatgcttctcgatggaaaacctgtccccgacaaccgcgacgatgttacccgtcgactgggagaccatatccatgaaaataggcacggcaatcattatgaggatgagatgtttactattaagtactttcagaagggaacagcgcatatcagcttcaaaaggccagaactgcttgataaaatgaacgacattgtcgcgaagcattttccttcgatgttacccgctcgttcctga

SEQ ID NO: 128912 - DNA, 705 bp, Enterobacter cloacae
atgaacccattcaaaggccggcattttcagcgtgacatcattctgtgggccgtacgctggtactgcaaatacggcatcagttaccgtgagctgcaggagatgctggctgaacgcggagtgaatgtcgatcactccacgatttaccgctgggttcagcgttatgcgcctgaaatggaaaaacggctgcgctggtactggcgtaacccttccgatctttgcccgtggcacatggatgaaacctacgtgaaggtcaatggccgctgggcgtatctgtaccgggccgtcgacagccggggccgcactgtcgatttttatctctcctcccgtcgtaacagcaaagctgcataccggtttctgggtaaaatcctcaacaacgtgaagaagtggcagatcccgcgattcatcaacacggataaagcgcccgcctatggtcccgcgcttgctctgctcaaacgcgaaggccggtgcccgtctgacgttgaacaccgacagattaagtaccggaacaacgtgattgaatgcgatcatggcaaactgaaacggataatcggcgccacgctgggatttaaatccatgaagacggcttacgccaccatcaaaggtattgaggtgatgcgtgcactacgcaaaggccaggcctcagcattttattatggtgatcccctgggcgaaatgcgcctggtaagcagagtttttgaaatgtaa

SEQ ID NO: 128913 - DNA, 1080 bp, Enterobacter cloacae
gtgttgcacagggataaactaaagcctgcttacacagatgcgcttgatatcgttgatggccagcaacgcctgctaaccttagcgttactttgctctctgcttgataaaagtggtgatttttcagcccctctgttggaacaaaaatttgcttcaagggtaagcatcaataaccttgaacacagtgccaaagtcattgagaaccggcttgcgggggtaaaggatgatgaacggaaatcactgctgcactttgtatgttacaagtgtgagctaatcgaagtcacgctcgatgatttgagtgaagcctttcagtttttcgactcgcaaaatgccagggggaaggctcttgcccctcatgatctattaaaggcatatcatttgcgggaaatgatggacaccacagaaccagcggaacgactacaccacgttagcctctgggagcaaagtgtcagtccggatgatgaatctgctaacctgcacatcattatgggcgagtttttattccgactgcgcagatggctggatggcgattatggcgttcagtttagtcgccataatcttgacgtattcaaaggcgttaacctgtccacaactgattaccaattcgtacagcctatgcttgccctggatttcgctattgagcattacaataatgaccttgccaggaactgggataagcaaagcaaaaattatccgtttcaagttaatcaggtaatgattaacgggaaacgtttttttgagtatatccagcactataaatccctgcatcacaccttgtttgagggtgaaaatgcgaagcttggtgatttcttaaaaaaatacacccattatgctggtagctcacgtaaaggggatatatatatcaaaaatctctttatgtgttcggtgatggcctattacgataagtttggtgataaagaattagttcaagctgcaacggtctttttttgttggagttactacttacggttgcactatcaaaaaattggcatggatagcgttgatggctatgcacgtgagccaagagggttattgagagtgctagggaaggtgcgaataagcggggaaattcttctcggctga

SEQ ID NO: 128914 - DNA, 1848 bp, Enterobacter cloacae
atgagtgagatagatatccagggtgatgaagcgctggttcaactgctgttgaaagcagataaaggcgatatagatctgctgatcgattacgtcactaacaccggtaagtttggtttttccatgtcagacagcgtaaaggccgtattacaggacgccaaacaccaggatatacctgatgaagaaactctgcgcctgcttgtacgggagttacagcatttcggtggtaatacgttcgtgaatctgtttcgtcgcaatggcgtcagctacagcgaaattgtagatgacgttgccagccatctgaagatgaaggtccaggccgctgcatcggtagaagaaaaagaagcgctgattattgactgtgcctttacctcatcatggaaaaaaatgtcggatgatgagcgccgccagattctgcgtggtatgggcattagcgcctctgtcagtctggacatccccgtctggcagaaagcggcattagttgccaatggccttgctcaaacgacagcaggcaaagtgctacctttaattgcagggcttggcatcgggcgtgtgttgggtgtattaacagggccagttggcctggctattaccggcttgtatacggcctatgatatctcaaaccccgcgtttcgagtgacactgccttgcgtggtgcaaattgcctggattcgcttaaaaaactcccgccagttccggcttgccacccggccatcacccgccacgatgcctgctctcatatacgatcaacgctggggttttgggcatgatattcaccaacctgcgcttacggttgctacaattccaccttcggaaagtatcaacaccggtgcgatgcaggagcaggatattaccggtatttcacggctgagcccgctgttgcaaacattaccctctctggcggcctctacacatattgccagccatcaatatatggaggtcattattaatggtcctctggcgagtgtaaaagatggcccaggtttccgaggcttcagcctgggagaagaagggattaaagaacatgccgttctgctgaatcctgacaaactcagtcagcttgttaacgccggtatgttgttgaatgttgcttctgccgtgctagcgcaaaagcacctggctgatatcagcaagaaattgacggaaattgttgaggcggtacgtgaagtttctgcattccagaataacgcgcgcaagtcagagatcattggggccatacagtatttgcagcaaattactcccgtggttattgaggatcaatgttcgccagcaatacgccaaaaactggaggatattgaagtccagttctccgccctgcaggcacacttactgactgatattactgctgctggtgacaaagtggctgcacttaaagaccgtgggctctttggcagtacggagattacgaataagatccagacccaacaaaagatccttgatgagcgaatccatgaatgggacctggcgatgaaggttcgtgcgcaagcgttgcatcttctgactcatgccgaaggtaacacaacactcgtcaggcaccgccaacaaaccattgttcataactatcaggagttcgaaagcgttgttgacaaagttgagcgtcaggttcacctgcggatacaaggtatcagctcattgacggaacagagcaataccaccaatgccaataaagtattactgcggaaatggacgacaacgacgttaatgcagcaaaagatggctattgaagaggcccatttatcgttcgggcaattccaacagggattgttggcagagcaaccgcaatctgcacggttactggtagaaatgcaggatgggaaaccggtgaagtgttttgaattgcctgctgtatag

SEQ ID NO: 128915 - DNA, 2916 bp, Enterobacter cloacae
atggcaacgcaaagcgaatacgagttagaagcgcagctggtggaacaactggtaggcatgcactacgaacgggtgaatgtcaccgacgaaaccagtatgaaagccaacctgcgcaagcagattgaaatccataaccgactggaatctgccccactaacggacagcgaatttaaccgtattttcttgcatctaaccaaaggcaatgaggttatcgatcgtgctaagatcctgcgcgatcgctaccagttattgcgtgatgacggcaccgagaaatggctcagctttatcaataaagaggagtggtgccagaacgagtttcaggtgacgagccaggtgaagcagttcaatgccgagcaaaatacgcgtaaaacccgcttcgacgtcacgctgctgatcaatggcctgccgctggtgcagatcgaacttaagcgtcgcggcctggggctgaaagaagcctttaaccagatcgatcgttaccaccgggatgcgttctgggtcggcagcggcctgttccagtatgtgcagatctttattatcagcaacggcgtggacaccaaatactacgccaacaaccgcgccaaccacttcgaacagaccttcttctggaccgatgaaaagaataacccgctaaaagcgttggaaaaattcaccgacgcatttttgaaagtgtgccacatcgccaaaatgatcacccactatacggtgttgaacgaaactcgtaagtgcctgatggtgatgcgcccctatcagttttacgcctgtgaggcgatgatccgccatgtgcaggaaaatctccacaagcagggacggccggagaacggctatatctggcataccaccggctccggtaaaacgctgacttcgtttaaagccagccaggtgatcatggagatgccggaagtggaccgggtcatttttgtggtcgatcgccgggatctggattatcagacggcgaaagagttcaacggctttgcgaaagacagcgtggataccaccaacaacaccagcacgctgataaaacatctcaagcaaagcagcaccaaactgacgttgaccaccattcagaagctgaataacgccatcacccatgaagggtataaagcgcagctcgcacacctgcgcaaagagcgcatcgtctttatcttcgatgaatgccaccgcagccagttcggtgacacgcataaagcaatcgtgaacttcttcgagaacgcgcagctgtttggttttaccgggacgccaatctttgccgataacgtcaatatcaccaatggtgtcaaacagaccaccgaactgttgttcgataaatgcttgcataaatacgtgattgtcgacgccatccgggatgaaaacgttctgcgctttgccgtggaatatgtcggtacttacaagcgcaaagagagcagcaatgagatcgatatcgatgtggaggatatcgacaccaaagaggtgatggaaagtgacatccggttgggcaaagtgaccgactacatccttgcccaccataacgccaagacccgcaaccgtgagttcaccgcaatgttctgcgtcgggtctgtcgatatgctgatcacctactacaaactctttaaagcaaagcaggccgcactgcaggcggcggatgccaattacaagcctttaaaggttgccaccatcttcacctatgccgccaatgaagcggacaaaagtgacaaagaggcggtaaacggcctgctggatgaagaggatattagcctgccgcagggcgcgaaagttgatatctcaagtcgcgatcatctggatagttttatcaaggattataacgagctgtatggcaccagttactctgccaatgattcaaagagcttttacgactactacaaaaatattgctcagcgtaccaaagagaaaggcatcgatattcttctggtggtgaatatgttcctcaccggcttcgacagcccggcgctgaacacactgtacgtcgataaaaacctgcgttttcacggtctggtacaggcgttttcccgcaccaaccgcattctcaacgagaagaaaagccacgggaatatcgtctgcttccgcaatctgaagaaagccaccgacgatgctattgccttgttctcgaataaagatgccttttctacggtgctggtcaaaccctttgaggagtacttcggggattatcagaacgctgtcgatcgcttgttaacgctgacgccaacggtggaaagcgtggacgatttgccagatgaggaagcacagctggcgtttgtaacggcattccgcgatgtgatgcgtttgaaaaacattctcgaaagctttgccgattttgatgatgcggctaaaccgctgtcggaccagacgctggctgatttcaccagtaagtacctcgatatccacgacaaggtgaaaaaacactccagcaaggagaaagtctcgattcttgaagacgtggattttgaagtctcgctgattcatcgcgacgaaattaacgtcggctacattttgcgtctattggctggcattcaggcgatgccgccaaaagaacagcaggagcagaagaaaaagatcatggatattgtcgacagcgacgttacgctgcgcagtaaacgtgagcttatcgataactttattgaaaaaagcctgctgcatgcctcgcatgacgaagatatcactcaggtgtttgaagcctatgtcgaacaggaaaaaggtaaggcgctggcagccttgtgcagcgaagagcgacttgattccatcaaactaaccggcttactggacaactacctctttaccgacgtgatgccgcgagaggatgaagtggcggaaacgcttacctggacgccaaagattctggaacgcaagaacgtgcgggcacgtgtctacgaccgtgtgcgtgatgtgattgaaacatttatcaatgggatgcgcgggttttaa

SEQ ID NO: 128916 - DNA, 927 bp, Enterobacter cloacae
atgatgatctcatatcaggaacttgttcgcaccttccttagacctaatttatctatagcctcatccaagttcatcgcaaatcttttatccacgaaaaaatacaacaatatcttaaatcagcagaatgatgctggtgctaagtctggactcaatttaagtacaattaaaaactttggattttacgcacctaataaaatagaacaagccaaaatcgccgattttttgtcctctgttgacgaaaaaatctcattactgaacaagcagtacgacctgctgtgccagtacaaaaaaggcatgatgcataagatttttagtcaggaagtgcggtttaaggatgaatacggtgaggagtttccagaatgggaagagtctttattatctgaaaggataaaagtgcagggagggtttgcatttaaaagccaactttttagtgagatggctagtacaaaggtgctccgtattggtgatatttcggaagaaattgatctatcagcattctcaggggtattttctactgagactccagcgattcgctaccaggttaataaaggtgattttgtgatggccttgtctggggcaacatttgggaaaatgggtttaattaaatgcgagagtgcttttttaaatcaacgcgtcgcgacatttaggctattggataacactaccgatatattaagcttctattattactatatgtcaacaatggaatttattaattatataaaatctataccaactgcaagtgctcaaccgaacatatcaaataaagatattgaactgtatttgtcttttataccgaccaaaaaagagcaaaccaaaatcgccaacttcctctctgcccttgacaataaaatcgccgtcaaaaaagcagaactggacaagttaaaaacctggaagcaaggcctgctccagcaaatgtttgtataa

SEQ ID NO: 128917 - DNA, 3009 bp, Enterobacter cloacae
atgagtgatgactttcttaccagcgaacagacagaaaactacggtcgctatgtggcagacccaaatgaggttcagctggctcggtattttcatctggatgagcgtgaccttgcttttattaatcagcgacggggaaaacataaccggctggggattgcacttcagctgactacggcgcgctttctgggaacgtttcttcctgatccccttcaaattccctcattcatccgtttttacattgcggcacagttgaacatcagccgaccagagatcctttcccggtatgctgaaagagaaaatacccgctgggagcatcaggggcttatcaagctctattatgattatcatgattttggtgatttcccctggacattcagactgaagcgtttgctctatactcgcgcctggctcagcaatgagcgtccaggtctgctgtttgattttgctaccgcatggttgctgcaaaataagatcctgctacccgcagcctcgactctgacaaggctgattggcgaagtacgcgaacgggcaagtcgacgattatggcgaaggctggctttgttgcctgacagctggcagaaaacacaactggacggtttacttgaaatacctgaagggcagcgtatatcggtgctggaggagatgcgaaaaggtcctgtcactatcagtgggccgtcatttacagacgccctggagcgatatacccgactgcgtagcatggagttttcccggttgaatttctccggtctgcctgccatccagctgcggaatttggcccgttatgccggaatggcttcggtgaaatacatttcaagaatgcctgacgaacggcgactggccgtgcttactgcgtttgtgaaagcacaggaaatttcggcgcttgacgaggccgtggatgtgctggatatgcttattctggatatcacgcgttctgcaaaaaatatcgggcagaaaaagcggctcaggaccctgaaagatcttgatcgtgccgcgctattactggcacgggcatgcacgttattacttgatgagaacaccgatgaagcagctctgcggcaggctatttttcgccgcataccaaaggacaaactggctgaatccgtcggcaaggtaaatgagctggcgcgcccgcaagatactcagtttcaggatgaaatggtggaacaatatggacgggtgaagcgtttcctgtccgcgatgttgcgtgacttacactttcaggccgccccggccggggagctcacgttgtcagcaatccattatctggccgaactgagtggctcaaaaaagcgaattctcgacgatgcaccagagcaaatcatttccggcccatggaaacgtctggtctacgacagagatggtaggattctacgagcgggttactcgctgtgtcttctcgagcgccttcaagattctttgcgccgtcgtgatctctggctggagaacagtgatcggtggggggacccgcgtcaaaaattgcttcagggagctgaatggcaggcacaacgcatcccggtatgtcgggcgctgggtcatccatcagacggaactaaagcagcagaacaactggctacgcggcttgatgacacatggaaatcagtggcttcacgttttgcctgcaacgcagcggtcagcataagcaatgaaggtaagcatccctcactgacgattagcagtctggataaactggatgagccaccggcactgatacaattgaatcgtcgggtaagagaattgatccctccggttgatctgacggagctgttgcttgaaatagatgcccgaaccggttttacccgcgaattcagccacgtcagtgaatcaggtgctcgggcgcaggatctccaggtcagtctgtgcgcaacactgctggcagaagcctgcaatatagggcatgaacccctgataaagcataatattcccgcgcttactcgccatcgtctgagctgggttaaacaaaattatctcagggcagaaacgctggtcaccgctaatgcacggctggttgattttcagtccacgctgccgctcgcggggtactggggaggtggtgaggttgcctccgcagatggtatgcgttttgtcacaccggttaaaacggttaattccggaccaaatcgtaaatactttggttcaggacgcggtatcacctggtacaacttcgtctccgatcaatactccggtttccatggcattgtagttcccgggacgcttcgtgattccatctttgtactggaagggcttctggagcagcagaccgggctgaatccggtagaaattatgacggacacggcaggatccagcgatatcatttttggcctgttctggttactgggctaccagttttcccctcgtctggccgatgcaggcggggcgatattctggcgggcagataaaacggcacattatggtgccctgaatgagctggcccggggatgtgttgaactgtcaaaaatagaatcccaatgggatgaaatgatgcgaatggcgggctcactgaagcttgggaccatccatgcatcagagcttattcgttcactgttgagaagtagccgaccatctggtctggctcaggcgattatggaagtgggccgggtcaacaagacgttgtatcttctcaactatatcgatgatgaggattaccggcgtcggatcctcactcagctcaaccggggagaaggacgccatgcagtggctcgagccatttgctacggacaacgtggtgagattagaaaacgctaccgtgaagggcaggaagatcaactcggtgctctgggtctggtgaccaatgcggttgtgctgtggaatacactttacatgcaggaggcgttgtcacatcttcgcaaatcgggggaaacacctgaagaggagcatctggcaagattatcgccgctgatacatggccatataaatatgctgggacattatacgttttcgttaccggaagatattctgaagggcgagttaagaccattaaatttgaatacaaacaatgaattaacctcttag

SEQ ID NO: 128918 - DNA, 969 bp, Enterobacter cloacae
ttgaaggatcagatcacgtatcttcccgacaacgcagaccgttccgtggcaaagcaaaagttcaaaatcaccaactggcccacctacaataaagccctcatcaaccgtggctccataactttctggctggatgatgaagctattcaggcctggtatgagtcagcaacaccttcttcacgaggcagacctcagcgctattctgaccttgccatcactactgtgctggtcattaaacgcgtattcaggctgaccctgcgggctgcgcagggctttattgattccattttttctctgatgaacgttccgctacgctgcccggattacagctgtgtcagcaggcgggcaaagtcggttaatgtcagtttcaaaacgcccacccggggtgaaatcgcacacctggtaattgattccaccgggctgaaggtcttcggtgaaggcgagtggaaagtcaaaaagcatggccaggaacgccgccgtatctggcgtaagctgcatctcgccgttgacagtaaaacacatgaaatcatctgcgctgacctgtcgctgaacaacgttacggactcagaggccttccccgggttaatccggcaaacccaccggaaaatcaggtcagccgccgccgatggcgcttacgatacccggctatgtcacgatgaactgcggcgtaagaaaatcagcgcgcttatccctccccgaaaaggtgcgggttactggcccggtgaatatgcagaccgtaaccgtgcagtggctaatcagcgaatgaccgggagtaatgcgcggtggaaatggacaacagattacaaccgtcgctcgatagcggaaacggcgatgtaccgggtaaaacagctgttcgggggttcactgacgctgcgtgactacgatggtcaggttgcggaggctatggccctggtacgagcgctgaacaaaatgacgaaagcaggtatgcctgaaagcgtgcgtattgcctga

SEQ ID NO: 128919 - DNA, 243 bp, Enterobacter cloacae
atgaaaaactggaccagaaactttattgatgacatgaagcatatctggcgggagttcaggcgggatattgctgaaactaatgctaaaaaaaacctcaatgatgatgatgtggctggcgttagccattccgttgactggaataatgtacctgatttagatccgcaaaaggcggttaacaacctcgataacttctactcacggcaattaaggggaacggataatccaggtacgcgatatcggtaa

SEQ ID NO: 128920 - DNA, 1608 bp, Enterobacter cloacae
atgtctccccagattgaagcgcaaaatttaagtgaactgcaaggccgcctgtggaatattgccgataccctgcgcggtaagatgaatgccgatgaattccgcgactactgcttaggctttatcttctataaatacctgtcggaaaaatttgtcgcgtatgcaaacaaaatcctcgtagaagatggtattcagtacaatgaactgactgtggaacatccagcgtatcaggacatcgttgatgcggtaaaagaggacagtatccagaccttaggctatttcttgccaccaacggatttgttccacactatggcagaacgcgtggctaaagaccccaaaggcactggtactggctttattctggaagacctcgccactaccctacgcagcattgaacagagcactctgggcaccgactccgcggatgacttcagcaacctctttgaagatctcgatttaggttcaagcaagcttggcaacactgcgaaagctaaaaatgagctgatcggcaaagtcgtcactgaactcgacaaactgagctttaacctgagcgaagcgagttccgacattctgggggatgcttatgagtatctgatcggccaattcgcttcaggcgcaggtaagaaagccggggagttctataccccgcagccggtttccactctgctggctaaaatcgtcaccactcacaagctgaagctgaaaaacgtatatgacccaacctgtggctctggctcattattattgcgcgtgaaacgcgaagcctcgtcggtgggtaaaatctacggccaggaaatgaaccgtaccacctacaacctggcgcgtatgaacatgatcctgcacggggttcactatgcagattttgaaatcattcaggaagatacgctggagcacccgcagcatacgcatctgaagtttgacgccatcgtcgccaacccaccgttctccgccaagtggagcgccagcgcgctgtttatgaacgatgaccgctttgcacagtacggcaaactggcaccgtcgagcaaagcagacatggcgtttgtacagcatatgttccatcacctggaagatgacggcaccatggcggtggtattgcctcacggcgtgctgttccgaggagccgccgaaggccatatccgtcagtttatgattgagaagctgaactgtatcgatgcggtgatcggcctgcctgccaatatcttctatggcaccagcattccgacctgcgtgctggtgttgcgcaagtgccgcaagcacaacgacagtattctgtttatcgatgccagcaatgactttgaaaaggtgaaaactcagaaccgcctgctgccggagcatatcgacaaaatcgccgatacctacaacgactggcaagcactcgagaaatacagtcatattgcaaccctggaagagatccgtaacaacgattacaacctcaatatcccgcgctatgtcgatacttttgaagcggaagaagagattgatctcaacgccgtagcgcaggaaatccgcgatcttgaggggaaagtggcagagattgataagaccattgccgggttctgtaaggagctggggattgaagcaccgtttacagtggtggaggacgttaagtga

SEQ ID NO: 128921 - DNA, 573 bp, Enterobacter cloacae
atgctgctcaactacaaggaaatagctacgtttacggcaggctcgcacatcagccgtatccagcaaagtgcagatgggctcgcatttcgtttctatgcaaccgagcagtttctggtagatgactggcagtcaggtcttgtgtccgcggagaaagagcagtgggttaaaacacatcaggatgttgtgattacgcagaaaggagatgttgtcatcagcctgaaccatggcaaggctgttcgtgtgagtaccaaaaatgccgggcgtatcttaggtaataactacgtcaaagtggatgtggatgccagccagattgatgcaacgtggtttctctggcatttcaatgaaagcctggagggaagacgccaacggattcagggcacccagggttctaccgtcgtgcagcgtatcgcggttaatgaactgaaaaattttaccgttaccctcccgtcactcgcacagcaaaaagcgatgggggggctctatctggcgacgcgagaaaaacgcttttatcagcagcggattgccaccctgagtgaaaaacagatcctgagcctgctcagtggtatgatttga

SEQ ID NO: 128922 - DNA, 1461 bp, Enterobacter cloacae
atgcatttgagaaagctggcagtccgtaatttcagaaggctgcacgatgttgttatcgatcttgcgtcagacatttcaattttcgtaggggcgaataacagtggtaagacttctgtcggtcatgcacttcaactattcaccggtaaaagccgattcaatattcatgacttcaatgctgaatgttggactgacattgtcacatttggagaaggggcggatgctgcgtcgctaccttcactggaacttgatatttggtttgaagtaacaccgaatgatgttcatcgtgtagtcgatcttctccccagcctatcgtggtcaggttctctggttggaatgcgcgttgctttttcccccatcaatcctgaagaaatccgttcgcgtttcctcgcagtacgtcagcttgctatcgatgccacacctaaagatgaaaatggaactcccaaatacgatccttcacctcgtaatctttgggaatatcttcgcgatagactcaatgacgaatatgaactccgctattttgttcttgatcccgcacgtttcaatgcggaaatgatatccgaggaaggctatgagcctactccgctcacagggcgtgatcgaagtggtcgcgaaatactgaacagccttatccaaatcaactttttgaatgctcagcgtcatctttcagatggttccggaggttcccgttcggaagatctttctcgtgttctcagccgtttttacggacgaaatcttgaacaaaaaggtgaagattacgaagcattaattgctttagctgcgtctgaatcagctttcaatcagcatcttgaacgtgtttttgcacctacgctgaaaagtctggcgaaactcggataccctggactttcaaacccacgcatgatgattcgttcggccttagacccggcgcagatcatgaacaaccaaaatggggccgtaatacattacgcgctgggggaggatgacggtaatcctaccccaccaacactacccgatagttataacgggcttggatttaagaatctgatctttatggttgttgaattactcgacatccacaaccaatggttagcaatagaagagaatcgaccaccggttcacctgatttttattgaagagccggaagctcatctccacgcacagttacagcaagcttttatacgcaagataatggaccttcttgccatggagagtcaggagcttatgcactacaccactcaagtggtggtgacttctcattcaactcatattctttacgaacgtggttttcggccgatccgttactttcggcggaagcgttcatcaaatatgtcagcaacagatgtgctcaatctctctgttttttatgataatactgatcctgaaattcgagactttcttgagcgttacttgaagctgacccattgtgacttgttttttgccgacgtgacctgctccccgttgattagtacaccccgatgttag

SEQ ID NO: 128923 - DNA, 912 bp, Enterobacter cloacae
atgctgtttgggcagccaaccggtaagccagtcaccacccggtttgtctgggaagggttccggctgttgcaggaggtgcacggggatgtgccgctgacctacgtctacagcgatcaggacagctacgatccgctggcgcgtattgacggcgttgatgccccggaaatcttctggttccactgtcagcccaacggcacgccggagcggatgacggatagcgaaggtcaggtacgctgggaaggggtgagcagcgcctggggcaagctgctacgggaaagcgagacgcaggtatcaggatattcccagaacctgcgtatgcaggggcaatacctggatcgtgagacagggctgcactacaatctgttccggtattacgacccggactgcggacggtttacgcagcaggacccgatagggttaaatggcgggttaaatctttacagctatgctcctaatcctatagtttggacagatcctttaggtcttacaccttgtaaggggttaccatccactcgaagggctggaggtacaggcaaacattatgatcccgtaaatggtcaagggttgtatgtgctacacgatggaaagaatattatctatgtaggacgtggggatgctccagcacgtttgaatagccatgcgaatacaccgggtaaatcacatttggaacagttgacgatatttgataataatttgaccaaagcggaagctaaattcctggaacaaaggattatggatcttaatggtggagctaagtcaacaaattctttaaccaatctcctcaataaaatcaggtcatatagccctaataacccaaacgctagcaaatatgatattgcaggtcatagtagtgattggggtggggaagtattgaaagatgcgttatcaattctgaaagggaatggcttatga

SEQ ID NO: 128924 - DNA, 432 bp, Enterobacter cloacae
atgaaagtaaaatataaagagggtgacatctttgtcattccgatgagtaatgggaagtatgcgctttgccaggttgtttttgctccaaagcaaaagtttaagcaagcaataggtttctgcattttatcaatacaggatacggaggagtttgaagagaacagttcactgacacctctatcttttgaaaaatttggcaagaagatgaagattattttcactggcaaccaaaatattagcaaaggtatttggaaaattattggttatgctaatctcacagaagaaaaaaaacagttaaaaatatttaattatgctggtggcttatatgatggggaggaggaaatcaggcgtttgtctgttgctgaatatcctaattacacaactatgggggtttcaggctttgagcttgtcgacaatgttctgataaatatttga

SEQ ID NO: 128925 - DNA, 1014 bp, Enterobacter cloacae
gtgaatgacaatcagatttctgttcactggtcagatctaccgaaagatgagctaacccgtttctggcaggatgtcgatgccggcactcagggtaatttcctcattgcaccagtcaaaaaactcccccgccgcaaacgcggtgagcattccacaaaagccaagtgtgagaacccggcctggtatcgcccggagcattataaaaagctctccggacagctcggtcatgcctacaatcgcctggtgaaaaaagataaagaaaccggacaggtcagcctgcgcatgcatgtttctcgtcaccctctctatgtcgccggccgccgtaaggcggggcgtaaatatggcttccgtccggaacgtcagcgcctgctcgatgcgctctggccagtgctcatcagcttctgtgatgccggcaagcataccgtcggcatgtgtatctcccgtcttgcaaaagagctcagtgcaaaggacgcaaaaggcaatgtcatttctgaaacggaggtgacggtgtcacgcctttcacggcttattgaggaacaggtacggtttggtgttctgggtctcgcggaagaacgcgcctgggatcgtgaatcccgcacctggctgccaacgtatgtctatatcacccctgtgggattccagatgctgggcgtcgatatggacaagctgtttaaagagcaggagaagaagctccgtcagagcgccgagcgtgagcagctgatccgggaaggggtgatgagcgaacatgatgatgttcaggcccactctgcgcggaaatgctggtctggccgtaagcgtcaggaggcactcgtttaccggcgcaaaaaaggcgcggagcgtaaacgtgccaacaacctgattaagctgccggcagatgaacgactccatgcaatgtctgaatggatttaccgcaccctgccgcctgacgaagcgtactggtgcacatctgagcgcctgaaggcgctggccatccagcatctttaccagctggatctggcgctttctccaccggattag

SEQ ID NO: 128926 - DNA, 1908 bp, Enterobacter cloacae
atgtcctgggatgccttcgccgaaagcgtcaccgaggcgcagaagctcgctcagcccgatgacttcgatttcctgcaccgcatcggcgaaagttacgccaccttgcgccgctacgcgccggaattccttgccgtgctcaagctgcgggccgcacccgccgccaagaacgtgctcgatgccatcgaggtactgcgtggcatgaacaccgacaacgcccgcaaagtgcctgccgatgccccgaccgacttcatcaagccgcgctggcagaagctggtgatgactgacgcgggtatcgaccggcgctactacgagctgtgcgcgctgtccgagctgaagaactcgctgcgctcgggcgacatctgggtgcagggatcgcgccagttcaaggacttcgaggactacctggtgccgcccgcgaagttcgccagcctcaagcagtccagcgcattgccgctggccgtggccaccgactgcgaccagtacctgcacgaccgcctgacgctgcttgaagcgcagcttgccacggtcaaccgcatggcagcggccaacgacctgccgaatgcgatcatcaccgagtcgggcctgaagatcacgccgctggatgcggcggtacccgacaccgcgcaggcgctgatcgaccagacagccatgatcctgccacacgtcaagatcaccgaactgctgctcgaagtcgatgagtggacgggcttcacccgccacttcacgcacctgaaatcgggcgatctggccaaggacaaaaatctgctgttgaccaccatcctggccgacgcgatcaacctgggcctgaccaagatggccgagtcctgccccggcacgacctacgccaagctcgcctggctacaagcctggcatacccgcgacgaaacctattcgacagcgctggccgagttggtgaacgcccaattccggcatcccttcgccgaacactggggcgacggcaccacgtcatcgtcggacggccagaacttccgaaccgggagcaaggccgagagtaccggtcacatcaacccgaaatatggcagcagccctgggcgaaccttctacacccatatatccgaccagtacgcgccgttccacaccaaggtggtcaatgtcggcgtgcgcgactcgacctatgtacttgacggcctgctgtaccacgagtccgacctgcgcatcgaggaacactacaccgacacggcaggcttcaccgatcacgtctttgccctgatgcatctcctgggcttccgctttgcgccgcgcatccgtgacctgggcgacaccaagctgttcatccccaagggggataccgcctatgacgcgctcaaaccgatgattagcagcgacaggctgaacatcaaggctattcgtgcccactgggatgaaattctgcggctggcgacctcgatcaagcagggcacggtgacagcctcgctgatgcttcggaaactcggcagctatccgcgccagaacggcttagccatcgccctgcgcgagctggggcgcatcgaacgcacgctgttcatcctggactggttgcaaagcgtggagctgcgccgccgcgtccacgctggactgaacaagggcgaagcgcgcaacgcgctggcccgcgccgtattcttcaaccgtctgggcgaaatccgcgaccgcagcttcgagcagcagcgctaccgggccagcggcctcaacctggtgacggcggccgtcgtgttgtggaacacggtctatctggagcgcgcagcacatgcgttgcgtggcaacgggcatgctgtcgatgacgcgctattgcaatacctgtcgccgctcggctgggaacacatcaacctgaccggcgattacctctggcgcagcagcgccaagatcggcgcgggcaagttcaggccgctacgaccgttgcaaccggcttag

SEQ ID NO: 128927 - DNA, 2067 bp, Enterobacter cloacae
atgaactcatttccgattgaacaaggtgagcaactcagggtcggcactgtagattttgtttcacctaatgaaattagagcaatattagagattgactcacctgatactgttgctttgaatgcaggaacgcctagaaactttccaagagtaaacagttatgtattaatatcatgtgataatggttacttagttgggcaaatagagtggcttgctgtagaacattcgccttatccaaaacaaagagatgttcaagaatttggtttagtaaatctaccattcccccgaaaaaaaataagtttgaatccggtgggaatgcttaaacgtttgtccaaagatggtactgattatttcagatttcaacgaggttctgaatcgtttccttctattggggctgctattttactaccgacagatttacaacttagatcaatagtcgaatctggaaataataggcgagtgatcattggacaaagtccacttgcgaacaatgcaaatgtagctgtagatcctgatagattatttggtcgtcatatagcagtgctcggaaatactggtagcggtaagtcttgctctgtatctggattaatccagtggtcactcgaatctgcattggaatcacaaataaaaccaaatgccagatttatcatcctagaccccaacggcgagtatgcacgtgctttggggccaacgacgaaatttaaaggtagagtatttaaggttgaggctgaaggcagtgaaaaccaattacaagtaccctcatggttttggaatagttcggagtgggcatcattcacgcaagcaagtcctaaagcacaacttccattactaaaacgctccttgagagcaatgagaaatgaagaatttgatttacaaaagaatatagatatagaagttaaaaaatacctaggtacaattttggtttctttaaaagcggataaatctaaaggagcagcggcacttaatgatttccctggagccaaaaatcttttggctaaaattaatatttggcgtcagagtctggaagaatacaaagcgagattaactacaccatgccctgagctagataaattaatcatctctattcaagatttttgtgggcaaagagaaggcagatatccagattacaatgctaaagttagcgcagttgataacatcataaatggagtgttatcttcatttcagagccttggaggcgatgagtgtgaactccttcctaaaaacgaggatatccccgtcccttttgacggaaataatttagtctcctatttagaggcgttagcacaagaaaatggtagcgagcaatatgttgaatatctagtagctagaatacgcacaatgcttgcggatacaagaatgaaacccataaccaatgactcagagcatagagttgacttggctaattggttagaaacatatattgggaaagatggtgatggtgatagctgcgtttcaattattgatctttctttagtaccaactgaaattactcatcttgtgacagctgtcatttcaagaattatttttgaatcattgcaacgttatagacgactatataacaaatctttacctacggtacttgttgctgaagaagcacatacatttattaaacggtatcgtgaggacagtgaaaatcaggatgtcgcagctgtttgctgtcaagtatttgagaaaattgcacgagaaggcaggaaatttggtctcggtatggttatttcttcgcaacgaccatcagaattatcacctacagttttatctcaatgtaatacttttcttctgcatcgaattagcaatgacaaagatcaggagcaagttcataaaatggtacccgacaatttgcgaggattactccgtgaattgccttcattgccatctcaacatgcaatactgatgggctgggcatctgaacttcctgtcttagttaaaatgaaaaatttgacgaaagagcagcaaccccattctgatgaccctgatttctgggatgtttggacaagaaaggatgctgatgggaaattggtcgagagaacggccaattgggaagctgttgtaaaggaatggcaacaaaattga

SEQ ID NO: 128928 - DNA, 786 bp, Enterobacter cloacae
atgagtttttcaagtcgaacagcgacaagggatcgattacatattttcacgacgaattacgacaggataattgaagcaggagctgaaatagcaggtattcgactaattgacagatttgttggtactatagcgcctattttcagatcttcgcgactagaagtcgactatcattataatccaccgggtattcgtggtgaaccaagatatttggaaggtgtggcgcgctttactaaattacatggctcattggactggtatactaccgaaggagccataaggcgatttggattaccttttggtgcgagttcggtggaaccctttttacaagtggaggctgctggagcagcgaactatcatcaattaatgatttatccaaactcggttaaagaccgagaaacatcagaatacccttatgttgaactattcagagacttagcatctgcaacatgtcgtcctaatagtactttggtaacatatggttatagttttggagatgaacatataaaccgtgttattattgacatgctgacaataccctcaacgcatatagtaataattgcctacggcgatccactcggtagaattatgcgctttgtaaacgaaagtggaagaaaagctcaaatatctttattacttggtgaccactttggagatatcaagaatttagtggatttttatcttcctaaagcagcgatagacagatcatcaattcgtatggcagaactattgaaatcaaggggtttatatcgtacaacaatttcaaataatagcgaggatgctgaatga

SEQ ID NO: 128929 - DNA, 1905 bp, Enterobacter cloacae
atgtcctgggatgctttcgccgagagcgtcaccgaagcgcagcggctcgcgcaacccgaggacttcgatttcctgcaccgcatcggcgagagctacgccacgctgcgccgctacgcgccggaatttctcgacgtgctcaagttgcgggccgcgcccgccgccaaggacgtactcgacgccatcgaggtgctgcgcagcatgaacagcgacaacgcccgcaaggtgcccaccgacgcgccgaccgagttcatcaagccgcgctggcagaagctggtgatgaccgacaccggcatcgaccggcgctactacgaactgtgcgcgctgtcggagctgaagaacgcgctgcgctccggcgacatctgggtgcaaggctcgcgccagttcaaggacttcgaggactacctggtgccgcccgcgaaattcgccagcctcaagcaggccagcgaattgccgctggccgtggccaccgattgcgaccagtacctgcatgaccggctgacgctgctggaaacgcagctcgccaccgtcaaccgcatggcgctggccaacgagctgccggacgccatcatcacggagtcgggcctgaagatcacgccgctcgatgcggcggtgcccgataccgcacaggccctgatcgaccagacggcgatgatcctaccgcacgtcaagatcaccgaattgctgctggaggtagacgaatggacgggcttcacccggcacttcgcccacctgaagtcaggcgacctggccaaggacaaaaacctgttgctgaccacgatcctcgccgacgcgatcaacctgggcctgaccaagatggcggaatcgtgccccggcacgacctacgccaagctggcctggctgcaagcctggcacatccgcgacgaaacctacggggcggcactggccgagctggtcaacgcgcagttccgacatcccttcgccgagcattggggcgacggcaccacgtcatcgtcggacggccagaacttccgcaccggcagcaaggccgagagcaccggccacatcaatccgaaatacggcagcagcccagggcggacgttctacacccatatctccgaccagtacgcgccgttccacaccaaggtcgtgaacgtcggcgtgcgcgactcgacctacgtgctcgacggcctgctgtatcacgaatccgacctgcggatcgaggagcactacaccgacacggcagggttcacggaccacgtcttcgcgttgatgcacctgctgggcttccgcttcgccccgcgcattcgtgacctgggcgacaccaagctctacatcccgaagggcgatgccacctacgaggcgttgaaaccgatgatcggcggcacgctcaacatcaagcacgtccgcgcccattgggatgaaatcctgcggatggccacctcgatcaagcagggcacggcgacggcctcgctgatgctcaggaagcttggcagctacccgcgccagaacggcctggccgtcgccctgcgtgagctgggacgcatcgagcgcacactgttcatcctggactggctgcaaagcgtcgagctgcgccgccgcgtgcatgccgggctgaacaaaggcgaggcgcgcaacgcgctggcccgcgccgtgttcttcaaccgcctgggggaaatccgcgaccgcagcttcgagcagcagcgctaccgggccagcggcctcaacctggtgacggcggccatcgtgctatggaacacggtctatctggagcgggccgcgaacgccttgcgtggccacggtcaagccgtcgatgacggcctgttgcagtacctgtcgccgctcggctgggagcacatcaacctgaccggcgattacctctggcgcagcagcgccaagatcggcgcgggcaagttcaggccgctacggccgctgcaaccggcttag

SEQ ID NO: 128930 - DNA, 459 bp, Enterobacter cloacae
atggaaaacattgcgctcattggtatcgatctgggtaaaaactctttccatattcattgccaggatcgtcgcgggaaggctgtttaccgtaaaaaatttacccggccaaagttgatcgaatttttggcgacatgccccgctacaaccatcgcaatggaagcctgtggcggttctcactttatggcacgcaagttggaagagttggggcattccccaaagctgatatcaccacaatttgtccgcccgttcgttaaaagcaataaaaacgactttgtcgacgccgaagctatttgtgaagctgcatcgcgtccgtctatgcgttttgtgcagcccagaacggaatctcagcaggcaatgcgggctctgcatcgtgtccgtgaatccctggttcaggataaggtaaaaacaaccaatcaaatgcatgcttttctgctggaattggggttcgaggtccaatga

SEQ ID NO: 128931 - DNA, 552 bp, Enterobacter cloacae
atggtcgctctccatgaggcactggcgaaatgcagtgcggaaaacccagtgttttacgaagatgaagtggatattcatctcaacccgaaaatcggagctgactggcagttacgcgggcagcaaaaacgcgttgtcacaccgggccagaatgaaaagtactatcttgccggtgcgctgcacagcggtacgggaaaagtcagctacgtgggcggtaacagcaaaagctcagccttatttatcagtctgttaaagcatcttaaagcgacataccggcgggcaaaaacgattacgctcattgtcgataactacatcatccacaaaagccgtgaaacgttgcgctggctgaaagcaaacccaaagttcagggtcatttaccagccggtttactcgccgtgggtcaatcatgtcgaacggttgtggcaggcacttcatgagacaataacccgaaatcaccagtgccgttcaatgtggcaactgttgaaaaaggtccatcactttatgaataccgtcagcccattccccgggggaaaacatgggctggctaatgtgtag

SEQ ID NO: 128932 - DNA, 348 bp, Enterobacter cloacae
atgacgctttacgaaattatccaggaactggagaaggctggtcatgacgatatctggatcatgacatcagataatggcgacagttataaaaaagcaccgatgtttccgggttcatggctccatcccaaaattgtcgcccgtgatggacgggttcttgccgaccgaatggcgaaacccaatgagtggactctatgcggagactggaggaacgtgtcggtacgtccacagagtgtggcgccttaccaggcaatatcgctcagggggcagatctccagtgtacgggagagagctgtactcgaagccattctgccgggtggagatgacacttctgataaaaagcgactctga

SEQ ID NO: 128933 - DNA, 150 bp, Enterobacter cloacae
atgggaagcatgaaagaccagatgatggatattgaatctgaacgatttgataaatggcttgcggaaaattatccggatgttgtccccggctcagaagaatgggaacaggccgctaacctttattgctgggaacaggagtatctcgcctga

SEQ ID NO: 128934 - DNA, 981 bp, Enterobacter cloacae
atgagccatcaactcaccttcgccgatagtgaattcagcactaagcgccgtcagacccgaaaagagattttcctctcccgcatggagcagattctgccatggcagaatatgaccgctgtcatcaagccgttttatcccaaggcgggcaatggccgacggccctatccgctggagaccatgctgcgtattcactgcatgcagcattggtacaacctgagcgacggtgccatggaagatgccctgtacgaaatcgcctccatgcgtctgtttgcccggttatccctggatagcgccttgccggaccgcaccaccatcatgaatttccgccacctgctggagcagcatcaactggcccgccaattgttcaagaccatcaatcgctggctggccgaagcaggcgtcatgatgactcaaggcaccttggtcgatgccaccatcattgaggcacccagctcgaccaagaacaaagagcagcaacgcgatccggagatgcatcagaccaagaaaggaaatcagtggcactttggcatgaaggcccacattggtgtcgatgccaagagtggcctgacccacagcctagtcaccaccgcggccaacgagcatgacctcaatcagctgggtaatctgctgcatggagaggagcaatttgtctcagccgatgccggctaccaaggggcgccacagcgcgaggagctggccgaggtggatgtggactggctgatcgccgagcgccccggcaaggtaagaaccttgaaacagcatccacgcaagaacaaaacggccatcaacatcgaatacatgaaagccagcatccgggccaaggtggagcacccatttcgcatcatcaagcgacagttcggcttcgtgaaagccagatacaaggggttgctgaaaaacgataaccaactggcgatgttattcacgctggccaacctgtttcgggcggaccaaatgatacgtcagtgggagagatctcactaa

SEQ ID NO: 128935 - DNA, 657 bp, Enterobacter cloacae
atgtccgccccggaagggatggcgctgaccagcggggagcacctgcaaattgccgccagcaaaaacgtcgccattaacgccgggggcgatatcagcattggaacaatgggcaatgcgaccctgcttaccggggagaaactggggctgtttgcccgcaccggacaactgagcctgaaatccggggaagggcctgtggaggcgcaggcgcagaacggcaatatgaggctgtttgcggagaaaaagttgacgctgagctcggcgggtgacatctccctgaccgggaaaaaacgcatcacgctgattggcggcgggagctacctgcggctggaggcggggaaggttgagtacggtacgacagcgacgtatctgcgcaaagttaagcggactatggtggcggcctctaataatttacaagtcacaacaaagccaatgccatttattgatgatctgagaaaagatggtttatatgatgagcaattccgtgtcctggatgataatggcaagcctttagccaacgttccgtactttatccgtaacgaatataatgaaacatttaaaggtgtcaccgatgctcaaggtttatgtaaacgcgtttttacaaaggaaccatccaaactaaggaaggtgcgaataagcggggaaattcttctcggctga

SEQ ID NO: 128936 - DNA, 204 bp, Enterobacter cloacae
atgaaattcatccctgcccgaactgccgccgatgtgctggagataatgaaatcataccgtgacgatctacgtgaaaagacattgtatgaaccatcctggtctgtgctggaaaggctcatttcaggtaatgactccaacttactgatagtgtcttatgttcagataatgcccgatgactttgtcatgcagctccaccgattttga

SEQ ID NO: 128937 - DNA, 1005 bp, Enterobacter cloacae
gtgagtcagtttttttctcttaaacggttttttgccgccgttgtgcttgtgatgtcaggcgcttgttttcaacctgcgtgggcgatttgcaccatttctggagaccatggcagtcatgttgtgaccttcccgatgcctcccacaatctacctggagccggatacgcccgtcgggaccatcatttacgatcacagtgcggagagtggggaagtatcggtagattgtggcggcagtgatgtgtattaccgaaaaggttacctggctataacggacgccgatgcccgggaggatgtgctgcctggtgtctacaaaaccaatataccagggatagggttccgcgccgcggcatcgacggagaggtttcccgcttacctggaggaggatttagtcaggccgtggcatctggttggaatgatacatggttactcccatgctacgactgtatttcgtgcagtagcccaactggtggtgattggtgatgtgcaggaggggatgctggacacctcgcgtctgatgtcccgggaaacgcttgatgatgctgttgttggcgagatgcgattctcaccgaccagcgtgcgtatcacgaccaatacctgcaacctggaggataaaaacatctacgtcccgctcagaaccgttcatgcgggcgatttcgatgggcaatattccgatatcctgaccgatgacagctttaagattgagatcacccgttgtgccgctgggacaaaagtggattacaaattcaccagcacaggctcaacgggcgtgacaaacggcaatattctcgacattgccagcggcgaaggtgccgccagaggcgtagggatccagattctggataaaaataacgcggttctgaattttgatcaggactatacggcagtcagcagcgtcagcgccaatgaagctgtgaccatcccccttcaggcgcgttacatcaaaacgggtcagattagtgcggggaaggttgaggctatggcgacctttgaagtcttttatcgttaa

SEQ ID NO: 128938 - DNA, 2478 bp, Enterobacter cloacae
atgtcgtcgttctcatattacagatcggttctgaatggggtcgcgttagccatgctggcgttattccagcctgcaaatgcggacgacgaattcaacctgcgcattcttgagctggatacgccgctggaaaacacttctacgcttaaaaatttcatcggtaataacagcttactggccggaagctatccagtgaccatcaaatgggggcgagacattatcgataaacggaccgtgacgtttgttctttcaaaagacaagcagaggctgctgcccgaattcaccaaggccgatctccgggattttggtcttaaggtagataccctgccggacatgaaagaactggatgatagcgcccgggtagaagatatctcgcatttcattgaaggggcgcagtacgactttaatcaggataatcaaaccctgagcctggttattccgcagatttatcgcgaccaaacggcggcagggacgatcaaccccaaatactgggatgacggagcatcagccgcctgggccagctaccaggtcagcggttcgcagcaggagacagattccggaaaaaacaggtccacctggctggggctgaattcgggcataaaccttggcgcatggcgactgcgtaacaacagcacctggagtgatacctccggctgggatgccatcagcaccagcctgcaacgtgacattaaagctctgcgaagccagctggagattggccagaccgcgaccaacggcgagttatttgacagcgttcagatgacgggcataaagcttgaaaccgatacctcaatgttgccaaccagtcagcagggttttgcccctgtagttcgcggtatagctaatagcgatgcgaaggtcaccatcaaacaaaatggctataccgtatatcagaccaacgtcgcacccggccccttcgaaattcgcgacttaagtcaggtgacctccgggaccgatctcgaagtgaccgtagaagaagccgacggcagcgaacatagctttattcaggccagcgcctcggtacccattcttcagcgagaaggggcgtttaaatattccctggcagcaggtacgtttcgcggtaacgaaggagaagaagagcctgcttttgttcagggaacagcgatttatggcctcccttacggcgttacggtctataccggcgcgctgggggcatccctctacaatgcgtttctggccggcgtcggcgcggatttggggcgctacggctcggcatcggttgatgtgaccgccgcgcataccgtatttgacgacggacgagatcccgccagcggcctgtcatggcgcgcgcagtattcgaaagatattcctgataccgacaccacggtcacgctggcgagctatcgctactctacctccgggttttacacctttcaggaggcgatcgaccagcgcgacagccacattgacgacgggatctacacctatcgccggatgaataaccgtcgcagccgtgtgcaggttaacctttctcagcgagtgggagactggggctccacctatattaacgcctatcaacagcactactgggatatgagcggcagcgagcgcagcgtgagcgccgggtttagctcaagctggcgcgatatcacctggtctgtcagctataacctgacccgcaccccggatgccgacaatgacaggcagatggcgctgatggtcaacattcctttctcccactggctgccaaatgcatgggcaagctacagcctgaataccgccagcggcggatatacctctcaccaggccggtatcggcggaacggcgctggaggacaataacctcagctacaaccttcagcagagctataccagcaacaatgtcgggtacggcgccagtctttcagggcgctaccgaggctcggctggcgaggttgggctgggttacagctacggcggcagcaacaggcagtggaattacagcgcgaaaggctctgttgttgcccatgagcatggtgtgacgctcgggcagtccgtgcgcgacgcctttgccatcgtgcatatcaaagggggcaacaacgttaaagtccagaacggacgcgggatttataccgactattttggcaatgcgattgtcccgacgcttacggcctatcgtcataatggcatcaccgtgaacacccaggatcgtgacgatctggacatcgaaatggcgacgcaggatgtagtgccgaccaaaggggcggccatgatggcgaactttgatgcgcgttcagggcagcgggccttgattaccttgttataccgtggaaaaccggtgccttttggcgctctggtaacgtttgaaaataacacggtgattgtcggtgatgacggtgaagcctggttcacggggttacgtgatgttgttccgttcacggttcagtggggagaagaacaggagcaacactgttccggcgcggtccaggtaccgtcttcgggcgtatccggcattttaaaaaccacgataagctgccagtaa

SEQ ID NO: 128939 - DNA, 678 bp, Enterobacter cloacae
ttgctcggctgctgttccgcgcaggccagtattgttctgggtggcacccgtattgtttatccatcgaataaatctgaagtgcagattgcgctaaaaaataaagatttgcatacccgttatttagttcaaagttgggtcagtaaccctgacgctacaaaagcgccttttgttgttacgcctccggtttataaattgcaggaaaatcgccaaacgcttttacatattatttataccggcgataaaaacgcgcttccaaaagatcgtgagtcactctttgttgcgaacgtgaaatctgtttccgcgcttgcccctgagctgaaggataaaaatacattgcagtttgcaatgaagacgcggctcaaactgttctggcgtccgtcgcagttaaaagaatctgatgcgcttgaggcatgggaaaagatcactttccaccgtcaggggacgcagcttgttgcgaaaaaccctacgcctttctatgtctcctttggcgaattggccgtgggggggaaagccgtgcctgtcgttgaaacaaaatccatccccggtgcggtggcaatgatggttgcgccttacagcgaacagacgttcaccttacccgcaggcgccaggggggctgtcacatggacggccattaacgaccatggtgcgcaaacccgtcagaagcagcaggctttataa

SEQ ID NO: 128940 - DNA, 597 bp, Enterobacter cloacae
atgtttatctcttataaggaatattggatgaaaaagcagattcggtgcacttttttagcggcaggtattatggctgtttcatcgctgcctgttatggcgagtgattctggtaccgtcaatttcgcgggtaaaattgttgctgatacctgtgtcgttaatgttgatgattccaactcaacggtatcaaccgttacgtttgctgacacctatccgtctgactatggcacagatggaaaaattggcacctctaaagatttcaaaattgaagtgtcaggctgtgaccctctggtgtctaaactgaaccttaaatttagcggtaccacaacggatgcagcctataagcgtctgcaaaacgatctgacgggcgaaggtaatgctactcatgttgggatcaccgtaaccaataaaaacggcggaaatggagatgtgctgtttaacggctctgttcctgacagcgcgacggatgtaatcaacaaccctgacggcacgacggcctctgtttttaactataccgcgaatgtcatccaggtcggtgatactttgccaaccgcaggccattactcggcttccgcgacatttgaggttatgtatcgctaa

SEQ ID NO: 128941 - DNA, 573 bp, Enterobacter cloacae
atgaaaaaaaatctttatagcctgccagtcgttgccatgatgatgctggcgttatcaggttcggcgctcgccgagggcacgaatctcgatgttaatttcacggctaatatccgtgaaaccacttgtgatatgaaactggttggtggtgagggttccgatactcagcaaacgctgaaaatcggtggcggtcaggtgcgccttgacgaggtaaaagccggaaccgcaaaagccaatttcaaaatcgcgatggttgaatgtccatcatccctgactggattgaaaacgacggttaagggaaccaaatcaggtgatctggcctcggggcttgctaacagtatagcaaaagccagcggaggcgcagattactccgctgttgaaattgccagagccgatacaccaaattccccgtttattattaactcaaccgtggatacggagcgcttaatctggactacaacagaaatccagaataaagaagtggccttagtcgcaacattacgtgaaaccaaagcaaataacatgaccattggtgattttcaaaccacggcgacttttgagtttacctacgagtaa

SEQ ID NO: 128942 - DNA, 564 bp, Enterobacter cloacae
atgaaatttaaaacaacttttatcgccctgtccgtttctgccactctgttctctggaatggcaggtgcagccattacgggtaccagtagtgtccagatggactttcaaacaaaggtcataccgggtacctgtaccgcaaaagtggttaacggagcaggtgcagaatctagtgaaattgcgtttggcgacgtatacaaatctgacctggtaaacaaaacccgcgtcgagcccctcaaaattaccctcaccaactgctctggggtagaaaaggcaacggtatctgctgcatccggcgctggcggaggatgttctggaggtgacgaaactggtgattcctatgcagctggtttagcaacaggcttcgaaatctggtccggtactgtcgatacaggtgtgctgatgagttgctatacacccccgtcgcctcaggaagtcaggattactaacggcacaggcgagttccccatgaactcacgcatcgttatcgccaaaggtagagacattagcaaggtgggtacaggtgcggttagtgcgccagtgacgtttactgtcgcctatcaataa

SEQ ID NO: 128943 - DNA, 1065 bp, Enterobacter cloacae
atgaagaaactactgaatatattagtattcgtgatgctcggaatttctggcgcaacgcatgcggagtgtaaattttacgcgggcaatgacagtgtattaattatgtctccgggtactcagccggtgattactcctctgcctgttggcacggtaaccaccccaacgcagatcagtaccacgatcacgatggaaactaccccgacattaaaatcgcattgtgcaggcggtaatgatggttcagatgtttatcagttaaccgatagcacgatgctggcaggggcgatcgatggcaaagcgatgtttcgcacaaacattccagggatctattacacacttgctttcttcccggatggtaatgccgtaacagcgtggttccctgaaaatcagggctttttttacaaaactgctgacggtaagccattggcttttagtgagaaaaactggcatgttcgtatggaattttggcagacaaatggcttcaccggtgtgccccttgatgagaacttcctgactgcaagcagcggtccaatcggacaaattatcatcggagatccgcatgaggagagcacatatgaccatccacgtccctatgtgaatatgtctcagatgtcatttaattttcccttaaaccgtccaacgtgtgcattacgtgcgcccacaacggtaaaccttggtgactggtatcccgcagaagtcgaaaacgggaataccagcaaagtcgagttccatgttacgggtacatgtgtaaatacaaccgctgtttactatacgttatcctccacacataccaccgcagataaaaaatattttaccaataccgtcgagaatgcaggtggtgttactgcggcaggaggcgtcggcgtcatgattatggattctgaaaatgatcattaccccgtgccggcagacagttaccaacgtgtcattgctataggagagattgttggggatcctgttagtattattgacagatcactttgggccaggctgatcaaaaccggtagcgatccggtaaccgtcggtgttttcggcaccaccgtgaccattcagaccacgtacgaataa

SEQ ID NO: 128944 - DNA, 693 bp, Enterobacter cloacae
atgaaaaaacttattattgcaacagctgttgcaatgactctgtctgcggcagcgcatgccgactccactgcggtattaaaattaaaaggtgttttaaccaatgatgcctgtacgccgacattaagcggtggcggtaccgttgatttcggtactaaatacacctacgcgctatctccaactgccactaaccaattaggtaataaagatctgacactgacgatcgcatgcccctcgcctaccaaggtgggctggacaatgacggatgaaaaggtggattcactggttacgcttaatattgaaaacgcacgttttgacggggcggccatcagatatgaacctgtcgaatttggcgtaggcaaaactgcggggggcatcaagattggtgcttactctgtggcaattgatgcagacaacaccctggcagatgggacgaaatctgacgtctatattgctgatagagccagtggcacttatgagtggcgcaccaaggtcacaaacgaccaaaactggagtcttgtctatggtgatagcgatcaaacctataccgtgggctctgatatgcagccagccgcctttacgaatgccgtattcccgctgcgcgtagcgctcgccgtgcaggatacgacaacgcttgcgatcaccgacgatacgcctatcgacggccaggcaacagtcactctgtactatctgtaa

SEQ ID NO: 128945 - DNA, 1323 bp, Enterobacter cloacae
atggctaagtataaggcgtatccggagtataaggattctggggttgagtggttgggggaagttcctagtcactggaatgtagccaaaacaatgcgttattttaaaatcgcaatggggcagacaatcttaaaagaacaactcgaagatgacggagaatggcccgtttactctgcaactgaaggtgaatcatactttggctacgttagtagtccgcaagttaaacttggtgtaggggacctagttataccggcacgaggaaactcgattggttctgttaaattagtatcgggaaaatcaacaacaactcaaacaactatttactgtaaacatctgactcaagctatctatcctgcctttgcatattattttatgttaggcaataggaaaaatttattctggttcacacaaacggctattccacaaattacagttgaagaggtcggatgtaatcctatcctcctacccacttatgaagagcaagttgttgtagcatctttcctcgatcacgaaaccgcaaaaatcgataacctgatcgagaagcaacagcaactgattgaactacttaaagaaaaatgtcaggcggtgattagccatgccgtcaccaaaggactaaaccctgatgtgccgatgaaagattctgatgttgagtggttgggggacgtgccagaacactgggaagtatcaaaatttgggtatatctcattagttgttagaggtggctcaccaagaccagcaggtgacccaactttatttaatggtgattattctccgtgggtgactgttgctgagataacaaaagataatgaaatatatttagatagcaccgatacgttccttactaaaaaaggaagtgagcaatgtagagtgtttaaagcagggacattattgctatcaaatagtggtgctacacttggcgtacctaaaatccttagcattgatgcaaatgcgaacgatggggtcgttgggtttgaattgttaaatattgatcatgaatatgcttatttctatctttcaacattgacaacaaatttaagagaaagcataaaacagggttcgggccaaccaaacttaaatacagatatcgttaaatcgatagcaattccgattccgccagagaacgatatccaacgaatagtttcctttataaaagaaaccatcaaattgtactcatcaatagagtctggtgctatggagcaagttaaacttctccaggaacgccgcaccgccctgatctccgccgccgtcaccggaaaaattgacgtccgcgattgggttgccccggacacgcaggatgttgaggagccacaggaggccaccgcatga

SEQ ID NO: 128946 - DNA, 489 bp, Enterobacter cloacae
atgaacaacgtaaaattcctgttgaaaaacagaaaattcattatttttatgcttcttttgcttatcttcatggtgggtgttgtcaccagtcttcagtatcgccatcggcttcttatcgactgtgattcagattttgtttttcgcgctccgcaaaatcagtatgagatgaaaggaacaatgaagttgaaaatggatcgtgacagacagggtcacatcagaattgacggagtagtgacgtcgcctgacggtaagacctggataagtcgtgatgctattttcacgtaccataaactgaatgcgacctccttcagaatggacaatctcaggattatcaaaggtgaacgggacacggcatcggacaaacattttgctgagaacttttactcgctggtagttaaaacgcgccgggttctgacaatacatcgtatcgagaatggttacctggtaggtaattatcgcgcccctgtctttatgtgtattaccccttaa

SEQ ID NO: 128947 - DNA, 777 bp, Enterobacter cloacae
atgctttttatcattgaggatcgtgtttactttcgtatcgacgatggcgcactgtgggagaaaaatgacgaaggagccaaggtcattctcagcccgatcgttgccagactgctgcacctgtttttgcaggaaaaaggcagagtcgtgacaagggaagaaatcatgaattatgtttgggagaagcatggattagaaccttccaataacagtctcaatcaatatgtctcccagctgcgtaagttgatggctcattttcagcttcccgatgaaaccctcagaacagtacccagagagggttttatactcagtcatgagttaacgattagaacagaaaatgattcattatctttcactccggcatcattgagtgaagaatcacatcacctcaagcaaaaaattaagccgccaatgggctattgggcgatcttttttctactgctggttctcatcgccacgcctgtggtggtaatcttttccactgatatgatgcataaacaaagtatgtccattacaccgactaaaataggacacgttgggaattgcccggtctatgccgtgctgatggggcgaaatgcgcaattaaacgaggcgctttcctctgctaaagattatatcggacaaaacaacatctcctgcaacgatgacagcatcctttactttttctccaccggaggggtactgaagaatcaaagtggaagagcattcttatcacattgctatatgaaggataatgaaattatttcctgtatggattacgcctatcattcctggatgtaa

SEQ ID NO: 128948 - DNA, 762 bp, Enterobacter cloacae
atgaaatttaaaaattttttcaatgcggcaggagtggttttatctttcgggatgatctccacctccgttaatgctgcgccaatgataggcattggcagtatgtatgatgttctgactcctgacagtcatagtttgactaaacgtatatataacagtggggactcaactgcgtttgtcagagttgaattgctcgaaatccatcccgggcagaaaaatacgccaaataatgaaacgcctgtgaaagaaatgtcaggtaacgtgcttgaaaaaaatcggctcgttgtcacaccattaaggatgattattcctcccaatggatttcaatctgcgcgcgttatgtggccaggtgtccgggataaagaacgttattttagagtcaggtttacacccgtaatgccacaggcagaagatggtttcggattagatagcaaggccgcagggcaatatcgggaagaaacacttcaggcaggcgtaaatatccttacggggtatgggacggtggtgattgtgcagccagagaaacccgctttcaacacccttattaagcagagtgactcaggtggtgtgagtgtcgtaaacaaaggcaatgcaacggttgtccttgaagatatacgtcagtgcaagtccgcaaatacggattgcggagaagtgagccgcgaatttattttgccaggccggagttattctgtggctgggaaaaatgggtttaaaaccaatttcactctcatcgagggaaacaataaacaggcgaagtcattctga

SEQ ID NO: 128949 - DNA, 528 bp, Enterobacter cloacae
atgaatcgtcaatttaatgctattaaaactacgctggctgctgcatttatctcttgtgccgcaatgaccggcgcagcgaatgcagctgagagccagagttacactattaacctgtcggccaccgtaccttcagataccttccaggtgatcccggttgatgcaggctggatcgatcagacccaggacatgggatatgacatcgccagcagcaagctgcaaatttttgagaagcagttccagtacaaaaatacggctggcgcaattcaggcgaccctgaccggtaacctcaattctgacggcaaaccccagctttctaatggtaccgatgttattccgctggctgtgagctttaacaatacgccactcagcaaaaccgcaacggaagtggtaagcgaaagtgcggcgaaagcagggggtcgtacttcactgaaaatcacccaggccgatgatgccgctctgaccgtgaacgggatgtttaccggctcagttgcgatgattttcgagcctgttgtcgctgtgactccttaa

SEQ ID NO: 128950 - DNA, 2355 bp, Enterobacter cloacae
atgacgctggccgcgaacatgcgagctctccctgaggatttcagacgttacttttatgagtccgaagtgatggctcaggtatatctgaatgacacccttttattcgaggctgcgatttcattaacggaaagcggtgatgttcgtcttatacgtaccattgaggagtcagaaagcgtcgattcggatgtcaggaaccggtggaaagaggttctcaataaaggcatatcagtgggtgaatgtaccacacagtgtccgtcaggtctgatggcagcagagtatctgctcgatagctcgattctgaaactgtacaccgcacattatgaaacagcacgaaccgagaacagttttatctcgctgccggaaaaaatgcccggcggaatgattatgtacaacgatatcactgccaccaacagtgataacacgcgtagctggggtattaactcatcgcttaccgcgtcgttgctgggctggagccagcgagtgtcattccagtcttctggtactgacgggcaataccagtacagcagcagcacactctacgaactgtattcccagaaagagctgccgggacatttcgttcgcctcggctttttcactcccgacagcgatacgggcaacgttgagatgtccgggttcgggtatgacacggttgtgggggccatgtggggaacatccgacgccttactgattaacggcgacagcgtcagcgcctggccggtctatgtgacaggacagaatcagtccgttgcggaagtctggcgcgacgggcggctcatccatacgcaacagctcgaaacgggtgtgcaggcgctggacacgcgccgtctgccgggcggtatctacgacatcacgataaaaattattgaaaatggcaagaccgtcgacacccagcaggcccagatttataaacctcagggctggaacaaccctgacaagcgctggcgaatgaacctgtggggcggacagcagcaaaccatcggtactggcacccgttatggcgacgataaccctcatcctgcggcggccggtggcggcattgactatcttgtccacccgcgggtggtcatgggggtgagcggggcggccactgagaatgagcatcaggtgcgggtcagaagtaacattacgctcacgcccagtgattcgctgtttgcccagtacacgacgggaaataatgacgttcagtcaaaccagaataccgatatccgctattaccgtactatcccgggaggaggggctgccagcctgtactggcgttcgacgaccaccgacgtttatggtcaccagacacgttatcgccagcaaggggatacctggggggcgtcattatcgctgcgtttgccctggacaacctcgttgacggtaaatggacaatatacagaaacggcctggcggcagggctttggggccgatgttgctaccaccacattgggaacgcttgcagggcgtaacatgaattttcgggtcagtgcctgggatcgccccgggtttagcaacgggcgtcgggaccacggcatgtcggtggggctgagcctgtcgctcgcaccatcctcgcgacacttggtgtcagctgaaacgggtatgaaccagaatcacggctactccagcctcagctaccagtaccagcctgatgagagcagtacgcttcgcaccgtgggcgccggtgtgtcctacagcgcgaaaaatacagtccttaatgcaaacggatctgtagataccccgttcgtcagcgctgacggctgggtgcagcaccatacgcaaaacagctcaaacacagcagggggcaacctcagccaggtgcttatgcttggagggggaaaactggcatcctccagcgggagtgccagccgcagcaccggggcagcactcatcgttgatgttgactcggaccacaatgacatcggtatcctggcctccgggaagatgtcagaaacgcgtctgttgcctggcagaaatgtggtgcaggcggaacagtggaaaaaagacgtcatccagtttagcgcgacggggggcgatagtgtccgggtcttccctgaacaacagagtgttcagcttaataagggaagcgtgcaatacgtaaaagtgaaagcagtgaaaacctatacgcttgtaggcactttgcagaatgaacaaggagagctgctaaaaaaccgtttcgtggaaagtgatatcagcggggcggtaataaacgcagaaggggtgttgacgttagagacaggtgcaaaaaacaaaaccttactattaaaagaggaaggaggaaaaccgccgctcaaatgcagtattcctgcgacagatgatgccgggactaatgctattcgttttgtcgatgcgctcaagtgcagcgtgatgaattaa

SEQ ID NO: 128951 - DNA, 1254 bp, Enterobacter cloacae
atgaaaaagcgactctttgcgttttacttatttgcgttaccgttgcaggctgccaccgtaaacattacggcttcgttttcgccatcaatgtcagacccatcgaatgataaatttgttaacactacaccgcagtccggttactgtgtaaattatcctagtgtatgtggaaataatcaaacatttagtatcaatatgggtggaattacggcgtcactggttacgtcagggctgaccgcaaactcagaaccaagaatggggatctactttggtttgcctggggcatggcgagacattgtcgtcagaaatagtgaaacaggggaggccagcacgcttaagtttagaatgagtgcgttttcagccagatataatactctacgagcgtggagtctgacagaacatcaacaagcctggaatggaggttcgtttgtttacgccgcctctccatgctcgaattccggggttggtgcttatccagcaggatcttatctttttatgtggaaagtaccgaacagggatgttgcgtgttataaaactgcgaaaacggatttaacaggagagccccatcttattaatactatcagcatgggttatgagctgagtacacctaacccattacagatgagttcaggtgtttataaaggagagatggtgctcaatgttggtcctggtggcgaaattgattttggggataattacgagccatcagatactacgctcgtgttaaatttcacactttcggtaaaccatgaactaaagctgagtacaacagctgataattacaacgtttcccttttgccgtgtgagcccggtaaagtttgcactgccgggcaaggtgatgcgcgctgggagcggtggatggtaaatcgtattacacccaacctgacgggccaaagcaaatttaacttgtccagttcaggttcattcacggtatatcttcagtgtgaacaaaacatcggttcagactgcgccctgaggagtgataaattaccttctcaaagggtgcccgtgcaggctttactgacgttaccggataatattgttgatagtaaaacaggaacaggagtggtaagaagccgtctcgccgttggcaaagatctcacaaagaatttatttctgactaatgtatttggtcaggagaaatcgggcagtattgatttccttattgaacaaaaagatgtcgatacgatgttgaatacgcggcctgatgtttatcgtggggcagtaaccgtcatttttgatccgttaattcactaa

SEQ ID NO: 128952 - DNA, 1023 bp, Enterobacter cloacae
atggggaccctgacctccccgctggtgcgcggcaaggatgttccgtctaacgccgtgatgctcaacgaaaccatcccggattacaccggcgcgccaatggagatcccccgggcgatcgccattttcgagcgttacgccgggccggaatataagcatcaggagttaggtaaacccaacgtcagcaccgaacgccgcgagctggtggtgcgctgggtcagcaccgtgggtaactacgattacatcttcgactgggtattccacgaaaacggcaccatcggcattgatgcaggggctacgggcattgaagcggtgaaaggcgtgcagacgaaaaccatgcatgatgccaccgcgaaggatgacacccgatacggaacgctgatcgaccataatattgtcggtaccacccaccagcacatctacaacttccgtctggatatggacgtggacggcatcaacaacaagctggtggccatggatccggacgtcaaaccgaacaccgctggcggaccgcgcaccagcaccatgcaggtgaatcagtatgatattgataccgaacagcaggcggcgcagaagtttgacccgggcaccatccgcctgctgagcaacaccagcaaagagaaccgcatgggcaacccggtctcgtatcagatcatcccttacgcgggcggtacgcacccggtcgcgtccggcgcgaagtttgccccggacgagtggatttatcaccgcctgagctttatggataaacagctgtgggtgacgcgttaccatcccgtcgagatgtacccggagggaaaatacccgaaccgttccacgcacgataccggcctcggccagtacagcaaagataacgagtcgctgaacgatcaggataacgtcatctggatgaccaccggcaccacccatgtcgcccgcgccgaggagtggccgataatgccgacggaatgggtgcacacgttactcaagccttggaatttctttgacgagacgccaacgctcggcaagaaaaaagtcgagataaaataa

SEQ ID NO: 128953 - DNA, 1404 bp, Enterobacter cloacae
atgctttcaaaattaaaactggagaattttaaatccttttgttccatgcaagagatagaattcgcacctataacactgatttttgggcaaaattcttctgggaaaagctccataatacaagctattcttggtttaaaacaatcattagctaatgcctcaggaactgctaattttgtttcttgcggtaaaaatgttgatttaggcggttttttagctgtagttaatggccatgactcatcaaagaaaatgagactttcattttcattttccattggtttaactgctgaacaatataaggatgaattttccgaaaagcccatatttgcaagttctgacattagaactatggatctagttttccaaagtattaatgtttctgaaaaagtagataatgtcttgagtgagtgcagatatacagttgcgactccaaattcaaaacaatcaaaattatatataaacttagctaagggtgctagtggttatacaaaatcatctgactggagttattatgctgacgataagacaataaactcattctatgggtattttgaacgtaagaacagtaggatttatgctgaagcaacagatgatataaacaaatggatctatgaatcgctatcaagtggtgtatataaggtaagaaaagatctgtcacttcctttattgcttgcaagcgagttcatgacaaatattccaaatgaaacattgcagtctattagtgaagaaataaaatatgagttttcaaaagtaaaatatctgggcccactgagaacgcatcctaaacgtttttattctacagcaaaggattctatctcagaaactaaaggtgaaacaaatcttggcggtgagatttatgaatctggccctgagacagtggaaaaactaaatgattggttatgtaattttgaaataccttatataataaatgtttcaaatttgggtgattatactacaggacacgttgtatcgcttacgttgcaagataccagaacaaacacaatagttacacctgtggatgttggttttggaattggtcaagtgatgcctattattactgaggcagtagtttcaaaaaatacaacaatatgtgttgaacaaccagaaatacatttgcatccaaaacttcaggcacatcttgccgatctttttattgattctgtaaatgcgaagaaaaataacaaccagtggatcattgaaactcatagtgaggctttgatgcttcggattcaaaaaagaataaggcaagaaagaataaataaaagtctagtgaaagtgtattatgttatatctgatactgaaggttctaaaattattgatttaccattggatgatgagggggactttactgagctctggcctgagggtttttttgaagagcgtctaaatgatttgtttggaggttga

SEQ ID NO: 128954 - DNA, 966 bp, Enterobacter cloacae
atgattgttgactttcatttcgatgaggattttttaggttgtgatgatcttacatcaaatggctcaaatttagtaaatacagtattattgaaattttggttcgaaagaggatgcttagtatatccatcagcatatttagaaaattataaagaatggatagaatttgtcccagtaaaatatagggagcgctggctagcagctttaagtacgaaccttactaacaacatgataactggataccaaaggataaatgattatccatctttgataggcttgaaaacacagtgtgaacaatttggtgttgatttggttttagttcctcaatgctttaataatctaggtattaatgatgactgccccaatatttccaatgggtttgatttatgcaagatcgatagttttttagaatcgccttcagtaactaatagttttactttatcccagcaggggatcttcccaggtgatgatatagatttaatttggaaacgccaatttagcaagcttgccaagcactcgaaagttattactataatagatcgttacttcggggtaaatatttgcgaggatattaacaaaaggaaaaccactcttgaaaagatagtttcgttactaaatgatgaaaataaaaaatatagcattacgatatttactgttggagatgttatcgattcagttatgcatactgaacttgtaaattatatgaggcgttttgtcgaaaagcctaacgtaaaaaagatcctagcaacaataaaaatttgttcttgtccagatactgtattcagagaccatgcgcatgaacgtttcattagttttgataattttgtagtaaccatagacaagggtacggaaatatttagagatttcccattggttgcaacgaatataagcataaatcgaaaggttccagattcaaattttagccatgcattgaaacatcttcaggcaaagagactttggagttattga

SEQ ID NO: 128955 - DNA, 1395 bp, Enterobacter cloacae
atgacgcttcgcccgatagctggcctgctgataatggctttcctggcgggatgccagtcggtagacgttgagcccgccaaatcgtccctgcacataccggcccagtggcgcgcgacgtcggggccagccagcccgacagagcagctctggtggcgaaattttcacgacagcaatctgaatcgctatgtggatcaggcgctgaagaataacagcgacgtgctgattgcccgcgagcggattaacgagtaccaggcccgggtgtacgccgccgacggcagcctgttcccgtcgcttgacgcgggcgtgaccgggacgcgcgcgcgttcgcagtccgccgtcacggggcttccggtatacagtacgttgtacaaaggcagcctgaccgccagctacgacgtggatatctggggcgtcaaccgcagcacctcccgtgccgctgaagcgtcgctggaggcacaaaaggcggcggccgcggcggctgatcttaccgtcgcatcctcggtggcctccgggtacgtcaccctgctgtcgctggacgaacagctccgcgttacccggtccacgttgaagtcgcgtgaagaggcgttcaacctcgccaaacgacagtttgagacgggatacagctctcgccttgagctgatgcaatcggattctgagctgcgcgccacccgcgcccaggttccactgcttcagcaccagattgcgcagcaggaaaatgcgcttagcctgctgctgggcagcaacccgggtgacgttgcgcgcggtgaaagctttgatgccctgacgccgctgaaactgccctcccagctgccgtcgacgctactgaaccggcgcccggatatcgtccaggctgaacgtcagctgattgcggcggacgcgacgctggcggcatcgcgcgccagcctgctgccgtcgatcaacctcacggccacgggatcggtgcaggatcgcacgctgtcgggattgctggataaccccctccagctctggagcgtgggcggcagtattcttgcgccgctgctgaaccgtcaggcgctgaatgctcaggtagatatctcccagtcccagcggaatcaggcgctgtatagctacgaaaaaaccgtgcgtaacgcgtttgctgaggtgaatgacagccttgatgccatcacccgctatcaggaacagcttaccgagctgctggcacagcagacggtcgcgcaggagacgctgcggattgcgcaaaaccgctaccgcaatgggtactcttcttacctggatgtgctcgatgcgcagcgcacgctgttctcggtgcagaccagcgtggtacaggtgaaaaacaacctgctgctggcgcagattgatttgtataaagcgctgggcggaggatggaattcccccccccacacaattatttaa

SEQ ID NO: 128956 - DNA, 963 bp, Enterobacter cloacae
atggttttacctgggataaaccttgataaaaacttaccgggctacgattttgcgaaaatgtcgggagttggggctgcggatttcgattttaaagcgcttggtgccgccatggactgtcatcgtgaatttgctcacgcgggtatcatttactctgacggcccccaacgcttcctggtgcgacccggcaaaagacatcctcaagggcaaagtggaatagtaacgcatgttatcgtgaccaaagcctcctcgtttccgtctgcttccacagcaggaaaagcattgagtgatgcagtttcttctacttccatgggaactgaaattgcctcaaccgttctgtcatgtggcgcgatgatcataactggcggagtgatgctcgctggaacagcagcaactccccttaccgcaggcgggggaagcgtactggtcgctattggctacgccggaacggctgccaccggtctgcaatgtgtgaatggcctttatcgaatttatgatttggttgaaaatgacggtgccaatgtcgcctggctggatacccaggactggtatgtcgccacatccacttccttagatgtcatttctctggcaagcgcaggcggtgcactcaaagaggctgttactacctggcgtgcgatgaaatccgtttcgtccttgaaagcaaccgagtggctaaaaaattatcctcgtcaggaccgtgctcgactgactgaattaattattcgcgctcaaaaccctggtataagcaataaagaagtcaaagcgcttattcgagctggcttttatccaaaacgattcccatctggtcctgttcaggttgagctcacccggcaattaggtcaagttgtaacaagtgccgcggcgcttgcaggaagcgctgtaagcggagttattgccgctccggggaacatacctcgtaccagtaaatacattattggtactatccagtcactggcggttttttaa

SEQ ID NO: 128957 - DNA, 333 bp, Enterobacter cloacae
gtggcggcgaaggatatcgaaagcctcatcgcccagtctgtttccagcgtgaaaaacggtgcggaactggtgaatcgttcgggagaggtgattgattctattatcagctctgtgaataaagtgcatgcgctgatggaacagatttcggttgcctcagaagagcagagccgcgggattggtcaggttgggcaggccgtaacggagatggacggtgtgacccagcagaacgcggcgctggtgcagcaatccgccgccgccgcggcctcgctggaggagcaggcgcagcagctgtcccaaagtatctcgcgctttagtttgcctgctacggcgtga

SEQ ID NO: 128958 - DNA, 471 bp, Enterobacter cloacae
atgaaaaagaaattaattctggggtgcattatattattttcgggattgttggtgctagttgttcatgtcttcccgatacgacctttcgttacgattacaaataatactaacaaacctctttttatatatgctggtgagagtatctatgacgtcgaccccgaacctgaagaagttgagcgaattgtaaggtcaaaacctaaaatcatagctccaggcgagaaaagtgaatttactgcttcatttatatctctgattagaagagacgcagtaatcgatattggttggaggatcggtggccaatacgaatataattcagttggtggtggaggccggaatttcattctttcctcaacagcaggtgcgtgttctgtgtcgattaaaataaacgatgggtttaataatgatattctagagaaagctcccggtgatttatgttttaaaaaaataaaagcattcaactataaatattga

SEQ ID NO: 128959 - DNA, 492 bp, Enterobacter cloacae
atgagtgcgaaacgcaggttttttggaaatattattatttggtgtgtttcatcattaggtttcctgtggtttgcaaatgatgcatttagtgagctatttgaatttggaaatgatatagtgttttcaccgattgtttccgctctgctaatgattccgataattcttcttttcccatgcatatactggtatttggcaatgaggcacggagaagagcaggcaattatcaaatgcaaaaaaacaaacagggtatttataggtctggttggtgtttttatcataagttctgtcatcttttcctttgcgtatacttcgattcttgagagtaaaggctatgtgaagtgcgtcggccgccctgatggatggatgccgggaatggccaccgaatacgtactcccaccatcagtatgtggaggaagtaggctcgccggaaaaggatcgagcagttatgctcccactacattcagccagtcacaggacgttgagaatgattaa

SEQ ID NO: 128960 - DNA, 1209 bp, Enterobacter cloacae
atgcggtattcccttaaacatcttcctgaatgttatccacgaccagttccgccaaaaacatcccgttggtttgctgtcctggcggcaatgctggtcatcagtgtgatcctcatgcggatattcgggcgatacatcgataacaaccacttctggttggtcgctattggtacgcccgttgttgtttggattataagtttcggttttcgtatgtggcactggtcattacaggacagtaaagcgaatagttttgaccggcatcgggaacgctggatcttaagtgagacccgtaaagcacgccgcgcgcttcagatactgaatatgacatttataactgcccataaggaagacaaacagggttctgtcgctgttgagatactcaagaatcacagcattattatttctcagtcggactggaaaggcgaaaaaggcaagaggctaagccgtattacgacagagccgggagagactcctgagctggttgtcacacgtctgttttctgaactcattgcggatctgccagttggtcagttcccggaaaatgcctcactggctgttatccttgataactcgtcatctttgtcattccctgcgattcaggagatttggcaggaatcctggaaggaaagtggaataacctgcgcggttgagtatgtggacagcaatgggccgggagtcgttagccactggctggattaccgcattaaagatgaaacgatgttattgatcgttggcctccagattaacccggttgactcaaacaataccgcagaagccgctgttgcactgcttctcggcaaccgcctgacacaggaggcactcgaacctctcgcgctgctgcaccggccagatgcttcctctcctggtgaactgagcgaggggatgaacatgtccgcctggaacgtcccgctcaaaggacatatcgttaaaaatttatggcttgccggactgacggatgagcagcacgcagaagtgatcacatgtcagaatgcacatcctgcgcagtctgtagcggacgactccgtcatttcactcgacaggtctatgggacgtgccggtgccgcagccccctggcttgctatcgctgccgccactgaaatcgcccaacaaacacagtcaccacagatgattatttgtggcgataccacaaagaatgtgctgtggagcacgctcattaccccgattgcttcccgacaggagatggatccgtga

SEQ ID NO: 128961 - DNA, 252 bp, Enterobacter cloacae
atgtataatacccacggcaatgcattgttttttttgagtacatactccggaattcacataaagtggcccatgtttttcgaagatataaaatatagtcatttcattatgaaaaaagaaaaacctgttctctctgttgggtatgtagttgtaagcaagatacgctttattatctttatctgcattcaatttacctggtctttttccgtaagcataatcggaagcatatacattaccgattttttatgtctctag

SEQ ID NO: 128962 - DNA, 543 bp, Enterobacter cloacae
atgattctaacaaacaagataaaactagcattatttctggtgactttgcctgttatgagtagttttgcatcttcttttactaaggagtttgttaggattgatggtgtccataaggtaaggattgatattcaagaagaaaatcttggggatgttaaaaattcaacaataactgcttcggagtatgtgaaaaacaaaaaaatatggagtcttgtcgattttgtaaataaatgtccgcttgatataaatatggccttgattaagggctcattcgaggttaagaaaattaatgactcattagatacagtattgtttgcttataccataggttgtgtgggcggccttgatccagttgctgtaaaatattttgcttatgaaaatggtattaagcattctcttcgaggagaagaacggatgattacgcctgatggggtaattgataataatattagaccattaccagatactaatttaaaaaataatattcttttgcataaatacatgctcaacaattggtgtaaagcatcaacagttgttctggagtaa

SEQ ID NO: 128963 - DNA, 576 bp, Enterobacter cloacae
ttgggggaaaattctggaaatccaatagctatactccctcatgaccagagagaagctccgtggatgaatattgcactgagtgaggcaaagaaatggcatggaactaaagaagactctattaccagcaattatcatgcattaataggtcataaatggataaaaaatctagttgggacatcaaatgcttggtgttcgtcttttgtaaattattgttttcaagaaagtggatatcataaaacagtgccagatccatatcgtgctatttcgttttttaaagatagcaataacttttttgaaatcaaaaaacctatctatggatgtgccgcatcatcaggaaagcatgcaacctttgtatatggtcaatcgaagtctggagaattaatttgtttgggcggtaatcagggtgacacaataaaattttcactttttaaagattttagattctttttaccagtggcatataaaggatactatgagtcaaatgcacaaaaagaattagacatctttgatgtaaatgaactgaatgaaatgattggtattcattctaaaacaactggacacgagagcacaagatga

SEQ ID NO: 128964 - DNA, 537 bp, Enterobacter cloacae
ttgcaacttcaccccacccgactgtatcttcgtcgcgtaactgaatctgacctggatgaccttttcagaatttatggtgacccggctacgaacacctttaacccagcagggccgtatcctgacatacagcatgcacaaactgttttagctcgctggattaaccactgggaaactcacaattttggaaactgggcaatctctttgaaggatagcccggaaagaatcatcggttttggcggtctgagtatcagcagttatgcgaatttattaattaataatttaggatatcgtttcgccaccgaggcatggggaaaaggtctggcgacagagttttcgaaaaactctgtcagatatggattttgtgaattaaagctaaccgagatatctgccgtagtgagaggtaaccacgtggcatcgcagaaagtccttcaaaaagctgggttgcaatacatcaaagaaattcatgatgtgaaaggcgcgccgccgagcctgcttttttctcttacgcacggtgaatggttaagacaatcaatgtga

SEQ ID NO: 128965 - DNA, 2262 bp, Enterobacter cloacae
gtgaacagtaacgttaaatttatcagttcgatctcaactgaaggtgaatttgagacgctgatcaaaagatatgctgaggaattattcaaaggaaatgcctatctagttggtgggccttacgataatggaaaggatttagttattaagcgcaatgaaagagaggttcggcaggccgcacagataactatacaagaaaagaaaattgaagaaaaactagaggcagatcttttaaaggttgaaaaattagttgataaggataattatccaccaatattgcattttttctggagtcatcccatttcagagtatacattggataaacttagaactggtgcaatgacaaatcattttatttccttggagttttatgatgcaaaaagaattgcgcaggatttaacagatcattacccacaccttcttaattaccttataaaagatattcataagattgatattcagaacgatgaaccaataaactttcagcaaagggctttttacgagtatcttctccttagtaaagacagtacaaatttaaagaatgctattatagatgcaagtatactctcccatttgaatgaaggtggcaaaacggttgaagagttattaggtttacttcaaggtgttaacttaaaaataggcagcttaaaaggtaaattacaaacactcacacgtaagggcaaagtaattaatcaagatggtatttatacgcttagccaagaggaaatatctaaacttgagaatataaaacttagagatagtactcgtaaacaagatttaattaaaactattagtgataaactagcaaaacatactgatcaagatttagcctccgaagtcgtgaagttaattatcactgcctacgaagaatcaataagcattcaaataactgagagtaaatttgaatctcctaaactaaaaatttttcaagcgacaattaataacttaaagattttaataaacgaaagatgcggtttagatagagagaaatctgaagctttggctagtgaattgcttgaaatagcaggtgaaaatgaatatttgtcagagcattgctcagcaaaattgtgtgttaacttcttgagtgatagtaaacttgaaaagtatattgaagataaaagtttctacatttaccttgatgcacctgtattgataccatatctaataacaataatgtttaaagatatttctttgtttgataaatcaatacgaaacattaatcttttgagagagaatattaattccattaaaaacaaaagattaagagtgtcaaatgaacattttgaagaaactgctagacatttttcacaggcagaaaagttaagccaatttgttacggacgagttagtagagcaactaggggaatcaaagaacgtatactttaatgtatatatgaagtggaaaaagaaaagagatgataaaaccaacttcgaagattttactagtgcattcttaggacttgaaaaagaagatgttaatctaaatgataaatttacagcttattcaagttgtatttttgagttattaacagctgctaactttgatgttatagataataaagaccttgttccctatgatttcttagagagaacaagaagaaaatttattagagaatctacatcatttagacatcccagagcagttgagaatgatatatattgtgcccacactttaggtgatgagaaacttcatcttgactcaaggggttattttagcacccctatgctgatcactctagatacctcccaatatctcctaagaaatataatccgtcgagaaaataaattcgctgagtggctcatttatacacctcaacgtgcgattgaaagactttctttagttggattaaaagtatcatctgagtctcttaaagatggtgtgttagctacaatatctgaagaatatttctttaaagaaaactcgatgagtttacttgatacgttatcggtgattatcgacgataataataacagtgaaggggatgtaattaagtttgttacttcgttgagaagaaaagtaaatgaagaagccttagactattcagagattgatgtggggcattacaataacatcagctatgtgttgctattcatacatcgtgaatttagggatgaatttactaagataataaaacttttctctgatgccagttaccaagacacactaactaaactgcttatgtctagcataaagggtgagtttgatgagaagcagagggatagactgcgcgaagaaatgcaggcaatactattgagctataaataa

SEQ ID NO: 128966 - DNA, 891 bp, Enterobacter cloacae
atgttagaaatcgcagcattaatagtaacgtttaatcctgatgtaaaaatccttgctaggctaattgagcgtctgaaagcttctaaactgagtttaaaaatatatttgatcgataatgcaagtgaaaatgctcatgttttaaaaaagaagtatttgccagagcatgattttatttttcttcaagaaaatgtagggttggcgggagctcaaaacattctacttaaaaaaatcatggattctgattcagatgcagtacttttctttgatcaggattcagaaccgactgatgaatttattggttctttatcacaaggtttgatagaacttaacgccaaaggtcataaagtcggtgctgttggacctgttttttatgatcccagaacaggaacaaatactcctttttcattaattgatggatgtcgtattagaagcattcatccacaatcacatgaaccactaagagtttcttttcttataaattcaggaatgttagttcctgttgaagtaataaaaaaagtcggtttaatgcgggatgaattatttattgattatattgatatcgaatggtgtttgagaacagccagcaatgggtattctttctatgcaataccggatgcccaaatgagtcatacgattggagatgagcggaagctttttatgggaagagaagtaagcatacatagcccattaagacgctactatcttgcaagaaactcaatttacatgatgagattatcatatgtccctattggatataaatttagagaggccattttttcaacgattcgtacaataatgtttgttgcctgcgtggataaaaaaagaatgtatattaaatatattcttcgtggctggaaagatggcattctggggaaatatgggaagttttag

SEQ ID NO: 128967 - DNA, 870 bp, Enterobacter cloacae
ttgattagttcagtcactgtaacttataatccagacattgattgttttaaagcacagttgcaatctcttcaatatcaactagatgattgcgtgattgttgacaatggttcaaaaaatgtagcggagattgaaggtctgtgccaacagtaccaatacgatttaattaaattgaatacaaatcgtggactttcctatgcacaaaatattggtatcgaagatgcaatttcccgcggcgccaattatttattactgcttgatcaggacagtgtgctaggcgaggattttataatggctatgagtaagatgtatgctcagtacaatgttggtatccttggcccttctttttatgatccaaacacaaacgaattttattggggtactaattatatcggaccatttatcaaaagaacgccgatacaggaaataaccgatgtaacgtatgttattgcatctggttccttcttttcttctgaagtttttaagaaagttggcaagatggaagaagcattattcgtggattatattgatgtggagtgggctctgcgtgcgaaaaaattagggtatcgtgtggcaatgactaatcgagcctcaatggctcacacgataggtgattcaaggctgaatctattagggcgtaaaatatctatccatagtcctatgcgacgttacttcctggtaagaaatagtttctttatgattaggaagccgtatattcctgttggatataaaatacgtgaggttttcttgaattttgctcgtgcaggaatatcactagttcttaacaaagaaaaaaagaaaacgttgatgatgatattttatggtatttctgatggtcttacaggaaaatttggaccgtttaatagaagttaa

SEQ ID NO: 128968 - DNA, 1113 bp, Enterobacter cloacae
atgaaaattctttatataattacacgcgcgaatgaaatcggtggggctcagactcatttgcgtgatatgacatctggtttagtaaaggatggtcatcaagttgagttaatcgttggagagcaaggcgctctggttgatgaagttcgcgcattaaatgtgaagattcatattatccctgagctggtaagggaaatatcgccttataaagatattaaatgtgctttaattatacgcaaaattataaaaaaattttctccggatgttattgcgcttcattcttctaaagctggaattgtagggagattggcagctcttttcctgaatattcctgttgttttcaccgtacacggttggtcattcgcaaatggtgttaatgataagaaacgtcggttgtacattgctattgaacgattattcagtaaaattactgatgaaataatcacagtctctgctcaagataaacaacttgcaatcgaacataacgttgcgtctgccagtcagcaaacggtgatccataatggcgtgccgttaaaaagtgctgctcctcatgtttaccatactcatgacgtagtgaagttgatttcggtagctcgtttttcagaacaaaaagatcatgaaagcctattgaaagcgctgagtcgattagaaacaagaaactgggcgttgacgctggtaggaaaaggtcccaggttagatgagatgaaacagctttcacaggatcttggaattagcgaaaatgtactgttcacaggcgaacgtttagacgttgatgccttgctggcagacagtgatattttcctgttaatttctaactgggaaggtttccctatcagtattctcgaggctatgcgtgcaggcttgcctgttttagcatcagacgttggtggcgtttctgaatctgtcattgatggcaaaacgggatatctcgttcctcgtgcagatattgatgccattaaaaacagactcgctgacttaattagtgatagtgctttacgtgttgaattaggcaagtcaggaaatgaatttttccttgaaaacttctcattcaacgcaatgtataataaaacggttgaactttatcaaaaagcaattaataaaaaacataataaataa

SEQ ID NO: 128969 - DNA, 255 bp, Enterobacter cloacae
atgcgggagaacagcgaagcgttcagcaaacacggcaaccagcacagcgaaggcaactatccgcaggtgcgcatggtctgtctgatggagctcagcagccatctgattaacgccagcgctttcgacagtgagagcgtcagcgaaatgcgtctggcggcacagttaacggaccgggtaccggacaacagtatccccctgttcgacaagggatattactccccggggctgctgcatcactggcagcacgccgaatag

SEQ ID NO: 128970 - DNA, 273 bp, Enterobacter cloacae
gtgtgccgtctggggcggggtgacgagcgggtgaagctaaaaacgagcccgcaggcccggaaacaatggcctggactgccggaagaggtcgctgccagacttctgagccggaaagtggacggaaaggagaggaaagtcctcacgtctctggaagacccctgtcgttatccggcgggtgcggtgagcgagctgtaccgtcaccgtacgaacaggcgagatggctggtattaccgggaagacgggagcgaagttacccgagagagctcagggtga

SEQ ID NO: 128971 - DNA, 579 bp, Enterobacter cloacae
atgattgcttcagcctttactccggagccgacatcaacaggcatccgttttggtaaccgagttattggttattcagttgcggttcgccagctcgacaacggtaattatgacaaacgaattccggatggacttgaactgttggctcgcattatggaagggattgaaagcggctggtttaacccgggcatcgagaaagaaatcattctttggcgctggatgctggttgccgtctttattacggaagagcaggaaaagaacgggaccagtgaggtggccaacgattcaggaggtttcgacaaagcagttatctactccggccagcacggttcaatcagtatttatcctgcgccagagcgattcgcacttgctaatcatgtggaaggtattgccattgagaaatacggccaggagcttggtcagcagatggctctgcgcatgtacaagggcatgttagcggaagacgaagtgcaggggcttcagctgtcacaatttggccgggagggttttaatttgctgcacgacagtttcatcgaacagattcagaaagaaggcatgcctgacatgccagttatgcactga

SEQ ID NO: 128972 - DNA, 240 bp, Enterobacter cloacae
atgaaatggggggatctgatggcactgacagcgatacgaattcctgagtgggttcacctcaaagcagcacacgttttaagccagttcagagcaaggcgcattcacccctgccgtatgcacggctccggtaatttgagcctcaaggttaaccaccgctggcggctactctcccgcgatggcggcaagaactgggaagtaatgtcccatgagcgttattcaaaagttaaggatcggaaatga

SEQ ID NO: 128973 - DNA, 411 bp, Enterobacter cloacae
gtgaaaaacaacgtaattgaaacttaccgacgccgaattttaaaggcagcgttattacgccaccagcgtaaaacgggtactaactgccttgttattaagctcaataaaggcggtattaacacggtcgagttaacagagattcttctcgatggattattacgaaaattcgaaaggctcgcgatcagtgagtacgggaatgtcgaaggcgtaaaagctatcaaaggaatttacagcagcgctgttgatgttaatggcagcggtgaattcctcacagatagcggaaaggaattaatagacgagctcatttctgagctggttgagttcgtcagaaaacaaaaagtagaggctccgaaaacggagggtcatgaaatggggggatctgatggcactgacagcgatacgaattcctga

SEQ ID NO: 128974 - DNA, 660 bp, Enterobacter cloacae
atgaaccaatctgaaatagatagtcttcttgaatcaaaagtttcgcggcgtaggcatttaaaaagcctggagtatggtgttggtcattatgacgtagaattccccagcactattatcatcgacggaataatgtgccaccacagcgctcaccgtcgttggagcggcatgttatctcgctgctacaaaccgcacacagaacagttagagcacagttacgccggatgtactgttgccgaagagtggctgcgattctcaaactttctggcgttctggaaagaaaattatcgcgatggatatgtgctagataaggacctgctacaccctggtaacaagatatatggtcctgaatactgcgtatttgttcccccagcacttaacttatttacaggtgatcgcgcccgtttacgagggaaatacccacagggtgttatctggcataaacagtccggtaagtttcgggcacgaatcaacgtaaacggaaagatttcacaccttgggcttttcaacaccacacaggaagcccacttagcctggcacacagccaagatgcaacaggctaaggactggaagcccacatgtgatgagattcacccactactacatgcaggcctgatgaaaaaaatagcgggaatgcaacagcgatttactcaaccacgttaa

SEQ ID NO: 128975 - DNA, 420 bp, Enterobacter cloacae
atgaaaactccattagacatgcttcatgatatcgtcgctcagatttccgaaggcaatactcttctggaaatgatttataaaaacaccgaagaaatgaacgaggaaactgattgcggcttagcctgcctcattcgctctttcgataaaacccgtgaaacagcttacgcatacatcgaagagttagcaaataatgcaaagacagttaccccccccatcgggaatagagatgatattgccgatgatattttttatgccacagtcagcgctgcaaaactcagggaactggctcacgtatataacgaatcatatttttcaggaaaagacagtgatgacgctgattgcctaatggcatcacttattttcgataatatcattaaggtacatgaattactgaaaagcatcgaaataaaattaaattaa

SEQ ID NO: 128976 - DNA, 213 bp, Enterobacter cloacae
atgaatgtagagcaaatgctttccgagaacggaactgtccacaaaattgcgatggatattgatcgtgtaatcaatgcgcttgagtacgcagaatcagatccagatgttgcatataaaccagcggcactcattaaaatttgtatcaatcagttaagggataatctttctgttctaaaccatgaacttggttatgattggccggagaataaataa

SEQ ID NO: 128977 - DNA, 690 bp, Enterobacter cloacae
atggacataaaaagcatacgcaaatcaaaccttgagcagctcattgttgagttcctgaagcgcgacagacatacgacaaaagcagctttcgcagaattgtgcgggataagccctgcccagttgagccagttgcttgggggcaatagccatcgaaacataggcgacaaaatggccagaaagattgaacaggccttggatcgtccgtttgggtggctggatagtccacacaatgctcctgacagtattaaaagcgagttggagtatgtcggatcagtccgtccgggagctgtaccagttgtaggggaagcgattcttgggattgacggaatgatcgatatgctagagatccacgctggatggctacaaatatacagcgcggatagggatgcctatgggctgaaagtgaagggagacagcatgtggccacgcatacagtctggagaatatgtcgtcatagagccaaacacccaagttcatacaggtgatgaggtttttgtgcgaacaaaagatgggcataacatgataaaaatcatgagtaaaactcgcgatggcgattatcaattctcaagtgtaaacagtgatcacaggcccatcaccttaagtcctgatagcatcgagaaaatgcattttgtttcagctattgttaagcatacgcgttatgttgacaatgatgaaatgcccgccctgtaa

SEQ ID NO: 128978 - DNA, 228 bp, Enterobacter cloacae
atgaacaaccaattacttgcttggcgtaagtgctcaacaaaagagcagtgggcagatcttgctaaaaaatcaggcacatctccgggatacctgaatctcattgcttatggtcatcgcaatgcttcccccagactggcattggcgatcgagagcgcatcaaagtcattcgtgaataagccagttattacaaaagaacagttggttttcaagagcggttctgaggtgtga

SEQ ID NO: 128979 - DNA, 606 bp, Enterobacter cloacae
atgcaatttcatatggattttattcctgcccaaaaagaattgaatgcctctaagcgttgctttgagaggatggtctcagcaaaaaattatgaagaatacgaagaagcatggtgcgatttcctcaaccgtttagaaaaaatcttcgagaaactccaacgagcctgtaatcctcataaagaaaaattcaatacccttctttcgaaagaaaatgccctgagaagctcagatcctcttttgcgttatcttaaacaagccaggaacgcggatacgcactcaattcaggatgtggctaaacgagttccaggaagctttcatcttggatttgacgtagctacccctggagaaccagtacatattgaaaagttagttatgagagggacagacatacatgaatatcgtggtagccatcctttagtcgtaaccttcactccagaaactgttgaagtgaaagaggtaattaacagaggtgtacattatttgccacctgaatcacatctttctcaaccattaacaactcgccatccaacagagctcgctaggctaggtgttgagttttatgaacagcttttcggcaaagttacgaatttcttctcatccaatcaataa

SEQ ID NO: 128980 - DNA, 588 bp, Enterobacter cloacae
gtggctgaagaagttaagtttgttgtggttggtcaccacacccggacgggacaagcacaacgtcttgctgcgctgctggatgctcatctgctgattgatggcggtaaccacggtgcgaactggaatcatcgccgcgcgcttgagtgggctgctgagcaaccttgccgggtagtcgtgctggaagacgacgcgctgccggtgcagggattcaccgaaaaggtaactgactggctggtgcgtttccctgacgacatgctgagcttttatctcggtaccgggcggcctccacaatatcaaatgcagattgctgagcggctaatcgtggctgataagacacgcgctgattacatcacgctgtcgagactcattcatggcgtttgctatagcgtcccgcctgagcatgtgcatcgcgtgctatcccgttgggataacagcaaacccgccgattacgctgtgggtgatgcatggggtggctcagtgatctatccgtgttactcgctggtggaccatgcagatggtgaaacggtagagcatcaccctgactcagcgccacgtacagaacgccgtcgggcatggaggttagcctga

SEQ ID NO: 128981 - DNA, 564 bp, Enterobacter cloacae
atgactgaatcgaaacatggttcagggctttcgcgcgcccagatgaaagatattcccggttatccagggtatctggcaagtgacgatggtcttatttactcgctccgctcaggtagcgttcggcggctgtcgatgcggctacataacggctattggcacgtgaatgtaaacaccggagcaggtaatgatacgaaagtgaagaagcaagtgcatcagcttgtgttgcttgcctttaccgggccaaagccatctgaagcccatatcacccgccatctggatggcaacccgctgaacaacagcaaaacaaacctcgcttggggaacgccaaaggagaacacttctgacagcatgcagcacggaactgccgcttgtctgcggcgcggacagcgagcggtagcaacaaaattgaagcctgaaatcatcctgagcattgagcgagaggcgagatctggtaagaggctggtagaaattgcaaagcgctacggtattacgcacacgcatgttcgccgcatcagggatcatctgtgccatccagatatttggtcaaagggggagggcgggtaa

SEQ ID NO: 128982 - DNA, 474 bp, Enterobacter cloacae
atgtctggaccaccgaaaaccccgacccatctacgtttggtgaggggtaacccatctaaacgcccgatcaatgagaacgaaccaaaacccccttcaggggtacccccaacgccgaagcatttcgacaagcaggggaaatactggtttaaacggatggccgacgagcttgatgctatcggtgtgatgtctcagctggacgccagagcccttgagctgctggttgaggcttataccgaataccggcatcactgcgacacgcttgaagttgagggctacacctaccggaccgaaacgcagagcggggatgtgctgatcaaggctcaccccgccgccatcatgaaagctgatgcctggaaacgtctgcgcgccatgcttggtgagttcggcatgacgccagccagccgctcgaaagtgaatgcaaaaggtcctgatgcggttgacccgctggccgagtttatgaaagcgagggattaa

SEQ ID NO: 128983 - DNA, 321 bp, Enterobacter cloacae
atgggatttgcatcaccagcagctgactacgttgagcgccagctcactcccgaagtattgtgcaacatgggtgccgatagtcgtgtactcgaaactgatttggggtttgcgattatcgaacctgtagtgaacaagacacctggaaatgtgttacttatcctttgcgacggtcatacgcagtttgccaagctgatgggcagggcgctcataactgatgatggtgaagcgattgagggagcagcgcttgaagaagtggaagtgctgggtagggtgacgttcttcatcaatcgtgcattagatgatgattgccctgcaatatag

SEQ ID NO: 128984 - DNA, 240 bp, Enterobacter cloacae
atgccacgcacagcagatatacacaccgccttcgtcgcggcaatagaggttaaccttaaaggctaccgctatctgagaacagacagcttcatcaaaaagttgcgggggtttaactggcacttcagccgtgcagaagcaaactcatggatagaacgctatcaacccggttttgcagataagacaactgacggcagtgataacagatactggatcctgcgtaacatggggagggttcactga

SEQ ID NO: 128985 - DNA, 957 bp, Enterobacter cloacae
atgaaagctgtatctcgcgttcatatcacgccacatatgcactgggaccgggagtggtacttcaccaccgaagcgtcacgtattcttctggtcaataatatggaagagatcctcacccgtcttgagcaggacgcagagtataaatactacgttctcgacggccagacggcggtgctggaagattattttgccgtaaaaccggaaaacaggccacgcgtgaaggcgctggtggcggccgggaagctgattatcgggccgtggtatacccagacggacaccacccttgtctccggcgagtcgattgtccgaaatctgatgtacggcattcgcgactgtctggcctttggcgagccgatgaaaattggctatctgccggactccttcggcatgtcctcccagctgccgcacatttacaacggttttggcatcacgcgcaccatgttctggcgcgggtgttccgagcggcacggtaccgataaaaccgaatttctctggcaaagtcaggacggtagcgaagtgacggcacaggtgctaccgctgggctacgcgattggtaagtacttaccggaggatgaggccgggctgcgcaaacggctcgacacgtacttcgaggtgctggaaaaagcctccgtgacgaaagaaattttactgcctaacggccatgatcagatgccgctccagcagaacatctttgcggtgatggataagctgcgcgaaatctatccgcagcgtcagtttgtgatgagccgcttcgaggaggtgtttgaccacattgacgcgcaccgcgatgaactggcgacgctgaaaggggagtttattgacggtaaatatatgcgggtgcaccggacgataggctccatgcggatggacattaaaatcgcccacgcccggatagagaataaaatcgtcaacgtccttgagccgctggccacgcttgcctggacgctgggcttttag

SEQ ID NO: 128986 - DNA, 1242 bp, Enterobacter cloacae
atgtctgcattacctcaacccgaatacagccgcaatatgcggctaattggccatagcgaccagggcggtcgtccggatggtgtacagctgatggtgcaccgtggtttcgcctggatcggccatatggtgtcgcagggcttttccatcgttgatgtgcgcgatccgaaaaatccaaaagccgcaggttacgtgcccgcgccgccggggacctggaacgtacatctccaggcgcacgacgatttgctgctggtcatcaacgcccgggatctgtttgccgatgcgcgttttgccgatgagaagatctactacacccgccaggtgggggagaccgtcagcgacgtgcaggataaaggctggagcgccgggcttcgcgtctttgatatctccaagccggacaggccgcgcgaaatcggctttctgtcgctgagcggcatcggcattcaccgcatctggtacgtcggtggccgctgggcgtacgtgtcggcgctgatcgacggctttaccgactacatttttctgactatcgacctggccgacccgcgcaagcctgaagtggcggggcgctggtggctgcccgggatgaaccaggccgaaggcgaacagccggactggccggaagggaaacgttacgcgctgcaccatgcgattattgccggcgatacggcgtacggcagctggcgcgacggcggcctgacgctcctagacgtgaaggatcgcacccggcctaagctcattagccaccgtaactggagcccgccgtttggcggtgggacgcacaccgcgctgccgctgccggaccgcgatctgctggtggtgctggatgaagcggtgctggataaccagcaggacggcgagaagctgatctggctgtttgatatccgcgagccgtcgaacccggtaagtatctctaccttcccgcagccggatgaaaccgactacgtggcgaaaggggcgcatttcggcccgcacaacctgcacgagaaccggccggggagctttatcagctcaacgctgatcttcgcgacgtaccagaacgcaggcgtgcgcgcgtatgacatttccaatccgtatcgcccggtggaaacgggggcgctggtgcctgccgcgcctgcgaagatgatggatacgcggccgaatcgtccgcaggtgatccagtcgtgcgacgtgtttgtggatgcgcaggggattatttacagcacggattataacggtgggttgtcggtgattgagtatttggggtga

SEQ ID NO: 128987 - DNA, 456 bp, Enterobacter cloacae
atgaaaatagaagccgcacacccctcacaatttgaacgcctcgtcgcagtctgggagtcgtccgttcgcgccacgcaccgctttttgcaggaaagcgatatcgcggcgctgcgtccgttgttgattaacgcgtatttgcctaatctcagggttgtgattgcccgggatgacgtgggtattattcacggctttttgggcgtggataaaaatcgcattgaaatgctgtttgtggatgatgcgagccgggggaagggtatcgggaaaatgctgctgcaatatgccattgcagaattcggcgtaaatgaagtggatgtgaacgagcagaatccgcagggggtggcgttttatcgttatatggggtttgagcaggtcgggcgctcggagctggacgggcaggggaatccgtttccgctgttgcatatgaagctgagcagaaataccgggattagcgcttag

SEQ ID NO: 128988 - DNA, 1038 bp, Enterobacter cloacae
atggcagataaagacgtaatccaatccccggcaggcgaatttgttatgtttgccagtgatgatggaacggttcgcatcacatgtcgctttgaacatgaaacactctggctgtcgcaagcagccattgcgtctctttaccaggtcacccctcaagctattactcagcatattaaagctatttacgaagaaggtgagcttgaacaaaaagcaacttgtaaggcttacttacaagttcagcaagaaggtcagcgcaaggtcaatcgcaacacacttcactatagcctgcccgtcattctcgccatcggctatcgcgtccgatccacgcgaggtacacagttccgccagtgggccacccaaacgctacaagaatacctggttaaaggcttcgttatggacgacgagcgcctgaaaaatccgcctgtgggatcttccgccgtccctgactatttcgatgaaatgctggaacgcattcgcgatatacgtgccagcgaacgccgggtctatcttcgcgtgagggagattttcgcattagccgctgactatcagccgtcgctcaaagaaaccacgcaattctttcagaccatccagaataaactgcattttgcctgcactgggcacaccgctgctgagttgattcaccaacgtgcggacgccactcaaccgcatatggggctgaccagctataaaggcgaagaagtccgtaaaagcgatgtcaccaccgcaaaaaattatctgtctcaggatgaggtgagcgagcttaatcgcgtcgttaatatgtggctcgattttgccgaagatcaggccaaacgccgcaagcaggtatttttacgagactggcaaaccaagctcgatcagttcctgcaattcaacgaccgggacgttttagaaggcgcaggaaaaatcagcaagaaagcggctgatgaaaaggcgtgctcagaatacattgaatatgaaaaaaagcagcgcctgctgaaagaggccgaaggtgagaaagatattgtcggcttattaaaatgggataagcaggctaagcgctaa

SEQ ID NO: 128989 - DNA, 951 bp, Enterobacter cloacae
atgagaatatatagcctgattgattctcaaacattaatgactaagggatttgcttctgaagtaatgcggtcacctgagcctccaaaaagatgggatatagctaagaaaaaaggcggtgtgagaacaatataccacccatcatctaaagtaaaactaattcaatattggttaatgaataatattttttctaaactgccaatgcataatgctgcatatgcatttgttaaaaaccgttcaataaaaagcaacgccttattgcatgctgaatcaaaaaataaatattatgtaaaaatagatctcaaagatttttttccttcaattaaatttagtgattttgaaaatgcattcactcgttatagagatcgcattgaatttacaacagagtatgacaaagagttactacaacttataaaaacaatctgtttcatatcagatagtactctccctatcggatttccaacgtcacctataattgcaaactttgtcgcaagagagcttgatgaaaaactgacgagaaaactaaacacaattgataaacttaatgccacttatacacgatatgcagatgatattattgtatctacaaatatgaaaggggctagtaaaataattctaaattgttttaaaagcgcaatgaatgaaattgggcccgactttaaaataaatattaaaaagttcaagatctgtagtgcttcgggtggcagtatagtagtaaccgggttgaaagtttgtcatgatttccatgttacattacataggtcaatgaaagataaaataagattacatctttctcttttatcaaagggagtattaaaagatgaagattttaacaaactttcaggttatattgcttatgcaaaagatatagaccctcatttttacactaagctgaacagaaaatactttcaagaaataaaatggattcaaaatcttcataataaaattgaataa

SEQ ID NO: 128990 - DNA, 951 bp, Enterobacter cloacae
atgctgactcagctaaaaaaaaatggtactgaggtatccagagcaaccgcgttattttcatcattcgttgaaaagaacaaagtaaaatgtcctggtaatgtaaaaaaattcgtctttctgtgtggtgctaacaaaaacaatggagaaccatcagcaagacgattggaattaataaatttttctgaaaggtatttgaataactgtcatttttttcttgctgaactagttttcaaagaattaagcaccgatgaagaatcattatctgataatttattagatatcgaagctgacttatctaaattagctgaccatattatcattgttttagaaagttattcatctttcacggaacttggtgcattcgcatacagcaagcaattacgcaagaaattaataatagttaacaatacaaaatttataaatgagaaatcatttataaatatgggaccaataaaggctattactcaacaatcacaacaatctggtcatttcttacattataaaatgacagaaggtattgaaagtatagagcgctctgacggcattggcgaaatattcgatgctctatatgatattctttctaagaatgagagagcaatttcaagaactttaaaaaaggaagagttagatccttccaataactttaataaagactcagtacgatttattcatgatataatttttgtatgtggccctttacagcttaatgaacttatcgaaataatcaccaaaatttttggtacagaaagtcattacaaaaaaaaccttctaaagcatcttggtattctaatggctattagaataatatcatgcacaaatggagtttattattctctgtataaagaatattattttaaatatgattttgatattgacaacatctcatcaatgtttaaggtttttttcctcaagaacaaaccagaaaggatgaaggtatatgagaatatatag

SEQ ID NO: 128991 - DNA, 1158 bp, Enterobacter cloacae
atgttcatcacgcatcttcttctgattagatttctcctaaaatcaaagtattcaacctcaactaatggtgagcaaatgagcgaaggactggtcacttttttcaaatataaacaattaggattccataagagaggtgattcatattatgagccattgatgatggccgatatgctggattccttacatacttggttctcaagtaggacctcattggcagatacattgccttgggatgacaatacccccggttattcttcaaggaaaaaagtttacttaaagggaattgagcgtaacgagagcacaggtgactatgttgtaattttatggcgagcaattggaaatgggaatggagtttatggtattcgctctgactctgccttaagtgatgatcgtttgtacagtgctgatgaagagttagatggtgaaaatgttatatggggggagcctgcttattattggtttgttccttctttaaatatttttgcatcaataaaatttcatagttcagtttcagatacagaactgatgaataaatatcttcgtgatttcatgacactgcatagtgatattaaaacaaagcgtcgagaaatgaaggaaggaaaaaatggtaattatttaagtatatcttttgtttctgcttctggcgagaacttgtggcttaggatatatagtgaacaatatacaaaattaacaaatgaagccgacttagatagaatcgcaaaccagataacgcacttcgtcaaacgagatgtgattagcgcatcagttcagccagatgctggctggacaaggtattttagaggtcttccattcatttctagcgaagtaacaagagatactcgaaaaattgaattaactatagaagcctctcctacaggagaagagctgcgttccatttttgaaacgtacaatgaagactataatgttagtgctggtgattgggccaacttaggttttagaaaagaaggtgtagggggaacatgttggttaaacgagttcgttgtaaggaatacattattagttagtgatataggtcagtatgatgattcagggttttatacgactagtagaattttgaatgccttgcacttaactagagataatttactggctgcctttacaagttctccggactccgaagaacaggcgaattcttga

SEQ ID NO: 128992 - DNA, 522 bp, Enterobacter cloacae
atgaaagatcaaactcgagagcatcttaaatatcttcacatcattccattggttgctattgtttgggccagttttgcatatcgatctgatattgtaagtcaggatttagacccgttaatttctattctgcaaaatgtttctgtaatggtttttactataatgggaatatggatagcatatctatatcctaatgcaatattgaggattacgcagccatcaaaagtggatgctattttttcagatgaggatagtgagcgagtcaagatcattgttggtgttgtggttctatccgcaatagtgttatctcttcttttaataggagttgttttaaagccgttcatcattaaatcttggctgtttattcatgccccaagtttttttgtcggcattggtattttttctttgctaatattgagttatttacaacttatagctctttatattgtgattgcatctaatgttaactttataattgaactgaaaaataaaaaaaacaaacataacctcaatagtagattgtaa

SEQ ID NO: 128993 - DNA, 2526 bp, Enterobacter cloacae
atgaaaattaaaatcctgtgcgccacggcgatcgccctggtgattcggcaagccgtggctgccgaaagcgagctgcaatttaatcctgcgtttctcaacggcgagcgcgccaacagcgccgatctcgcctgggtcaacgccgggagcgcgctgccgccgggcgagtacaatcttaacgtgtatatcaacacccagttcgcgttcacaggtaacgtcacgtttcgcgtcgctgaaaacaccgccggtgaagccctgccgtgccttacgcctgcgcaattcgccgcacttggcatcgacagccgtcaggctaaagggggtgagctgccgcctgcgcaacgctgcatttttttaacccggtcattcgccgatacccggtttgattttgaccagaggacgcttaccctcaacttcaccgtgccgcaaagcgcgatgcgcgctctgccgcgcgggtacgtcagcccggagagctgggagtccggcatccctgccgcgtggctgaactatgtggtcaatggcgcgaataatgaataccggggcgagacgcgcacgcgggaacaacagctgtttgtgagcctgaacagcggcgccaacctgggcgcatggcggctgcgtgatttcaccacgtggaccaaagagagtaacgagctcacccacgtccagacctggctacagcgggatatccgcgccctgcgtgcccaggtttacgccggtgaaacgttcacctcctcgcaggtgtttgacgccgttggcctgcgtgggattgccctgaagaccgatgacaatatgttgcccgctagcctgagcggttacgcgcccgaagtgcgcggcatcgcgcgcggcaatgccacggtgacggttcgccagaacggtaacatcatctatcaaacctccgttccgccgggagcgtttgtgctgaaagatctctatccgacctcttccggcggcgatctcgcggttaccattcaggagagcgacggcagccagacgcaatacaccctgccctttgccagcgtgccgaatctggtgcgtaacggtcaggtcaaatatgctctgggggcggggaaataccgccctgcgggcgatcagatctcgccctccttcgcgcagggcgagctgttcctgggctggcgatacggcctcacgttttatggcggggcgcagttttccgatcgctacaacggcctggccttcggtatcgggcagaatctcggccgctttggcgcctactccctcgacctcacccatgcccgcagccagctggctgataatcagcactacaccggtgattcggtgcgcctgcggtacagcaagctgctgaacaatatcggtacacgggtcaatttcttctcgctgcgttactcaacggcagggttttataccctcagcgataccacttacaaaggcatggcgggcggagcgccaaaacagaccgtggaagacgatggcaccatcaccacccactacgacacggtttacaacctgcatatgtcgcgtaaggcaaaaaatcagctgctgttgtcgcagccgatgggcgaatacggcgcgctgtcgctgtcctgggatcaacaaacctactggaatacgtcaaaaaccacgcaaagtttgcagttcgcgtggaacgcgacgtttcgtaacctgtcgcttggcatcagcgcccagcgtagctctggcctgtacgacaacaagaaagacaatatcctcgcgttgtccctgtcggtgccgctgggtaatccggcgctgtcgacccgtctccgttttaccgctacccatgcggatcccgctggcaccaccgccagtaccggtgtcagtggttatctgccggggcaggagaatcttttctatagcgtcaaccagcgctacagcgcgcagcagcactacggcggcgatgccgcgctgcaatacgagggcgcgtggggagactataacctgggctacagctacgccggtgactcccgcaacctcagctacgggatgagcggcggagcggtgctgcatgaggatggtctgacgctgagccagccgctcgggaacaccaatatcctcgtgaaagctccgggcgccagccatgtcgccgtgctcaaccacaagggcatcaaaaccgacagccggggctatgcggtgatcccgtacgccacgccatatcgcgttaatcaggttgcgctggatgtcaccaccgtgggcaatgacgtggaacttgagaacgccatcgccaataaaatccccaccgacggggcactggttcgcgccaccctcaccacgcgtcagggggcaaaagcgatgtttatcgtacgccacgctaaagacgtgctccccttcggcacgctggtctcgtcagaggatgacaaagccagcggtatcgtcggcgatggcggcagcgtgtatctgaccggcctgtcagcgcagggaacattgcatgccgtatggggacgcgacagcgcccagcgctgcacgatccgctatgcgctgaacccgcagacttatcacgcccgcaccgggctttattcccaggaggtcatatgtcagtaa

SEQ ID NO: 128994 - DNA, 483 bp, Enterobacter cloacae
atgaaaaaattactaatggctttcgtgattctaactttacctctgctctcattcgctaagggtattggttatggaaatactaaatgggacatgaatccgtcagaagttgttgcggctcagggcaatggcgcacatttgatctcaccagagaagtataaggataattttgggaaagtgcggattgataatgtatcgatcggtagcggtctttatactgtcacattcctttttaatagcgcagatcgtcttgtacaaacgaatgtagccagtaatgagaaaaaaaatgaaggtatcgctgcgagtcaatttggcacattgagtcaattgttaactcagaagtatgggaaacctgagttttcagattcagataaagcaacctggaaacttcctgacactacggttgagttaagtaagatggtcattttgaagtggtcaacaaaaactggccaccgcgttagagtttttccagtatcggttttctga

SEQ ID NO: 128995 - DNA, 567 bp, Enterobacter cloacae
atgggctggtcttcgttggttaagataaccattggtacatttctattagctgggttgtcgttctctacatacgcgaagaactgcaagaaaggtataccatgcggtaattcgtgcattgcggttggaaaaacgtgcaggattggatcaagcacctcttctgcgtataaaaattattcttactcttacccatcatcttcttttcatagttcaaccccttactcctcttcacattccccatcagcgaaggttgagggaaaaaacacagcttcaactgcgaaaacctatctctgtcagtacgctattgcagcagtacagaatggtagaataggtgctttacgtgtgctgggtagtgcagaggtaacgttgtatgtcgatagcttcaaagctaaccgtttaaacggtacatacctgctctcaccaaagctgaaaactaacggtaagttgatgatggcagatgataaaagcaaagtgtatgcctatgattcgtcgctgatgaactttgcaattagtgaccgcatcgcaagaagcactgagcaatgggataattgtaaactggttcacaattaa

SEQ ID NO: 128996 - DNA, 186 bp, Enterobacter cloacae
atggtgcggtctgtggtgtcgggtggcgcttacgcttacccgacctacagcggtcgtgcggtctgcgtgtcgggtgacgcttacgcttacccgacctacaatggtcgtgcggtctgtgtgtcgggtggcgcttacgcttacccgacctacaacggtcgtgcggtctgtgtgtcgggtaaggcgtag

SEQ ID NO: 128997 - DNA, 1644 bp, Enterobacter cloacae
atgcttggggacgaactcggcccaacgattatctggataattatttatctgctatgtgccgtggcgatacgactattgcaccgacgctatcagcgtgaagcgaaagaaaacggtgaaagggacgttctgcgacgctggcttccgcgtattaataatatcgcctttattcacgggctgggaatttcatcactctatttaattacgccacagacgcagaattttgactttttcctgttacttaatatcagtatcgccgccatcgtcgccgccaatgcgacgcatctgacgcctgtcatcagtacctttacgcgttttttcttcgcctcctggggggtgctgaacctcggtattatctggcggctggatgagttgatgttcatcgtgctcatgctgaatctgctttacggcttcgcgatttaccgccatgcgttaacttcccatgcgttctttattcagcaagcgctgcttgaggaaaaaagctcacgccttgcggaacagtttcgtcaggccaaagaggacgcggagcaggcactgctggataaaaatcagtttctgacaaccgccagccacgatctgcgccagcccgtacacgcaatgggctttctgatcgaagccatcctccaccgaaaccgggacgacagcctgacgccgcaactccttgaccttcagcagagcgttcgctcggtgcatttaatgctcaattctctgctcgatctcagcaaaatagaatccgggaatgtcctctctgccccgaccaaagtggatatcggtgctctgctcgactcggtcatcacgctgtttcgcgaagaggccaacagccgcgcgcttaggctgggcatccggcggcctaaacgccatatctacgtgatgggcgatccgctgctggtgcaacagtctctgattaacctgattcaaaacgcccttcgctacacgctcctgggtggggtgctggtcgccatccgaccgcgcggtgacgagtgtatggtggaggtgtgggacacgggagtcggtatcgccgatgaagagaagggcaaaatcttctcaccttactaccgccccgagctggcatggaagatcgacagcgccggacacgggctgggactggccgtcgttgcccgttgtgccaagctgatgaaggtgaaatacgggatgcaatccattgaagggaaaggctcacgcttctggatgcgctttacccaatatgctggcgaagatagcgcgctggacaccccacctgccgctgataacaccgccacgccggtacgctatgcgccgctgcacggttcctgcctggtcgtcgatgacgacccgctggtgacgtctgcctgggagagcctgatgagcgtctggggaattgatgtacgctgtgcggcctccgctgaagaagcgtttgccatcatcgacgacggctttacgccgttcgccgtgctgtgcgaccagcgcctgcgatcgggcgaaagcggcttcgacatcctgaaagcgctttttgaacgtctgccggatatgagcggcgcgatagtcagcggcgaatttaattcaccggttctgctggaggcggagcaggaggggtacctggtgctccgcaagcctctggagccggctaaactgcatgcgctgctgacgcagtggtcggggtgtcgttaa

SEQ ID NO: 128998 - DNA, 300 bp, Enterobacter cloacae
atgttgagcggctttcagatcagcagcttgcgccgccgtttgagtattgagcaatttaactttgttgatagtggttgtatcaacttctttcttcgtgatggtggttgttacgccgtttttaccgtcttttccatcggcaccgttagtgcctgctacaccctgaataccctggatgccttgcatcccttgagcaccagtagcgcctacatcaccttttgcaccatctttaccatctttaccatctttcggcacaggcgcattctcaagtgcagtgatacgggtatcgttaatactgattaa

SEQ ID NO: 128999 - DNA, 312 bp, Enterobacter cloacae
atgaacacccctccggccgaagaggaaatcgaggaggaacgtcggctgttttatgtcggtatcactcgcacaaaacagcagctaaatctggtggtccctcttgatgaagggcttgcgcggtggctcaaaaaccgctgggatagcaccccgaagaagtcaccgatagctactcgcttcgtctatgaggctggctggactgcttgtgcggttaccagtgatgcgatctataacagcacggtagagaaacagaaggctgacttcagcaagtttcaccaatggtatctaagagatcttcagcggctaaaagtctag

SEQ ID NO: 129000 - DNA, 300 bp, Enterobacter cloacae
gtgcgctgggaaggggtgaacagcgcctggggcaagctgctacgggaaagcgagacgaaggtatcaggatattctcagaacctgcgcatgctggggcaatacctggaccgtgagacagggctgcactacaatctgttccggtattatgacccggactgcggacgatttacgcagcaggacccgatagggctggcgggagggattaacctttaccagtatgcgccgaacgcgctggggtgggtggatccgtgggggttgactcctaaaacattaattcactacacgactgaagaaggatga

SEQ ID NO: 129001 - DNA, 753 bp, Enterobacter cloacae
gtggttgaggtgaaaaaatattataaaggaagtgttgattttattgcaggtgaagggactattctcaatgagttcataggagaggtagccacgcgacaaataaatattatagatggtaattattatgcttcttcctctttgctagataaaaatgaaaaagttggcttcctgctgtatgatggtaagaaaagcgacctggacttaagtgacgccgaagaaatttcgaatgaggaatttgaagttttctggcaaacatcaacgagttcattgcaagaaaaaaagcgaataaaatacttgtttggagatgctgtggaacctttgaaaaaatccacagttattgctcatattgtgaataataaagggaagtggggtaaaggttttgttctgtccctttcaaataaatatcctgcggcaaaaaaaagctatcttagtagcttcaaagaaaatagctccccagaattagggatggttgattttgttatggttgatgctcaggagaagatatttattgctaatatgtatgcgcaggatggtataaagaaaaatatcaacgacaaaaaacaatgcgtatgttatgactctctggaagtttgtcttgaaaaattatctgactttgctttagtgaatcgcctttctgtacaaatgccaaggataggagctggcctcggtggtggtgattggaatgttatagagtcattaatactaaaaaatatttgctataaaatgattgattgcaatgtaataagtttatga

SEQ ID NO: 129002 - DNA, 354 bp, Enterobacter cloacae
atgaaacgtttgttgctgcttgtattggttttaaatgcctcagtcgcttactcccaaacactgcctgatgttagtgcttttactcagcaacaaatctttgaaaactgggtgcaaaatcgatgcatcagcaagattgcagatagtaaaatcctgaaggatgatgcagaggccagtgccgctgcatggctcgaagcaagcgatctacctccagagaattttgaaaaagctgacaaggtgattgtttccttacttaaagagcaggtaggcggtaccgaaccgggtaattatcagatattaaagtgcagcttaattgccaatagcgacgcaattcgtctgctcaatgtccaaaaatag

SEQ ID NO: 129003 - DNA, 1341 bp, Enterobacter cloacae
atgtcagaatgtctggccgcacgcgtagatgatgagattgctcatacagcctcaaaaggctggatgatcgcaggattggttggtggggcaattctgggcgcagctgccgttgtcgtgaccggagggaccgcgctggttgctgtttctgccgttgcggctggggcatgtgctgcgggtgggttgggtgagctcctcggcagtatgtcatgggctccacgccacacgacaggtacgctgaaagaaggttcacccaatgtctttatcaacagccgaaaggctatccgcgcgcatctgtcagccggagagtgtgatgagcacagcggtagcctgcaacgggttgcggaaggatcgataaaagtttacatcaacaactttcccgcctcccgcattggcgataagttgacttgcagcgccgagattagtcagggatcgcgtaatgttattattggtggaagcaaagttcagaccgatgaaataagtcctgaaatccctgaatgggtaaactggacgatgctcgccgttggtgcaggagcgatggcggtgctggccagtccggcaatcgcacttctgagtaccctcggtgcgatgggcggtggcagtgttggtagctatgcggggggaatgctgtttggcgaaggtagcgacggtcagaaatgggggatgctgatcggctctgttatcggcggcggggctggcattaaaggcggggcacggtttgatgcgtggcgggctggtaaaataccggcagttagacctgtcgaagcaagtccattaggcgctacagctttaaataaaccgaagatgagtttatccgaggctgtaggtaaagacctggcgaatacatgggtaacgaagggaagacaacttgctgaacaaggggataaacgactctcctcgctgctaaccgatgatgaggtaggggctctttacggttatactacgaatgaaggctatccgatggttaacaatgcgctaagaggccagactgaacttacaccagaaattcaagcttttgcggatcacgctactagcgctcttgataagcttccttcctatgaggggttaacatatcgaggcgcgacgttacctgaaaacgtactaatggaaaatcaggtgggtagtattgtttctgatccagcatttatgagcaccgatcagaaagttcctttttcaggagataccaccattacgataaatggtaaaacgggtaagcctattgattttctttctgaatataaaggaactgaaactgaagtgcttttcaaaccaggtaccaaatttgaagttgttgagcgtgttgatgctggtggtaaaaccgcgcttacatataaggaattataa

SEQ ID NO: 129004 - DNA, 1257 bp, Enterobacter cloacae
atgagtttaattaagaacagcagttggaatatatttggacttgcgcttccattattaatggctatccccgtaatgggggttttagcaagatcactcggagtggaacgctttggtctttttacaatcgcatatgccctaatgggctatgcgagcgttttcgatggtggaatatcgagggctgttatacgatttgtttctacacatagaaacgatgataatcgagttaatgctattcttggaacatcgctttatgctgttacagggcttagcattattatcgttctgcttggatatttttttgccccttcgttagcaagatttttgaatgtttctcctgagctcctcaatgaattgacgctagcgcttcgtttgttagtattatgcgtgccggctttgttgcttacacaagtatggagagcctatcttgagggcgttgagaaattcttaagtctcaatattcaacaagtcacaacaagtccatttatcattttactccctctttttgcagtactatattctccgaccttgacctctgctgtatgtgggttagttgctggaagatggatagttgcactaataagttggaaagtttgtgaaagccaccttaaagaatttcgacggattttcagaaaggatgttttttcagaactaatgagcttcggtggatgggttaccctaagtaatataatcgggccactcatgggatttgtcgatcgatttgcagtttctcatttttctggtgcaagcgttgtggctcactattctgggccttctgatatggtcgcaagattatctttattcccaggtgctgttgcaagagcattatttccaaaattaagctattcgaaatcgaaagatgctcattcagtctatcatcgtactttgtggtcggtatttttgttttccatactacttgctactcctttttttatgttttcaagcgagattttaggcttgtggttaggtaaagaatatatgggggatgcggcacaaatatttaagattttattattaggttttgtctttaattcagttgcgcagatctgctttgcaaaaatacagtccgcaggacatgcaaaatggacgggaattgttcatattatcgaatttttcccgtacctcgcgattctatattatctgactacaacctattccatctttggtgccgccgttgcatttttattaagaacatttgccgattttttaattttattttatgttgaaaaatttggaattcgtatgaaaacaggtggctaa

SEQ ID NO: 129005 - DNA, 555 bp, Enterobacter cloacae
atgaatattattaaaacagagattccagatgtattaatctttgaaccaaaaatatttggggatgaacgtggttttttcatggaaagtttcaatcaaaagaaatttgaagatgcagtcggacaacaaatagattttgttcaagataaccactcaaaatcatctaaaggagtgcttcgaggattgcattatcagaaagaaccctatgctcaagggaagctggttcgctgtgtcgcaggtgcagtatttgacgtagctgttgatattcgtaagcaatctccgactcttggtaaatgggtcggtattattctttctgccgaaaataaacgccaattgtggattcctgagggattcgcccatggttttcttacattagaagataatactgaattcttatacaaaacaacagattactatcatccagaagctgaaggttcgattctctggaatgatgaagacattggtatagattggcctaaagaagacaatattattttatctagtaaggataaagatgctccactgatgagttttttgattaaaagtaaaattatatga

SEQ ID NO: 129006 - DNA, 900 bp, Enterobacter cloacae
atgaatattcttctattcggtaaaaccggtcaggtgggttgggagctacaacgtgcccttgcgccgctgggtaatttgattgctattgacgtccattcgcaggagtattgcggtgatttcagcaaccctgaaggcattgcagaaacggtgcgccgcattaagcctgatgtcatcgtcaacgcggccgcgcataccgccgtcgataaggccgagtcagaacccgaatttgctcagttgctgaatgccacgagtgtggaggcgattgccaaagaggcccaaaaattgggggcctgggttgttcactactctactgattacgtattccctggtaatggtgatacgccgtggcttgaaacggacgccacagcgccgcttaatgtgtatggtgagaccaaacttgctggtgaaaaagcgttaagtgaaaattgttcacgccatttgatcttccggactagctgggtttatgccggtaaagggaataattttgcgcgtactatgctgcgactggcaaaagagcgttctgagctgtctgttattaacgaccaatttggggcccctacgggtgctgagttattagcagactgtacggctcatgctattcgggttgccctgaataaacctgaagtggcagggacttatcatctggttgccagtggtacaacaacctggtacgactatgcctctctggtatttgatgaagcgcgcaaagcaggaattgaactggcattaaagctgcttcatggagtgccgaccagtgcgtaccctacgcctgcaaaacgtccggcaaactcccgcctcaatacgttaaagttccagcagaatttcaacctcgtactgcctcagtgggacgagggggttaagcgtatgctgactgagtggtttacagcaacagcaatttaa

SEQ ID NO: 129007 - DNA, 1086 bp, Enterobacter cloacae
gtgaaaattctggtcactggtggagcaggctttattgggtctgcagtggtacgacacattattaatgatacgcaagactctgttattaacgttgataaactgacttatgcaggaaatcttgaatcgctggctggtgtctcactcagcaatcgctatcattttgaacatgctgatatctgcgacagcgacgccatggcgcgtatttttgcagagcaccagccggatgctgtgatgcatctggccgccgagagccacgttgatcgctcaattaccggcccggcagcttttatcgagactaacattgttggcacttatgttctgctggaagccagccgtaaatactgggctgagttaactgctgataaaaaagcgtcatttcgctttcaccatatctcaacagatgaagtttatggcgaccttccgcatccggatgaagttacagaggattctgaactccctctgtttactgaacaaaccgcctatgcgccaagcagtccatattctgcttcaaaagcctccagcgaccatttggtccgtgcctggctgcgtacctacggcttcccgactattgtgactaactgttctaataattacggtccttaccacttccctgaaaaacttatcccgttggtcattctcaatgcgttggatggtaaagctctgccagtttacggtaaaggagaccaaattcgtgactggctgtacgtggaagatcacgcccgcgcattatataccgtagtgacacagggcaagataggtgaaacctataacatcggcggccacaatgaaaagcagaatcttgatgtggtaaataccatctgctcactgctggatgaaattgtgccgaaggaaggttcctatcgtgaccagataacgtatgttgctgaccgtccgggtcacgatcgtcgctacgcgattgatgcagaaaaaattagtaaggaacttggctggaagcctcaggaaacgttcgaaagtggcattcgcaaaaccgtagaatggtacttggcgaacacacaatgggtagagaacgtaaaaagcggtagctacaagtcctggattgaagaaaactatggagaccgtgcttga

SEQ ID NO: 129008 - DNA, 1632 bp, Enterobacter cloacae
atggggatggtcatatcgtccattttacttattatcgcagcgttctataccaacctctatttgccgagaacgattccttttatctatttctcattcggtctactgcttattgccggatcacggcttgggatgagaatgttggtgaatcgtgggttgaatctgggcactcgggtagttatttatggtgcaggtgcatccggtcgtcaattactgcctgcgctgagccagatggacgaatattaccccgttgcttttgtcgatgataaccgtgccctgcaaggtcaggtgattcacggggtaagcgtttttgcgccagaaaaactgccctggctggttgagaaatacgaagcgaagaaaattctgctggccatgccaagcgcaagccgggcaagaaagaacgaagtcattaaaacactggaaggtctgccgtgcgaagtgctctccatcccgggaatggtcgatttggtggaggggaaggcaagtattgattccttacgtaaagtcgttattacagacctgctgggccgcgatcctgtctcacccattccggaactgatatcccgtaatattaacgggaaaacagtgatggttaccggggcaggggggtcaatagggtctgaactatgccgacagatacttaaaaataagccaaaccagcttattctgttcgaattgtcagagttctcactctattccattgattccgaactgcgtaacctaaatcttggtcaggattttaaagtaaaaatctatccaatcctcggtaacgttcaggataaagagcatctcgaaaggttaatcagagcatttaaagtcgacacaatttatcatgctgcggcgtacaagcatgtaccgcttgtcgagttcaacgttcttgacggtgtgcgcaataatatctttggtacattgagctgcgcacaggccgcggcaagctgtggtgttgaaaactttgtcttgatttcgaccgataaagccgtacggcccaccaacacaatgggggcgaccaaacgcatggcagagctggtactgcaagcattggcgaaggaatccagcaaaacctgctttagtatggtccgattcggcaacgtgttaggctcatcaggctcagttgtgccgttatttgaaaaacagattgctgcaggtggcccggtgacgttgactcacgaagacatcacgcgttactttatgaccattcctgaagcggctcaattggtgatccaggcgggagccatgggcacgggcggcgatgtttttgttctggatatgggggaacccgtcaggattatcgatcttgcacaccgcatgattacgctgcaagggctaaccgttcgtgatgataaaaacccctatggtgatattacgataaaaacgacgggtctgcgtccaggtgagaaactgtatgaagagttgcttatcggcgacaatgtctctgcaacacagcacccgcgtatcaggactgctaacgaagtgatgttgccttggagtgagatgagtatgattctcaacgatctcgacaaagcctgctgcgaattcgactatgaacgtgtgcgtgagatactcttgcaagcacctgctgcgttcaatcctacggatggtatctgcgatttactttggaatgaaaaggcaagttaa

SEQ ID NO: 129009 - DNA, 561 bp, Enterobacter cloacae
atgcatgacttattgattttgggcgcgggtggtcatggccgtacgctgtacgagacagcgagactgctgggatataaggatatcgttttcctcgacgataatacctctgcctgccaggaaattaatcagctgattattggaaaaatttccgaactacagttacatattggtaaggtcagtcatgtcgctattggcatcggaaacaataaagtcagagagcagctctatcagcaactgctcggcttaggtattcatcctgtaacgcttatacatccctttgcatttgtcagtccatcggcgacccttgctgagggaactgttgtgttagcgggagctgtagtgggtgccaacgcaaaattaggtttggcgacgattgtgaatagccactcgacaatagatcacgatgccattgttggtgatttcgctcatttaggtgttggtgtccatcttgcgggcagcgctgtgattgggaaagcagcgtttctccaggcggggacagtgggcggctataatactaaagtagacgattactcagtgtgtcctgctggtactattttataa

SEQ ID NO: 129010 - DNA, 1044 bp, Enterobacter cloacae
atgacgaattatgggattgtgatattcgcttttttagcctcctgcgcactgacttggggattgcgggggtatgcaataaagcataatgttattgaccgcccaaaccagcgaagttctcattctgtgccgaccccgcgaggtggtggagtagcgatcgtcctgacgctcctggtcgctttggtaggattttattttaaccatacgcttacgttcgacagtttcctgggtttatttattccaggtgtaattgtcgctatcattggcttccttgatgatcatggtcatattgcggcacgctggcgtctattgatgcatttcatggcagcagcaattggcatctatttcctgggttccttccctgtaattacgctgtttggttacgatctttctttatcctggattggtatgattctcggctgtgtatatctggtctggatgctgaacttatataattttatggatgggattaatggcttagccagcgctgaagcaataacatttgccgcatgtagtgctatattaattgttgtaaaccagtacacggacgcgcctggaagtatttatccgctgacgcttgctcttatcggtgccgcggccggttttattgtctggaatttcccgagagcaaaaatcttcatgggcgatgccgggagtggtttcctggggataactatcggactgatgattctccatattgcgaaagcagatacacatttctttattgcagaattatgtttgctgggcgtatttatcgtcgatgccacgacaactttattgaggaggctcgtagcaggtaaaaaggtctatgaagcacatgccagccatggctaccaaatcctcgcaagaaaatatggcagccacgttccggtgacatcattggcaattgcagtcaatctgctgtggcttttccccttcgccttttttattgcctcaggcaaaattgatggtgttgtggggctgctcatcgcctggttcccgcttctcgttgttgcactgaaatgtggtgcaggagttaaagacaaagagagcaacgtcaatgcatga

SEQ ID NO: 129011 - DNA, 945 bp, Enterobacter cloacae
atgaaagtaatggtgacgggcgggaccgggtttcttggaactgctttagtccaggcgttgaagtcatcaggacacgaggtgatattaacaacgcgcaagcaggagaaccctgaacagggcatttacaacctgggtgatatctcagccaataccaactggttaaatctcctgcaaggatgcgacactgtcattcataccgcaggaagggcgcatatccttaatgatgatgcacaggacgctttagcggaatttcgccgtgtcaatcacgacgcaacgatgaaattagcgagcgatgctgcgaccagcggagttaaacattttatctttgtaagctcaatcggcgttaacggtaatgccacctcagggatcccatttactgaagcctcggagccacaacccacctctgattacgccatttccaagcgagaagccgagcagagtctgcttaatcaatttgcagaaagcgatatggcgatcactattgttcgcccggcattgatttgtggtgaaaatgcaccgggtaatatacagcgccttttaaaactggtttctaaaaacctaccgttgccatttaaaaatgtcaggaacaagcgagcgctggtgtctctggataatgtcgtcagtttcatcaacgaatgcgtggtaaatgagaaatccaaaaatcaactctatttactcgcagatgtggaacgaccttctacagcagatatgattaatgcctttgcttcaggaatgggcattaaagcgaaactggtctctttcccaacgggtatcttcaggttattgctttcttctgttggtaaacgaggtatttacgatcagctgtttggcgatctggaagtcgatgcctctaaatcccgggagcatttaaactggacgcccccgataacgctttatgaaacgatgaaaaaaacggcgaaatattatatcgaaggtaataaataa

SEQ ID NO: 129012 - DNA, 1128 bp, Enterobacter cloacae
atggctattggtcacttcttattcaggggcgataagactgcttgcggtggtcggattattgaaggatgtaccgatcatcagtttttcgataaagacatggcctgtgaagggcataaagtgacgtgtggcaaacatgcgggtagattccgcatagcgggagggcttgaaaaccaagacatacacggtaaaagggtagccggaacactgcacagccgtagctcttgcccctgcaaatcacgttttattccgtccatcttcgacacttatgaattttctaaagaaccagcggaagccgaaaccgcccaatctcacatcgttgaatttcccgttctcccaggcccgattgcagatcctaaaactgatagcttcgctgacacctgcaaaccaacagataaccggctattgaatggcgtttacatctggactgaaacaacaagtgcaggtcatgctttcgtttcggtgcatgagaataactcgatctacctttacacctatggacgctatggacgcacagacagaagcacgctaaccggggatgggattttagacttcttccaagatgaagatgcacggaagtattaccgttacgaactttatgaaatgggtgctcgtgcatttcggattgatgatgctgatcctgaattaatccgtaagttcttcgaaaaattatggaataacggtgtatcaccgattcaaacaccaaagatgcaggacggcacaatacgtagaggccgcacgattgataagtatgacgtaacagggaataactgtactactcactcagtcgaggggatcaagtttgctggttcaaaggtattcgaacacggttacacctccacgactacacagctaccaatcgacatagaagaagatttcactatcccggtatcactgcaaagttaccttgaaacaaagagtgcagattactcctcaatgctcgtcgtcgagatgacaagtacgttcaagcagcagtatccaaacattgagaacaaaagccctcaaccaatggggggaagtgcaaaaatccaacaagcggcggctgattctgctgccgttgctggctcaacttctccatactcaggcggcacagtaggcggatcgttgggaagtacatacgatgatgaataa

SEQ ID NO: 129013 - DNA, 591 bp, Enterobacter cloacae
atgttcgatgttccgcctgaagatttggttggcgctgagtctatccataagcatttgaagatttataaatcgctgttcaaaacctttctgactgacaataaagatattctggagaagtctccgactgatggagtagtcgctgcaccgtcgaaagcgaggtttggaacatacagtgcagcagaaatgagaaagtttgtggggtgggcgctcaagcagcctgacggctggcagaagtggattactctgttgttggcgtatacgggagccagaagaggggagatcgccaagctggagaaatcacacattaaatttgatgaagacagccagcgacactatctcctgatcgcggaaggagggcagggtaaaactgagaatgctacaaggcaggtagtgatccatcccaaactgatcgagtgggggggcctcgattttgcaaaccgtcaatggaaagagaagattttctcgcctgtgtcgggtaagaatatgctgaagatcggcaaagttttagccgatgtccgcgatcagcttggtattcgtatctggatgattatgggcagcgccgcctggtgcatagctttaggcacactatga

SEQ ID NO: 129014 - DNA, 468 bp, Enterobacter cloacae
atgacggtaaacgttgaagcgctgataaatagtctgggtaaatcttatcaatatatgcttgataaggatttaattccgtataagtctccaccaaagggagcttctggaacgccaaccattaatctcgaaatggcccaggaaggaatttttctttctttctggcgggagggacggatattgaaatctgtcacactcagaattcagcacgaacctgcgtccagttggacattccctaatgaactaccagcacctttgcaggtgtctatgtcacgcaaatgggttaatgaaaatcttggtgagcctctacgaagtgcgcctccttacactgtaatgaataaggattatggctggacagacctttatgaagtaaaggattacgatattcctaccagtatgcaaattaactatgacgtagcggatagcgtgaggtctgtaaccttcatgccaacgtcagagcttcgctggtag

SEQ ID NO: 129015 - DNA, 249 bp, Enterobacter cloacae
atggcctttcgttttaaaagacttaaatcaacgagtattgtaagcggcaatacctgcgccaacaatagccaatacacccaccactgctttagcctcttttacatgctggttatgcattattgctgctttattagcattaaccgcgttagggtccaatgtaataacattgctaaaatgattcatgcaagcttcatcaacagttccattgaaggtgcccgaaagtactttatcagttttattatctattga

SEQ ID NO: 129016 - DNA, 741 bp, Enterobacter cloacae
atgaaatatttaacgctgcagcaggcgatgctgggcatgcgcgtaacaatgaccgacgacggcttgattctcaaaagtcctgcaggtagcgcacactacgatttgaaaggtcgccgccatacagtttggggtgatgcttctttcttccctgaacatctacgggtgaaagataagcgcaagccgaaaggtggccacgtcagctacggcaatggcgaaattgttggtcatcgggctgatggttctgtggcctggcgaatggggaagatagaagaacctacaaaaacgcctgatgctgcattaggtgagctgtcggctgtttacactcttccgcgttacaaaattagtagcgacatgaagaggcaggagctgattgctaatgctcttgatgaagtaaagcagaggtccaatgaggtatttggcggatttccagcagataaaacagcggtggttttcttggctgatcgctgggtagctattgaaggaggctatacgccagatgaaatgcgtgatgccgtggaatacatcaagcggaaaaggaaggagaaagcagacgcaaaggcgatggctgaatcatcgccattctttgtggtgggcggcgttgtacacatcaaacaatcagtcatccaacctgttaataacgaagaaagctgcttaagtcgtttcgtttcggagagagtgagcgaagctttacgcgaagccacacgtcctggtggaatcattcacgccgccactaagcgttaa

SEQ ID NO: 129017 - DNA, 543 bp, Enterobacter cloacae
atgaattctgattatatctcttacgaagcgttaatttcagcccgtgaaactgcatactgggcaaaagtatctgcatacggggcttggttttcaggagtggctacttttttagctgttatcacttcgctgttcattgctttaatcaatcgaagggcttttattggaggaaaggttaaattcgggcgtatcatgtctgatgatgatgaccggaggctgatagcaataacagttgttaaccgttcattgcattcgataaaaatcaaagccatttactggtatgttggcggagaaattgagcttcaacagctatttaggaataaagagtctgatcgacttcctactcgtttagaaaacggagatgaagctaattatcgaattattattgatgctgatgaagattggttcaaaagaatggccgtgcggttgaaaaagctaaattttcatccaaataaaatccgttgcgttataacactttcaactggtgagcgatttcgcttaaaggtggataaacggctaaaagaaaaaatccttcaatacatgtaa

SEQ ID NO: 129018 - DNA, 264 bp, Enterobacter cloacae
atgaataatcgcgtcattgaatgcgcctccagagcggggcgcgacttctctgagttcatgaaaggtgagaaggacatgatgcaagtgctggcctcggttgatcagtttggcgagcaactccgtctcaacggctgcgtcaatcatcactttgtaagttacatgatgaggaactcgatcatgcaggcattcatggacatggcaaacgccgagaagaaagaagagcgccgccgtaagcgagcggaaacaaaagcaaaggcgaagtag

SEQ ID NO: 129019 - DNA, 498 bp, Enterobacter cloacae
atgaaatcattaaccctcttcaatcaaccaatccgtgtcggggaagacggcatgatctgcctcaccgatatgtggaaagccagtggcaaaagtgatgctgaatctccgtaccactatctgcgaaacaagcagacaaaagagttcctggccgagctggagaaaaaccacgaatctgtggttttcactgcacgcggcgtacatggcggaacctatggcgggaagtttgttgcttacgattatgcggcctggttaaacccagggttcaagtacgcagcttataaaatcctcgatgactacttcaccggagagcttcagcatcgcaacagcttaagtgcgcagctcaacatgaagtgtcatgagtttgaccagaagaaggacatggcgagcttctgcgggcaaggcctcgctgcatggcgctatacaaagcctgtgctggtcgctgagattaataccctggctaaccagctgcagattacgatcccagggcttccaggatga

SEQ ID NO: 129020 - DNA, 231 bp, Enterobacter cloacae
atgttcagcagacagttaaccatatgtctggcgacgatgttgatcgcgagctgcgcacaaactggacccgtaaaggttgaggtagtggacacggcttgcgactgggttaaacccatctacggcacagcgcacgactgggatgtgctggaccgccagacgaagaaggacatcttggcgcataacaaagcgtggcaggcgaactgccagaaagaaaccagagcctcgcaatag

SEQ ID NO: 129021 - DNA, 630 bp, Enterobacter cloacae
atgaaccaaacacaatttcagagggcggctggtatcagcgccgggttagctgcgcgctggtttccacatatcgacgccgctatgaaggaatacggcatcaccgcaccgctcgatcaggccatgtttattgcccagatggggcatgaaagcaccagatttacccgactagtggagaacctgaattacgcggttgaaaacctggtaccgacgttcggtagccaccgcatcacgcaacagcaggcagcagcacttgggagaacagcaacgcaaccggcaaaccagaaagcgatcgccaatctggtatacggtggtgagtggggaaaagaacaccttggcaatcaggtcgctggtgatggctggaaatatcgcggtcgtgggctgaaacagattaccggcctgagcaactatcgcagttgtggccaggcgttgaaactggaccttgttactcatcctgagctgcttgaacaggatgaatacgccgcgcgctctgccgcatggttctatgcctcccgcggttgccttcttcattccggcgacgttgagcgcgtgacactgttaatcaatggcggccgcaacgggctggataaacgccgtgcgctgttgaacctggcgaaatccgttctggtatga

SEQ ID NO: 129022 - DNA, 573 bp, Enterobacter cloacae
atgaaacttttttcaccgctgagttatctccgcattaagcatgaggaaaaggattggtatgattacaaagtaccagtcatagcttctgtaattgtcactattgtttatcattttcatgctaacaaaatttctttaatcgagactaatggactcctgcttcaggttaatggtttacttcaagtattgattggcttttatatcgctgcattggctgcggtttctactttttctagttcttcaattgacgaagtgatggcgggtgtacccccgactctggtagagaagttccgcgggcaaaaactcactgtagaactgacgcgcaggcgctttgtttgctacctttttggctatctagctcttgtgagctttatgttattttgcatagggatgatttccattctgatggggaagcctttccatatttggctgctcacattctggtctgctgatgcaatcttatggcttaaaacggtgtttgttggtgtttatttattcatcttgatgaatatcataacaactacattgctggggctatacttcctggcggttcggttccatcaatcatcgctgtaa

SEQ ID NO: 129023 - DNA, 921 bp, Enterobacter cloacae
gtgctttctaacaacgaacgttgggtttctttttttgattttgctttgacacccacgcatgcagcagccccaagtattccgattgcagatattcttacaaagctaaagctgctggtggattcaggcaatgcggtgaaactatacaataatggttctagggcgctcagaatttcagaaatgaagtttgctgccggtgctgcacaagcgaccatgcttatccagctaagtgacaagaatggatcagatcctgtttttggtgagctcacgacaggtaatcttagggttgagcctaagctggcgggggaagggattgcagtgtcatgtcatattgtgatttccaccatcgttgagccgcattcagcagaccactacaaaacgctcgttgaatctgttccggggataagtaaatcggttcttgaaccatttttgaacgcaatgctcagggaggcatttactggatgtgagttcaaaaatcctgcaacgaaggccatgtgtcagcaccgtccgaagttagacatatattcccatggctcacaaacgctattggatgctctaaaaggtgcaaaacttcataatgttaagcttgtgagcacaagaagaaaaggtggactggaccaaacagcgtacactgaactttcagagagagctgtaaggtacaagatcatcaaacagccgccattgaaagataaagaaaggttgttagaaatcctgagaaggaaagggcaacagtctggatataccaaggtttcaattagctactcaaaagatggcaagcaagccagtttagatctggatcgtaacgaagatgctgccacaaaactgttcactaaaagtgagagggtcatattaggtaacctcatcaaccaatgtgaaagcacagttcatctgcagcttgaaacaaaaatgatagggttgctctaa

SEQ ID NO: 129024 - DNA, 264 bp, Enterobacter cloacae
gtgtattattttacatcgttttgtttttcaaggttttttagttggaaggagggtgttgaaggcaaaaaaaaagccgctttcgcggccaatttacgggagattggtgatttttgcgtcgaccacaacacctataatacggcagttgccattgattgggattattgggtattggggattcaggggtttgagaaatctttgaccggcatcgataacaagctttttgaatgtagcttcattgtcaccgtcaagtttcgctacaactag

SEQ ID NO: 129025 - DNA, 315 bp, Enterobacter cloacae
atgagtacagagaaattttttcaacttgtagatatacccgattaccgtttctcttctgataaagagaaatgtcaaaacattgatttcgacaaaattgctactgactgcgatacgaaaacaatctctattttagaagccattaatcatatagggattagcataatgagtgaggttgaagaaaagagcttggataaaaacaaaataataatgctttctggtgtgattgcagacctcgcagaattagcaatggctaccaataaaattgctaactcagcaacatattcctccggttataaggatgcaaaaaatgtctga

SEQ ID NO: 129026 - DNA, 255 bp, Enterobacter cloacae
atggctaaccaacaaacaatgctttatcagggtgtgctgctcccccgacccatgttgaacgtggatctgcatgtcctccctgattttaccgggcgggtagttctgcatatcaagaatgggagagtgatgtgtgatcgaccgttacgcaacgatgaacatattggtgatttagacgctttcattgagctgattcgcttagctggaattcagtatggggaggtaactggtggcactgacagcgatacgaattcctga

SEQ ID NO: 129027 - DNA, 414 bp, Enterobacter cloacae
atgaacgataagcgcaccgtaagcatgattgacctggcattacagaaacacgatacgccagttggcccactgttcgtggcagtacgccacggtcgtatcaaaaaatgcttcacgcgagatacggcgatccgctatctggctttcttcatgaccaccgaggcttttgagcgttcaggttttgcgcagcgtcacccgcgggtgcgtattgatcgcgatgacagggaggtatggcgagacggggaaacaaaggctgagtatctggccgcccaccagcgttgtattcgccgtctgcgtcgcatcctggcgcgtaagcgagaaatggagaagtggcgtaagaaatgggacgcgatgcatgaccggttcattaaagaggtcgatgcacttcaagccatcaagcctaaaggagtgtattga

SEQ ID NO: 129028 - DNA, 516 bp, Enterobacter cloacae
atgagttctaagaagttttcgtggttcggggtgctgcataaagctatcaaatgccctaatcgccgtttccacttctggtggcgcattgcttcatactggcatcattcagacagtaacttcctgaaaaaacgagctactaagataaacagaaacctcattttcaaatatggaactgatattcagttgggcgcacacatcggacccggaatggtgatttcccaccatcaagggatagtgataaacggctccgctgtcatcggacactctttgcgtatcaggcagaacataacggttggcattaccggtgcgaatgtccataaagagccgatatccattgttattggcaacaatgtcagcattggcgcgggttcctacatcatcgcagataagattcgcatcggtgacaacgttgtaatcggcgctatgtcatttgtgaacaaagacattcccagcaacaccactgtctatagcgaaaaaactttgcatgtcatacctaacaaattacatgcagcatga

SEQ ID NO: 129029 - DNA, 789 bp, Enterobacter cloacae
atgtcttcttctcgtatgccagcactgtttttaggccatggcagcccaatgaacgtcctggaagataacgtctatacccgcgcctggcgtgaactgggtgagacgttaccgcgtccgaaggcaattgtggtggtctctgcgcactggtttacccggggtaccggcgtgacggccatggaagcgccaaaaacgattcatgattttggcggctttccgcaggcgctgtatgacacgcattatcctgcgccgggctcccctgagctggcgcagcggctggttgatctgctcgcccctgttccggttgcgctggacaaagaagcctggggctttgaccacggctcatggggggtgttgatcaaaatgtatccggatgccgatattccgatggtgcaactgagtatcgacagtaccaaaccggctgcctggcacatggagatggggcgtaagctggcttcgcttcgtgatgagggcatcatgctgattgccagtggcaacgtggtacacaatctgcgtacggtacgctggcacggtgaaaatacgccgtacccctgggcaacagcttttaatgactatgtaaaagacaacctgacctggcaagggccggtcgaacggcaccctttggtgaactatctggatcacgacggcggttcgctctctaacccgacgccggaacacttcttgccattgctgtatgtattaggcgcatgggatggtcaggaggttattacaatcccggtcgacggcattgagatggggagtttgagtatgctgtcggtgcaggtggggtaa

SEQ ID NO: 129030 - DNA, 243 bp, Enterobacter cloacae
ttgacgctttccgccagcggtgtgtacggcgtggaggtgaaagcggacagtaggagcattcatcaggtgaagattgcaagggacgctattcagggtaagcaggtcagttctcgccgcttgatctatatggagaaaacagcgggaaatgaatcctcagcctgtcttaccggagcgacaccggaatactgccccgagtgtaccgggtgcaggtttataatctttagcgttttttcacacatataa

SEQ ID NO: 129031 - DNA, 489 bp, Enterobacter cloacae
atgaataaaaaatataaagcatttaccattgctttgtttggcctgttaaccatcttccttgtcacaattatgagcatgactaaaagtggcaatgtcaactgtactggcaccctgcaaatgaattcaccgggcgatcatgagtatctcttcaatggaaccatcagtgtggtaatacgggcgggtagtgaaagtattatcagtatctttggtacctcagtatcagcaagacaacccacgcctatcaatacacatctggttaatcgggaaataacattcaggctcctgagtagaaacaaaagcgatttttacctgggtgatttgaaaactattgctcatccgggggatagcatgactgagacagaggcctccgggctgcttttcgatatgtttgatctggaaaacaacaggctcaccgtccgaagatatctcaatacctttgtttttggtgatgttcctcttcctttatttatatgtgtgaaaaaacgctaa

SEQ ID NO: 129032 - DNA, 852 bp, Enterobacter cloacae
atgctctatatttttaatgagaatattgtttatgatgacgttcagtgttctttaactaactgtatgagttatgactccattcttctccctgcaacagcttcccggttgctgtcgctgtttatcagatatcagggatcaacattaacccgtgatgaaattcttaattgcgtttgggatgaatacgggtataaagcgtcaaacaatactcttacacaatatgtatctctgatcagaaagaattttcagttgcttggtgaaacagcagatatcatcattactattccacggatcggatttgtgatgagcaacgatgttgaagtgaaaatgacagaggcgggttatgaaaagcaaaacctgttgcctggggatataaattcttttagtgaaaatttacttcctgagaaggtagaacagctaatagctctttctgaaaccattgccgaaactgaagagatcagtacaaatggtgttacaagcaatagtaaaaggccaataggacttcatgtgattaatgcactgtcattagtcattttgtgtcttatttgttattttattcagctaaacaccaataagatgaaagttgcaagggactaccaggtcggaacgattgatagctgccctgtatatatgttttacaaaagctcagaagaactgcttcccgtgcggctgaccttaactgaaaagatggccagggaaacactcccttgtcttaccgggagtttctatattacccagcaggaagatagtctgatttttggtgaggcaggacgattattcatcagcaggtgtagttaccaggctgacagcaagctaaagatatccagttgcaagagcgtatttaatcatgaataa

SEQ ID NO: 129033 - DNA, 780 bp, Enterobacter cloacae
atgctgataatgaatgatacatttgaaaagaaattctcttacaactgtgaaatggatgttacgcctttccttcagcctgttattaatacttatgataactgtatcgtgggagcagagatcctatgcagagttaaaacaaaaaaaggatacatcctgaatcagctgcatattgaagagcttgaggtaccagaacgtgcagattattatgccagggagcttttgttaaaaacagcggaactcttaagggaaaatgatggtttaagcgaaatcccatcgggttttgttttttctctgaacatcaccagtggtcagataaagtctcaaactatcaggaatgcagtggcgaggtttaagagttatttcacaacagagatagtgatcctgctggagatagtggagaggaatataactgaagcgaccagcgatattctgaatgcaatcgcattatatgattctatcggagtaaagtttgcaattgatgatgcaggaataaactctgctgcaatgaggttttttggtgtcaataatgtttctattttaaaactggatcgtacagttactcagataaaagagaactctgatttggtataccggaagttaattgatggcatcgtaaaagtgtcttctctgtgcaggctacatattgttgcggaaggggtggagaaccattatcaaaaagaggctctggaagaggctggcatcatatatatgcaagggtatttcttttcacgacctttgcctgtaattgctttttgtgattttatgaaacactaccgctga

SEQ ID NO: 129034 - DNA, 588 bp, Enterobacter cloacae
atgacattaaaaaaaacagttatcatcctgtccgatgattattattatctaaatgggctggatgctttgttaaaaaatgtaaagcacctggatctatgctgtcattatgtatatcaaaatcagcaggaatgcttttttgatggcgtcgcttttgatatccataatgataaaagcatcattattctggcggttgatgatttaaatgtgatcagacaatttgctgcatattttagcaccaatgtcatctattcactgagaaccatcggcaaaagagagatgatcctttcttacaagggcgcgctggtaataaacagaagcctttcgatatggcggatgttagaaatgattaaaaaatacgggaggaattgttgtatgacaagcatatcactcaccacaaaagaagaacaggtgatttttaactacttcaatttgacgggatgccagtttaaggattttagatataaatccgggattaaaaaaatcagttattacaagcgctccgcgtatcaaaagataatggttaatggtgatggtgaagcacattttgtagtaagggcactaaatcaaattagtgcagggaaggtgtag

SEQ ID NO: 129035 - DNA, 933 bp, Enterobacter cloacae
atgttactgaattcggtattatttctgttacgcagtagcatgaaaatgttacttttaatttcattattcattatgatgaaatttccttctctggtgtatgctgctcccgtttgcgacaatactaatattggagtcagggaggtagtattgcctgttaatataagtagtctttcacctggagttgacctgtcaacgacgacatcattattatcaataagtgtatttggttcgtcttttttaggagtcagtggttcaaatccatttaattgtcactcgacaaacggggattttgataactatgaaatgtatgttttcattgagccattaagtgcatatggtaactcgtatgtatttaccatagggtatccagtctacagtgtcattgcaacgaatgctccggcattaggggtaggattcaactctgctgttaccgtacctggtatgtctgttccggcttatcttttaagctcatggcggcaggataattcaggtggtctaggttattcagtacaagattcttctggttatattcatatttcactggctaacgcgtctctcttacagcctggtgttgtaatgggtagtgcgctgcctgtttttggaatatatggcatcatctataagaatgatggtacaccctatgacgggaaaaaaatatctatgggaacagtccattttagcggagcactggacatcattccgtttacttgtcagacccccgatgtcattgtgccaatgggaaaatataaaacgactgatttcaccggtgtgggaagcaccagtccgtgggtggatttcaatatagagttaaataactgcccggggaattaccccgggtatagaaatggactcgttaaaaataatattagtatattgataaattccgtttatggtaatccgacccctgaatcattcagtggctttgttgaataa

SEQ ID NO: 129036 - DNA, 2172 bp, Enterobacter cloacae
atgattatcagcccaccgtttctgagaaacagaactgcatcccagtctgatgccgactggactggcgcaatgatgccggttaatccagaccagggattcccgttgaacggagcagaatcctggcatggaggtgttcacataacacatacagacgaaggaatgcctaatgaaaaaatacgggcaattgctgatggcgtagttgtttcgttccgccagccatcgtcgtctaaagatgcagaaccactcaattatctcggaccgacagatgacggctatgtcttgctgaagcatgaaacggagacaggaagcggagatgacgggaaggtcgtattctattcactgtgcatgcatatgaaatttctggaggcagaaataaagcaggatgcaaaaatataccgtaaagcccccctgggctcttcaggcacgtgcagtggacggaatgaattccatttccagattttctgtgatgacaacaatatcagcaagctggcgggcagaacgacccgtgaactggacgtgtcgaaagatggccggactgatgccgtttacggagatattcacttttatcttccggccggaacgaagttttatgataaggcacccgcaaataacagtacttccataaccgggctttctgagctgtataccagcagtgcgcctctgtatgccagtatgacgctggcacagggcagctgcacgatggtgacccggcagaaaaatacgcagactgacgggaagtatgacctgctgggcgaccctctggtgaatgctgacggagaggactacgaatataatctctataacaccgcgatgcggaattataaggaaagccccagcgccgggtttgagctgcttcgttttggccgggtgatcaatacggagcatgaaacgctggtaccggcagatgcgccattatggatgacggtcagttatccgggtggcaaaggggtggtcaatctcgctgatccgaatattaaaaaattcagtgacgctgattttcctcactggacgggctggcagctggttgatgacgatactgacagtaatagtcagtgtagctcagccataatcaggaaactgcaggaggacggtgagtacaataatcagtgtggaaagttaatctgtcatttcccgttcgaatgggaaaaaagtacgttcgatacccgtttttcatggctgaaaacggggaatgacaagcgtgctccgatgacggaaggagattatgcaaaatttaaggcttatgcagaagcgttgtgctttgattccggagcattgagtaatggaaggctgtggcattttgagccaaaaacattcattaaacattttagaaactgtggatggttaagtttctgtgaaatgaaacaaatagtacctagccatgcactgcggcaatctggcagagatcggtttgtttgggaggcaattaatacgaatttaagaacgccgggctcaattttaagtaaccagatttcaaatttaaattcctcgatgagaaagtattgtattaatacgccctttaggatttcttgctttttaggtaatgcaatacaagaaacaggctggttaagtacccttcatgaaggaaatggcagtaacctctggtacgccccgtggtacggacgcggttttttgcaattaactaatccagaaaactatctaaattattttaaatatattggcaaggtagttcaggatcaattaaaacgaagtttggttgacgcatatgcattaattgcagcacaaccacctgcgaatagatctaatgcgacattgcaagatcgccacttccctacgcttccaacagagtttataggactaaggagcgaggttagtgattcacaaggtacattagctgcagatagcgctgggttttattgggtaaaaaataagatggctaaatatgccgatgaggagcatgttttagagagggtttctgttaattcaaatctaggaattaagtattactaccgaagtcctagtttttggaaagcaagtgccgcagttaatttacctggaaggatcggttcactttaccatcgctcactaaatggattcgattcaagatgctgtgcctacggagttgccattgctattctaactgaaaatacattcccgaatgcttctggaagttttgttttggactttccagaaggatataatcataggacgtaa

SEQ ID NO: 129037 - DNA, 630 bp, Enterobacter cloacae
atgaaattgttatatatagtggtttttctcagtattagttccttcgctatggcctctgctcctgaagctaaagttgaaaatacttcagtaaccagagcattgacttcagattctaacgcagaaatctcttcgtcatccagttttgatgcatgtaatgtgcatttcagggattacaaattccctacattgtcagaggatgagtactttaaaaaaaaatcgccaatatcagagtggagttgtttatattctggtgaggcatttgaagcgggatatgatacacagcaagtaaacactaaaggaattagtgttagtagtactgataataaaattgtttatgattataagaataagatatggaaactaataccagacacagcttatgtaaaaaatggaaagataaatcatctatccctagtgcaggtaaaaagtaaaaatgcatctggttttatggctgtgaacagtatggcgaaactcatagatggaactctaggtgagagcatttatttctgtttgatacataaaaataatgctctatgtggctctggcattaattcccctgatgataaaaatgaagagctctctaaagatgcgttgaaactgcttgagagtatttcatttgatgataactaa

SEQ ID NO: 129038 - DNA, 852 bp, Enterobacter cloacae
atgattcttcgagaagtatttctcacaagcaaaactcatgggatgagtgctctacccccgatggagtgcgaaagaaagaaggtatccagaatgacaattcttataaaaacgttaaaaatcatggcgtcaggtgttgttttcgtttcaggtataaccaccgcctccagaaccgtctatttcttgccagaggcaaaatcagcaggtgtcgcaagcagcgacaaaaacgccctgatgtttctcgggatggacagggatgtaaatctgaaggggatatgcttcgcgatgacaaagcaatcctcatcaatcgttccgctggtagatatcactgctacaactgataacggcagattcacgatgcacgggttacgccctaatgtcagtgatactaaagaagtcgcttgttccttcgggtccgaagctggtgatttcttgactggcatttcgaagtcaacagccgttaacgtgaagctggatttcaatggcgagatccgcaattacagtttcgacaccacagagttcggaaaaatgttgactgccaatgggaaaggcgtgtgggaaaaagcagctaatgactacgctcagggagtacgtgcccccgttttctatagcagcggtagcgaagctcccaaaaacaatgcagtaacctcaaacgtcgatacacacagttataaagcaagcgatgagaaacttaattcggtctggaaaagccttagccctgaaacccgaaaacgattgctaccttctcaaagagaatggataaagcacaaatccggctgcaataatgaacaaaaatgtcttactgacatgacgaacaatcgcattcgtgaactggagtctgaaaatggaaaataa

SEQ ID NO: 129039 - DNA, 585 bp, Enterobacter cloacae
atgacctcaaaatttaaaaagtcaacgacaattattgccttcttcttcggactttatatattgaacggaatagcaataacacccagccaagccagaacatctgaatcaatacatttctcgaacggagattcagcatttttacaacaaaacgaacaatcaacaaaatcatcgataatcgatatacttccaagactgtatacaaccgaagaagtttatgcacgatttcaggaacatgagttcagagcaacaaatgacttcaaaaagtgccgattgatggttacaggaaaaataaaaaagattagcgcagccaccttcagtaaaaatccgttagtaacgttacacatccctaattcaagtgaaggcttgaaattccttttcgaaaacacggattatgataacaatactgtagcagcattaaacgtgggcgatacagtgattattgctggatggaatgcacgactaggaacatttggggacatttttttagatgattcgcaaatcatgacaaaaatggtttcaaagaagaagaggcaaatgctggctttaaacggtggaatttatgatcgggagatttgtcataagtga

SEQ ID NO: 129040 - DNA, 582 bp, Enterobacter cloacae
atgaacgaaaatttacgtaatgcccttcctcatagagacacaccatttttccgagcgctgcatatcatcgtagctgtactggttttattgcagattattagttcaaatcttactgaaagcgatgcgcttagtgactatacactcactgggttcgtcacatggttccatattgtcagtggattatcacttattgcccttggggtcgtaatgcttgtttggatgttgacccaacgaggatttcgttattattttgcctggctgacccttaattttaggggggtgattgaagatatcaaaatgctgatgtcattccgtcttcctgaagctcatgctggtgggattgctgctttggttcagggtcttggtgtacttgcactattgggtgttgcgctatgtggtggattttggttcgctctcaatacgattcccggagcatcacctgtattgacagaaactattctgcatttacataagtttctgactgtatttattgaaacctatttctgggtgcatggtgcgatggggttgctgcatatattcctcactatccgtagccaaaggaaaaatcccgtaaccgaatag

SEQ ID NO: 129041 - DNA, 618 bp, Enterobacter cloacae
atgatgaatgttcgtatttactgccgtgcatctaccgaaggccaacatgctgatcgtgcattagttagcctgcgcgaatttgcgcaaagcaaaaactggcaagtagccggagaatacattgaaaatgccagtggtgcgaagctggagcgtgtggaactgatgcatctccttgaggaagcacaacccggcgatctgcttctcatcgaatcgattgaccgtctcagtcgtcttcaacatgaagaatgggctgaactcaaagctacgctgaacagtaaaggactggttattgtttcgatggatttgccaacaagctggcagatggttgaaatgtccggcaacgaccttaccagcggcattcttcgggcagtcaatgctatgctgatcgatatccttgcgacaatggcacgacaagattatgaaacccgccgtaaacgccaggcacaggggatcgagagagcaaaacaggcaggtttgtatacgggaaaagagaaagatatggaagcccgtgaagtggtacgtgaaatgttggcacagaacgttaaaccagctcacataatgaaagctgctgatatcagtcgtgcaacgttctaccggatcaaaaaggaattggtaatctag

SEQ ID NO: 129042 - DNA, 291 bp, Enterobacter cloacae
atgagcggtaagcgttatcccgaagagtttaaaactgaagcagtcaaacaggttgttgatcgcggttattctgtttccagcgttgaaacacgtctcgatatcaccacccacagcctttatgcctggataaagaagtacggtccggattcttccactaataaagaacagtcagatgctcaggccgagatccgccgtctccagaaagagctgaaacgggttaccggtaatgctgtcaacctgttgatgactattttaatctgtagtcattcaatccttgtaacatcaggatga

SEQ ID NO: 129043 - DNA, 273 bp, Enterobacter cloacae
atgaagagaccaatagcgcacaaaaatgatcgtctgccagtgccgaaaacgaatcactttacgcttgaagcgaggcagcgtgttatcaatggacttgttgcgacggctaaagctgacttcgtatccttagttagctggctgaaaacaggtaaacagaatggtgaacctattccgttagataaatgcgaaagtcttcgaactgctattcttaatcttgggacccttaaagctggtgtacaaaccgactggaagcaggtaatccagttgatgtga

SEQ ID NO: 129044 - DNA, 723 bp, Enterobacter cloacae
atgatgcaacaatcacaagccctgttcgaatcgtcgattttatcggcaacaagttttcgtaccgtctaccatgaacacggacgttacaaaaccatcaatggcaacttctttgttcatgatggtcacgaataccgcattaacaacagaatcggttctggtgttcgccacgatatacttatatcaacaatcaacgaactgaacgcaatcctgaagctctacagtcgagtgttcctgacccgttttgatctccacctccctgagttcacttctgttgaagcaggtaacaaatacatacgcaacctgttcaaacgattacgtgaccgcctggagtctggaaacaacggtttatcagaacctatcatcgattttgcttacggttgggtttgcgaacaggaaaaggcttcacaaccccattaccattgctggattgcacttccacatcgttcggtaagatggtttggaacgccagaaagagggatcgctggtattattacggaaatctggatgaaactgacaggtggtaaagcaacgctggtaaacttgtctaaagccactaaagactatcccgatcactacgtcattcatcgtgaacatccttcatcactcgaaggtccggtattctggctttcttacctggcaaaagaacgtggtaaagcgcaaacagggaagggaacacgcatgtactcaacatcaaaattgagttgtaaagcactaaattcgtaa

SEQ ID NO: 129045 - DNA, 870 bp, Enterobacter cloacae
ttgccaaagcttgattttttgcatactgacttcgaacgagttagttaccttgctaaccttttaactgctcgtgcaactggcctttcatatgatgaagaagagtatgtaatgttaaggaacaagttaatcaacgattctgtcctttcaacatggatgcccagttttgtcaggcaacaccggagccttgactccttttggtccttcataaaaaccaaattcggtacttatgctgaacggcgaacctttatttcagcacaatttaccccattgttggacttcttagaattcggcgaatctgtgcagccctcaacgcagagggctcataaaccagaagtacagccctggtttcaacagcctacttcaggcattgatagttcgtataaccaagcagagattttcgatcaatttcctaaagttacacgaaacaaaaggaaagtattcatcgttcatggtcgggataatgaagccaagcaggaagtagctcgattcatttcagacttgggtctcgagccgacagtcctacatgaacaagcaagccaaggtcgaaccatcatcgaaaaaatagaacgctacacgaatgacgcagatttcgctcttgtgctctacacggcatgtgatcatggtcgtggtgcaagtgatactaaagtcccgcctcgtaatcgcgcacggcaaaatgttgtattcgaacatggctatcttatggcaaaacttggcagggaaaacgtttgtgctctggtgaaaggagacattgaaacaccaaatgatattagtggcgtagtttacgtacccttagacacctctggagcctggaaaatgagcgtcattactgagcttaggtcatgtggttatgaacttcgctccttgttctga

SEQ ID NO: 129046 - DNA, 1689 bp, Enterobacter cloacae
atggaaaaacgtaagctatacagttatatacgttggtcgagtgataaacaggcaaaaggttcatcactacagcgtcaattggaaacggcgcgtagggtagcacatgaaaacgatttagagcttgttgaaatcattgatgctggattatctgcgtttagatcgaaacatcttgagaaaggcagcttaggtgcattcatagaagctgtgaaggtaggtcaaattgctagcgattcgtggcttaccgtcgaaagtttagatcgaataagtcgtgatgcaatactgaaagctcaagggttgttcatggagttgcttgaattggggataaccatctacaccgggatggataaccgcatctacaccaaatcaagtgtaacggataatccaatggaattgatgctttccattatgaccttttcgcgagccaatcaggaaagcatggtgaagtcgcaacgtcaaaaatcggcaacgcaacttaaaatcaacaaattcaatgctagtgttcgagcagataatggttatccgcatgcaatacgcaactctggtgcgaacgttttttggtctgatgtatcagacggaactgttcgaccgcatgaatattactttccgatagcaaaactgattgtttcacttcgattgaaaggatggggatatatgagaatagcaaagcatctcaatgaaaattatacccctccgaaaggaactgctaagcgaaagcatttcaaagacctttggtctccaaaactcatttgtaactttctgcaatcaagaacgctaatgggtgaaaaatcaattcgcgttgatggagttgaacatattctgaaggggtattaccctcaggttatcagcgaaaatgaattttacagtttacaaaacgttatcaaccgtaaactcgctaacgaaccaaataactatattcctttgttaactgggatcagacgctttaaatgtggatgcggagcagcaatggttgcgttctttcagtacgacaaaatcagataccgctgcgatggtatgaagtcattagataagcgcatgcactgcggtgcaaagtcctttaatggtgcttcaattgagaatgcaatcgttcagatatgtgccgacaagattttcaaagatgtgaaaactcatacttcgaatgttggggcgatacaggcaatgcttgttgaagcgaaaagaaagtataaccgtggtatggatatgcttcttgaagatactgctccacagggtttgaacatcaagttaatcgaactcgagaaacagatagaagaattgcaaaaaaaattgaatgatgagttagttaccgaagctggggttaattcttctgtgagctggggggctgtgcctaaagattatagagatgtattcaatacggaacggttggaaattaaacaaaaaatacaagcaagtacgttatctattgtctgcacaacgattaaaacaaagggccatcttttcgaaataaaatttaatgatggcgatgtcattcgattttttagtgataaaagacgtgtacatgttgatgttcatagcattaacaacgcagagattatgcaaagtgaagggataatactacatgatcacttagattatctggtggggcctgaggagttcatcgaacgtatccgacagaaacatttacagatgaaggctctgcaagaacgtactttggatgacatctttgatatttag

SEQ ID NO: 129047 - DNA, 240 bp, Enterobacter cloacae
atgttcgttgagctggtctatgacaagcgtaatgttgatggtttggttggcgccagagagattatcctggcagagctgacgaaacgggtgcaccagatcttccctgatgccgaagtgagggtgaagccgatgcaggcgaacggcttgaatagcgatgccagcaaaagcgatcgggaaaagctgaaccgcatgctggaggaaatgtttgaagacgcaaatatgtggctggtgaatgattag

SEQ ID NO: 129048 - DNA, 576 bp, Enterobacter cloacae
atgcaaattggctatgtaagggtgtcaacaaatgaccaaaatacggatcttcagcggcaagcactcgaacgcgcaggatgtgaacagattttcgaagaaaaaatgagcgggacagtggcgaacaggccagcactcaaaaaacttctcaaggcactgaatgagggggatacgctggtggtttggaagctggatcgccttgggcgcagcatgcgtaatctggtgctgctggtggatgaactacgtcagcgtggcatccacttcaagagcctcacggacagcattgatacatcaagcccgatgggccgcttcatctttcatatcatgtcagctctggctgaaatggagagggagttgatagtggagcgcactcgggctgggttggccgcagcccgtgagaaagggcgaatcggtgggaggcggccaaaattgacacctgagcaatgggctcaggctggcaggttgatcgcaaacggagtggatcggaagcaggtggcgatcatttacgatgtggccgtttgtactctatataaaaaattcccagtaaataaagacgttacacgaacttcaacacattaa

SEQ ID NO: 129049 - DNA, 807 bp, Enterobacter cloacae
gtggcgggaacggtggcggccggggatgattcacgtattgcaggagctctgcaaacctcaggtggaacgcttacaggccaactgaatttgaaaggtgccccgattgctgctgatgctaactccgttatttccgcaaatggcggccttgatgtcgatatggcaaaaggcttcgtgctgaaaggaaaagtgcagcagggggctggcaaagaaaacaacattctgaccatatccggtgatggaaacactggcactacaggatttgttggcgcgtttcagtataactggtatgccgatggctggattgcagggatcacgcgtggatcaggaacaaacacaattgcgtattcgatttactataacggtgcatcatatggcactgggtcaaaactttggaactttaattatgatggttctgccacttctcaaggcgcctgggtaaatggttctgacgagcgccacaagtcgaatattgagctggtgcaaacccctcttgccgccgtactgtccatgcgtggcgttacgtatgatatccaggatggtgagcggggcgttggccttattgcccaggatgttgaaaagtggtgtcctgatgcagttaagacatacggagaccgtaagttcagtgatggaacggtgattcaggactttaaatttcttgatacttcaggtgtagctgccgcgtaccatactgaagcaatcaaagaactcttcaacttggtggaactggcgcttaacaactcgggaaaagcgcttgaggtaatcaatgcggttaaagaagccgctaaactcagcgagttaggttcgtag

SEQ ID NO: 129050 - DNA, 165 bp, Enterobacter cloacae
atgatgaacattcgttttagtccagaagtttacgaggcgctccgtgaagccgccacaattaaaggtgtaagtattccggccctggttaactccattgtcaaacacactatcctacaaaaagaggaaactgatgaaagaaaagaaacgcgtagtaaaattcgttga

SEQ ID NO: 129051 - DNA, 285 bp, Enterobacter cloacae
ttgatacaatacataaaattgaacaacacaaaccagatacagatcaacgatagcgggaagggcgtttattatgcgcttatctggttctggaagggacgtaggacacgcatttcttacggagagctatctgataaatccggtgtaagtgaccacgggatcagattctggcttcgtgcgctgcgcaacattggtgtgattgagatagacgatgaaagccattatctatcattcacgctgaaacacatcgaacgagacaatgtagaatttatctactctaatttctaa

SEQ ID NO: 129052 - DNA, 399 bp, Enterobacter cloacae
atgggaagaaaagatagaaatccaatcaaacggatcgagcaggaaagtttaaaccatatcggaaaagccgcgcgtaggcaacgcgagagattattaatctcttcactcgaagaaatccctggtgaactaatagagcacgttgaagaagtgcattcacaaccgccctctgtggaagagtgggctgctttgaatgatatcctcacttcctgtcctggtgcgtattaccgcccacgtaaacggaaggtttacacctgggatgatagccagcttaaaaaatggcagtgcctcggtttcacctctttacgtcattacctcacattcaacgcaatgaataacaccgtggcgggagtcagggactttaatgaactatttaacattggagacagttacacagaataa

SEQ ID NO: 129053 - DNA, 318 bp, Enterobacter cloacae
atgactaaaaccgacattaacctaatgctacagaaatttcacgagcaactacacattccgcttcttgatgcgactacggaagcctaccgacagggaacccctgagagcgtttctgaggccgttaaacagcttcatctggcctcagttgttatgcaagggattataagcgtagtggagcagtcagaaagcctgaacgaggatcaaggcgtactacgcgaagtgtcacaggtggctcagtcccttgtgtcctgtatgcaggatttagacgcgctggcgcatgacttagccgaagaatacgtagtactcgaaattgaataa

SEQ ID NO: 129054 - DNA, 216 bp, Enterobacter cloacae
atgttcttattaaataatcgcgaccgaatcctaaaatacaaatccgaagtgattcaagttaatcctgagttaatagctaaagtggctgaaatggcaggatgtactgttgaagaaatagaaaaagctgtagaccagtatttcccttctgaggacacacctcaacttagtatgcaggaacggatcgcaatcaaatccaaggaaatcaaacaacaatga

SEQ ID NO: 129055 - DNA, 738 bp, Enterobacter cloacae
gtggggtctaaaaaccttccggtaatttctgatctctgggacaaaagccagggaacccgcttttgcaatgttaatcccgcgacctctggcggtcctggaatgtatggttctggcatccggttatcagaccgtaatattgggagtgggggcaccccagctgcgcaacaatcctttgccgccctgatcctaagcggcaaagtcattcaatttatgggaatggctgatggcgtcgacactggctggatgaagatttaccacacaggcaacacaactcgggcatctgatggcacgttgaaggccgcctccccgattgtacagttatttggggatggttcatgccagcttaacgatgagtctgagggttgcgccgtaacccgcctgagcgtcggggaatatcttattaaaggatgtgaggggctcaacgcggatgccgcctgggggggcattgatggtggttttgatatccctaccgacaggaacaagcagcctctaatctggctggattatgaggtcaatgctgacggttctatcttggtgaaaacctaccaccgcacacatccttcagcacctgcttttgccagaaatgagcgggaggggttagctgatggagacctggttgatatcccgtctgaccagtttgtaagtgtccgagtggaaatgccagctgacagcatctggaatcagaaacagaaagcaatagaagaagctgcgaaaagcgcgtccgaagaggttcaataa

SEQ ID NO: 129056 - DNA, 579 bp, Enterobacter cloacae
atgatcaatccttcagaagttggcaaatccggcgagatggttcgccttcgcactctcgaaatcatctgggtacagggcaagctccgcatgtggggtcgctggtcatacatcggtggtggctcaggcgggaacatgttcaaccagttgcttgcatccggaaaaatcaccaagaccgcaatcaacgatgcgctgcgccgtatgaagaaatccggcatctccaaacccgagctggaagcatacctgcgtgaaatcctcgacagtaaaaacaaaactggcctggcgttctgctcagacgaggaggggctaaagattgacggcgttattgctgcggtattgatgaacgaagaataccgtgggctgtatggcgtgattgttgatcgtcatcgtctgcgtaaaagcaaactccagatggctaaagagcttaattcaaaacaccccgactggacccttattacatgccgtcgtcgcattgatacatgggttagtcttgcagaatcgatcctttacgcaccactttgtgatgcgttcggcacaaatggcgacagatttaagttgcagagtgagcaggaaagtgcttaa

SEQ ID NO: 129057 - DNA, 990 bp, Enterobacter cloacae
gtgagagcattactgacacctgaagttgcaccaatgtccggggtggttctgttccgccctggcaatgaactgctctggctgtttcgtcagggaagggttgttattgagacgccatcagaagcaatccagcatttgccatcaggtcttattccagaggcacatcagccactgacagatgatgtcagtatgcaggagcttttcctgaacgagagggttattcagcgtgctggcggtcttagcagtcttgatgcctggcttgagcgtaaattcgaatgtcagtggccccacaatgactggcactcaaaggactttacggtgatgcgtcacgcacccgggagcattcgcctttgttggggatgcgataaccaactgcgtgaacaaactactgaaagactcgcaggaattgccatgcagaacctggtaaaatggttactcggaagggtgaatattatgctgggattcagcgaagaccacaccctgacgcttccggaattctgctggtggatggtacgcaacgatctggctgaccttattcctgaaccagtggcgagcaaagccctcaggattaagcctgaatcgcacagttccgtaatgagggaaagcgacattgttccgtcgttaccggcgactgaaatcctccaggagaaggtgaagaaggttgtctccgttaaggtagaccctgagtcaccggaatctttcatgcttaggccaaagcgccgccgctgggttaatgagaactggacacgctgggtaaagtcccagctttgcgtctgctgtaacaagcaggcagacgacccccaccacctgataggccacgggcagggtggaatgggaacaaaagcgcacgacctgtttgtgataccgctgtgcagagcgcatcacgatgagttgcacgctgatcctgtggcatttgaagcgaagcgcggcgaccagttaacgctgctgtttcggtttttagatcgttcgctggcaatcggcgtactggcgtaa

SEQ ID NO: 129058 - DNA, 603 bp, Enterobacter cloacae
ttggtcacccttactggtggtgttaaccaggggacattcgtctgcaaggagttggtttattcctatgcaatgtggatcagcccgaaatttaacctcaaagtcatcagaacgttcgatgccgtacagaaccctgcatccaatgcgccgacatccgacaaaattcaggctggcgtgatcctgcttgaatcggcggcgaaaatgctgaacctctcaaactcttcaaggctcggtgcttatcaaaaactccagcaggtagctggtcttccagatctgatgccgcattacgcgatcgatgcacctgccggtgcgcaggatgggtccagccgtcccacacaatcactcagcgctctgcttaaagcaaaaaacatccgcatcaccgccaatcaggtttatcacatgatgtcccgctttgggattgtggaacaaaaagagcgaaacagtcggtctggagtgaatggtgttaaaaagttctggtcacttactgccaaaggctgcatgtatggcaagaacatcaccagtcctgcgaacccgcgagaaactcagcctcatttctttgagtcgaagtttgcggagcttcttaaaataatcgacatcgtagcctga

SEQ ID NO: 129059 - DNA, 495 bp, Enterobacter cloacae
atgagcctcttgaaagacattcagattttcatcgccgctaaccctggcttaacgaacaaagagatagcggcatcaatgcgtcagtacgacgttcatgctgttcagcgtggtgtatgtcacctggtcaaactgaatcgcgctacccgccagcacaatggcaagtgctaccagtattttgctaaagcgccgggtggggatgttaccgaagggcgttctgcactgaaaattaaccgagctgacgcaccagctgcatcagaacaggaagccgcaccgaacccggtagtaaccgcgatgatggaaaaagcacaaggcctgtttgagaaggggctcttccagcgggcagccactgttctgatggaagcattcaaccgctcaaaagacgaagagcaacgaatgaagatcctgattgagcgccagcgctgcctgagcatggtaccgaaaataaaaacgcctactgacacatggtgtctggcaggtcaggggaggaatatctga

SEQ ID NO: 129060 - DNA, 204 bp, Enterobacter cloacae
atgcataaagggacagtcgtcgattactacggcggcatttctaaaaccgcagttgccctaggggtaactcacagtgccgtttgtcaatggggagaggtaatcccagaaaaacaggctctttacatcgaaagaattacaaaaggtaagttgaaatacgacgcctctctctacagcaaatttaacaattctcaacgcaagcagtaa

SEQ ID NO: 129061 - DNA, 633 bp, Enterobacter cloacae
atggataccgttggcagcaggctgagattcagaagaaagcagaaaaaacttacccagcgcgatgtcgctgagtgggctggagtaagcgcgtctgctgtgacccagtgggaaagtgatttaactaaactttctggtgagaacttgatactggtgtgtaagtgccttcagtgttcgccggagtggttggtttttggttcaggcgatatcgaaaatggcattaacatcaacttaatgtctgccagagaggtaccactgatatcatgggtgcaagctgggaattggactgaagtaattggcaacccaagcaatgagcaagtaaaaacgactcgcaagctttctgattcagcctttgcattgagggttaagggggattcaatgacttccagtagggagttgagcattcctgaaggttctattgtcattgttgagcccgagttcggcttcgtggatgaagcaaacggtaaaattgtcgtggctcaaacggtatctggcggtgaggcgaccttaaaaaaactagcgatagatccccctttttcttacctgattccactaaatccggcattcaagcccattgaggtgaatcaggaaaccaagcttattgggatagttaagcaaataattattgacctttag

SEQ ID NO: 129062 - DNA, 756 bp, Enterobacter cloacae
atgccggatatccacgttcgtgaaggtttcaacaagcgtgaagacgatgaacgcacccgccaggctgatgatgacctgttcaactacctgatgaacggcggatcagttccaccgctggaagttatcgcgcgtgatgaaggtggcgtatgggttgtagaaggtcaccgccgtcgccgctgctatgcgcgctgcgctgaagctggcaagccagtggaccgcattcacatcatgccgttcaacggtaacgatgttcagcgcctggcgcgcatcatgaccagtaacaaccagctcccgctatccgatatggagcaggcagctgttattcaggagcttcataacgccttcaaccagaccaccagcgagatcgcaaaactagtcaacaagtctgttcctactgtcgaaaagcttctgcttcttagcacagctaaccatgacgttcagaaagaagttaaatccgggaccgtgtccgtagatgtggcagttgatcgtgtaaaagagttcggcgaaaaggccggtgaggttcttcagaaggataaagcttcagctgccgcaaagggtaagaagaaagttacccgcagcgtgatagcgccggaaattagcgtgaagaaagcgcggcgtcttgtagaactgatcagcctggcgggtataagcgacacaggtgttatctatctcgaaggattggtccatgcagaagtcgtggagattatcgacgagcacaaagctatcgccgttcagcgtcatggagaagcatcatga

SEQ ID NO: 129063 - DNA, 138 bp, Enterobacter cloacae
gtgagtaaatccgaagcgctgaaatacgcaatgataattggctttggtgtggccgcagggattcacctttacgtggcatgggcatccatgcttgagattgcctggggtgcagtgaaaggggtgtttaaccatgcctaa

SEQ ID NO: 129064 - DNA, 270 bp, Enterobacter cloacae
atggtgagcaaactcaaacagcggcgcctgcgccgccttaaatccgacgtggcatggtggcgcgaagaggcagaggattgccgctcccgcctgctggagcttgccggtgaaatcgacaggctcaaaaagctggttatcctcgttcctatgccagtacttatttcaaaggagatagccaaccagctttataacaacgaaacgaaaagatgtcgtacctgcaatgatggcctccgtggtgggtgctcatcatgcattttctataaaagatag

SEQ ID NO: 129065 - DNA, 648 bp, Enterobacter cloacae
atggttcagaaaattattacgttgtccggcgcggcgacggatgttctgtatgcgttgtttttccgtggcgcgcttcagtctggtgacctgccagctaaatctggtgctgctgagcttcgagagttgggattcgctgaaacacgccataccgcgacggagtgtcaaaaggaaaactatttcaccttcctgactgctgaagggcaggagtttgccattaagcacctagtcaatacgcgctttggtgtgccagtaggtcaacagtattgcagcgcaatcaccattggtgttgagcttgacacctcagccgtacaaaaggcacttgacgaactggacgacaaaatccgtaaaagcgatgcatttaaagtcctgaaagatggctggtcacacgaaaaaaacggaacgatgattattaataacggccaggtgttcattcgcgatgctcagagtgccgtaaccgttcgcgtcggtaaatttggtattcatagcggagttgatacaaaactcgatgaaatcatcaaaaacgccctggcctctcatgccgccatccagcaaatcagaaaggatattgtaacggtcgtgaaagatgagattgccaaaaatcttaggcccggcggcacaatctgggattgcttacggcgtggaatctga

SEQ ID NO: 129066 - DNA, 267 bp, Enterobacter cloacae
atgttgaaaggtattagtgctttagataaatggcttgctcgctccacatggcatacagggcatcctatcgatatggggatattttatagtgctgtaaaagaaattatttcccaaaatccaaatgtcctactgcatgaatccgagattgccgcttacatcaaaagctcacagtccgggaaactcgaagcgagtgagcttgagcgcttggcaaaagagtattcgcaaaaagcagagttaatttctgattatgtaattctcgctaagtaa

SEQ ID NO: 129067 - DNA, 201 bp, Enterobacter cloacae
atgacccaattagtgcttaccgctgaacaaattaaatcactcgctgagtttgcagaatcagaaggccaggcggcgtatacgatcacccacgcaacaatccccgcatttgaagccgatgatggcgaggttatcccggaatacacgggtctggtcgcctattcaggttcagaagagcacggcgtactgcaactggaagactag

SEQ ID NO: 129068 - DNA, 201 bp, Enterobacter cloacae
atgagttacacacgatgcaccttttgcggttcggttttacacacccgtgagaattgcccccatacgtggagcggcagcgctcgccgggtgaatctgcgctgtagctactgcggcgtcaccggtcacaactctaacgcctgcccgcacaacgccagcagtgcgaaccgtcgtcgtctaaatgatgactactatcttgactaa

SEQ ID NO: 129069 - DNA, 537 bp, Enterobacter cloacae
atgaaaattaatccaggtcttatctgcgtggtcgttattgctgtcctttcggtcgccctcgttaagagttgctcggacgccagtaaccttcagagcgataatgacgttctgcgaagtgacaactctttgcaggggcaggtgatcgccactcaggcattcaacttcaatcggttcaatcaggttgcagagcatgccaacaggcttaactccctgatagacaccagaaccgaagaaaccctaatcgaataccgggagattctccgccgtgaaaaaacctgtgatctgcctgttcctgctgatgttgctggtgggctgctcgaatacgcgcaccgtttacgtgccagcgcaatgcacaccgattccgggaacgctgacgcagccgatgatagtaccgctgccgccagctcaatgacttactgccaagctgttttgtggattaagccgctgctggccgtaattgagaagggcaacaataactttgcgggaatccgtgatattgagcagcagcgtcaaaaaccatcgggagccgtgcaatga

SEQ ID NO: 129070 - DNA, 579 bp, Enterobacter cloacae
atgattaatccatctgaagttggaaaaaaaggcgaaatgattcgcctcaaaactctggaaagtatctggattcagggcaagcttcgcatgtgggggcgatggtcttatatcggcggtggttctggcggaaatatgtttaaccaactgctcgcggccgggaaagttacaaagaccgcaatcaatgatgcactgcgccgcatgaaaaaagccggtatcaagaaaccagaactggaagcattcttcaaagagttactcgaaagcaaacataaaagtggtctggcattctgcacagacgaagaagcgctgatcgttaactcagtgctttgcaaggtactcatccaggcaggccataaaaatttatattggttaattgaggatcgttacatcaaacgcctcagcaaaaaaacgatggctcgtgacctgaacaaaaaacatcctgagtggtgtttacgtacctgtgagagtcgaattgatgtctggctaaatcttgcagaatcgatgctttacgcaccaatgtgtgacgcattcggcacaaatagcgacaaatttaacttgaaagtttgcgcgcaaagtgcttaa

SEQ ID NO: 129071 - DNA, 645 bp, Enterobacter cloacae
atgaattacgaactgatctactgtgacccaccctgggaatatggcaacaaaatcagtaacggagctgcctgtaatcattacagcaccatgagcatggaggaacttaagcgtttaccaatatggtcactggcagctgaaaacgctgttttggcaatgtggtacaccgggacacacaaccgggaagcagtagagctggcggaatcctggggtttccgtgtcagaacgatgaaagggtttacgtgggtgaagctgaatcaaaatgccgctgatcgcttcaataaggcattgagcaccggagagctggtggactttaacgatctgctggaaatgctcgaccgtgaaacccgcatgaatggcgggaaccatacgcgcagcaatacagaagacgtattaattgcaacccgaggcgcaggattaacccgcgtcagcgcatcggtaaaacaggttgttcatacctgccttggcgaacatagcgcgaagccgtgggaagtaaggagccgactggaaaaactttacggagaagtgaaaagaatcgaaatattcgctcgggaagaatggaaaggatgggaccgctggggaaacgaatgcaacaacagcgttgaaattattacaggacagataaaagaggtgaacgccaatgattaa

SEQ ID NO: 129072 - DNA, 618 bp, Enterobacter cloacae
gtgaagaaaccagttaaaacaaaactgaaggtttacaaaccgaaaaaatgcgctcactgcggggagaccttcacaccagatcgtaacctgcaaaaggtatgcggtcctctgtgcgctataggtcacaaccgtgcgctcaaagccaaaaaggcagaggccgacagaaaggacaagctgaagatgcgcaaaaaagcgctgcagcctcggggttattttcttaagaaggctcagacagcattcaatgcattcatccgcgagcgtgacgtgggcaaaccttgcccatcctgcggggaatatcacccgccgatgatctttggcggtcaatgggattgtggtcacttcatgagtgtaggcgctcgtcctgaacttcggttcgaagagaaaaatgcctatcgacaatgcaaggcctgtaatggtggcgctggccggttcacagcaaaaaataagacggttcatgcccggtaccgggaaaccctaattaattggtacgggcttgagctggtggaatggctggaggggccacacgaagcgaagaattactcaaaagaagacctggaagaaattgcggccaaataccgccgtaaaactcgcgagctgaaaaaccggagcgctgcatga

SEQ ID NO: 129073 - DNA, 972 bp, Enterobacter cloacae
atgaataccaaacaagccgccattggccgctggtctgaaattttcgagtattacggcctgcctggcattactggtaaaaatcatttcaagggagagtgtccgttatgcggtcgcaagggcaaattccggtgtgacaacaagaacggcaccgggtcattcatttgtgtatgcggttccggcgacggatggaccctgttgactggcgcaacgggcaaagagtttaaggttctcgcttcggaagtggacaagcttatcggcaatgagtacaccgctgatcgttctgctgtaaatcccgtgcgtacatctctggcgcaacagagagaaagggtgagccgtaagtttgcaaagctaattccgttacgaggtaccaacgctgacagatatctgaagggaaggggaataaatacgcttcctgctgaaagcatcaggttttgcgacacgcagccagtcgacgggaaataccttcaggccatctatgccttggctactgatgaccgtggcgagctgtgttatctgcaccgcaccctcctggaaggcgacaagaaagcaaacacaggcggcgcatctaaaaagatgatgaagctgcaagaggatagttacctagagtttgctaaatccgttgcaattcgcatgttccctacagcctcaacgctcggcatcgctgaaggtatcgaaaccgcgctggcgtgccatcagatcaccaaatgcaacacctgggcaacgatgaatactgctttcatgaagaagttccgtgttcctgccggggtaaagtatctcattattttcgcagactccgacgcgaacggtgccggtcacgcagctgcattcgaatgtgcagctgcaaacttacacgcaaagaacgatttggaaagcgtctcggttcgttggcctgcacagggtgactttaacgatctgcttctgaatggttcagaagtattcgaatgggtatttcacagagggatgaagcagtga

SEQ ID NO: 129074 - DNA, 1533 bp, Enterobacter cloacae
atgcttaacatccagccgcgtgagaaacagatcgtcgcactcaacatgttgcgcagcgcatggaagggaaataattctttcatgctctatgcacctgttggttttggcaaaactgccattgcagcgctgatcactgacggatttgtaagccgtcagatgcgtgtaatgtttgttgcgccttacaccgttctgctggaccaaacagcaacgcgtttcatggaatatggccttcctggcgaagagatcagttatgtctggcgtgaccatccgtcgtacaacccaaacgcgctcattcagattgcgagcgcagatacgcttattcgacgtgaatttcctgacaatatcgacctgctgatcgttgacgaagcgcacttgaagcgcaaaaagcttctggaagttatcgacaacctaacccgtaacacttcaacgaaggtgatcggcctttctggaacacctttcgctaaattccttggtaattactatcagcgtctgattaagccaacgacgatgaaagagctgatcgctattggcgctcttagtaaatatgagttttacgcaccgtcacaccccgatctttcaggtgttgaaacgtcctatgtcgctggttatgggagtgattacaaagaaggccaactcagtaaagttatgagtgaagccaaactggtcggcgacatcgtaaaaaactggcttgagaatggagaagaccggccgacgatttgtttctgcgtggatgttgctcatgcgaactatgtgaccatggaattttcgcgtgccggtgtagcggttgaagtcatgactgccagcacaccacacgacgaacgccagctgaccatccgccgatttgagcagggtattaccaaaatcatcattaacgttggtgtgctggtagccggatttgatagcgacgtccgctgcatcatttttgcccgtccaaccaaaagcgaaatgcgctggattcagacgctgggccgtggcttacgtgcggcccctggcaaagactactgcctgatcttcgatcacagcgggacggtcaataaacttggctaccccgatgatattgaatatgactatctcccgtcgtcttcagacggaatggaagatgccccacagcgagttgtaaaagctgacgagccggaaaaactgccgaaagagtgcagtcaatgccattacgtaaaacctgccggaatttacatctgcccgaagtgtggttttaaaccactggctggggaagacgttgataccgataaatcccgtggactgacgaaggtaagcaaagcggaagtcaaattcaccagtgagcagaagcaatcctggtggtcacaaattcttttttatcagcgcacccgagcaacgcagggccgacctgtaagtgacggttggtgtgctcatacctatcgacagaaattcggtgtctggccgcgtggacttcacaacacgccaaaagagatcacacctgaagtcagcaattacatcaaatccaagcaaatcgcctttgcaaaaggcaaaaacaaacagggagagcaagccgcatga

SEQ ID NO: 129075 - DNA, 276 bp, Enterobacter cloacae
atgatttattcagaagctaacgaaaaatgggctccagtcccagtagagctttattccaaagcttacgaagtcagcaatcttggccgcgtgcgcagcattccacgtctggctaattctgaatattttattcggcacatccacggtggctttctcaaaggtcggatgcgtaaagacgggaccaaaaccgttgtgctttcggtacagcgtcagcgtcaaaaatttgtaatcgccgatctggttgcgaaagcatttggggaggtatcagccaatgcttaa

SEQ ID NO: 129076 - DNA, 279 bp, Enterobacter cloacae
atgtatcaggaacaaaatttccacgtgactatgcccacggtttttgctcgtgaggacgccccgtggattaaagagcagttatcaacgctcccggcaggtatgcgggaaaaaatcgcggttgcgtatgcgcaggcgtaccaggaagcgttcgacgctgaacctgtgtcattccggcagcagaacgcagcacggcggaatgctaatcgccgattgcgagagttttgcactaggtataccccggcagtcagggggtatacgtcacccccacctagggtatga

SEQ ID NO: 129077 - DNA, 471 bp, Enterobacter cloacae
atggtagagcaaagtctcaaagaagttgtgaaagcaatgtgtaaggcataccccggcgggcgtgaggctatggctggcgctcttggtatgaccgtcacgcagtttaataacaacctgtatgagaaaaacgggtgccggttcttcgaagtcgctgaacttgaggcgatggaagatatttcagataccgccgaactggctgattacttcgcaaagcgacgcggagcattgctggtggaggtccccaagtttgaagaactcgatcgggttgaattattcaataaagccatgaaaacagccgccatgcgcgggcatgtggatcaggttatcaatcttgcccttgaagatggggtcattgatgaagccgaagctgatgaaatcaggttttaccacagaaagcatctagccgcccgagaggaagaagtgaattccatccttgccgtctttggtcgacgaaaaccaaagcgagagtaa

SEQ ID NO: 129078 - DNA, 198 bp, Enterobacter cloacae
atgaggaaatccgaagttattaattatttcggaggtgtctgtaaaaccgcgacagccctaggaatcaagcatccttcagtatccgaatggcctgagattattccagaagttagagcgtatcaggttgagaaaatcaccaacggacttttgaagtttgatcagtcgctttatcaaaattctactgattcagccgcctag

SEQ ID NO: 129079 - DNA, 654 bp, Enterobacter cloacae
atgatgaatatgagtgaccgtatccgccaaaggcggaaagagttaaaactgacacagcaagcactggctgagatggctggtgtgaatcgagtcacggttacagggtgggaaaaggatgactaccaaccgaacggagcaaacctacagtctttagcgaatgcacttcaatgtgatccactttggcttgtatctggcaaaggtgaccctaagcccaagctcaatctgaaacccgagatattcagtgtaaaagaagtgccgttaatttcatgggttcaagccggttcctggacaaggactgatccgggagtaagggctgacgatgctaaagaatgggtatataccaccgcgctagtttctgacggtgcttttgctctgcgggtgcgtggggattcaatgactaacccatcaggggctccatctatccctgaagattcaataatcatagttgagcctgacatcatggacatcgaagcccttaatgggaaaatcgttgttgcataccttgatggaggccatgaagccacacttaaaaagcttgttgtggactggccttaccgttatttagtgccattaaatccacattacaagcctattgagtgcggagaaaactgcacaatcgttggccttgttaaacaagtaatcatggacttctaa

SEQ ID NO: 129080 - DNA, 915 bp, Enterobacter cloacae
atgctttacatgaaagaaaatggtgtattgatcaaactggatagctgggagcaggtttattcaagacccaatttcattaaagatttagacctcaaagataagaaactcaaagcattggttggttactataaaaatgaaccacctcgaaaatgcgggattaaaagctgccacagtagccatatgaaaggtggaattgtaattacagaagacaatttcgaagcttccattggtcacatgtgtggtagtaaaatttttgaagaaaagtttgatgtattaattaagcagcttgaaaaagaagtcgatttcgaaatctacaaagaagctgttgccagccgtaaaacacgagtattcgaatactggaataaggcagcagcccttacttcaggcaaagatggtgtgttaaaactggctgataaaattctctcccttagagaccctttagtcgctggccgatttgctgcaacagaactagcccgtatggcggctaaccagcagacgaaggtaacgaaagaagtttgggtggaaaaaaagaaaaaagaattaactgaagaagaagcaaagagcggcgagaagaaataccgcttagaaactgtcgtatgtggacagattaaaaacactgaagttttgctctctgttaacaacttaaataatatctataaagatgatattgaggctgtgattcgtgcccttgaaagtcttgatctacaaacagcaactccaagacaaatacagaatataggtcgggccgcatctgtgcttgatacgagactggacacggctgccaggctgaagaaccttgcaactgaatttttgacttacgacaatctatatccgatgtatgacaagatgtattcaatggatactgttagtcgaaaagaccttgagttatacgaaaccctgataaagcaattctaa

SEQ ID NO: 129081 - DNA, 360 bp, Enterobacter cloacae
atgtccgaaaataaaaacaccacgccgtttagtcagcaacttgcctatatcaataaaggcacgctggatgctgaattaaccgaggcgctggcagaagttattaaggctgttcgagaaacaggtaagaaaggcgctgtgacgctgacgctgaactgtgcaatgctgaacaaccgcgatgaaaacaccatgaaggttacgccaaaggtcactcgcacaattccagagcttgaccgtgctgacaccatcatgtttgcaactgccgatggtgatttgctccgcgatgatccttcacaaacccagttggatttgaaagtcattgagccaaaaactcagactgcaccaatcaagctggcccagtaa

SEQ ID NO: 129082 - DNA, 813 bp, Enterobacter cloacae
atgtctcatattgaaggctctgccgtatccgaaattcgtgatctggtttctgcaaatctgaaaacacaaactgatatcccgtctgttgtcgtgccggagggctttgaagtcaagtcgcttgaaagtctacagctggcaccgtcacgtattcgtcaagctgcaaacctgatctcccctgggtctctgatcgcttacattcaacgtttccgtgattctcgtactgttgttttcgcagataagaccaaaacgcgaatcgtagccgtgttggacttccatcaggatgcagagaaaccaagctgggccgcacacaaggccgtttatgactgcccgttctctgatgaatggaaagcctgggtcgctgctgatgggagcaaaatggaccagattaactttgctgagttcctggaaaacaatattcagaatgtcgcgccggttagtgattcatatctagggccgtcaggaactgaactgctggaaatggttctcgcattccaggaaacccgtaagtcagagtttaagtctgttaaacgtctttctgatggaacctgccagttccagttcagcgatgaaaaatccggttctggcaacaccaaaatgccagaaaaaatcagcctggcaatttcaccattccataacggttcaccttatcaggttgatgcccgtatccgttatcgcctgcgtgacggtcagttaatcctctggtatgagctgatcgaaccgaagaaagttgttgagcatgcattccaggaaatcgtcactgatatggaaaaccagctcggtgaagacctgcctatttacgaaggctccatttaa

SEQ ID NO: 129083 - DNA, 810 bp, Enterobacter cloacae
atgccaagcttaggccagctctataacgataaagacgccggattaaccacccgaaaaacttacaacgtaccagtagataaaatttatgccgaagaaggctacaacgttcgtgaacttaaccaggcgcacgtagaagaattccgcgatgcctttattgccggggaatatataccgccgcttgccgtagaagttactgagcgcggggtgaaagtgatcgacggccaccaccgttatcatggcgcgttggctgctatcgcaatggggcacgatattgttcgccttgagtgcaaagattttgtaggcagtgaggctgacaaaatcgcctttatggtgaccagttctcaggggctggcattgactccacttgaacgaggcgcggcttatcatcgccttcaaaatcaggggtggagcccttcagagatagcgtcaaaagttaaacggtctgagtcagatattctccagcacctccagcttcacgaatgcacaccgtatatcaaaaagctcgttcgtgacggctcaatgaattacgcaatcgcaatcggtatatctcgtgagcatggtgtttacgcagatcgtgaagcttcacgtctgatgaaaaaagccgaggcagccggaaagaaaaaagttacaaagagcatagccagccctcagtttaatgccggaaaagccaggaagtttcttgaactaatttcctcttgtgcagaggattccggcgaagggctaatcattgaaattccaccagcaatacaagctgaaatcacatccattcttcgggagtttcgtcacgaaactgacgaggctgcaccatga

SEQ ID NO: 129084 - DNA, 126 bp, Enterobacter cloacae
atgaaaaaaatatcagaactgatgatgtggtcccttttcttttctctcctaatagggattgggttaactgctggattctactgtttcatcgggactgtcaagctgatcgcaagggtaatagcatga

SEQ ID NO: 129085 - DNA, 225 bp, Enterobacter cloacae
atgaaaattgaataccaagacatggggcccactgcaaaaatcataatcaccagcaccgtattcgagtttcgccgacacgttcgggttgttgatacgattttgatgtgtactcctggagtcattgcggatcgccgtggtttcttcctcatgaaaacggtgatttcaggtcgctctaaagaaatgcttcgcgccaataaaacagcagtgcgtgaggtaaaccgatga

SEQ ID NO: 129086 - DNA, 489 bp, Enterobacter cloacae
atgagcactattaccaaagagttcaccaaagagcagttacagcaaatcgaagcagctgcgaaagaagtcctgtggcctgtcgtgtggtcggaaaagaaagcacgagagcacttcagtgaaaaaataactgccaaggtggtactgaagctggcgcgtatcgcgctggcatcgctcgaaacggagcctgcgattcaccgctggcgtcgtgtgaccgttgagccatacggcccttatccttggcattacggtaattttatcggcttctcaaaacccgttgagggaattgaggacgagtatttttactccgccccgccagcgccggtagttcctgatgaggctataagtcttgccgttgatggaataatgtctacttacgcagataatcaggacgaatgccggaaacgtattagaaatcatattgaagacgcctgccgcgccgccatgcagggagcaatgcagcaggaggagacggtaaaatcaaaaaagtag

SEQ ID NO: 129087 - DNA, 258 bp, Enterobacter cloacae
atgtctgcactgaaggcgctcgcggcgggtgtggtacgtgtgtttttaacggtaatttttgatgaggtatttatgactactactgattttatggaggagcaggaagtattcgacctgctcaaaaagaaaaaaactgctgtttggcgcttacgcaaagaacgtggtttccccaatcctgttctcacatatccgtcacgctacagccgtaaagcagttatgaaatggattgaagagggcggcgtcaaccgagctgtttaa

SEQ ID NO: 129088 - DNA, 1170 bp, Enterobacter cloacae
gtggccctcagtgataccaaactacgtagcatcaatgacaagccatacaacggcgcgccagaagtcacagatggcgacggtctcagcgtgcgtataacccctaccggaacgattacgtttcagtttcggtaccgatggaacggtaaacctgttcgcctttctattgggcgctatccagctacctctctgaaagaagcgcgcgtcatagtcggcgagatgcgcgaattgtacctcaaggggctaaaccctaaaaattattttgccaaagaggatggcgagctgacgctgaaagagtgtctcgatcagtggtggaacaagtatgttgaaaccctgaagcctaatacacagactttatacaagtcagttgtgtacaacactatgtacacagaatttccggatgcccccgtcgtcaacatccctgtttcagcatgggttaggtttttcgataagcaggaaaagaaaaacggcaaaaaggccagggtacttctcctgcagctgcgatcagtaatgaactggtgtatcagccgacagctcataccttcgtgcgaggttctgaagctcagcgttaagacgattggaaagaagccagatgttggtagcagggttttaacctataccgaactggcaaaaatatggctcgcgctggaaaacaacaagatcgttacttccaacaaggtgcttcaccaactgttgttgttgtggggagccagattgtcagaacttcgcctggctactaacagtgaattcaatatggacgatcttatttggactactccagctgagcattcaaaaatggggaatgttattcgtcgtcctgtttttgagcaggtaaagccttttgtagagaggcttttaaattcgggtaacaccgtcctgttccctggccaggaactggataaggcaatagatcgttcgtcagcaaatctctacatgaaaaaactaagggataaaattgatatacctgaatggagaacgcacgatttcaggcgctcactggtaacgaatttgtcaggggagggagttatgccccatgtcaccgaaaagatgctggggcatgaactgggtggtgtgatggccgtgtacaacaaacacgactggctggtggagcagaaagaggcttatgaaatgtatgccgataaaatattctggcatgttaaacagctcggttga

SEQ ID NO: 129089 - DNA, 1170 bp, Enterobacter cloacae
atgcttacggtaaagcaaatcgacgcagctaagcctgcggaaaaatcatatcgccttgcagattcaggaggcctgtttctgttcgttccgccatccgggaaaaaggtgtggcgtatgcgttaccgattcgaaggaaaggaaaagacgctggtcattggtccctatccggaaatctctctcaccgaagctagggctaaacagtctgaagcaaaaatgaaattgcttaccggtgtcgacccggccgaacagaagcaggcgctaaagaagaaagagaaagaagaagcggccgactcgttcggtgacatcttccgagagtggcatgcacacaaatcaaaggtgtggtcgaagggatacgcggacgagatgatgagcatgttcactgacgacattcttccagtcattggacacttgcgcatggatgatgtggagcctatgacgctgttgaaggtcatcaggctattcgaggacaggggagcaatggaacgcgctgacaaagcgaggagaaggtgtggtgaggtgttcagttatgcgatcataactggcagggctaaatacaacccatccagagaccttgcaggagcaatgaagggataccggaagcagaactacccatttcttcctatgcaccgcatacacgaattccagcgtgctttaaacgcgtacggcggttggattgtatcgaagatagcagcgcaaattcttcactatacggctatgcgtacagtggagttgcgttcgctggtatgggcgggaattgattatgaaaccaggctaatcagtgttgatccagaggtcatgaaaggaagaaagcttcacgtcgttccaatgtcggaccaggttatcgaactattcaagttcctgcaacagattacaggacagtatgaactgtgcttccctgggaggactgacaggaagaagcctatcagtgagaacgccgtacttggcgtgatacgcagtattggctacgaaggccagacaagcggacatggtatgcgccatcagttcagcaccgtactaaatgagaagcactggaacaaagacgcgatagagatgcagctggcgcacgttagcggcggtacgcgctctgtttacaaccatgctgaatatctcgatacgcgtcgcgaaatgatgcagtggtgggcgaattggctggacgagaagattaactag

SEQ ID NO: 129090 - DNA, 363 bp, Enterobacter cloacae
atgcttaagctattctcaaaatatttgactgtaggcgtattcaataccgccatacactggtttgtcttcgcagttggcgtctacatgttctctgttaatcaggctgcagcgaactttctggcgttcgccacggcggtaaccttctctttcttcgcaaatgccgtctttactttcaaatcaaagcctaaagtgaaagggtatttcctttttgttggattcatggggctcatgagtgtgctggtaggaaagttgtctgactattatcagatcgcacctatcgttacccttgttgaattctcgctgataagcctgatttgcggtttcttttattcaaaacacattgtctttagggaagaaaaatga

SEQ ID NO: 129091 - DNA, 921 bp, Enterobacter cloacae
atgaagatttctctggtcgttcccgtcttcaatgaagaggacgcgataccgattttctacaaagcagtcagagagtatgaagaactaaagccatatgaagtagagatagtcttcatcaatgacggcagcaaagatgcgacagaggcgatcataaattcgattgctatatcagatgctctcgtcaagccgctatcgttcactcgtaacttcggcaaagagccagcactgttcgccggacttgaccatgcaaccggtgacgcgattatcccaatcgacgtagacctgcaagatcctatcgaggttattccgcaccttatatcaaagtggcaggaaggcgcagatatggtgctggctaagcgatctgaccgctcaacagatggcagacttaagcgcaagactgctgaatggttctacaaactgcataacaaaatcagtaatccgcagattgaagagaacgttggcgacttccgcctgatgtctcgcgaggtggtggaaaacattaagctcatgcctgagcgtaacctgtttatgaaaggcgtgttgagctgggttggcgggagaactgatgtcgttgagtatgcccgcgctgagcgcgttgcaggaaataccaaattcaacggctggaagctatggaaccttgctcttgagggtattactagcttctctaccttcccgcttcgcatgtggacctatatcggacttgccgtcgcaggaatggctttcctgtatggcgcatggatgattgtcgatactatggctttcggcaacccgttgcatgggtatccttcacttcttgtttcagttctgttccttggtggcgttcagcttattgggattggagttcttggggagtatgtcggaaggatatacacagaggtcaagcagcggccaagatatattgttaagaacaataaattataa

SEQ ID NO: 129092 - DNA, 1500 bp, Enterobacter cloacae
atgaatagttattctttcttttcttttaggatttcagcaggtgaaaggaagttcgtgattatactttcactgcttttgctggtatatataataccaattatactggcggatagattatatatagacgatatacttagatcgcagcagggctacaagaattggggtataaatggcaggcctcttgctgatttgattatggctgccttcaatttcaccgatggtgttatagctgacgcatctcctttgggtcttttttattcaactgcattttttttgctttgttctttaatctattaccgtaaaaatcttactttttacggtccattatttagctcttttgcaatgtttttggttttctccaatccatttatgttagaaaacctatcatacaagtttgatgtcatcccaatggtggcatcactgtcaatattatttattccatattctattaatggcaaaaaggtaatctgttttgttgttggtatcatatgcatagtatcgtcactatcactttaccaagcatctataggattcttttgttcactggctttggtagagatggtgactaagtatacctctggagagcagatagctatatgctatattaaatcagtaatgcttagagttattcaactgatagtttcatacataatatatagctttatatcatctaactttgttaatggcgactataacattgagcattctcagatgataggaatgagcagggatgctttaccagttctttacagtaatgcatcggtttacatttcaaagatacatcagatatttactgaatctacatatgtattttatttcgttgtagcatcttctattttatcgtgtatttatattgctatacctaacaccggtagaattaaaggtggattttggtcaagggcctctctttttatatgtataattgcagcgcctgttctagctgtattgttttcatttatccatctttcattattgaaataccctgtgtttgccgatagggttttgatatcatttggcggggcaatccttttttattcgctctcaatggcgtctatagttagttggaaaagaatagcatccattattttaatcccattggttttattttccatatactattcgtatgtttatggaaatgctatgaagtatcaaaaagagtacgatgataggctatcaaatgatatagcaaatgttatatcaaatgaggataaaacgggaacaattcctgtgtacacgtacggaaaacagccatcctctctccagagaacaaatgccgtgaataggttccaatctttggatacacttgttccattgtattatgtggatggttggtggggaacgctacttattaatatgtatggaataaaaaacaaagtctcagggttgtatgaaattaaccaagtatgctcaatgagaattgtatctcaaactcaatcatattcaatatataaagacagttctaagttaatcattgacttttccaaacatagttgccactag

SEQ ID NO: 129093 - DNA, 2346 bp, Enterobacter cloacae
atgtcatttactgatacggcaaatgcgaaaaagtatgcctcaatcgcagagactgctgctgcccaggcaaaattatatgcaggtgagcttgaatctgctccagattatgcggcacaggctgccgcatctgcttcagctgccgcatcatcagctcaggaagctatcgcagctgagtctgtagtaagcaaccttgcaatatctgccagtgaatcagcaacaagtgctgcagcttcagcagcagaggccggtaatgctgcagcggctgctgtaggtcaatgcttaagggttccgacaggggaaagcattagcgttcttcctgcccaatcaagtcgacaggatacattcctgacatttgactcatcgggtaactcagcattactggctaaaggtagcgttgctatccttgattcaggcggaaaaatcccggtatcaatgataccagcggttgcgttatctgagatttttgtcgtcaacagccaggctgcaatgctggccctgaatgttcagccaggtgatatcgcaaagcgtactgacattggtctctcatttgcgctggcttcacttcctgccagtacgctatctaactgggttcaactgaacgatgacgtccttgctcagctaggtttaagcacaggagcgactgaggtgggagcggtagatgatctatctaatccaaccactgtccagggagctttaaatttaaaagcaccgataaccgccctttcagctaaggttagtattagctcacttggagcgaatgatggtgaaaaatttataggattatgtccagacattgccacgctgcggaccgttgagccggttagcgacggccagcgcatcaccctgcgcgaacacaccgctggtaccggcaaaggtggcggccaattccgctccgtattgtctggatcgtcatataccgacaacaacggcacgatcattaagaccactggcggcgctgcctggttgcgcatcaatgcggatattctgaacccgctgatgtttggggctttgggtgacggggaggctgatgattccgttgcattcaattcaaccatgcaagcggctaagctctctggggggcggggtaagaaaattgacatacctgcaccatcagcattttacagagtaaaagacgtaaatgtggatagtgctgtagaaatcattggttcgtcaaaatcatcatccctggtcaagccagttagcaacggcgacacttgttttatcattaactcaaacttcgtgacgatgtctggcatcaccattatggacgagggaagaacaacaacgtcaacaggaataaaaataaatgaagggtatatgaccctttataattgctacattgcattaataggaacgtgtatatcgttcgccaaaaacagtggcgagcacaacatgtacaatgtcagactagttgaaagcaagtgggggttagtaatgccaggtgggcaggttaactccagatttaacggctttgtaattggcaatgtagatggtgctgtgcaagttagggaaactcttgcggcatctgatagggcacctacagaagggcttgtatttacagactgcctaattgctggttgtggtaacccatcggaaagtatccctgctgttgatatcacgggcacacggtggacctggttcaacaatacaatggttgacctttctaaatttactgctgtttacgtgaataatgccgagtccattaagttcaccggtggatacctatcatctaaccaatctgctaactctccttgcttgcacgtaaaaggtaatagtccattacttgatgcagtaaatttaacgattggcgatagtcgtagctggggtattaagctggaacgtactacagatggtgcacctgatggtgcaagatttacaaatcttacagctcagaataatgacattaacgcttctcagcagggtgatttgcttattgactcagttagcaatgtatgtgtctataacagcaagtttgccagccaaaaaacaaccggaattgcggttatagataattcaagtgtcggatcttcattgtacctggatggatgctcaatgagaggccaggcatatgttgggggagcatcgtgcgtcataattaataggaacagtccaactcatccagaggagcagcgtggagttgtcacaatcccaaacggatccaataccgttagcatccctctaaaaatagttccttttgagtctggaaaaacggcgggagtagtatcatcaccatcttctggagcagacgtaataacatctggagttcagggtaccaacattgtattcaatagagtaagcacaggagcagccacaacggtgtctttctatgcattttcaactaaatag

SEQ ID NO: 129094 - DNA, 1149 bp, Enterobacter cloacae
atgaactcttctgataccccatcaagaatcactaaagcatttggtgtaaatggcctaaaaaatacaattccagtcgactccagcacatccacagataataacggtgttgcgacgttcgataagggattcccggccataacaatgcatccattaagcgcaggagggataccgccatcaggaaaggacgtgaacggcgtattgtattcaacaacactccaacagcaatggcaaaacgctggaatgacatatccatttagtcaggacttttcagatgctgtgagtggatatcctaagggcgcgatcgttccaagctcagtttataccgggcaatggctaaaccttaatgaagcaaatggcacatctcctgaatcagcgactggagctaataccggttgggttccaatcaataactatggcgttacccaaataacaatgacatcaggaagtatcgtgatgtcatcacttcaggcagcaaaagacagaattattatcagcggtacgcttaccgcaaacgtaaacctgattttccccgcctggattaagtcatgggtcgttcataacaattgcacgggtaacttcacgattacctgccgtaccgcctctggtaccggagttgtagtcattcctggacttgtctctcgccttttctgtgatggcgtgaacatgagcgatgaaacctacaacccaaacaatgacatggttggaatggttgccccattcgcagcaaattcagcccctacaggatggcttgcagcagacggaagccttgttagcaggattacgtacgcacgtcttttttcaagaattggcaccacttttggtgctggtgatgggacgtctacattcgctttgcctgatatgcgtggtgagtttgtcaggggctgggataacggaagaggcgtggatgcaggacgagcatttggctcgtggcagaaggggtctgtgattgttggtgatgacggtgtggcaggtgacaacgttgcctcatacaacgtagcggataaaacaacggtcggtctagacctcggcggatcagagcaatacccaatctcaacagtagcagcaactcagtcaacacttcgcggaaacaccttctacggatattcacgtccgcgcaactacgcactcctgtactgcataaaaatctaa

SEQ ID NO: 129095 - DNA, 588 bp, Enterobacter cloacae
atgataaacgtcgcggataccatcctgacgcaatatgccgacagcccgaaattaaaatccctgatttactcgttcaatgaagccgtaggtattgaaagctttcttgatgatttctatgacgttatctggaatatcgagacagccgatacctatggtctggacgtatgggggaaaatcgtggttgtcagcaggcagctgacggtaacagagaacaaaatatatttcggctttaatgaggcgtcatctgatccccctgttgtagatgacccacagccatttaaccaggcacctttctattctggcgagctattaacttcaaccgtaaccctcacaaatgacgtttaccgcaagctaatcatgatgaaagcggcggcaaacatctctgattgcaccatcccaaacttgaataagttgctgatgtttatgttcggcacgagtggcaaatgctatgtcaggaatgacggggaaatggtgatgagctacgtgtttgaatttcagctttctacagcagagctagccatcgttcaaagctcaggtgcgcttcctgccccgatcggggtaacagtaaatatcgttcagcaggtatga

SEQ ID NO: 129096 - DNA, 1233 bp, Enterobacter cloacae
atggctgaagtaacagttagcacagccgtcccctctgtcacgttttccgctaccggcattgccgttcctgatgagatagacattctcaacgggcgattaactgaccttgataccgccatgggcggagggatgagtaagagtctgacgactccgcagggacagattgctatgagcgatacggcaatcatcggagacaagaacgacaatctggcatggctggttaaccagattaaccctgactttgctgaaggtcgcatgcaggatgcgatcggacagatttacttcattgaccgcatcgcagcgattggcacaacggtaactgcaacctgcactggccttgtaggaactgttattcctgcaaatagcatcgctcaggacgctagcggttacctttactactcactggctgacgctgttatcccttcctctggctctgttgatgtggttttccagaatcagtcatcaggacctattgcctgccctatcggggcactgaacactatttaccgcgcaatacagggatggtctggcattactaacgccaccgctggcgtgctgggaaatgaggtggaaagccgggctaactttgagtaccggcgtaagcagtccgtggctggcaactccaataaccagctcggggcggtatacgcaaacgtgctagctgtcagtggtgttactgacgcatacgtgacgcagaacaacacaagcctgaccgttacaaagggattcactaacgtttcactggaaccacactcactttatgtgtgcgtatacggtggtgcatcggctgatattgcaaaagcaatatggcaaaagctcccgccgggtccgtcaatggttggagacaccacttacacggtggtagacgatgttaactacgttcagccataccccgagtacgaaattaagtggcagacaccttctgcagtaagcgtctatttcaaggtcgagcttgcggataacaatgcactgcctggtaacattgcaactctggtgcagaacgcgatcatcagcgcattcaatggtgaggatggcggtacacgagcgcgtatcggatctaccatttatgcagggcgttactacgcaggcgttcaggcaattgacagtgataacgtagatatcttcagcatcacaatcagtcgtgacggcaccacctatcaaacatctgcgtcctttggcattgatgaagtgccgacactggatgcaacaaacatactggtgacactggcatga

SEQ ID NO: 129097 - DNA, 357 bp, Enterobacter cloacae
atgctcaccaaatcactgcttttgactgaccagtgggatatcacgctggacgatagcggaagcatggcaatcacagccaatccctatgcagtagcgcaggacgtagcatgcgcgtgctcaacatttctcggcgagccctggtatgacaccacgctgggtattccgtattacgagcgcattctaggtcactggcctggaacgcagctaattaataccaagatggctacagaagccaaaaagcttccatacgtccagtcagcattctgcacaacaacggttggcaaagcagatcgccttgcatccggcgttatgaccataacggaccaaaacaacgttcagaccacaatccaattctga

SEQ ID NO: 129098 - DNA, 702 bp, Enterobacter cloacae
atgaatttatttactacacggcctcaggacacggcaacagacgccaattcacaacaattcctgatgcatcagtttctgatggggaagtcattcatcacactggcgatcgtaacttcggttagcgagtctggggaagttgtttctgtgaagccaatggtcgaaggattcactggaggtggcgatctcattccgaactcagtgattcacggcgtaccggtttggcgattacaacgcggtgctagtgcggtgattatgcctccagtcgaaggtgatattggccttattgctatttgcgatcgcgacataacagcagttaagaaaacaaagcaatcagcgctgccaggttcaaatcgcacgcacagttactcagatgccatctatcttggcggagtgctgaatgcagagccaagccagtatgtgaagttcgcgaatgatggaattgatatcgtctcgccgcttgttgtgcaagtgaatggcaatacggtagtagtgaatgctgacgacaaaatatcgcttaacgctccggtaattgaagctaacggccagttaacgcaaggctctggcaacttcggtggcgatgcgacattcggcggtacgattactgcaaccggtgaggtgacaggaaatggcatacacctaagtacgcacaagcatggtggtgtacagaccggctccggaaataccggaacgccaacaaactaa

SEQ ID NO: 129099 - DNA, 855 bp, Enterobacter cloacae
atgacctataaaaagagaacgctgaaatttcagttcacgctgaaagacggtgctttcgatgagtcagggaacaatatcctgaccatcgataacatcaaggcggaagtagagataggtgcttacggcgggatatcgggaacgacactggaagcaagggtgtttggcctgagcatcgaaaacatggctctgctgagctacaagggcatccagttaaacggtgctaagcagaacatgatgaaggtgtgggcggatgacaggccggtattcttcggatctatcaccaactgctttgcagaccttaaccagatgcctgatgcgccactgataatcagcgccttttctacagggttcgaccagtcaatcactgcgccgcctttctcaaaagaaggcattgcaagcgtcgctgaaattatcacgaccatagcagcaagcattggatatacggtggttaacaatggagttctggcgaagcttgaaaatccttacttcgaaggcaacccgatagcacagattcagcagtgcgctcacgcggcaggcatcgagattgatttcaggcttggggctatttatatctggccgcagggtggaagtattgacgataccatacctcttatatcccctgaccacggcttaattggatatccggtattcagtaactatgggattaacttccagtgccagtacagcgatctgattttgcgaggtcgaaaggtgcagatagaaacgtcgttaccgaacggaagcggggtttatacggtgcagtcggcaatacaccatctttcgacatggactgaaggcgctccgtgggcaactatcgtttgggcatcaatcggacagctaacagtgaggcagtga

SEQ ID NO: 129100 - DNA, 306 bp, Enterobacter cloacae
atgcaaaacatatctctcaagcccctcaaggctcaggaagtcagcgtcaatctggatggacagtctgtaaccttgcgcatcgttcagcgctctacagggctgtttatcgatgttggcctggacagcctatggatagcgcaaggggttctttgccataactgcaacaagatagtccgctacccatacctgggcttcaaaggtgagcttttcttcgctgatacaaaaggaagtcttgaccctgtttatgacgagcttgggacgcgattcaagttgttctacgccacagcagaagagatggcagcatga

SEQ ID NO: 129101 - DNA, 804 bp, Enterobacter cloacae
atggccttttcactgaacgaaacaacgctactcagcgcgataaacagcggcaacatcttttccatcatcaacagtaccctttcgcctggttacgggatttacctgaaatcaggcttaagggcattgtctccatcctcgttccttgggattgagtatggagcagatgcttcagtggtgtctgcaccaattgagcagggttcttacagcagttttaacaaggtaaagcggcctccgattatccgggtgctgtttacactggaaggatggactggatttagcggtagcatccccaacctgaccaattttaccctgaccagtcgctctgacatgctggctgctcttgatgccatggttgctgatgctcaggtgtacgatatcgagacgccggacacgacatacgaagactatgaccttgttcgatacaattaccggacatcagatcgcgatgtgacccttttgacggtggaggccatcttccaggctgttttgcaggaggcagaagttactctgacaagcaccacggccaatagcaacaccacatcaaacggcacaagtaaggcagccagcgtcgtaactgagaaggccaactccacggcgaccaactcaacgcttgaagacgtgaaaggtgcgctaaccggcctgaaagagtcagtatccagcgctgcaacaaccgtcgccacgtccgtaacgaatgccgttagcaatgcaacgtcaggtgcaacgagtgccatcaatggcgcggcaacatcggccattaaaaaccttgcgacaacggttgatgaactggtagcggggttatcctga

SEQ ID NO: 129102 - DNA, 504 bp, Enterobacter cloacae
atggaaggcggagagggcggtcgctttgccgttttcgagtcgatgcagcatggcattgccgcgctctacaagcaattgcagttgtacttcaagcgcggcatcaacacactttcctctatcgtcaaaacctatgctccggcatcagacaataacaatgtcgatgcttatatctctgcgctcaccaaagcgacaggaaaaggcgctaacgaggtacttgattctggtgacacagcaacaattgccagactgatgaagggtattgtcgatcatgagaacggaaagggatacatcagctcatctgacatcatgggtggtattcagttaggcgcaggctcatccgcatctcgcaatatgccagcggctgccggaagccagaccaccatcaccatcggaaaaatcgacatgcagacatcggcaggcaatgccaatgcgcttggtgccgatatccagagaaaccttcagagaaaccgcctggtgaatccagcgatgtcagggcagggataa

SEQ ID NO: 129103 - DNA, 204 bp, Enterobacter cloacae
atgcgcgaacttcgcgacgactcactcattgacatgaaattcattatggaggattctggcttttcagatcgctacttctacaagcacatccagaaaggcgacttcccacctcctatcaaatatggccgcgcatcaaaatggctttatggtgattatcaagcctggaagctcagcttcattccagacctcaaaaaagcatcatga

SEQ ID NO: 129104 - DNA, 531 bp, Enterobacter cloacae
atgactttgcttgagttactgattaaaaagcttcctcagtgtgcagggtggccgaaagatgcagctcgttgcatttatcatgagtacaaagaaggagccaccttctatgatgtggaaggtgccatggtaaaaaacggcgttggctttattgatttatgcattccagatgtgcggatagaggaagtaacccgagagcaatatgaagccgcacttgcagccagcaagccagaatgggatggcgagggattgcctccggagggttgtaactttgaatacatggcttcgcctggtaggtggttcatcgcgaaaatgaagtattgcggtaaaagcttcgcaattgttgacattgatggttctgagtcatggatgtctcttaatcaggcaatgcggcctgtacgcttagaagtagataagaagaaagaggcggcgatatttgctattgccgacctgtgccgagaatccgccagtaacggacacttagcagagcttatctacgatgctatcaagtcaggaaaaatcgtaatcgattag

SEQ ID NO: 129105 - DNA, 144 bp, Enterobacter cloacae
atggttgagagccagattgagcctgatagcgaccatccgaagtgctggattaaatgggatgacggcaactactcggtgcatcacgaacatgaacttcgcgcggctactgttgatgagcctcgtttgtataagaaattagcgtaa

SEQ ID NO: 129106 - DNA, 2175 bp, Enterobacter cloacae
atggctttagaacaagttatctacaatcttgaagaggttaaagggttctctgatgaagagctttatcaacgcctttgtgagagttgggggattacgaatggaaaactggcagtttggggcaagattctaaatggcccagattccgatagcagaaagctcccaacccgtcttttagagattaaatccctccaaacgggactggatactgaatatcccattaatgttcgtttgacgatggacaaaggtgtttttgtttccttcaaaagtgtcgaagagttatttggcttggaagatgggagttttgtctcatgcgagcttgctttagcgcctcaatctgaacgcgaaaaacatgaaaacccgttcgaatgcaatgtggtagtaagttcagtccgtcgacttatcaaacttcctgaatatacggcgaatgacatcatcaaaggtgatgaaaacatcttccttgatgaagctgtttacaagcagcatttacagaacgttcaatcaagaattgacagcgaagtgactgcacttaacgcagaatttgagcgcgaagaatcctcattgaaggctcagatatcgtcatataaagatcagcttcaacatgtccaagatgacctaaatcaaaaaaataacgttctctctcaggcaattgcgaaagcccaaaagctggaagttgaacactctgaatggcaacacaaaatcgcattgcaaaagaaggcagaagaaacaatgtctaaaaaaattgaacgcttaaaagcttatgtcgaaagtaaggctggattcctaaaaagctttgagtttttggatgatgacgattttgacctttttgttggaagcaccttgtctaataaggatcgtgacgagcatatctctttttcgcaagcttttgattctaactacagtgatgccgtttcatacattcaagcgcacctaaaagaacgagatatcttgtacccgcgccatattatcgagaacttcctaacgcttattcgcacccatgatctcatcattctggcgggggactcaggctcaggcaaaacaaacctggttcagtcgtttgccaaggctattggtggggtatcgaagatcattccggtcaagcctaactggactagttcagaagatttgctgggttattacaatcccctagagaagaaatatttggtgacaccatttcttgaggcattgatcgaggctaagcaaaacccagatatcccatacttcatctgtttagacgaaatgaaccttgcccgagtggaatattactttgccgactttctttctaagctagaggagcgtaacgagcaaccgaccattcaactttactcggatgatgaagctgcacacgttcttgccgagctaaaaggggttgtttctgtcatttctaacgcgcaagaaaagttcagcaaaaatggcatcgtggacttcgttgcgctcatgcaagatgaagaaattaacgctgaaatgaagcgcgcgtttggctttagcgataaagactcactgattaaataccacggtgatatcagacgcatgttggcaggtgttctcggcacgccttcgtcaatcacgattccagcgaacgtaagaattattggtgctatcaacatcgacgaaacaacccattacctctcaccaaaaattcttgaccgcgcgcatgtgatgaagtttaagagtcctttgctgaccgactgggatgcgatttttgatgagattgactcttacgggctagacgacgttactttaccgctagtgtttgatattgaagagcttggtgagcgtaccccttatccgaaatttgaacgtacgaatgaattctgcgagttgtttacgaccttaaaccgagatgtctttgatccgcttggcgtggagtttggtatgcgtaccattcgacaggggcttaactacgtaagtttgtttagcgatgtaaacgacaataagtctctggccatcaacaactttatcgttcataaggtgctaccaaaattcacatttgatggtgataagcaagtaggcgattacagtaaagctgagcttgttagccgtgtattcttgcctcgccttgagtcgctgttggataatcaagcagagataacggcggagttttcttgcaccaaatcggtagagcgtttggttaaaacggctgaatcgaatgatggcgttgtgaactactgggcgtaa

SEQ ID NO: 129107 - DNA, 2577 bp, Enterobacter cloacae
atggaagctccattcgttatcaagtttatcgagaccaaatggcacgataagcaaaccttagtcagtgttagcgagtcggagtactcgctaaagcttgagcagacggggaacaatgcattttccgcacacaccaccatctaccctaaggtcgatgagctacgttttgctcaacttgcgataaaaactaagcagggtgatcagtctccgccttacattgtcatgcctaatggtgatagaaagcagttagagtcgataaccgatcccgcatctaatgctgtgtggtgggttgagcctgctcattgggacgcaaaacaacgggtgtggcgcagtgaagcgaggcgaacggctggtcagatcacgtttgttattggtaactcgacactaaagcttgatattgatatctccgaacagaccaaatcggatctttcacgttacctgtcagattttaaagcggacctgtgggagctgatcctcgatgagaatagtcatatcacgggcgacgctaaaaattcacaggttgcagccatcggccaagaagcgctgtcattagtcgcatcaattcttagcaatgcacaaaccatcctcaaaaagcccaaagttgaactgaaagaaattcaagcgttaaagccagcaaaagaagtacgtcctgttccacgtacatttatggagatttgtaccaaaggttcgcgtaagcatttaacgagccgcgcatctgagccgagttacaacgtgccagaaaaccagtatgtgctgtatgtggtttcgagcacgctgagcattgtaaagcaattggttaaggtggctgagagcaaaaagagtcgtttttctggggctattgaaaagctcaatgagcgtttagacagtttaaaagactatcgtattatcaaccgtgacctagtagttaaagacttagaacgacttaaaaagcgctttgatacagaagtaatcaatgccgagttatcggaacagttagcgaaaatcaacgttaatctgtctcgaagttactctgaaaaaggttacctaagattggaaaaagcaacaggctctgagaatgagtggtgggctaaaattaaactatcgcaaaatgatgactggcaacagtttgagccagatggatataccatttttaattctagagatcattacgccagcttgtttaaagcttatagcgactatgagatagaagcgaagatccctttaccgttaagaaggggaaaagcggtggtcttgtatccagaatacatctcacgaatttgcgtattaccagagtctcgttctattcaaagagagcaagaaaatttcactaaattgcgtgacaaaggcattgctctaagtaaaaatgattggcaagcgaagctgacaacagatgaactcgctgaacaggaaaaagaacgtgctaccatcaataagcgcttgggttatttcgcaactgaacatgaaaaggtgggaatcgtacacaaagcgcttgagccaaaactgaaacctttccagcaaatagaaaaagaatggcgtcaatgcaaagtcaaaagtaaaagcacctttcctaactctatgacttttgtgcaaaaccctgcctatcaagcggttcactcgggttttaaaaagttaaaagagcagattggcttggccgatgaggacattttgctttcgctggagaagatcgaagcgattgggttagtcaacatgccactactttatgaacgctggtgtttgctgcaaatcatcaaagtgctgactcaggcattccgctatcagccagaggacaactggaaacgaaaattgattgcgaatattcaaggcaatgaagaacaaatcagcattcagtttttcaacccaagtgtttcaagagctatcactctgcaatacgaaccgttcttagcaaatggtaagcgccctgattttgttttggatgtagaagcgattaccaaaagtggtaaccagatttcaaagcggttagtcgtcgatgcaaagtactattctgctgcctatctcaagcaaagaggtgggatcggtggggttatccatgaactttacaacggcaaagattatagcgaatgccaagagaacagtgtgtttgttcttcaccccgtgttagatgcggttgagaaagtcgtctctccacaggaatgggcgaaagacagttatttgggcgaactatccatgtttgattgggaacctgcacgccatcaacgccaagctacaaactatggtgcagtatgtgcaaacccaatgaagtcgcaacgctatcttgatgaaatccaacgtatgctagggatgtttctacagtacggcattgaagacaatacatcttttcgaggagcatcggatgatactcatgcggtgaatttttgtgtttcttgtgggtctgaaaaagtagtttatgtaacgaaatcaatgagttcaaataatcaaaagcgttggtatcggtgcaatgagtgtacacactttaccgtgtatacccactgtggtacatgcaatacacgattaattaagaatggcgagtattggacctatttgtctttgatgcctatgtcttcaattaacataaagtgtccaaactgcgagtctcccgtatga

SEQ ID NO: 129108 - DNA, 306 bp, Enterobacter cloacae
atggttggacctcagacccctaaaccggaaaatcagagctaccgcgccagtggactgacgctgctgacagcaactatctcgctgtggaatacagtgtatatggaaagagcggtcgatgccctgaagcgtaaaggggtgaagatcaacgagcaactgctgtcacatttgtcgccgttaggctgggagcatatcaatctgacaggcgattacatctggaaaaacaacagaataccggcctccggtaagtttcgtcggctgaggccagctaaagtagaaaggtcaaaaaacgaccttaacgtacaataa

SEQ ID NO: 129109 - DNA, 219 bp, Enterobacter cloacae
gtggagaacccgtacgccacagccaggcgctggagcgcgctcttcgacctcccgatgacaacgcgcgcgggcaatccggcgctgcgtattggcgataagtatttccagttcaatcaagggaacagcaacgcgctggtgcaactcgattttctcaccgacacggcggcgctcaagggtcaaaccattttggtgggcgaagggcgttatgcgtttcactga

SEQ ID NO: 129110 - DNA, 1086 bp, Enterobacter cloacae; identical to SEQ ID NO: 37169

SEQ ID NO: 129111 - DNA, 1158 bp, Enterobacter cloacae
gtgacagtgttgaacattgatgatttacgtcggcaggcaaagcgcacgcttccccgttttgctttcagttatctggagggtggggccgatgatgaacaaacgttacaggataatcgccgtgttttcggccgctggcgctttattccccctgtgctgacagatgctacgcaacgggatttatccgtcacgctgtgtggacagaagctggctgcgcccttgtttatcgccccgacaggctacaacggcatgctgcggtttggcgcagatgtgatgctggcgcgggccgccagagaggcgggcatcggctatatacagagtacggtttcgacggcctccattgaagagatcgccgcagaaaacattccccgacactggttccagctctatgtgctgaaagaccgcgccgtcacgacagggttactgacccgggcccgggcggcgggttgtacgaccctggtggtttctgtggatgcggtgcactttggcaaccgtgaaaaggacaaacggaattaccgacggcccatggaactatctctgccgagcatgctggacattgcgatgcatcccggctgggtgtggcgagccatcaggcccgcaggcatccctggctttggcaacctgaaatcttatgttccggctgacaaacaacgaggcgcaggtggcgcgagctattttgccgaacagatggatacccacctggactgggccacactgcactggatccgcacacagtggtcaggtcccctgttaattaaaggtatcctggcgcctgaagatgcccggcgcgcttttgccgcgggcgtggatggcattgtgttatcaaaccatggcgggcgacaactggacggttcagtcagccccatggaagtactgcaggagattcgtcagtgctgcggtcctgatgctgtcatccttatcgacagtggatttcgccgtggcaccgatgtggtgaaagcactggcgctgggcgcgaatggcgtgctgattggccgacctgtgctctatggcgtcgctgcctttggtgaggcgggtgcgaaacaagcgctgaacattattttgcaggagatggatcgcacgctggcgcaactgggatgcacttcgattgcccagttagggccgcatttgctgcgttttcagcctgctatggcggggttttaa

SEQ ID NO: 129112 - DNA, 1167 bp, Enterobacter cloacae
atggcttctgatgtagcagtttccagttcacttgttgattcacaacagcagatactgaaaaacctcgccaggcccacagcgcggtcattaagcctgtataacgccgggttgtcggcggaagcggtacgacagcaatatgggttgagccatatcgccaaactggccagtaatgaaaatccgctgggcgccagcccgcaggtcatcgcggcactgcaggcggatgccggcttcagcgcagtctattcggatgctgccagtacagcgctgcgcgatgcgctggcaacgtataccggtgtgcaggccgggaatattgttatcgggaatggttcagaagatatcctgcatatgctggcactggcctttctcaaccccggggaccgcgtggtcacattgcgaccttcatttggtctgcatgagattttcccgcgcatgatgggcgcggacgtcaccctggttgacgtgaataagcagcatcagttcgatatcgccgcctggactcaggcactttcgatgcccgccaaaatggtgattttcagcaacccgtcgaatcccgtgggctgcatgctcgacaatgcaggttttgagcgcatcatcgccgcggcacctcaggactgtgtgctggtgattgatgaggcctatttcgaatattgccggaacaacccggattatccggacagccagcgtgtgctggccgcgcagtcgcgcccctggattgtgctgcgtactttttcgaaagcctacggcctggcgggattgcgggtgggctatggcttagccagtcaccctgaactggtcaatctgctcaatcgcgttcgcacaccgtttaatattaaccgttcggcacaagcggcggccgtggtagctctgggggatcagcaacatgttaatgacagcattgcgctggtcagtgcgcagcgcgacatgatgtcggcgcagctcacggcgctgggtttccgcgttgcgccatcctgcgccaacttcctgttttttgactgcgggcagcctgcggcagaactggcgcagcgtctgctgtgcgatggcgtcattatcaagccatggcgggagaaggggtatgaacactggatccgggtgtctgtggggaatgaacaggataaccagcagtttattcggagcctgaaacgtatcctggcggaggatgccgcgtga

SEQ ID NO: 129113 - DNA, 1683 bp, Enterobacter cloacae
atgaacgcgccacagaaaaatgccgccgcccatgtcgttcgcgctccccagggaacagcgctgagttgtcaaaactggttgatcgaagcggcttatcgcatgatccaaaacaaccttgaccccgatgttgccgaacgcccggaagacctggtggtctatggcggtattggtaaagccgcccgcaactggcctgccttcgaagccattctggacagcctgcgggcgttgcgtgaagacgaaaccctgctggtacagtccggtaagccggtcggtgtttttcgcacccataccaatgcgccgcgcgtgttgattgctaactccaatattgtgccgcactgggcccactgggaccactttcacgaactggataaagcgggcctgatgatgtacggccagatgacagcaggctcctggatttacattggtgcgcagggcattgtgcaggggacgtatgaaacttttgccgaagcgggccgacagcactacaacggcgacctgcggggcaaatggattctgacggcagggcttggtggtatgggcggcgcccaaccgctggctggcgtgctggcaggggcctgcgtcctggccattgaatgccaggaatcccacattgatttccgtctgcgtacccgttatgtggactataagacccgcagcctcgatgaggcgctggcgatgattgaaaaagcctgtgcggagaaaaaagccatctctgtcggcctgctgggcaatgccgctgagttgatgccgcaactggcggcgcgggcaaaagcgggtggcctgcgtccggatattgtgaccgatcagacctccgctcatgatccgcttaatggctatctgccggaaggctggagcctggaaaaatggcaggccgcccgtcagtcagatccgcaatccgtggtgaaagccgcccgcgcttctatggcaaaacatgtccaggccatgctcgattttcaccatatggggatccccaccgtcgattacggcaacaatatccgccaggtcgccaaagaagagggcgttgaaaacgcctttgatttcccgggttttgtcccggcctacatccgcccgctgttctgtgaaggcaaagggccattccgttgggttgccctttccggcgacccggaagatatctataagaccgacgcgaaactcaaagaactcttcccggacaacaccaatctgatcaactggctggacatggcgcgtgagcgcattgccttccaggggctgcctgcgcgtatttgctggctgggcctgggtgaacgtcaccgcgccgggctggcgtttaacgaaatggtgcgtaacggcgaactgaaagcgccgattgttattggccgtgatcatctggatacggggtcagtggcatcgccgaaccgtgaaaccgaagcgatgaaagatggctctgatgcggtatccgactggccattactcaatgcattgctcaataccgccgggggtgccacctgggtcagtctgcaccatggtggcggtgttggcatgggcttttcacaacatgccgggatggtgattgtgtgcgatggcactgaagatgccgatgcccgactggcgcgtgtgctgtggaacgaccctgccaccggggtgatgcgccatgcggatgctggctatgaacaggcaaaagcctgtgctgaacgtcatcatttgaatttgccgatgatctga

SEQ ID NO: 129114 - DNA, 1551 bp, Enterobacter cloacae
atggctgcttcatccaccgattacaccctttgccgcctgcaacccgggcatgtccatttgcccatgttgcgacaaatataccagggtaatgtccgccttgcgctggccgaagaggcccgtgccgatgtgctggcctcccaggaaacagtcacccgcattgtggcatcgggaaacgtggtgtacggcattaataccgggtttggcaaactggcgcaaacccgtattccggcggaacgtctgaccgaactgcaacgaaacctggtgctgtcccacagtgtgggcacaggcaaaaacctggcggataacgttgttcgcctggtgatggcgacgaaaattctcagcctctcccggggtcattccggtattcgtattgaggtgattgatgcactgataacgttatttaatgcgggtgtgtacccctgtattccggaaaaaggatccgtcggcgcttcgggcgacctggcgccgctggcgcatttgtcattgatgctgattggcgaagggcaggtgacactgggtggcgaaacgatgtccgcggttgaaggcctggctgccgcagggctgagcccctttgaacttgggccgaaagaaggtctggcattacttaacggcacccaggtatcgacatccctcgcgttgtcaggtttgtttgaagcagaacgggtgttttccgcaggcctggtggccggggcattatcactggaagcgattaaaggctcagttaaaccgcttgacccgcgtattcatgaagcacgcggccaggaaggccagattgctgtcgccgctgcgctgacggcgatcctggccggtagcgatattgtgacatcccatgctaactgcggccgggttcaggacccttattccattcgttgtgtccctcaggttatgggtgcctgccttgataacctgcgacatgcggcccgcattctacgtattgaagcaaacgcagcatccgataaccctctggtttttgccgaaaatggcgacgtgatttctggcgggaatttccacgcagaacccgtggctttcgccgcggacatcattgcgctggcggttgccgaagtgggggcgatttctgaacgcagaatggccttattgttggacagcggtttgtccggcttgccgcctttcctggtaaacgatggcggcgttaactccggctttatgattgcgcaggtcacggccgccgcgctggcatcagaaaataaatcgctggcacatccgggcagtgtcgacagcctgcccacctccgccaatcaggaagatcacgtttcaatggcgacctatgccgcccgccgtctgggcaatatgtgttttaacaccagtgtggttgtcggtatcgaagccatggccgctgcccagggacttgattttcatcgtccgttgcaaagttccgccacactggaaagcgaaatgaaggcgattcggcaacatgtcgcttttctcgaaaaagatcgtctgatggcgccggatgtcgaaatgatgcgtttgtgggcgtcccgtgaacactggcctgcggccattgaagcattactgccgagctttgcctga

SEQ ID NO: 129115 - DNA, 786 bp, Enterobacter cloacae
atgagctatccgaagctgagtgttcgccaggtggaacgcgtcttcagtggcccgaaaggcgagaagacccaggcattactgcccgtggattatcaggtcaatgagaacgactttattaccattctcgggccttccgggtgcggtaaatccacacttttacgcattgttgccgggctggatcagcccacccgcggcgaggtctggctggatggcgtgctggtcgatggtccgggcgcggatcgcggcatggtattccagagttacacactgttcccctggttgacggttgagcagaatatctgctttggcctacaggaacgcggcgtgagtaaagcggcacaaaaagagcgcagcgactactttattaataaggtcggtttacgtgggtttgagcagcatttcccccgtcagttgtccggcggtatgcaacagcgcacagccattgcccgcgccctggccaacgacccgaaaattctgctgatggatgaacctttcggcgcactggataaccagacgcgcgtcatgatgcaggaactgttgttgtcgatatgggaatcttcccgcaaaacagtcctgtttgtgacccacgatattgatgaggccatttttatggccaataaagtggcgattttcagtgcgcgccccgggcgaatcaaaacggaagtggcggtagattttccgcacccgcgtgattataccctgaaaacatcaccagaatttatggcattgaaggcgcgtatcacggaagaaattcgtacggaaaccctgcaaaccatcgatcactaa

SEQ ID NO: 129116 - DNA, 882 bp, Enterobacter cloacae
atgaacagtcctgtcagtcaggccgcggaatttcccgccagtacgcagtcagttttacgtgagccggcgcctctgccggcaagtaaaaaggtctggcacaacccgatgatggtgccactgcgccccgtggcgtcccgtcatcgctggtttttgggcttctgcttttttgtgctgtttttcgcgctgtgggcgctggtgacttttaccgggctggtgtcgccgacattccttgccagtccggccagtatgttgcaggaaggggggctgttatttaccgattttgatttcacaacagatatcggtatgacggtaatgcgtgtactgggcggctttattctggcgtgcattatcgccgtgccgctgggtattctgatgggctcatacaaactgatcgaagcgttttttgagcccttcgtttcgttttgccgctacctgcccgcatcggcgtttgtccccctgcttattctgtgggcagggattggcgaaatgcaaaaaatactggtgatctttatcggttcgttctttcagataaccctgatggttgcggtggctgtcggcgcggcgcggcgcgatctggtggaagcggcgtatacccttggcgcgaccaacaagagcgtggtgcgtcgggtgataatccccggggcggcgccggaaattgcggaactgctgcgcctggtgctgggctgggcatggacctatgtcatcgtggcggaactgattggttcatccagcgggataggtcacatgattgtcaatagccaggcgttactcaataccgggcaaatgattttcggcattatcgtgattggctgcattggattgctgtctgatctgttgtttaaagcggtgaatcgccgcctgtttgtatggagttcgctgtga

SEQ ID NO: 129117 - DNA, 987 bp, Enterobacter cloacae
atgagcaacatgatttccaggactgtgctgaagcgttcgttatccatgttagggctggcagtgacattgggttgcggggcaataaacaccgccatggcggcagagactccggtggccattggtatttccgggtggacaggattcgctcccctgacactggccgataaggcaggcattttcaaaaagaatggcctggacgtgacgctgaaaatggtaccccagcaatcacgccacctggccattgcatcaggctctttgcagtgcgcggcgaccacggtggaaacctacctcacctggaatgccagcggtgtgcccatcaagcaaattgtgcaactggataaatcctatggcgcggatgggattgccgtacgtgggggtatcaataaagtggctgacctgaaagggaaaaccatcagtgtcgatgcaccaggaacctcctcctattttctgctggcctggatcctcgataaaaacggcatgacgatgaaagacgtcaaactggcaaccctggggccggatgccgccgctcatgcctttattgccgggcagaacgatgccgctgtgacgtacgagccgtatctctccaccatccgccaaagcccggacaaaggcaaaattctgaccaccacactggattatcccatggtgatggacaccctgggttgtacgccatcctggctggataaaaaccccaaagcggctcaggcactggtaaatagctactttgaagccctggatatgatcaaaaaagatccggataaagccaatgagattatgggggcggcggtcaaagaaaccggcaaacagtttgctgaagagtccagctatctgcgctggcaagaccgtgatgcgaacaagaagttcttcagtggcgagattgtcacctttaccaacgaagcggcgcgtttgctgacggaaatgaaaatcctgcataaaacgccggatattaatacgttgtatgacgcgaagtatgtgactcagccatga

SEQ ID NO: 129118 - DNA, 597 bp, Enterobacter cloacae
atgacgggctggcagcgtttttcccagaccaggctgccggtcagtcgctggcgtaatggcggcggcgaaacccgcgaaattatcagctggccgccagggcaggcggattttgactggcgtgccagcattgccactgtcgcgcaggatggcccgttttccgctttccccggcattgcgcgttccatcacgctgttgagtggcgagggcatgcaactgactgacggcatcggggtgaatcatgtgctgaataccgtgggagaacccttcgagtttagcggggatcttgcactccacgcacatcttctggggggcgagacgatggattttaacctgatgacccggcgtactgtctgtttgcccggcgttgtcgccctcaggggaagtggcacggtgtcccgtgagcagggcggtgtgcttttcgccattcagggtgactggcaattaccggatgggacccggctgggcgcgggtgaaggtatctggtggccaccgacgtcagacagctgtcagacgacacagtggccgatttctgccttgcatactgtggatgcacaaaaaacgcgcagtctgctactttgggcggcggtcattgcctga

SEQ ID NO: 129119 - DNA, 1374 bp, Enterobacter cloacae
atgcctgcttattttgctacacaagccctgcttgctgaaggatgggctcacaatgtgcgtctggatgtcgatgctgccggcatgttaaccgccatcacgccggacagcacagcacaggatgctgtccggctttcaggtccggtgatcccgggtatgccgaatttacactctcatgcattccagcgggtgatggccgggctggcggaggtggccggaaacccgcaggacagtttctggacctggcgtgacctgatgtatcgcacggtgcagcgattaacgccggaccaggtcggtattatcgcccgccagttgtatatcgagatgctcaaagggggttatacccaggtcgctgagttccactatctgcacaatgatatcagcggtaacccctatgctgaccgcggcgagatgaccgcccaattaagcgccgctgccgaccttgcgggaatcggcctgacgctgttgcccgtgctctacagctatgccgggtttggcgggcaaccggctcaggcgggtcaggtgcggtttattcaggacgctgacacctatttgcgccagcaggcgattatccgccagcagataacgggcaaagtactgcaaaaccagggcctgtgttttcactcactacgggccgtgacccccacgcagatgcagcaggttttacaggccagcgacccggcattgcctgtacatatccatatcgccgagcagcaaaaagaagtcaatgactgcctgagctggagcggacaacgccccattgcgtggctgtatgatcacctggatatcgatgcccgctggtgtcttgtccacgcgacacatgcggatgagaaagaagtggcccgcatggcgcaaagcggtgcggttgccgggctgtgccccacaacagaagcgaatctgggcgacggtattttccccggcgtcgattatttggcacagcgcggtcactggggtattggttccgacagccatgtttcacttaatgtggtggaagagctgcgctggttcgaatatgggcagcgcttacgtgatcagcgccgcaaccgcctgacaacggcgacccaaaatgtggtgggcgatgtgttgtacacccaggcgcttgccggtggtgcgcaggcctgtggcgcgcctgtcgggagattgtcagtggggtatcgcgccgactggctggtgctggatggacaggatccttacctggcggcagcccgcccccctgaaattctcaaccgctggttatttgccggccacgccgggcagattcgcgatgtgtatgttggcgggaccccccgcattatcaatgggcaacatgcgcagcaacaggccgttgccgctgattttctgcaggtactgcgccaactggcggaggcgacagcatga

SEQ ID NO: 129120 - DNA, 801 bp, Enterobacter cloacae
atgtctgagcccacccttttttcatcggccggtacggcgcaacaagacgtgacccggcagacactatctgagctggccgccgccatgagcgatgcaccggcgcccatttatcagcgggtgaaacaggccatcattggccagattcgcgccggcgtctggaaaccccaccaacgtattccatcggaaagtgagctggttaatgaaattggcgtcagccgtatgaccatcaaccgggcgctgcgcgaactgaccagcgaaggttttttaatccgcatgcagggcgtggggacgtttgtcgccgaagcaaaagcctatacaccgatgcttgaggtccataatattgctgatgaaatcgcccaacgtggtcatcgtcatgacagtaaaattttagtgtgcgaggcccgccaggcggacgccgatcaagcgctccagttggggattgccatcggtgatacgctgttttactcccaaattgtgcattacgaaaataacgttccggtacaaattgaagaccgttttgttaacccggaaacggcgccggattacctccggcaggtgctcaataaacagacgccatatacctatctgatggatattgccccgctgaccgcaggggagcaccgcgttgaagccatcagcgccagcgatgaacaacgccacttgctgcaacttgaggagcatgagccctgcctgttgattcaccggcgaacctggagcggcagccgcgttgtgacgtccgcccgcctgatttacccgggttcgcgttatcagttatttggccgttttaccagtcacggctaa

SEQ ID NO: 129121 - DNA, 1263 bp, Enterobacter cloacae
atgtccttagcctcgtccctttgccttactgtcactcccccggcgcactgtgacagtgtctggcgcggcgccacgctggtcaccatgcaggatggccgttacaacgtgatagaaaacggcgcattggcagtgacggagggaaaaattgtctggcttggccgtaatgccgactgcccggcgtttccccatgcacaacagcatgtattcgacggcgggataattaccccgggatttatcgattgtcatactcatctggtgttcggcgggaaccgcagcgccgaatttgagcagcggttaaatggcgtaagctatgcagaaatcgccgcggcgggcggtggtattttatccactgtaaacgccacccgggacgccacggaagaggaactgctccggcaggctttattgcgtttgcaaccgctgctggccgagggggtcacctgccttgaaattaagtcaggctacgggctgaccctggacagtgaattaaaaatgttgcgggttatccgcaaattagccactctgttgcctgtcgatattcagtccacctgtcttgccgcccatgccctgccgcccgagtacaaagaccgggcggaggactatatcgactttatttgcgataccctgctgcccattgtcgccagagaaaaactggcggatgccgttgacgcattctgtgagcaccttgcgttctccccagcacaagtcgagcgcatttttgatgctgcacaggctttggggttgccggttaaattgcatgcggaacaactctctgccctgcatggcagttcactggcggcaaactatcacgccttgtcggcggatcaccttgaatacgccacccaggaagatgctcacgccatggcggccagcggcactgtcgccgtcctgctgcccggcgcatggtatttactgcgtgaaaaacagcacccgcccgtgaattttttccgccagtatcaggtgccgatggccctggcgagtgatgccaacccggggacatccccggtgctgtcattgcgcctgatgctgaatatgggctgtacactgtttggtctgacgccggaggaagcgctggccgggattacgtgccacggcgcgcgcgccctcggtctggccgcgtctcacggtacgcttgccgaaggtaaggttgccgattttatccactggccgctgtcgcgaccggctgaactgatctactggctgggcggtcaattgccctgcacggtggtctatcgcgggaaaatacgaggaaacgttcatccatga

SEQ ID NO: 129122 - DNA, 825 bp, Enterobacter cloacae
atgagcctttcagctatgactgacattatcgatccttaccatttcacggctggcagtgcaccgttgcttatcagtattccccacgcgggaacacaactgacgccggaggtcgacaatggtctgagcgatgccgcacgcccgcttggcgataccgactggcatattccccgcctgtacgattttgctcacgccctcggcgccagtatgctggtcgggaattattcccgttttgttatcgacctgaatcgccctgctgacgatacgccgctctataccaccgccaccacaggattgtacccggagactttatttgatggtcgggacagctttacgcccggcatgacgccgacagccgcccatcgtcggcactatctggcgcaaatctggcacccttaccaccagcgtatccagtcagagctggcgcggataaaacaccagtttggttatgcactgctgtttgacgcgcattctattgcatcggttatcccgcgtctgtttgatggtcggttgcctgatttgaacctcggtaccaacggcggcgccagttgcgctgcagccctgagcgaccgtctggtcgattgctgtcagaaacagtcgccattcagccatgtgcttaatggccggtttaagggcggctatattacccgggcatacggacagcctgacgcgaatattcatgccgtgcaacttgaactggcgcaggtcaattatatgaacgaaatggcgccttatgcgtatgcagaggaaaaggcccctcaacttcaggcgctgctgcgatccttacttgagaatatgctcgactgggcagatagccactatcaataa

SEQ ID NO: 129123 - DNA, 678 bp, Enterobacter cloacae
atgcaaaacaggctggacaataaacagcaggccattattccaattgcggctttcgccgcaaagggcgacacagaaaaactcgctgctgaaatacagcacgggctggatacaggccttaccatcaatgaaatcaaagaagtcctgattcagctctatgcctatgccggttttcctcgcagcctgaatgcccttggcgtgcttatgggcgtggtggaacagcgccagcagcaaggaattacggataatgcgggagaagacgcatcctcttttcctgagaactggaatgcccttgaaggtggcacgcaaaaccagacgcgtcttatcgggaaacccgtaacaggcccgctatttacctttgcgcctgcaattgaccagttccttaaaacgcacctgtttggtgatattttccagcgtgacaccctgagctggcagacgagggagctggccaccatttcgtttctggctgcaattcccggtgtcaccagccaactgaaaagccattatgccatcagtctgaatgcgggattgacggctgagcagctgtgggcatttacggcaattctgggtcaaaaatgcggtgctgatatggcagacaacgccaggcccgtgctgggtgagctgctggatgaaacaaaaacgccccggcacggtggcttatccacaccgtggctttgttga

SEQ ID NO: 129124 - DNA, 675 bp, Enterobacter cloacae
atgtgcggacgtttttctcagtcattgacgcgggaagagtatctttctctcctcgccaatgaagccgatcgaaatattgcctacgacccggaacccatcggtcgctataacgtcgccccgggtaccagggtgttacttctgagcgaacgcgacgaacagctgcagctcgatccggttcactggggttacgcgccagggtggtgggataaaccgccattgattaatgcccgggttgagaccgcagccagcagcaggatgtttaaacctctttggcagcacggtcgggcgatctgctttgctgatggctggtttgaatggaagcgtgaaggagacaagaagcagccctatttcatccaccgtaaagatgcccagccaatcctcatggccgcgatcggaagcactccgtttgagcgtggtgatgaggcggaagggtttctgattgtcacggccgcggctgataaaggtctcgttgatatccatgatcggcgcccgcttgtcctggtaccggacgccgcccgggagtggatgaaacaggacgtttcgggtaaggaagctgaagaaattgctgctgatggagctgtgtccgctgatcatttcatatggcatcctgtaacgcgcgctgttggtaatgttaagaatcagggaccagagctcatcgagcctgttggcttatga

SEQ ID NO: 129125 - DNA, 183 bp, Enterobacter cloacae
atgttatatgggcacagtggccagtcgcgtgtagttgttcccgcgcgacagcagcatgcgctcctgcacacggcgctcaacctcacgcttcagcgcttctttatcgcccctgaagcggccggtggcgtattcgcgggtcagttgctgacgcacgcgcgtctcgatgtcatgacgctgccgtga

SEQ ID NO: 129126 - DNA, 1545 bp, Enterobacter cloacae
atgaatgaagacaagattttgcgcgttgcgcttgactgggctgtggacgaggtcgatccgccccgatcattcgggggttggaatacaggccgcgtggttcatcaaacacatgaaagcctgtttgaagatgacttcggagagttacccgcttcggacggcgcgcccaccagcctcgttccgcgactagcgacccattgcataacgtcaccagacgcccgtcgttatacttttcgaatcagagaaggggttcgttttcatgatgggtgtccactcgacgcggaggctgtagttatcaactacgagagaatgtgttgcgcaacctcgccctttttctctccggttgttgcggacttcaatcgcatgggcgttggcctcattgaaaaagttcgcgctttagactcgatgaccgtagagttcaagttttccgagccgtttcctgaatttctgcgttacatgacccaagaagacgcacccggtgctcagtcgctgattagtccggcggccattcgcaaactcggtcctgatggttgtgccgacaaagctcctggtaccggtgcgttccggtttcattctcgttttgagacggatggagggtctgcggtagagctgcggcggaacgatgactactgggccggcccgccacagatagaagggatccggttcctaccttttcctgaccgcaaggctcgcgtccgggcattggttgaggggaaggtggatgtcgcctatagcttagagggcgctgaccttgaggaactggcggcgctagggttcaccgtgccctcatttaacccaccatatctctggtatctggtatttaacttgcacgatccgcttatcgcagatttgcgcgttcggcaggcaattgcgtacgctattgatagagagtcattatgcgctgagttatttccgggggcggctgttccggcgcatagtgcgctatctccaggctcccctgctcatgacccgcatgcagcaaatcgctatgtctacaatcccgagcgggcaagggagctcttggccgaggcaggggcaaacgatggcttggttttggatgtcattgcggcgcaagcggggtctgcgcagctcgatccaggggccatttatcagcggctcgcgctcgatctagccaaggttggtattcgcttaaatgtaacgctgcatccggattgggtagcttactgcaaccagtggcgtgagggggcgccgtctggtattgcatttagtgaaatgagctgggggatgtcgtgcgatctatggctatcacagatcctacatggggcaaatcagtctccccgaggtttcaacgctgggtataacaatgaccctcatctcgacggattcttggatctcgctcgtgctacgattgactcgtcgggaagagccgcgctatacagggcagctgatgcaagggtcatggaatcactcccgattcttcccctgttcacgtcccgtcgaggtatgatcgcgttttcgcccagggtgaaggggctcaccgtcgtaaaccagtgttggcaagacttccgaaaagttaggctcgaatga

SEQ ID NO: 129127 - DNA, 765 bp, Enterobacter cloacae
atggtgtgggggctgcacacgagcaccatcaccccgtcgctaattctgacgatgcttgaaggcaacctagccgtgcgcgctggcccattgttgtcccttatgcaacttgccgactccgcgctgccgataggcaggcacgcccatgcgttcggccttgagcgaatgcttcgggataagcgcgtgaccacgccagacgcgctccgtgaaatgatcgtctcggccttgattcatggcagcgcccgcgcagacggtgcggggaccgcgttggctcatacggcatttgtggatcggaacttagaggatctgaaagcagtagatgcgcggcttgacctactgaagttgacggctccagcacaggtggcctcacgtcgctgtggaagtcgcctagcggtgttagcaccgtcacttcatgcagacccgatgttggcggaatacgctaccgcggtggcgggcaaggttacgccgggtcatctagcggtcatatcaggagccctggcggcggcaatgggggttagccgtgagaatgctgtgctagctgagctgagaggtgtggctacgatgattctttcggcagccgttcgcctggatgtgctttcggccacggcggcccaaggaatgatggtagctctttccacgcaaattatcgcagcggcagagatcgcgcttgtaactcgcccggatgagatggaaggtggcgccgctgtggggctagacatagcaactatgcgccacgctcgtgagcacggtcggctatttgcaacttga

SEQ ID NO: 129128 - DNA, 513 bp, Enterobacter cloacae
atgcttttagtaaataatattctgggccacgtcaacgaccaggatttttccggtcgtcagacggaccgtgtatggattgcgtcggccgacgcgggtcgccgccggttacgcacttgcagcgaggggggcgtagatctaggcatcgagctgccccgtgtgagctggatgtttgacggcgcagttctgcatgatgatgggatgtgtatattggtcgtctcccgccgccccgaactggtaatggtaatctcgctcaacgagctgggccctgaggcggtgttccggattggccacgctcttgggaaccgtcacagtcctgcggagctacacggtaatgagatccttgtaccggtgaccgatacgcctgatcttgttgcgagatcggtccaggccctcggattgcgtgagctaacgatacgctttgaagaaagaccttttgcggctgcaagacctccaaatggtgtgggggctgcacacgagcaccatcaccccgtcgctaattctgacgatgcttga

SEQ ID NO: 129129 - DNA, 816 bp, Enterobacter cloacae
atgggcgacggagtgctgtcgttgcgctttgctcgtgatcgacatggtcgaacgcgacttgctgcacgacaacagcgctacccgttgacgactaccgccgttttgcccatggagtcagaatctggtgcgctaatatacgtgcaaaacgcggcaggatcagtgtttggcggtgatcgcctgcatgttgccgtacaccttgaggctagcgctgaactttgtctctcaacaccgtccgcaacacgcctgcaaggtgaagcgctatcgatacagacgaccatgatcgagctgagcgaaggagccttcttcgagtacatcccggatatgataatcccgcatgcgcaagcggaacacaggcagcacacatgtattgcactggcaaacggagccgaggccattttcatggagagtttcgcggctggccgggtggcgagaggcgaggagcacctttatcgaagcttctcgacgcgccttcaagtcagttttagcgcacgccctgtgcttgttgacgcttcgagtttccgtcctggggaggcgagtccggccttagagggggcgttagcgtcgagtggttttgttgggaccatattcgcgttgtcccaacagggcgaccatgaggaattggcgactcttatcagtcgacggttggcgtccttaccgggtgtgtatggtggtgcagctgcgttagcctcaggctatggtgcggtgggacgttttctagctgacgatgcgccaaatcttcggatggcgacgcaggtggcttgggatgtcgcccgtcgccacatgcgcggccgtcccgctccactactaagaaaatga

SEQ ID NO: 129130 - DNA, 612 bp, Enterobacter cloacae
ttgactgcagtgcgtttaggtttcggagggccggtaggcagtggcaagacgcgcctggtcgagcgattgctccccttgttcgccgcgcgaggaatctctgtcgccgtgatcactaatgatctggttactcacgaggacgcagaacgtgttcagcgctccggcctcatcgatcctgagcgtgttcttggggttgaaagcggggcttgcccgcatactgctatccgcgaggacccttcggtaaatcttgaggcagcagcttggctggagcagcgctttcagcctgacgtgattctcatcgaaagcgggggagataatctagccgctacattttctagcgagctcgtggactggtgggctttcgtcattgatgttgccggcggagacgacattcctcggaagaatgggttaggcctgttaagggcagacctgctagtcgtcaataagattgatttggcacctcatgtcgatgtcgatatgacgcgcttcagagcggacgtagccgcagcacgttccgatcgcgcttcagtatttaccgatctgcgaaaaggcgagggtgtgcagctcgtttttgaacaaattgtccatagcgcgctgtttgggcggaaaccctga

SEQ ID NO: 129131 - DNA, 1716 bp, Enterobacter cloacae
atggctcagtctattgagcgctctagatatgtatcactgtacggtcctacggaaggagactgcgtacggctaggcgacactggcctttgggcgaaggtggagcgcgatttctgtgtagggggcgatgagttagtctttggcgcgggcaagacggtacgagggggcaccggttgtgacggtgtgctgaccgctgccgacggcattttggacctgatcataaccaacgctctgatcatcgacgccgttgcgggcatcatcaaggccgacatcggcattaagaatggccggatcgtaggaatcggcaaggctggcgaccccaatcttatggatggcgtaacgccagggctcacggtgggcgtgaacacggatatccgggccgcggaaggacatatcgttacggcgggcggaatcgactgccacgtgcattttattgatccgggacaggtggatgaagctctttcggcggggttcaccacgctgatgggaggagggctcggacccactacggttcccattgcgtcgacaggcacaactaacctggggctaatgctccaagcagctgaggcctttccgataaacttcggtttcattgcaaaagcggcctcgcatgccgtcgagccactgctcgaacagcttgctgcaggcgcagcgggtttgaaaatccatgaggattggggcgcgactccggccatcatcgatgccgccttgaaggccgcggagatcggcggtgggcagatccacttgcacgcagacactctgaacgaatcaggatttgtagagcacactctgcgcgccatggccggacggtgcattcacgcctatcacgtcgagggcgccgggggtgggcacgcgccagacatcatccgcatgtgcggcatatcgaatgtactgccctcatctacgaaccctacgaatccattcaccatcaacacgtttgatgaacatttcgacatggcgatgacgagccatcatctcaatccacgtttgcctgaggacgtggcgtttgcggaaagtcggattcgaaaagaaaccattggcgccgaagacgttctgcacgacatgggagcgatcagcgcgatcggttccgacagccaggggatggggcgcatcggtgaaaccatcgctcgctgttggcagcttgctgacaccatgcgcgagttacggggcgctttgcccgaggatagcggcagcggtgcggacaatttccgaattcgtcgctatatcgccaaatatactaccaatcctgcccttatgttcggcatcgcagatgaagtgggctcgattgagcctggaaagctcgcagaccttattttttggaagccggacagctttggcatcaaaccggaactagtattgaaatctggcttccctgtctgggctcccttgggcgaggctaacgcttctcttatgacctgcgaacctgtgcgttatcgcccgatgtgggggtactttggtcgcgctccgcagtcactcggcgtgcgttttgtctctccatctgccatcgcagccggggtggcccaacgactcgatttgaaagctaccttgcgtccagtggccgacacgcgccgtctcactaaacgcgatatggtgctgaatgatgtgttacctaaaattgacgtcgaccctgaaaactttcgggtttacatcgatggacaggccatcgacagccctcccacatcgcaggtctctctcggccaatcatatatgttgaaataa

SEQ ID NO: 129132 - DNA, 693 bp, Enterobacter cloacae
atgatgcgtttactgccccgtgaggtggatcgacttcttttgcgccaggctgctgaactggcgcgatcgcgccaggcgcgcggccttttactcagcgagcccgaggcacgcgcgattattgcggataccgtctgcgaaggtgcgcgcggaggaggtacggttaccgagatggtctcgatcgcgtccgggctgttgactgaagacgacgtgatggaaggggtatcagagcgcctcgatgcagtcatggtcgagggtttcttcccggacggtcaaaagctggtttgcatacacgaccccatcggcccaggcaaatccactgtcgctggcgcgcctcaccggccccgctggcgcctgggtgagcagccggtgataatcaatacggatcggccaacggtgaccttgcgtgtccaaagcaccgcggaccggcccattcagcttggatcgcactatcacttcttcgaggtcaatccagccctgcgcttcgatcgtgccgccgcctacgggttccggctcgacgtcccagctgcaaccacggtgcgcttcgagccgggagacacccgcctggttgacttggtggctattgggggagcccgagttgtatatggtctggcaggcctagtgaacggggccttggatgacccaacagtgcgctctgccgcgatgatccggttggaaagttttttacaggagtag

SEQ ID NO: 129133 - DNA, 708 bp, Enterobacter cloacae
atgaaccaagagcttctgagcgtcgaggggctcaccagtggttacggcacagctgctgtactgcgaaacatttcactgagcgtttccaagggcgagatagtcgttgtgctaggaaagaacggtatgggtaagtccaccctgctgaaaacaatcatgggcttcgtaagtccgttcagcggtactgtctcgctggacggggatgatgttacgaacatccgaccgcacatgatggcacgctccggtgtggctcataccccccaagagcacacgctttttcccgatctgacggtcgaagagaatctccggctgggcgtagcttcgaaccggcttttccacgagcgcctgccttctctcgaaacccttttcccccgaatgctcgagcgcctaaaacagcgggccggaacgttgtctgggggcgagcaaaagatgctgttgatgtcgcgtggcctaatcgcccagccaaagttgatgcttattgacgaagtcagtgaagggttgcagcctgcgatggtcgaccgcatgggcgaggtccttatccgagcacgggatgagctgggcattgcggtcttgcttgtggagcagaacctcgactttgcgctgtcggtcgctaatcgctttatggtgctcaagctcggcgagattgtagaacaaggggacgttgaggatgttgtctcgacccaaactctctcgaatcacctggccgtttga

SEQ ID NO: 129134 - DNA, 1794 bp, Enterobacter cloacae
gtgcctgataatcgcctttctatgtcttacacacatcgtgctgcattgattgggtgcctttcaggcttggccattatcgctgtagcgccgctcttcctcgatgtctatctaacaaatattttgatccgtacattgtttgttgcggcagtggtgatgactgtcgacatactttgggggtatacgggtgttctaacattcggtcagtcggccttttttggcattggagcttatgcctgcgggctgatcttcacccattacggattcggccctggatgggcacttgccgcgctagctgttgcgcttggcacggctgcaatcgttgctgctgctgttggatggctggctttctttcatggttcatcgcctctgtattcttccataataacgctagcattgcccattgtgctgacccagataatatattcaggaggcagctttacgggatcatcgagcgggctttcaggattcccaacatattactgggacttgaaagtttggttctggattgcagggggctttttggtgctcacgactacggccggctggcttttggtgcgtagcgattttggtagggtcctcatagccatacgtgagaacgaagagcgtagcgcctatctgggtatccccgtctctcgcatcaagactatgttgatggtattcgccggcatggtggcgtctgtagcgggcttcggctatgcggctttctccaatgttgttgctcccgaaatggcaggatttcagctgggcacggagctacttatttggaccgcacttggcgggagggccacgttactggggccggtcttcgcggcgatcgggatcgatacaatctcctcatggctatccggcgctatgccttttgtctggaagcttttgacaggcgtcgcttttgttttggtcattgtgctcctgccccgagggctggcgccgttgataggcgcattatggcgtaagctaaggcccaagcatgtcccgaaaactcacgctatcaggcttaacccggcgccagcgggccggatgctgcaagcatctttcggagatgcgccgcccctatgcctgagccaagtatctcgtcgttatgggagcttacaggtcctgcgtgatgtgaacttggatgcgcacggcactgagctgctaggaattattggacccaacggggctggtaagacgacattgatgcgttgcattagtgatggcaacgagcgcaccggcggtgctgttcgagtcaacaacgtcgaaatagcgcggggatcgccccaagatatcgttggacttggggtgggacgcagtttccagaatacaaatctattcgacactctaaccgtcggtgaatgcctccagttggctcgttatcgaatcgatggtgcaaagttgttcgacaggcgcgaaaccgtttcgcttccccagccagcgctagacattctgaagaccacgggcctcgataagatgctagcggaggagacgcgcaacttatcgcacggaatgaagcggggactggaattggcgatggtgctggcaactgagccgtcagtactcctacttgacgagccgactgcaggcttgacccggcctgaacgcatggccatcggcgcggtgctcacgcgcctgacgcaggaattcggcttgtgcattatgcttatagagcatgatctcgacttcgtgcgtgctatctgcaatcgagtggtcgttttgcatcaaggtgcgatcttgatggaagggactgttgaagaggtagtggcgtcggacttggttaaagctgcctatacaggcctacaaaaggaggcggtagcatga

SEQ ID NO: 129135 - DNA, 837 bp, Enterobacter cloacae
gtggaggctttaccgcttgacattttgacgactgccgcaattttgttcgtggtttcgacgggcctcatgatcatcctcggtgtaatgaagctcatcaattttgctcatggagcatttttgaccactggcggatacatagcttatcttgtcggcgctgctggcctcaacccatggctcgctgtcccggcggcggccatcttggggctcttggcggggctcgtgattgaacgaactattatcagaccgctttatcatcggccgttggatgcgatattggccacatggggactaggcattgttatcgggcaagtatttgcattgactttcgggcggggcgtgcagttcgcgccctcaccgattctaggtacgatagatgtttttggaagtgaatactctggatatcggctggccatgctagctattgccatagtgttggcagttgcgcttagtgctttgttgagcttcacccgcttcggattgaatgcacgtgcagtcattgccaatgaaccgctggctaggggcttaggtatagatagcgcgaatgttcgatccataactttcggcttgggtgcaggactagcgtgcgcagccggagcgttaatcaccccattgctctcggtcgatccaaacatgggactgccttggttggtgaatagctttatgctagtgatgatttcgggcgtttcgtttccgagcttgttggtcgcttcgctgctacttggagggtcgcaggtccttgtcagcacttacattagtcccattctcggcggcatgactatcgttgttcttgctgcactgattctgcgtttaaagccgaaggggtttagccgtgcctga

SEQ ID NO: 129136 - DNA, 1155 bp, Enterobacter cloacae
atgaaagtacgtacacttttacttggtatcggtctctcggtgggagcttcagcatatgcagccgaacctataaaaataggtataccagtaggtctaagcggcgcaaacagtgtcgttgcaccttcggtcgtccaagcctcggagttagctgtcgaggagataaattcgcaagggggagtcttggggcgtcagctgcggcttgaaattgctgatgacggatcaggagctcaaggcgctcagcgcgcctatgacagtctcgtttttcaacggaaagttgacggcattgtagcaatggaaactacggctgccagaaatgccggcttaccaatcgtcaatcgcggcagggtccccctcatctacacatcattttacgaagggcgctcatgctctcctatgatgtacatcaatgcctgggtgccagagcagcaggtcgccccggttgtcgaccattttatggccgagaacaaggccaagaagtttttcctgattggcagcgattatgcctttggtcgcggcatgctgcagtacactcgagagtacgtcgagagtaaaggaggcagtgtggtgggcgaggcgtacttgcccatggatggatcagattggaccgcaatcatttctcaactacgttcggccaatccggacgccttgattacgtcaacggccggcggcgcgccaaacgtgacgctcaccaggcagctgcgcgctgcaggtatctcgatcccctatggtaactacgccctcgatgaaggcacagccaaaagcatgggtgataacgccgaggggatatacatcgtcgcatcttacctctcaagcctagagaccgatgcgaataaagccttccttgaagcgatcgagaagaagttcggaagcagcgccgagacgccgaacgagttgtcggtgccgcagtacgaagccatatatgcgtacgcggcggctgtcgaaaaggccggctcgactgattctactgctgttatacaagcgctaggggaagtgactgtggaagggccccgcggctccgtcatcatgaataagcaacatcatgcgtcgctcaatatgtatttgggccgcgtcgctgctgatggttcagttcagctcgtcaaatcgttcccaaaagttgacccgggcgaacagtgtccgcaattcgctaacaagtaa

SEQ ID NO: 129137 - DNA, 915 bp, Enterobacter cloacae
atgcttagtccccttggtcactctggtcccgaccagagcccacaaaagttgaaaattgcctgcatccagtttgaaccaaagtttggcgaggtcgagcacaacgtcacacgcagcatcgacctgattgagcaggctgccggctacggcgctcgcttgatagttttgccagagttatgcagcaccggctatatctttcagtcgcgggaagaaactctcgcattatccgagcgtgtgcctgaagggcctactactaatgcctgggtcgaagcagctcgccggctagaagtgacaatcgttgccgggctagtagagcgcgacggaaattgtctctataacagcgcagttatcatcgacccttcaggcgtgctaggggtttaccgcaagcttcacctatgggcagatgagaagctctatttcaagccgggcgatcgtggtctacccgtgttcgatactctagtgggccggatcagtgtcgttatttgctacgacggttggttccctgagatgtttcgtctgtcggcctgccaaggtgcagagatagtatgtgtgccaaccaactgggtgcccatgccagagcaaccggcaggccacccaataatggcaaacattcttcatatggccgcggctcacagtaattcgatagtcattgcatgcgctgacagggtgggcattgagcgtgggcaacgattcttagggaatagcgtaatcatcaatcgttcaggctggcctgtagccgggccgtgctctgaaagtgaagaaaagatcctcatcggggaagtggatatggaccctaggtgcgaacccagctggaacagtgtcaatcacccgctaacagatagacgaacagatgtatacggcgagaatttaggcgcagatatccagattaacctggcaaagttagaggcagagcgatga

SEQ ID NO: 129138 - DNA, 816 bp, Enterobacter cloacae; identical to SEQ ID NO: 118473

SEQ ID NO: 129139 - DNA, 720 bp, Enterobacter cloacae
atgagtcaaattatcagccagagtaacgcgctggccgagcatatttaccaaaagttgaagcaggagatctttgatttttatctattgccccatgaccgttttaccgagacgcagatagccgaacgcttcgaggtttcgcgtactccggtgcgcgatgcgctataccggctacagcgagagggctatctggacgtggcttttcgccgcggctggacggtacgcccgctggattttagtcgtatagataacctttacgatcttcgcgtggtgcttgagagcgcggcagtggatcgcatctgcgctcgggctgacacgcctgcgaagctgactgcgcttggccgaatttggcttgtggccgaagcagagcgcgagtcggcgccgtcggtggtgtcggagatggatgaaaatttccatatcgacttagtcgcgtcctccggtaatctggaaatgctgcgggtgcaccgggaggtgacagagcatatccgtattgtccgccggctggatttttttaaaagtgcccgagtggatcatacctatgatgagcattgccgcatcctcaatgcgctgttccgtcgcaagcgcgacgacgcgttgctaatgctgcgcgcccatatcgaacagagcaaaatcgaggtacgtaaaattagcctgtccatgttggcggatgcgcggcagcgccatcagcagccgacggctggaacagatagcaacgatggttaa

SEQ ID NO: 129140 - DNA, 669 bp, Enterobacter cloacae
atgataagggtagcggcaacaccagacgctttttgttttatggcggcgcattgtgcgctggtaattatcgatatgcagcgcgactttatcgagccaggcgggtttggaagcgcgctcggcaacaacgtcgccccgctgcgggagattatacctgcggtggagcgattactgttactggcgcggcggcatgccatacaggtaattcatactcgcgagtctcacctgccggatctctctgactgtccgccagcaaaatatgagcatggacggccggggctgcgcatcggcgatgcgggaccgatgggacgcatcctgattcgcggcgagccgggtaatcagattattgaccagctagcgccgctgacgggggagtggacagtagataaacccggcaaaggcatgtttttcgccaccgggctagatgcgcggctgcgacacaacggcataagccatttgctatttgccggtgtgaccaccgaagtttgcgtacaaaccagcatgcgtgaagcttgcgaccgcggctatcgctgcctgctgatagaggatgctacagaaagctatttcccagcattcaaacaggcgacgctggcgatgattgtcgcccagggcggcatcgttgggcgtacagcatcactggccgcgctggaatcagccctgaatacccagtag

SEQ ID NO: 129141 - DNA, 1545 bp, Enterobacter cloacae
atgatgatgcgcgcgcttagtctggagaccgtcggcgccggtaaacagttcggcgccttccgcgccctggatgacgtgtcgctaagagtacgcgccggaaccgtgcatgccctgctgggggagaacggcgccggtaaaagtacgctggtaaaaggcatcgtcggttacgatcctctcgacacaggcacgttattggtcaacggccgcgagcaggagatgcgtacgccgcgcgattcccatggactgggcataggcatggtatatcagcattttaccgttgcgcctgggctgagcgtagcggagaatctggtactgtcccgtgacgatctaccctggcgtattaattggaaacaagagcgcgagcggctgacggaatttatggcgcgcatgccgtttcgcctggatatttcacggccggtaagtcatctggccgccggtgaaaagcagaagctggagattttaaagcagctctatctcgatcgccattttattatccttgacgaacctacctcggtattgacgccacaggaggcggacgaggtattggggctgatgcgcgatatggcccatcgcggcgaagtatcggtactgatgatcacccacaaattccgtgaggtgagcgcctatgccgatgatgtgacggtgctgcgcaagggccgcctagtgggcagtacagctgtggcgcagacctcaacggaacagctggcgctatggatgatggggcaggcggatacccgcgcttttaaccgcgatagaccagcggtaaacgaggcgctggcaccacggctggaactgcgggatctgagcattaccggcgacaaaggcacgctggcggtttccggtctgtcgctggctgtacggccgggggagattgtcggcatcgctggagtttccggcaatggccagcgagagctgaccgaggcactgcttggccagcgccgtattcgcagcggcgaaatccgcgtcaatggtaaacgctatcttgccagccggcggcagatgcagcgtgaaagggtctttagcctgccggaagaaccgctgcgcaacgcctgtatcgccggcatgagtgtggcggataatctagcgctacgcaactatgatcggcccccgctatgccgccagggctggttcatcgatcgtcgagccatccatcggcatgcgcgagagctgatcggccgatttcaggtgcgtccagcagatccgggacggcctattggaaccctgtccggcggtaatgtccaacgggcggtactggcccgggaactaactgaagacgtttcggtgctagtggtctccaatccggttttcgggctggatttttcttcggtggcgcttatccaccagcgtatcgttgaagcacgcaaccagggggcggcagtgctactgctaagcgaggacctggatgagctgctggcgctgtccgatcggattatggtaattcacgctgggcatatcaactatgctgtagacgcggcggcgatagaggatcgcggcgagctaggacactatatggcagggggaacacagcgcgggagcagcatatga

SEQ ID NO: 129142 - DNA, 690 bp, Enterobacter cloacae
atgaacgaacgttaccttgcctccgacccctatccctggccctatgatggtcagctgacgacttcaaataccgctttggtcattatcgatatgcagaccgacttctgcggcacgggcgggtatgtagacagtatgggttacgatttatcactgacccgtgcccccatcgcgccgattaaacgggtactggcgcggatgcgggagaaaggttttcccattatccatacccgtgaaggtcaccgtccagatctgtccgatctgccagacaataagcgttggcgctcccagcgtctgggtgccggcattggtgatgtcggcacctgtggacgtattttggtacgcggcgagccgggttgggaaatcatcccggaactggcgccgctgccgggagaagtgatcattgataaacccggcaaaggctctttctacgccaccgatctggagcttattctgcgtacccgcggcatcactcacctgattttgaccggcatcactaccgatgtctgtgtacataccaccctgcgcgaagccaacgatcgtggctttgagtgcctgatacttgaggactgctgcggtgccaccgactatcagaaccatctggcggcgctgagcatggtcaagatgcagggtggggtatttggcgcggtggctagcgctgctatgttactcgatgcgctaggcggtgaatga

SEQ ID NO: 129143 - DNA, 1005 bp, Enterobacter cloacae
atgtctagcggacttggtggtttaaataaatcccctcatggggtagtcatcggcctggcgcagttggcgctgcctgatccccacagtagggaagccttgtggcagcagacgcaaagcgtcgtagcaatggtaggcaaggcacgccgaagcatgcccacgatggatctcattgtgtttcccgagtattcgttgcagggcctatcaatggatacctcccctgaggtcatgtgtagtctcgatgggcccgaggtggccgcgctgcgcgcagcctgcgtcgaacaccgcatatggggctgcttttcgattatggaggccaatcctcatggcaatccttacaatagcggtattatcgtcgatgatactggagaaatccgtctctactaccgcaagatgcatccttgggtacccgttgagccatgggagccgggcgacggcggtattccggtatgcgacgggccgcgcggctgcaagttggcgctgattatctgccatgatggcatgtttccggaaatggcgcgtgaatgtgcctataaaggcgcggagattatgatccgtaccgccggctataccgcgccgatccgccacgcttggcagatcaccaatcaagccaacgcttttaccaacttgatgcaaaccgccagcgtttgcatgtgcggctcggacggcacctttgactctatgggtgaggcgatgtttgtggactttgacggtacgctcatggccagcggcggtggtcgtgccgatgagatcgtctgctgcgaaatgcgcccggatctggtgcgcgaggcccgacgtcactggggcgtagaaaataacatctaccagttcggtcgccgcggttattcggcggtacggggcggggcgcgcgactgtccctatagctatatgcacgatctgaccgcaggatgctaccgtctgccctgggaggacgaagtggttcataccgacggtacatcttgcggactgccagcgccgcagcgcgactaccttgctaaaaaggaataa

SEQ ID NO: 129144 - DNA, 921 bp, Enterobacter cloacae
atggctgatttgcatctcaccacctttttactggcgttgctggccggcgcggtgcgtgtcggtacgccttttctgtttgttagcctgggagagtgcctgaccgaaaagggtgggcgtattaacctcggtctggaagggatcctggtggtaggcgccatgaccggctacgcggtctcctatatgacaggttcgccgtggctgggcgtcctggccgccgccggcgccggactgctgctagggctgctgcatggcatggtttgttcgctgccgcgggttaacgatatcgccttcggtattgcgcttatcctgctcggcaccggcctggcgtttttcctcggcaaaccttttattcagccgcaggcgcctatgctgcctagcgtgccgctgggtagctggagcggcgatgagcgtgtgcgttcggcgctgaatatcaatgtgctgttcttcatcggtataggattggcgctggcgctgcattggggactgagcagtactcgctgggggttgatgcttcggctggtgggcgatcacgctgagtcggcccaggcaatgggctaccggccgctgcgagtgcgcattaccgccacggcgatcggcggctttcttgccggcgtcggcggcgcctatctgtcgctctactatcccggcagttggaatgaaggactctctagcggacaggggttaatggcagtggcgttagttattttcgcccgctggcgcccgcttaattgcctttgggcatcgctgctgttcggcgccgccggcgctattggcccggcgctacaggcggtgggcatcagcaccggctattacctatttgccgccgcgccttatgccctgactctgttggtgatgtttatcacctgccgccccgaccgaaccctgacaggcgcccccggcgaactctctctcacccgataa

SEQ ID NO: 129145 - DNA, 1107 bp, Enterobacter cloacae
atgaacgcgagattcctattgcccggcgcgacgcgagcagtactgccagctctgcccacggtgctggcagttgtcacctcaagcctgctgtttattctgttcctggcattacagggcaagcctgcgcttgaggccggccggctagtgttggaaggggccttcggttcgtcattcgcttgggagaataccctacagcgcgcggcaccgttgatgctcactgcgctatgtgtggcgctgccggcgcgggccgggctgattattatcggcggtgaaggggcattagtgctcggcgggctggcggcggcagtcaccccattgtggctgccggcctggccgccagtgcttatgctgatattcatggcactggcggccatggtgatgggtggggcgtggatcgggttaagcggctggatgcgccagcgccgaggcgtgaatgagaccattagcagcctactgctctcgtatattgccattgcgctgtttcgccaattggtggaggggcccctgcgcgatcctgccagcttaaacaaaccctctaccatgccgttggatgacacttataccatcggcaacattagcgatgcgttcgaagtgcactggggactggcggccggcgccatcgcctgtcttctggcctgggtactgttgcgctatagcgtggccggtttctcgctgggcgttgtggggggtaacgtgcgtaccgcgcgtatgattggcctgcctgtggaccggctgatgctgctgacctgcgtattaggaggcgccgccgccggtctggccggcatgttcgaggtagctgcggtgcaggggagtgccaatgatgctttgatcgccggctacggcacgggcggcattctggtggcctttgccgcccgtcaacacccgctgggtatcattctatgcgccacgttaatcgggggtatcgaggccagcggcagcctattacagcgtcgtttggacttgcccgacgccacaacgctgattcttgaagggttactctttactaacctgctcgcctgggaggcgctaaatgggcgtataacccgggggcgtatcgcactggcggcacagggcgcagcgcaaaaaggagagcctcggcatggctga

SEQ ID NO: 129146 - DNA, 1107 bp, Enterobacter cloacae
atgtccatagatcgtcgtgattttattaagctggccggtctgttcggcctaggttgcgccatgcccttcactatggcgcgcgccgcagataagccgctggtagtgggctttatctacgtcggtgcccgcgatgacttcggttataaccagtcacatgcccaagcggcggccattattaaaaagttgccgaatgtgaaggttatcgaagaagaaaacgtgccggaaacagtcgcggtgcagaagacaatggaggcaatgattcgtcaggacggtgcgcagctgattttcccgacctcattcggctatttcgacccccacgtcgtcaaaatggcaaaaaaataccccgatatccgctttgctcactgtggcggcctctggcaggagggtaaagatccgaaaaacgccggcagcttttttggttatatcgacgagggccagtatctcaatgggatagtagccggtcatatgagccaatctaaaaagcttggctttatcgccgctaagccagtaccgcaggtgttacgcaatttgaatgcgttcactctcggtgcgcgccgcgtagatccgacgattactgtgacagtgatttttaccggcgactggtcgctgccggtgaaagaagcggaggccgctaacagcttgatcgatcagggctgtgacgtcctgacctgccatgtggatagtccgaaggttctggtagagattgctgagaagcgcggcgccatgacttgcggttaccacgtcagccaagcagcactggcgcctaagggctatctgaccggcgctgagtggaactgggagacgccctaccgcgttcacgttgcggcggcgcaaaaaggcgaaccgatgatcaacttcatgcgcggcggtttgaaagaaggctttgttaagacctctccctatggcgccaaagtcaatgacgcagccaagcagcaggccgatgacattaagggacagatgatgaacggcacctttaccatctactccggtccgattaaggataaccagggaaagttagtaatcccggagggaaccatcaaggcgcaaactgatgtctcgctggagagcatgaactggctggtggaaggcgtgcgaggtcaaatctga

SEQ ID NO: 129147 - DNA, 1785 bp, Enterobacter cloacae
gtgacagctaataccattaactcactacaaaccagcattataagcggtgaattgccgctcagccgtctggtaaaagatattggccgcaaaattgatcaacagcagccggaaatttggatccatcgtgtttgtgaagctgatttgctagaccgcgccgcggagctggacgcattggctcaacagtatggcaatgcgctgttaaaggcgctgccgctgtacggtgtgccatttgcggtcaaagataatattgatgtggccggtctgccgacaactgccgcttgcgccgaattcagttacctcgcgcaacaggatgcgtttgtggtacgccggctgcttgacgcgggcgccattctgatcggcaaaaccaatctcgatcagttcgccaccggtctggtaggggtacgctccccttatggcatagtgcgtaacgcaatcgatccgcgccgggtcgccgggggttccagctcgggttcagcagttgcggtggcgacaggcttagtggctttctctctgggcaccgatactgctggttcggggcgtataccggcgggcttcaatggcgtggtaggacttaagcccagccgcggcttattcagcggcagcggggtagtaccggcttgcatgacgcttgactgtgtctctatctttgccaccgatgtcgccggcgcctggcaagtggcgcaggtaatggccgcctacgatgatcaagatgggcgttcacgccgggtggcgatggcgccagtgcgccgccgccatcgtcgtgtagcgataccggcagactgcgaattttttggcgaccagcaggccgccgatgcctttgccgccgccctggacacccttcgtcgccagcctgatatcattttcagtaaagtcccctttgccgtattcgccgaggcggcggcgctactctatgaagggccgtgggtagctgaacgccgcgtcgctatcgatgacttttaccggaaccggccggaggctatccatcccgtggtcaggggcattatcgctaacggggataaattcagcgctgcacaggcgtttagcagccgctaccgcttggacgatttgactcgtcaggcgcagcgtttgttggcggagacggatttgctattggtgcctaccgcgccctgtatgcccactattgatgaagtgctggcggagccagtcagggtcaatgcccagcttggatactacaccaattttgtcaacctcatggacatggcggcgctagcaatgccagccacgccccgcgccgatggcctgcctgctggaattacgcttatcgggccagccggtgccgatcatcttctagccgagaccgccgctgcctggcaaggactgtttaacggtgcagaccagagcgatgtcattagcgcacagccgctgacgtttaatgaacccgtcgtggaggtcgcagtagtaggagctcaccttcaaggcgaaccattgaattggcagctgatcgaaggcggtgctcgcaagatggctgaaaccaccaccgcccccgcttaccggttatatgccttgtccggcactaagccggccaaacctgggttggtacgggtagcggagcaaggggagtccatcgcgctggagctgtggcagatgccgctgcgccactttggctcctttgttgccgccgtgccaccgccactcggcattggtaccgtcgagctggcagatgggcgattggtaaagggttttatctgcgagcccgccgggcttacgaatgccgtagatattaccgcctttaaaggatggcgcgcttaccgtgccgctgtttaa

SEQ ID NO: 129148 - DNA, 954 bp, Enterobacter cloacae
atgatggctgctatcaatataaagatagatgacaaccttaaagatacgggagacgcgattctgcgggagctaggcctgaatgcaacacagtatattactctctgctggcagtaccttgcccagcatcgcaaattgcctttcatgacagagacgaagatcttaactgcctctgatctgacaatgaccattgccacccagtttagggatgtgcttaatcagctgcataaaattcgggacatgttaaactctgaaggcacggatttttctgaactgtctgctgcaaaacaggctctctcccgtcttgctgcagacatacaacagaacggctggcgactggagtccatgcctgaagatcttgatgcatccaccccggcccgtcggatgctgccccgaattaactattacctgacaggatgcgactttgccttgtcggatttaccggcagaactgcctgtccccacccggatagagaatgagtttggcatctcgctgaaggcgttcgaaactgagtttgccaggctgcagtctgtacttaccgataccggtctgctggcacgtcctgcgccggcgcgcgaattcgtttaccggggagaaaacgtcacagtatccgtcgtacaaccggaagattaccagcacggggcatggctagtgcggatgcaggcaaaatcagtggttcgggaaaatgcactggaagatgccgcactgacctttccagcactggagggcagagtattcctgcccggtactgtctacggtaaagcggtacgtaattcactgactggaaaatatgagatgggattctgttttctctcaggcatcacagaatttcatatgtactccagcggacacgaagaggaagggaatccaatctcgcctgatcaggtggcttcccgcctgtcagcttgtgtggaccagtatgtactgaagagcctgcagtcaatttcaggcaattaa

SEQ ID NO: 129149 - DNA, 312 bp, Enterobacter cloacae
atgacttccagagaaatgtcttacatgctggcaagtagcaacctcaacctcaacaagatggtgtggtgttaccagatcaaactaggccacaggcaagtacggctgtttattctggatgagtggggtgatgaattagcgcgtaaagattttggagcgtatccctctgcctggaatatgaatgcatcacccaaaatcatttataacccttcggtgatggctggcactttagctgagatgaaagtggtaaacgccgatcaaatctcgctggaaattgaagctcatgaactagtgtccgactatatctccagatag

SEQ ID NO: 129150 - DNA, 873 bp, Enterobacter cloacae
atggatagttctgacgcgcagcaaagcccttttgcgatcaaaaagaaagattcgggagaaagttatgaactgactcccaacagcaataagacggtacagccagtggcgctgttacgtctgagcgtgttcactcctgtatcacctaaagagaaaggtaagcgggactttctgatcgatgcttcagaagaattgtccagtctggaggttgcccggcaggaagggtataccaacatcaagatccagggcgccaagctcgggatgtctacggactttaaaacctggattggcatcatttctgctttctcaaagtatggctacacatcggaaaagattacgttgccgttctctgagttcgcccgtatgtgcggcctgcgacccacagacatcaatggccgcgcccgtaaccgcctgagtgaagcgctgttcaatctttctagtgtgacgttgtcctttcgtagccaggacggcaagcgcagcctggtgacccacttggtgcagcgtgctcagctggacatggataccaatatggtagaaatcgtgggagaccccagcctctgggaattatatcgctacgatcataaggttttgctgggtctcaaagtcctttcagccctttcacgtaaagaatcggcccagtccctctacgtctatttcgaaagcatgccagccgggacattgtacgtttcaatgaagcggctgcgcgagcgacttgcgatggagtcacaggttaaagaccagaatgccacgatacgccgggccatgaaggatctgaagaacattggctatctggactacaatgaggccaaaaaaggtcgcgaaatcatgttcatcgtacactcgcgctcgccgaggctgacgttaccaattgcgtaa

SEQ ID NO: 129151 - DNA, 618 bp, Enterobacter cloacae
atgaaagtaatctcgtttttgaatccaaagggcggaagcggtaaaaccacagtaacaatcaacgtaagtaccagcattgcgaaaaagcatcgagtagcagttgttgatacagatccgcagcaaagcctggccaactggaacaaggctgaaaaagctaactttgatgtattcacagcagcatccgaaaaggatgtatacaccataagaaaagaactggttggttatgactatgtaattatcgatggggccggggctctctctgttataactgcagctgcagttatggttagcgatctagtcatcattccggtgacaccgtcaccactcgatttttctgcctctggtgcagttatcagtgtactggaagctcagtcatacaacaggcctgtagaatgtcgcttccttattactcgcaaaattgagcaagctacaatgcttggagttttgcgtgagagtatcgcagcaacaggtataccttctttaaaaacatcgattacgcagcgacagagctacgtgaaatctgtgctggatggtgagactgtattcgataccaatgatggggccgcgaaaggagagatcgaagtgcttgctggtgaaatcatcaagttagttgcataa

SEQ ID NO: 129152 - DNA, 135 bp, Enterobacter cloacae
atgtctgaactgtatttttggctttatgttttgatggaactagcgaagttagccgatgatttggttccactttttttaagtgcagcagtgttgctggctttagtgattgtttacagaaaagggaattcaaaatga

SEQ ID NO: 129153 - DNA, 513 bp, Enterobacter cloacae
atgatcaaaagcatttggttcaaaatgccttctgcatggataagagatgggggactgaggcttttcaaatggaacaatgatgaacttggctccacttcgtccaaaattgcggcattgcagctgtactatgtaattgcaatgacactcgaaccggttgagctgtcggatgcgtttgatgtaacgattgtccgcggcctgtccaaggcaacctttaaccgcttcagaacgctcacagggatgagtcgtgcgtcaattgctgcaggccttgagacgttaatccaaagcgggcttgtgattcgacacaggcaaggaaaatgctgcttttatgaaatcaatggctatgttcccggtggtggagggtggtgcaaggttccgctgcgaaaagttactggagcaaatggtgaggttagagcgtttctgcagtttactttgcgtaagaagatcgagttatatgcactgaagttttatctctatgtttgctatgcacgagacaaccatactgaaggtacttga

SEQ ID NO: 129154 - DNA, 444 bp, Enterobacter cloacae
atgaataaatctattaatatacagacggatactgccacattagtaatttatgatttaatgtcattaaagcataggattaatgatgatgcagattggtggagtcttccagaagatgaagttgaagaaataaataaagggaatgtgttatttctcaatcttggaaatgatggtacctataaagttgatattaaaaatgacattggtgaatataccggatcgttatttttaaacgtacctactggaaaggttttcataggggcgggagaggatgtcacgggcggagatctggagccagatgattcagatgctatttcaggcgagtttattactttagaacctggtagttacgaggttaaatataaaaagcatggttcagatgtgctaatttcctttacaaaaacaacgtttactgaaaattcattagaagagggtgtttatctctga

SEQ ID NO: 129155 - DNA, 426 bp, Enterobacter cloacae
atgaaaggccttgaagacccaaaaattgaatccgaaattaactcctttgttgaaaaaggaaacgagtttcacgatgataaaaaatacgtcgaggctttagagcaataccaaaaagcctggcaagctcttcctgagccaaagctcgaatgggagctcgccaactggatctctgcctgcatatacagcgcatattttgatctcgcggtttacgctgaggcaaagaaatggggagagacgacattacggacacgtggatcagatatagacactgcacccttaatcgatctcggcatggtctgttatgagttaaatcaattcgaggaagcgtataaatattttaacgatgcttataactacggcaaagagcgtgcgtttcaggatagacctaaaaaatatctagagttttatctgcgcaaaaggggataa

SEQ ID NO: 129156 - DNA, 477 bp, Enterobacter cloacae
atgaaaaaaatgacattaaattttaaagatggaaacattgaaattgatggctactctattgaacttggttcttttgaaaattttacttcttctgaattttacaaagcccattctgaattcactaggataggtaaattttattttgcgaaagatgatattgaatgggaagggcagaactttattgtggagtttagaccagctattttttcatttaattcatctctttttcttacaagtaaagatggggatttctatcaaacacttaaagattgggaacttagagcatcgttaaaaaaccttaaagatgaagaaagaagattgacagactggattcaaaataaactttccaaagaaaaaatggtaaagataagtgcccccccttatggagtcacatggaactttgaatggggtgagctaacagtgcaatcaaatgaaagatcctttgattgcggtatatacatagaatggaaagattaa

SEQ ID NO: 129157 - DNA, 450 bp, Enterobacter cloacae
atgatgactatcaaaactgcaattgaatatttgaacaataatgcgacagacgaagttttttggttaggtcaagttgatatagaacagattgacttacttgaaaataaccttggcattaaactccctcatgattttcgagagttcttacttttggttgggggcggaggggtgattggagaggagatttcaggaatagtggataataatgctcttgaagagtcaggaggtgctgttttttacgatacaatatattgccgcaatgaattttcactccctgaaaattatgctgttatatatctaaaagatgatgaggtttgctggtgtatagattctggtggtgaggattttggaagggttgttaattatgatctgttttccaagaatacgacgaacattataagtccttcgttttctgaattttttgataattatgttaagttgcggacgtga

SEQ ID NO: 129158 - DNA, 399 bp, Enterobacter cloacae
atgagtcagtgggatcaaggtaatattgatcaaggcgctgtaattcataaagactatgtgatttttgattcattaccagaggacgcgttcggagcaaacgttaatatcaaactagcgaatgcttttaatttagatgtaaatgcacaacgctgcattgtcgtcccattttttattacggatgaaaataagcttcagatcgcatctgcgacagagaaatttgatgtgaacattaatgtaaccggtaagactttttcgctcttctttgagatttgtgaaggggacgagatttattataattttactcttgtgcctgaaaaagaagctatcactgctaagtttttattagacgacccttggggagggaaaaaagacaatcctctaaaagagggtgtgttttaa

SEQ ID NO: 129159 - DNA, 1437 bp, Enterobacter cloacae
atgatcgcggcgcaggaaaatgcaaaactggccgtgccttccaacccacaggattggctggcagacagaaaggcgcgactcacgatcgctcttaagcggctggcccgggctgcccgtaacggcactattccgcacggtagcatagaagatggaacgttgcggatcgacaggttgacagcagacgtgccggatggtgccgaggcactcatactggatctgtatcgccgaatgccgtccgttcggattaccgacatgctgcttgaagttgatgcagcccttggtttcacagatgcgtttacccatctgagaaccggggctccatgtcgcgaccggatcggtctgctcaacgtcctgctcgctgaagggctcaatctgggcctgcgtaagatggcggaagctacaaacacgcatgattactggcagctctcacgccttgcccgctggcatgttgaaagcgaagccatgaaccaggcattggcaattgtggtggccgcgcagggtaaactgccgatgtcacgcgtctgggggatgggcacgtcagcatcgagcgatggtcagtttttcccgacagcgcggcatggcgaagccatgaacatggtcaatgccaaatatggttctgttcccggcctcaaagcgtatactcacgtaagcgaccagttcgcgccattcgcttgtcagtcgatcccggcgaccgtgagcgaggcaccgtatattctcgatggactactgatgaacgaggtcggtcgccatgttcgcgaacagtatgccgatacagcaggattcaccgaccatttgttcggagccagtagcctgctcggctacaatctcgttctgcgaatcagggatctgccatcgaagcggttgtacgtatttaatcccgatacgacccccagggagttacgcaagttggtaggtggaaaagcccgggaggatcttatcgttgcgaactggcctgatattttccgttgtgccgcgacgatgaccgctggcaaaatcaggcccagccaactcctgcgcaagctcgcttcttacccacgacaaaacaaccttgcagttgcgcttcgtgaagttggtcgtattgaacggacccttttcattattgagtggatcctggatacggacatgcagcggcgtgctcagatcggtcttaacaagggagaggcccaccatgcgctcaaaaatgcgctccgtatcgggaggcagggggaaattcgcgatcgcacgacagaggggcagcactaccgaatcgctgggctcaatttattgactgcggtgatcatttactggaataccgtccatcttggtcatgccgtcacggagcggcggaacgaagggttggatgttccccctgaatttcttccccacatatccccattgggctgggcgcacattctactgactggcgaatatctttggcccaaggaaccgaaagcttag

SEQ ID NO: 129160 - DNA, 1206 bp, Enterobacter cloacae; identical to SEQ ID NO: 19666

SEQ ID NO: 129161 - DNA, 498 bp, Enterobacter cloacae; identical to SEQ ID NO: 91874

SEQ ID NO: 129162 - DNA, 624 bp, Enterobacter cloacae; identical to SEQ ID NO: 10353

SEQ ID NO: 129163 - DNA, 624 bp, Enterobacter cloacae; identical to SEQ ID NO: 10352

SEQ ID NO: 129164 - DNA, 1206 bp, Enterobacter cloacae
atgaatagttcgacaaagatcgcattggtaattacgttactcgatgccatggggattggccttatcatgccagtcttgccaacgttattacgtgaatttattgcttcggaagatatcgctaaccactttggcgtattgcttgcactttatgcgttaatgcaggttatctttgctccttggcttggaaaaatgtctgaccgatttggtcggcgcccagtgctgttgttgtcattaataggcgcatcgctggattacttattgctggctttttcaagtgcgctttggatgctgtatttaggccgtttgctttcagggatcacaggagctactggggctgtcgcggcatcggtcattgccgataccacctcagcttctcaacgcgtgaagtggttcggttggttaggggcaagttttgggcttggtttaatagcggggcctattattggtggttttgcaggagagatttcaccgcatagtcccttttttatcgctgcgttgctaaatattgtcactttccttgtggttatgttttggttccgtgaaaccaaaaatacacgtgataatacagataccgaagtaggggttgagacgcaatcgaattcggtatacatcactttatttaaaacgatgcccattttgttgattatttatttttcagcgcaattgataggccaaattcccgcaacggtgtgggtgctatttaccgaaaatcgttttggatggaatagcatgatggttggcttttcattagcgggtcttggtcttttacactcagtattccaagcctttgtggcaggaagaatagccactaaatggggcgaaaaaacggcagtactgctcggatttattgcagatagtagtgcatttgcctttttagcgtttatatctgaaggttggttagttttccctgttttaattttattggctggtggtgggatcgctttacctgcattacagggagtgatgtctatccaaacaaagagtcatcagcaaggtgctttacagggattattggtgagccttaccaatgcaaccggtgttattggcccattactgtttgctgttatttataatcattcactaccaatttgggatggctggatttggattattggtttagcgttttactgtattattatcctgctatcgatgaccttcatgttaacccctcaagctcaggggagtaaacaggagacaagtgcttag

SEQ ID NO: 129165 - DNA, 462 bp, Enterobacter cloacae
gtgaccaaaggtgccttttatcatcactttaaaaataaaaaacaattactcagtgcctgttataagcagcaattaattatgattgatgcctacatcacaacaaaaactgatttaacaaatggttggtctgccttagaaagtatatttgaacattatcttgattatattattgataataataaaaaccttatccctatccaagaagtgatgcctatcattggttggaatgaacttgaaaaaattagccttgaatacattactggtaaggtaaacgccattgtcagcaaattgatccaagagaaccaacttaaagcttatgatgatgatgtgcttaaaaacttactcaatggctggtttatgcatatcgcaatacatgcgaaaaacctaaaagagcttgccgataaaaaaggccaatttattgctatttaccgcggctttttattgagcttgaaagataaataa

SEQ ID NO: 129166 - DNA, 417 bp, Enterobacter cloacae; identical to SEQ ID NO: 10349

SEQ ID NO: 129167 - DNA, 1323 bp, Enterobacter cloacae
gtgccgctcgcgcaggcacgatcccgggcgggtcgatttaaaaacggcgttctgcatatcgagaaactcgaagccgccgcgccgacaggcgccgaagatctggtgctcgatctctacaagcagatcccgcccacgcgcatcaccgatctcctgctggaggtggatgcggcgaccggcttcaccgaagcgttcacccatctgcgcacaggagcaccctgcgctgaccggatcgggctaatgaacgttatcttggcggaagggatcaacctcggcttgcgcaaaatggcggatgcgacaaacacccacaccttctgggaattgatccgcattggacggtggcatgtcgagggcgaagcctatgaccgggcgctggccatggtggtcgaggcacaggcagcgttacccatggcccggttctggggcatgggcacgtcggcttcgagcgacggacagttcttcgtcgctacagagcaaggtgaggccatgaacctggtcaacgcgaaatatggcaataccccgggcctgaaagcctatagccacgtctccgaccaatatgcgccgttcgcaacccaggtgattcctgcaacggcaagcgaagcgccttacatcctcgatggcctgctgatgaacgatgctggacgccatatccgcgagcagttcaccgacacgggcggcttcaccgatcacgtctttgccgcatgtgccattctcggctaccggttcgctccgcgcatccgcgacctgccatccaaacggctctacgcgttcaatccgtcggccgccccggcgcacctgcgagcgttgatcggcggaaaggtcaaccaagccatgatcgagcgcaattggcccgacatcctgcgcatcgccgccaccattgctgccgggaccgtcgcgccaagccagattctgcggaaactcgcctcctatccgcggcagaacgagctcgcgacagccctgcgggaagtcggtcgcgtcgagcgcaccctgttcatgatcgactggattctggatgccgaactccaacggcgtgcccagatcgggctcaacaaaggcgaagctcatcatgcgctgaagcgggcaatcagcttccaccgccgcggtgaaatccgcgaccgttccgccgaaggccagcattaccgcatcgccggcatgaatctgctcgccgccatcatcatcttctggaacaccatgaagctcggcgaggtcgttgcaaaccagaaacgcgatggaaagctgctatcgcccgatctcttggcccatgtttcgccgctcggatgggaacacatcaatctcaccggagaatatcgctggccaaagccttag

SEQ ID NO: 129168 - DNA, 276 bp, Enterobacter cloacae; identical to SEQ ID NO: 19894

SEQ ID NO: 129169 - DNA, 228 bp, Enterobacter cloacae
atgttctccggctggcgctgcctggaaatgcaggtcgcgcaataccgccggaagaaagcgctttacccgcccgtactgctccaccatttcgtcatggaaattgttgttctgaggccgggccagctcatttaccttgcagacggattctgccagcctgcttttcggtatgctgttgaatatggtctccctcagttcagcatcgtcagcctgttcatccagcaacaatga

SEQ ID NO: 129170 - DNA, 552 bp, Enterobacter cloacae
atgcgcctttttggttacgcacgggtatcaaccagtcagcagtcgctcgatattcagatcagggcgctcaaagacgcaggagtgaaagcaaatcgtatctttactgataaagcatccggcagttcagttgatcgtccgggacttgatctgctgcgcatgaaggtggaggatggtgacgccattctggtgaagaagctcgaccgtcttggccgtgacactgccgacatgatccagttgattaaagcattcgatgctcagggcgtagctgtccggtttatcgatgacggaatcagtactgatggtgacatgggaaaaatggttgtcactattctgtctgctgtagctcaagctgaacgtcaaagaatattagaacgaacaaatgaaggtcgccaagaagcaatggcaaagggagttgtgttcggtagaaaaagaaaaataaacagaggaacgatattaaatatgtggaaacaaggtttaggagcctcacacatatcaaaaacaatgaacattgctcgttcaacagtatataaagtaataaatgaaagcaactaa

SEQ ID NO: 129171 - DNA, 2097 bp, Enterobacter cloacae
atggaatttaatattacttcaaagtctaatccgtttggcgatacaacagcagaaaatgataagaaaatgttgagcagtgctttcatcgaaactgctgactttagaactttaattgaaacagatgaccgaactattgttgtaggcagacgagggactggtaaaagtgctttattcattcagctaaatgaacattggaagaaagataaaaaaatattaatcctaagtttttcaccagacgacactcaaataattggttttagatcaatgttgaagccatttacaggctcattcaatttagctagggcagcaacaagattattatggcgatatgctatgttaatggagatagcatcatatatatcttctcattataaattatcatctcaaatttcgacagaaacattgttgaatgagcatttaaaaaaatggaatgctgcacaaggtgatattttaagaaagtgtagggttgtagcaaaagaatatttagatgaaaacaatcctgaagaatcaattggtgatcttcaatttaatttgaatatttcagaaatcgaaggcaatatagtttcacttcttgaacgctcagacaggaaagttgtcatattgatggataagttagatgaagcatatgaaccggataatatagggatcggaatcatagcgggtctggcatatgcctcaattgaattaaatcaaaaagcaaaatgcattcgcccaatcatttttttaagggataatatatttagatcactatcaaaggaagatcctgactactcaagaaatatagaggggcaagtcataaggctgcattgggattgggcacaactcctaatgctatcggctaaaagaatgaaagtagcatttaatctagatattgagaaagatcaacgggtttgggataggtgtacagccgatgatctcaaaggaaggaatggttttaagcgatgcttgcaatttaccctttaccgccccagagatttactatcattgttaaatgaagcttttttttccgcatttagagagaatcgagaaaccattattaacactgatctagaatatgcagccaagtcaatttccatggccaggcttgaagatctttggaaagagtaccagaagatctttccttcaatacaagttataactagtgcattccgtagtattgaacctgaattaacagtctacacttgcttaaaaaaaatagaagcatctttcgaatcaatagaagaaaatgaagacccaaaaataacttctgaaatacaattactaaaagcaagtgggatcctccaaagtttgtatagcgtaggattcgtaggtatacgtgataaaaacacttcatcctattcattttgccatgatggacgaaccccagacaaaggttttgaaagcggtgaaaaattattaattcatccctgttattggcttggtttgaatttaaatcgcaacgctcttgctccagaggaagctgaggaaataaatgatgaatatgatatcaatgttgtttccgataattcagccattagaaataaaacaataggtcaaataaccactcacctggatcaaataccgacaggaaatgaaggagctaatgaatttgagcaatggtgcttagatgcactaagaattgtatttgcatcccacctgacagacataaagccgcatccaaacggtaatgcggttcagcgacgagatattataggtaccaatggtggaaaatcagatttttggaagcgcgtgttagaagactataaaacaaggcaagttgtttttgatgcgaaaaattttgaagaattaggtccatctgagtacagacaattacaatcatatttaacaggaccgtatggaaaattaggttttattattaatagagaagaaagtgaggcgttgaaatcagggagagatttagattggacaaaagagatgtatcaatctcataattcattaataataaaattacctgcaaaatatatatctaaattgctgcaaaagttaagaaacccagagaagcatgacgctatagatagtcagatggggaaacttttaactctatatgaaacatcatatatggctattaaaagtactcaaaagaaacgaagaaaatag

SEQ ID NO: 129172 - DNA, 948 bp, Enterobacter cloacae
gtggggcatttgcaaaacggtgattttgcttataacgccgacactgcccgatttgttgacaaaatggtgcgtgaacacggttttgagcctcaacaactgcatgatgtattggcccaaactaaaaaactggattttgttatccgcttgatggataaacaagcaccatcggcaggccgcccttccggccctaatggtgcgtggaaccgctatcgcaaacagtttattacccctgataatgtgcaaaacggtgtgaacttctggaatcagcatcaagaggcgttgcaacgcgcctatgaggtttacggcgtgccaccagaaattatcgtcggaatcattggggttgagactcgctggggccgggtgatgggtaaaacgcgtatcattgatgccttggcaacactctcctttgcctatccacgccgtgctgagtacttttctggcgagctggaaaccttcctgttgatggcacgtgcggagggtaatgatccgctcagcttgcgggggtcttatgctggagcgatggggtacggccaatttatgccatcgtcattcaaaagctatgctgttgattttaatggtaacggccacatcaatttatgggacccggaggatgccatcggcagtgtcgctaactacttcaaatcccatggctggaccaaaggtgcgatggtcgcggtgcccgctaatgggcaagcgccataccttgataatggctttaagacgaaataccctacctcgacgttatctgccgcagggctgagcccgtccggttcgttagggggctatcaggaagccagtttactgcgtttggatgtcggcaccggttatcagtattggtacgggttacccaatttctacacgattacccgctacaaccacagcacccattacgcgatggcggtatggcagctaggtgaggcagtaggcagggcacgttcaatacagtaa

SEQ ID NO: 129173 - DNA, 501 bp, Enterobacter cloacae; identical to SEQ ID NO: 83644

SEQ ID NO: 129174 - DNA, 483 bp, Enterobacter cloacae
atgagtgataagatcatgcaaacagtagatctgctaatttcacatagtcaaatattgttacgatccagagactatgacgaaaagctgagtcagtggggaaaaggtaatgtttctcaaggcgctgttttacacaaggattatgttatattcgatccattaccagaggacgcatttggagcaaacgtcaatatcaaaatagataatgcttttaaattagatcgaaatgcacaacgctgcattgttgttccattttttattacggataaaaataagatccagatcgcatctgcgacagagaaatttgatgtaagcattaacgtaaccggcaagatttattcgctcttttatgaggtttgtgaaggggacgagatttattataattttactcttgtgcctgaaaaagaagcaatccctgctaagtttttattagacgacccttggggagggaaaaaatacaatcctctaaaagagggttttttttaa

SEQ ID NO: 129175 - DNA, 642 bp, Enterobacter cloacae; identical to SEQ ID NO: 112541

SEQ ID NO: 129176 - DNA, 939 bp, Enterobacter cloacae; identical to SEQ ID NO: 112542

SEQ ID NO: 129177 - DNA, 792 bp, Enterobacter cloacae; identical to SEQ ID NO: 112543

SEQ ID NO: 129178 - DNA, 1146 bp, Enterobacter cloacae; identical to SEQ ID NO: 112544

SEQ ID NO: 129179 - DNA, 324 bp, Enterobacter cloacae
gtgatttcgtatgaggttgagtttcctactcgaaaatcgtttagcttaaaaattaatggttacttttcaaaagaggggctggattgtaaaacggttgaggctattggtggtgatgttaaagtgctggtcgaaaggaaaactatgtttactgttccttatcgtgaaggcattacagcagacttcactcttgaaggttacaagcagcgtgcaaagagacatactgaaactgtgatttcggagtttttagaagcggcccaaactcagaccgctatcgaaattaaaaaagatgatggagctactgctgtccggttagggaaaatttag

SEQ ID NO: 129180 - DNA, 1458 bp, Enterobacter cloacae
atgcaggtcactattggtggtgtcccgtatgcacccgcctgcgcaatttcatcgcggattggcattgcaataacgacacaccagcgcgccgacgttctgaaacgagcgctcgaacagcacatgaagtacctgccagcaggtgcgctggtggtggtagtcgaagatggttcaaaacctgcagcggtaatgcccgacggcgtgcagctgcttcgcaatgaaacatcactcggcattgttgcttcgaagaacgccagcctgtctgccctgatggatgccgggtgtgagcatcttttcctgtgggatgatgatgcctggcccattactgataactggcaccagccttacatcgattcaccagagccgcacctggcttatcagtttcttgatctggctggccgcaacaagctgaatgacctttcggtgctttactgtgacgatcagcatgtggcgtataccgggcagcgcggcgtgatgctgtactaccaccgcagcgccatcgagaaggtgggcggattcgatccggtttacggtcgcggcatgtacgaacacagcgacctcgccctgcggattcataacgctggcctcacgacgtgggcttacgctgatgtcgtcggttcagaaaagctgattcattctcttgatgagcatgaagcggtggagcgttcggtaccgaggcccgaccgccaggcgctggtggaacgtaatgtgaagatccacaacgaacgacgtgataccggctttaccggttacgttgaatatcggcgtcagcgcgacgtggttatcacaacgctgctcaccagtcagcctgacccgcagcgcggtacgaaaatggcagcctcacctgatatgttgagcaggtgggcggcatcgcttcggaattgtggccgtatcgcgctggtggatgagctgcagactgccccggctgacgttgagttgtatcgcgttcctgacgtgaagatgaatgtctacttccggcgatggctgcacatctggcagcacctgcgcgatcaccctgaataccggttcgtctggtgtacagatggaactgatgtcgaaatgcttcgcgcgccatgggaagaaatgcagcctggaaaagtttatgtcggttcagaaccgaagacatacgctgacacctgggcaaagcagaatcatccagagcgtatctatcaggagttcatcgaagcgcatcgcaacgatgtgatgctaaacgctggtctgctgggtggtacccgcgctgatgtaatggcgttcgctcacggcatcatccgtctttactaccggatcgagagttatcgtttctggaagaaagaacaggctggcgccgcggtgggtgacatgctggcgttcggtattgtggcgcagtcattcgctgacaggcttgtcaccggccctaaggtacataccgttttcaaaactgatggaatcggtaaagaaaacgcttggtggcgacataaataa

SEQ ID NO: 129181 - DNA, 345 bp, Enterobacter cloacae
atgataaaaatgacaggttgcagcgccgtagactgtggggttggatttgtgttcggtaaaggagttgatgccgaactcatcaatacaaatgctcactcatgccgaatcggctttttgcaacacggtagcgagcaagagtggcagctacttttagataaattgctcacaaagccagaagaactgaatcaactagtaaaagattacagtgaagctaagcctgaacagaaaaaacaagccatttcaaagtctggtttatttgaatatttatcagcttttgcaaatgcatcgactgtttatcaattccttgaaggtcttgttacgtcattcctgacaaattcacaataa

SEQ ID NO: 129182 - DNA, 630 bp, Enterobacter cloacae
atgaaccaaatactatttcaaaaggcggctggcattagcgccgggctcgctttgcgctggtttcagcatatcgatgctgcaatgaaggaattcggcatcacggcaccgctcgatcaggccatgttcatcgcacagatggggcatgagtccacgggatttacccggctggtggaaaacctgaattacgcggctgaaaacttagtgcctacattcggcagacaccgcattactccccagcaggccgccgcactcggcagaacggaaacgcaaccggcaaatcagaaagcgatagccaatctggtttatggcggtgagtggggcaaaaagaacttgggcaaccaggttgctggtgatggctggaaatatcgcggtcgcggcctgaagcaaatcaccgggctcagcaattaccgcaactgtggcaacgcgctgaagttggaccttgtaacccagcctgaattgctggaacaggatgaatatgctgcgcgctccgctgcatggttctacgtctcgcacggatgcctgctccattccggcgacgtggagcgcgtcacgctgcttatcaatggcggacgtaacgggctggataaacgccgcgcgctgtttaacctggcgaaatctgtgctggtgtga

SEQ ID NO: 129183 - DNA, 387 bp, Enterobacter cloacae
atgtccgatcctgtttctggcactacggtagcggctggtggtctgctggtttcagtcctgtacggtgtctttactcatactgatttcggagtggtgtttggagcgtttggtggcgcggtgttttacgttgcgacagctgcaaaccttacgcgtgcgcgcctggctgcatacttcctgacctcattcattgttggagtgcttggtgccgggtttgttggatcatggctaaatgctgcatcgagttatgaaaaaccactggatgcacttggtgcagtgattctgtctgcgctgtgtataaaaatcctaacttttcttaataaccaggacctgaacaccctgttcggttttttctcacggttacgcggaggagggggaaatggtaattga

SEQ ID NO: 129184 - DNA, 570 bp, Enterobacter cloacae; identical to SEQ ID NO: 16861

SEQ ID NO: 129185 - DNA, 1305 bp, Enterobacter cloacae
atgaaaaaaaacaaacggccaggcagggttaaaagtgctctgcttaactggcttggtgtgcctatcagcctgactaccggcacattctgggaggaatggtttggtaccagcagcagcggaaaggtggtaacggccgataaagccatccagctatcggctgtgtgggcatgcgtaagactgttaagcgagtctatttcaacccttccgctgaaaatatacgttcgacagcctgacggttcgcgtaaagcggcaaccgatcatccggcctactcgatactgtgccgccggcccaattcagaaatgacaccatcacgctttatgttgatggtggtcgccagtatttgcctgcgcgggaacgccttcattgagaagaaattcatcgcaaaccgcctggtttcgctggtgcctttactgccgcagaacatggtggttaaacgtctcacgaccggggcgctggaatacaaatacactgaaaacggtaacgagcgcgtcattcccgtcaaaaacatcatgcacattcgcgggttcggtcttgacggtgtttgcggcatgatgccgatgaaaacaggccgggatgtgatcggttctgcaatggcggttgaagagtccgcggcgaagatattcgaacagggcctgcaaagttcagggtttctctcttctgataaagctctggatgatactcaacgtgaaaaacttcgcggttacatggcggcgtttacaggctcaaaaaacgccgggaaaatcatggtgcttgagggaggcttgacgtaccagggcgtaaccatgaacccggaagatgctcagatgctcgaaagccgcgcctttagcattgaggagatctgccgctggtttcgcgttccgcctttcatggtcggtcacaccacgaagcaaagcagctgggcatccagtctggagggcatgaacctccagttcctgacgcacaccctgcgccccctgttggtgaacatagaacaggaaataggacggtgcctgctggacagcgatgatgaggtgttcgcggagttctctgtagaagggctgctgcgcgccgacagcgcgggccgtgctgcgtactataccagcgcgctccagaatgggtggatgtcccgcaatgacgtgcgccgtcttgagaatatgccaccgattgaagggggtgacatttacaccgttcagctcaacctgacgcaactgaaaaatctcgaaagcagcaatcctgctgttcaggctctggccctgagagagctgcataaccacatattccctgacatttcctttgaacaatctccgctgaaacaggccgcttag

SEQ ID NO: 129186 - DNA, 1860 bp, Enterobacter cloacae
atgcttgaaataaacacagcacgtatcgtaaacaccgttgagtttaaagtttcgaaggaagatattgcactggccaaaaaagcggctgatgaccttcaacgccattttaagaagctggagaatccgaaaattcggtttcagactcagaagcagcgccgacaatcagcgcgtgaacaggtggcagatgctaaagcggcttctccaaaaacgtccaatgacttaaaacaacaacgccaggctgagaaagcaggtaaagcgcaagcaagggaagctgcgaagattgccaaacgtaatgagacagcttcgttaaaatttaggtcagctaaccttcaaatgaaaggcgtagcggggaagtatggccttgacccgctcaaacaactggagtttgctcgcttcgctaaacagcaaacagagcttttccgtaataaccagatcagtagcgcgaagttaaactatgaacttcgtgaaagattggccttgatgcggagagaggcagcgttacaagcccgtataaccgccagtacccaacaacaagcggctgcacagcgtcaagctaagagaacggactacaaaggcgcggcggctaacatcaaagagaaggggctgaacgtgatcggcggcggtgctggttttattggcgctacggctgcattagcgggtggggcttccatcctgggacgtgtacgcgagacagccaatgataacctcgatctggtgaggcaatctgaacgtgtgaaaaccaacccaaacgccataaaaacgatggtggcctggggacagcaacacggtgttgattcagctaatacctcaaaagccgtcgataacatgaaagacgtccgtgaacgcctcgctatgactgtgaatgatagccagtttaaaaatggcgaatggaaaggtggcgacggtggcattacgtccatcatgaacaagttcggatggagcaaagatcagatttccaagttccaggattctccactggatttcgtccaggctacggtaaatgaagggcaacgccgtggtatgtcacaggctcagattggtacgctgattgagagtttaggtgatgatctgatgcactacaccgatatgttcatgaacaacggagagcagtatacaagcgtcctcaggaaacttgccgaaagtggtcaaactctcaatgatgaacaaattaggcaaactctggcatacggcgacctgtctacccagttgcaagcagttaacaatggttttaatcagaatctaacttccggcttcctcgaagggtttggtaacgctggtaaggacttagcatcaaacaccgctactctgaacgagacagcaaaatcattaggttctgggcttggaaacctgttagcacaggtgacaggattcacgcaggaaatcactgctgacctcagcaaatttaacggctggatgaaagataccttcccatcgctgtattctgatcctgataaaacagcgccagatgctatctatgataaagccgtgaatggctcagctaatgccacagccgattggattcaggataagacagggtgggacagccgctcagtggctccggctattatggactggttgggcgttggtaatcagcaagcagggactgcggcgaatcaatataaccttgcaggtgattctctgcgtgattctgcaatgtcactcagcagcggcaatgcaccagcgtataatctgaatccaacatttaacctgacggtcgcaccgtccgtaccactaacgatccaatctgacacaggcagattagccgactatgtagacttccaggcgagggcttctcaagccaattttacacagtcactaaccttgtcagccctgagcggtcaaagcagtacaggcgggtga

SEQ ID NO: 129187 - DNA, 564 bp, Enterobacter cloacae
atgaacttaaaaaatgcagtccaagatcttgtgaacaaatttaaaatgaatgaattgaatatgggagagatagactatacagacgatgaaaatgagacttcttttcccgtgaatttaaatggggaggttgattttttttatcgtcatttgattttaaatgacagtccaacatttgatggtactttttatttacagattattgaacctcaagatctcaacgaaatattatccggttggcgagttcaaaatgatacggcttggcgcgatgaatatataatctttgctgaaagaaatggtgacgttcttttttgtgacacccaaaatctaacatctcctgtttatggtagcattcaaaaacgaaactttataatttctggttccttagctgactttttgaatgctttttgttctgctattgagatggaacaaaataattatgatggtgatgctacagatgatgaatttaatttaagagaagattttctggaagatatcgatgtgatgcttaaaactaaactaaaagatgttgaggttgaagggtttaaaaaattcttttttggttag

SEQ ID NO: 129188 - DNA, 579 bp, Enterobacter cloacae
atgccacacatcgcggggcatatcagccaggacatacatcttattgtcaccccagtacgtcatgccgcgaaatatacccgccagatcacgaagtacggtccaggcgtcattacggtcctggatataaacgttgcaacgaaaacgcggctccgtcccgctgccgcccttgccgtctggtaccagctgatcgcaatactgggcgatgcgataaagttcccacttgtctatctgagtcgcatcgattctttgccccagcccgaaacgctcgttcagaatgatgtcgtaataaatccaggcggggttatccgtccatgcccatttaaacacaccttcccatgtaccagagtaagtgcgggtttcaggatcgtaggtatcaggtacacggatgattctccccttcggattgcacacaacctgaggaatgccattagggaactgctttgcgtcaaactctacatacagcagcgctgtgttaacgtagcgaagtttggcgtcaataatttcagttacagctacaacgcgcatggtgtccacgatattcacgctcgtggaatccggcgtgattctgcgaacccgtaa

SEQ ID NO: 129189 - DNA, 948 bp, Enterobacter cloacae
atggccaggggactctatatcgatttgaatgacgggcgtccggcaatgaccatcactgccggaatgaaatgtccgtcgtatggtggggaggctgtggaggcatggggccagcagaccatgactgttcagggctatgttgccggagcgaccccttttttcattccatcaaactcggttgtgaatgtgactcgctcgccgaatctgataacaacgattatggttctcgatgggataaccaataacggaaacggaaccctgacccagagtgtctggtcatcagatggctgggggaaagataaaacatttcccggcacagtctggcagattttacccgcagggcagagtggaaaccgtggtttgcttattgaggattcgacagactttattgcgatcactgatgtcagccgtgttgcttcctgtgttttcagtggaacggtcaatgtaaatggtacttacacgcttccggccaaagggctcgtttttgcccgctggaatgacagcgcagctacgcttgaatgtgatggtaataatatttactcccgtcaggattacacgggctatgacgatattgcccgttctgtgaatgtcgatattgcgatttttgcggttcaggcccctgtacccggaagaggattaaatttcatcaacgctgctggccagtgcactttctctaccacccgccgtccatttatattccgaaatcagttttattcaccgggcaatagctgggtcgatattggcaacagcatgattgcgcttggctgctatggtttcaactcttcaacagccagcgggtggtgcaacatgcgatccaagggactggtgatgagcgggaactcggtaaaatgtgggaatggccgtgtccgttcccgatggaccgacaagtattctgtgaccggtgagagatataccggaatgagtattcccatcatccccgcaatgtattga

SEQ ID NO: 129190 - DNA, 315 bp, Enterobacter cloacae
atggcggaatatggtgttcagacatgggacgcctcaggcaatgtaaataactatggcgttaagcctgtcagcgtttgtggctatctccagctggcccagaaccagaaaacaggctcttacaccgtagcgcttccgccgggttgcaggctgacctattttcagagcatgaacggcgatcagtttggtacgagtcggaggaagatcaccatttcagggggaaccgcgacagtgtcatcagtaggcgataccgactactcagcagggactgagcctgcggcagcggcttatctcattttccagatcgagagggcataa

SEQ ID NO: 129191 - DNA, 417 bp, Enterobacter cloacae
atgctgtatcaggttaacgtcctgatattcatcaacaatgatgtgcttgaagtgggcaccaaggctgctgtcattacgcaacagtgcgacagcctcaatcaaacagtcatcaaaggttcgcagactgttttcctccagcagctcacaatagcggccataggcgtgaataaactcccgtttgatgttgctgaacgttggatcattggcagcatcaacaggagttacggccgccgcccggcagcgagcaataaacagctcgaagttttcaatttcattggggtcaatataattcgcctcatggtcaaagccatagcggtaggcttgctttaccagttgctcatagcggtagtcgcttggagtaatgaggtctttcttcttgattatctgttggcgttctccgtaaccaacaatctttaa

SEQ ID NO: 129192 - DNA, 855 bp, Enterobacter cloacae
atgggcgagttcaacgctaagcactttcgccattcggaagaatgctgtgcccttgaaacctatcttcacaagtgcggcaaagaagcattcttctatcgctaccaacaagctctcagccgtgaaatgcctattagccttgagctggagcgccgggttgcctgtaatggttctcgtttagccttggttagagacgaagcacgtcagtgcgtaaaatccgtgcctgcacgctacaacttgactcaatttttcgatcaggcagagctggaaaaacacgataaggtcacagggctgcgaccagacgtgatgttgtatgatacgactggcgaaaggcgttgctacgtagagatttgtgtcacacacccctgctctcaagacaagatcgaagccggtatcccgattcttgagtttaaggtccaatctgcctctgatattcagatgttgcttaccggggcctactcgatcaaggagaagatcctgagagtattcaactggcttcccccgtttcaatctgtggacacctgtagcggcgtctgctcagtaggtaacgtggatatgtctgtctggagtttaagtggttccggccgactcaacgaacaaacgatgccgctcgctgaagtggatttaacaatcaattctgacgtgaacacatggcctagatcgttaggggccgctgagctggctgataacttacgagcttttatccgtcacgccgatcctcattcactatttcccaactgcattatgtgcgagcaagcaggccgatgggaggatggctatctgcaatgtcacagtaaggcaaagatcgttccctacaccgaggcccgtcagtgcgccaattacaaggttaaggcatga

SEQ ID NO: 129193 - DNA, 237 bp, Enterobacter cloacae
atgaaagacctcagcattgaataccgcaatggaaaattcgttcgcctggtgattgatggcgtggagatgaagaacgtgacatccattcagttctcgcacgctgtagggcaggaggtgccgacagtgaccgtctcagggcatgttgtctccgggcgtgggaaaggcactcagaaactcgaacaggttgataaacagacgtcctggaatgatgaagtgaagcggataatgaatgagtga

SEQ ID NO: 129194 - DNA, 486 bp, Enterobacter cloacae
atggcagataaacgaacccgttccgacagttcggcggcagcggttcaggccatgaaaaatgcagctgtggacaccatcgatccgccgtcccatgcaggtttggagaaaaaagccgaaccattctggcatgacaatatcagatcgaaagctctggacagctggacgcctgccgacctgctggccgccgtagaactggctaataatcagctctatatcaccgttttacgcaaggatttacgcaaagaagagcgtatacgcggggaggagcgagacgaaggccttattaaagacctccgcaagcaaattgttgagctacaacgaactatcctggctcagcgccgcgacctccagatccattcccacgcaaccaacggcgaaagccgcgaccagaagaaacgcaatcagaatgatcgtgatgcacgaaataccaaaaacgagcatcagagccaggaagataacctgatcgcctttcccaaacacggataa

SEQ ID NO: 129195 - DNA, 126 bp, Enterobacter cloacae
atgcgcaccctgggctgtagtaatcgcgtcgataaaatcatcctgtggcccccttacctgtccggtttcgtccagaatcgccagaatcggggaaagtccgtgtgtggttttaccctcagcagatag

SEQ ID NO: 129196 - DNA, 315 bp, Enterobacter cloacae; identical to SEQ ID NO: 16857

SEQ ID NO: 129197 - DNA, 345 bp, Enterobacter cloacae; identical to SEQ ID NO: 86717

SEQ ID NO: 129198 - DNA, 306 bp, Enterobacter cloacae; identical to SEQ ID NO: 16855

SEQ ID NO: 129199 - DNA, 189 bp, Enterobacter cloacae
atgaaaagtaagatgattccctttacagttaaaaaccttttaaaatcaaagagttgcaagaagatgaccgcttcagctaaagcgctttgcaatgcctttggcacttcggcgcttttagcgcttgcaagcgctttagctgaagcggtagagcctaccacaaaaaacaaaaaaaatcaataccatgcatga

SEQ ID NO: 129200 - DNA, 498 bp, Enterobacter cloacae
atggaactcaagaaacttgatgaatctttctatactgataaccctgtcgttattcaggctttagatttcaatatagtaaacaacgaatggatgtctcatgatggcaaagttcgtggtcatggggtagttcaaattgacatcgatgggttaacctttgcaattcccgtccggtcaaatatcaagcatgatgcgagttacatccttgaagtaaaccgcgatgaaaataaagacagacgtattaaagggatgggtcttgactactctaaagccctgctgataagaaaaacagagcatatcagtaataatatttttgttttgagaacaaaagaagcaggcaggaaactccagggtaaagagcaacatatacaaaagcaatttaataaatatgttatgcgttacgtcaaagctgtagagaaaaacgacaggcgtattcttaatgatgaggaatatcggtttagcactttagttaactatcatgtggaattaggaattaaataa

SEQ ID NO: 129201 - DNA, 711 bp, Enterobacter cloacae
atgcgtcagaaaaccatcgatgcgattatggctcatgctgcagctgagtatcctcgcgagtgttgcggcgtggtggcgcagaaaagccgtgttgaacgttatttcccgtgccgtaatcttgctgcggcgccagaggacaattttgtcctttgtccggaagattacgcatcagctgaagactggggaactgtgatcgccatcgttcacagtcaccctgatgccacgacgcaaccaagcgaactggataaagcgcaatgcgatgcaacgcttctaccctggcacatcgtgagctggccggagggggatttacgtactatccagccgcgtggagaactgccgctgctggagcgcccgtttgttcttggtcactttgactgctgggggctggtaatgagctatttccggcaaacgcacggtatcgagctccacgattaccgggtggattatccctggtgggaaaacgactatccggacaacttctatcaggattgctggtatgagtgcggattccgtgaattcgacgggccaccgaaacccggcgatatggtgatcatgcaggtccaggctgataagtggaatcatgcgggaattctactggagggaaatatgctgctgcaccacctgtacggacatctgagccagcgcgtgccgtatggtggctattggcaggaaaggacgatgaagattctacgttacaaatctctgtgctaa

SEQ ID NO: 129202 - DNA, 228 bp, Enterobacter cloacae; identical to SEQ ID NO: 10398

SEQ ID NO: 129203 - DNA, 1452 bp, Enterobacter cloacae
gtgcaacagttggcggtccagctagatgaaacctggaaaaccgtcgcatcccgctttgaaggaaatgcggaggttcatatttgccatgacggtaaacatccttccctgactatcagcagcctggagaaactggaggagccaccatcgttgcatcgtctcaacagtcgggtaaggctgctactcccgccagtagatttgacggaactgttgcttgaaatagatgccagaacgggatttacacgtgagtttacgcatgtcagtgaatccggggcccgggcacaggatctgcacatcagcctgtgcgcggtcctgatggcagaggcctgcaatatcgggctggaaccgctgataaagcacaatataccggcgctgacgcgccaccggcttagctgggtaaaacagaattacctccgggcagaaacgctggtcagcgccaatgcccgcctggttgattttcagtccacactggagcttgctggccgctggggtggtggcgaagtggcttcagctgatggcatgcgctttgtcacgccggtgaaaaccgtcaattcaggacctaacagaaaatattttggttccggacgtggcatcacctggtacaacttcgtctctgatcagtactctggattccacggcatcgttgtccccggcacattacgagattccatttttgtgctggaaggccttctggagcagcagacagggctgaatccggttgagatcatgacagacacagccggtaccagcgacattatttttggcctcttctggctgctgggataccagttttccccccggcttgccgatgccggtgaagcggtattctggcgagtggataaatcggcaaattacggtgcactggacgaactggcacgtggttgtgccgatctgtcgaaagccgaggatcagtgggatgagatgatgcgaaccgccggttcgctgaaactgggcaccattcatgcttcagaactcattcgctctttgctgaaaagctcgcgcccatcagggctggcacaggcgatcatggaagtggggcgcgtcaacaagacgctgtaccttcttaattatattgatgatgaggattatcgtcggcggatcctgacgcagctaaaccggggggaaggccgccatgctgtggcgagggcgatctgctacgggcagcgcggtgagatcagaaagcgctatcgtgaaggtcaggaagatcagctgggggcactgggcctggtcactaacgcagtggtactgtggaacacactttatatgcaggaagccctgagctggatacgcagtaatggagaagaaatcggggttgaagatatcgcccggttgtccccactgatgcacgggcatatcaatatgctggggcattatacgtttacgctaccggaggatattttgaagggggaactgagagaactaaatttcaatttaaacaatgaattaacttcttag

SEQ ID NO: 129204 - DNA, 387 bp, Enterobacter cloacae
atgaataaaccagcagatctgaaaccccgcaacttatcggctgctgtcagattgcgcctaaatgaaatcgagaactggctggacagagggctaacgcggcatgaaattgctgaaatcctcgacagcgaatacagcttttcggtaacagccaaagggcttgagatggcactgtatagaacgcggcaaaaccgaaaaaatgtattgcacaatacacatgataagagtagcgcgaagggtgcagcggaaagtgtattgcacaatacacaaccgtctgagcctgaagcgcaggaaagtaaaaaagcagagagtcccggcattattgataaagaattcttcaagaaaatcggtgagaatttcgaccctaagaagttcaacaaaaaattctga

SEQ ID NO: 129205 - DNA, 384 bp, Enterobacter cloacae
atgaagaatattaaaaatctcgccctggctaagatgtcgggttttcgtcataagacggtcgccgttcctgagtgggaaggcgtcaaagtggttctccgtgagccgtcaggtgaagcctggctgcgctggcaggaggtggtgaaagggggtgccgacgatgaaaatgtgtcggtatcggaaaaggcgcaccgtaatctttgcgctgacgtggttctcttcattgacgtcctgtgcgacaccgataagcaaccggtattcagcgtagacgaagaagagcaggtgcgtgaaatctacggccccgtccattcacgcctgctcaaacaggctcttgacctgatcaacaatgcggacgaagcgcgggaaaagtctcaacccccggcgtaa

SEQ ID NO: 129206 - DNA, 444 bp, Enterobacter cloacae
atgtctgcactttatgaaaaatcgcagctgacgaagatccttatttcctccctgccagccaccaaagaaacgatggattccgcaacctttctcgatctgagttgcaccatcaaagaaattcagttcaccggtggtcagaagcaggatatcgacgtaacaacgctttgttcgaccgagcaggagaacattaacggcctgtcttctccgtcagaaatctctctgtccggcaacttctacaagaatccggcgcaggacgccttgcgtgatgcgtatgacaacgatacgacctacgcgttccaggtcattttcccgtctggcaaaggcttcaagttcctggctgaaatccgccagcacacctggtcttccggtaccaacggcgtagtggcggcaacgttctccctgcgcctgaaaggtaagcctgaaagtatcgagcctggctcctga

SEQ ID NO: 129207 - DNA, 1005 bp, Enterobacter cloacae; identical to SEQ ID NO: 31749

SEQ ID NO: 129208 - DNA, 279 bp, Enterobacter cloacae
atgaagctgtcgcgtcgggatcatttgcccctgcaggtccatcgggctggacagaacaaattcaacggtttcaccggcaagctcgcccgttttcccgtcgatataccagacctgcagcttttcctgagtcgggtctgctgtggggttgccgtctgcgaaatttctggcatcgagatatttctcttttgtgtcgtgaatagtgactttcgcctgcagcagatcgtcataggcaagacacagggcagaaatagagctttcgatgttcgcaaccgtcagtga

SEQ ID NO: 129209 - DNA, 333 bp, Enterobacter cloacae
atgaaaaagctattcttggtgctagttattggtttggctggctgctctgtaaactccctcgaatcccaaaagcctattctttctgagcacacttcaaagagtgcagaacaggttaacagatgcctggcccctaaatgggtggagcttcgatcttcaagctccagcataccaactgagacaggttacaaaataacagcatcagacgatattttcggcgccctttcagtggtgaatatcgataaatcagaagcaggcggaagcgatgttaaagtttacgccgtcgcaaaaggatggaacgatcactgggctacggctgccagatcatgcctttga

SEQ ID NO: 129210 - DNA, 339 bp, Enterobacter cloacae; identical to SEQ ID NO: 127131

SEQ ID NO: 129211 - DNA, 675 bp, Enterobacter cloacae
atgaacgttccgctacgctgcccggattacagctgtgtcagcaggcgggcaaagtcggttaatgtcagtttcaaaacgcccacccggggtgaaatcgcacacctggtaattgattccaccgggctgaaggtcttcggtgaaggcgagtggaaagtcaaaaagcatggccaggaacgccgccgtatctggcgtaagctgcatctcgccgttgacagtaaaacacatgaaatcatctgcgcagacctgtcgctgaacaatgtgacggactcagaagccttcccgggtcttatccggcagactcacagaaaaatcagggcagcatcggcagacggcgcttacgacacccggctctgtcacgatgaactacggcgtaagaaaatcagcgcgcttatcccgccccgaaaaggcgcgggttactggcccggtgaatatgcagaccgtaaccgtgcagtggctaatcagcggctgaccgggagtaatgcgcggtggaaatggacaacagattacaaccgtcgctcgatagcggaaacggcgatgtaccgggtaaaacagctgttcgggggttcactgacgctgcgtgactacgatggtcaggttgcggaggctatggccctggtacgagcgctgaacaaaatgacgaaagcaggtatgcctgaaagcgtgcgtattgcctga

SEQ ID NO: 129212 - DNA, 186 bp, Enterobacter cloacae
gtgaccagacaggaatccgccgccctcaacatggccaaatttatccgctcacagacactcctcctcctcgaacggctcgaacagatggatctggatgaggcagccggctgctgtgagcatctgcacgatcaggctgaagcgctttacgccatgctgaacgcacagataggcgagaaagatgcgtga

SEQ ID NO: 129213 - DNA, 450 bp, Enterobacter cloacae
atgattgagacgagtctcgatttttccgggctgaatgacatcgcaaaggatctggaggcgcttagccgcgctgaaaacaacaaggttctgcgtgacgccacgcgcgctggcgccgaagtgcttaaggaagaagtgatcgcacgtgcaccggtacgtaccggaaaactgaaaaaaaacgtggtggtggtgacccaaaaaagccgacgccgcggggaaatttcttctggcgtccacattcgtggtgttaacccccgcaccggaaacagcgataacacgatgaaggcgagtaacccgagaaacgccttttactggcgattcgtcgaaataggtaccgttaacatgccgccgcacccgttcattcgtcccgcgttcgatgtacgccaggagcaggcgacggaggttgcgatcaggcgcatgaaccaggccattgacgaggcattaagcaaatga

SEQ ID NO: 129214 - DNA, 315 bp, Enterobacter cloacae
atggactatttccgcatcgaacacggcattgaactgcccaactacagcgtagatcgccactggtgggagcagggtgaaaacctctatatggacaactggcaggaatgcggttttcgtgagtacgacggtcccgctcagccaggtgacatggttatcatgcaggttcagtccaccgtcccgaaccatgccgggattttgcttgatggcaacatgctactgcatcacatgtatggccagctaagccagcgtattccctacggtggctattaccgtgaccgtaccatcaaaattctgcgttataaggatttgatgtaa

SEQ ID NO: 129215 - DNA, 192 bp, Enterobacter cloacae
ttgttcaagatcgaagaggcgggtaccggatttggtcagctcttcctgcactttcgcaaggtcggactgcagctgcttggaaacctgaccagtgctttcgatttctgctttctgcgcatcgaaaagttgagacattttctgctgggattcttcgatagctttttgaatgagagcgagttcagacataattaa

SEQ ID NO: 129216 - DNA, 222 bp, Enterobacter cloacae
gtggttccgactaaggcgcaggccgccggcacctttacggtgggcggtttcgatatggcctctcaggtctgggatcgcatgaatgccaccgtggaagtcagccgtgacgaccgcgacaacttcgtgaaaaacatgctgaccattctgtgcgaagaacgcctggcgctggcgcactatcgcccggcggcaatcatcaagggcactttctcttctggctcatga

SEQ ID NO: 129217 - DNA, 480 bp, Enterobacter cloacae
atgacaataccggcacatatgtggcttactgatgaaaataactcacctataacaggtgaatgtttaatgcctacacgattgggttctacagagcttaaatcgttcaatcattctgtatggattcctacagattataacactggaaaacttactggaacacgcctacatgttccaattacatttgaaaaagagatagatcgcctcactccctatttattcagggcggtatgtcagggtagaacatttggaaaagctttaattaaaatgtacagaattaatgaagcaggaatagaagtagaatattttaatataaaattggaaaacgtaaagattacaagaatttctccaattttatttccaataggagtcgcaagtaagcatatggaagaaattgaaattcgttatgaatcaatagaatggatttactgtgatgggaacataatgttcaaagactcatggaatgaaagagcagtagcataa

SEQ ID NO: 129218 - DNA, 219 bp, Enterobacter cloacae
atgttaaagccaatcatgaaatttttaaaaaaattctttaatagtgttatacaggattgtttcaatgatatttactggtacggtgtatttatcttttccgcttttctttcaggtatagtagcagccaatatagatgatattaaaatagctcacaacattattctgggaatttttattatcgtatttgtaattgctttccgcttcagagacaaaggataa

SEQ ID NO: 129219 - DNA, 702 bp, Enterobacter cloacae
atgtattacagtgaagatattattaataaaataggaactgataaagaattagccataagattagacaaggctatgagcggggtcaaagaggaagttattgattatttaaataacctcggtgatgcagcaacgcgcctgttatactattcatcatgtttaacgaaaaattatcatgatgtttgcacccgattaaaggatgaagatgtcagattcgtgcaggggttaggcgagttagttatacatcggaatttaattttcaggatgattaaaatttatatagaaacagttctcaaaagcaaaaatgaagtagaaaagaaaagcatccttgaaagattaacactattcactaaaaacatttccataaaaaccttctcaaaatccgccttaatttattccattgtatcttacatttgttatggtaataaaatgaatgcctccgttgaagctgcttttgttaaaaaaataggagcgcgcgctggcattccaattactgcattgaacctttatagcattgttaacaaggcttctgaaagtgcaaatagattaaaaatttttatgccacaattttatcatgcactttatgttgaaaaacttgagatgatgtattttcttattgagccaattattatgaaggctggatacttaaatataaacacagcatctaacattgaaattactaacgcgctaaaaagaatgatgtaa

SEQ ID NO: 129220 - DNA, 984 bp, Enterobacter cloacae
atgccagcgaacagcattaccccatccgacttaaaaaccattcttcattcaaaacgtgccaatatctattacctggaaaaatgccgtattcaggtaaatggtggacgcgttgaatatgtcactcaggaaggtaaagagtctttttactggaatattcccatcgctaatacgacggcagtaatgttgggaatgggaacatccgtgacgcaaatggcgatgcgggagttcgcgcgagcgggcgtgatggtcggtttttgtggcacggatggcacgccactctattccgcgaatgaagtggatattgatgtctcctggctatgcccgcagagtgaatatcgcccgacggaatatttacagaactgggtctccttctggtttaatgaagaaaagcgcttgcaggcggcaaaacactttcagtttattcgattacaacaaattgaaaaacagtggtcagggttgcggatgcagcgcgaaatggcctttcagccagataaagatgctctgaatactctcctcgaacgtgccagacagggtatggaaaaggctcaggaccacacctctctgatgctccaggaagcccagctcacgaaatcgctctataaactaaccagccagacgacaggttacggcaattttacccgagccaaacggggtggcggggcggatatggcaaaccgttttctcgatcagggtaattatctggcctacgggctggcggcggtcgcggcctgggtgacgggcattccgcacggtctggcggtgatgcatggcaaaacccgacgcggcgggctggtttttgatattgccgatttaatcaaagacgccctcgttatgccgcaggcatttattgcggctatggagggtgaagataatcaacagtttcgccagcgctgtattaatgcctttcagcaggccgatgcgctggatgtgatgattaccacgttgcaggaaacctcgcagtcgctggcggggagcacaaaatga

SEQ ID NO: 129221 - DNA, 3225 bp, Enterobacter cloacae
atgaatgtgctgattatctctcggtgtaccaaacgtgcgcgcgagcaaagctgtcagattatcgatcagtttgctgagcgcactggagacgcggcgtggcagacgacgattacgatggaaggtgccataacactgcgcaagctgctgcgtaaaactgcgcgacgtaataccgccgtggcctgccactggctgaaaaaaaacggtcaaaccgaactgctgtggatagtcgggaatttgcgtcgctttaacgcgcaagggcgcgtgccaacaaatcgtacgacgctgcaaattatccgcaatgacagcgaacaccgctggcaaagtgcagaaagcatcgccttgctggcggccatcgctgggctgtttcacgattttggcaaagcggggatgtgcttccagcaaacgctgctgaaagagagtaagcaccgttttcagccataccgacacgaatggatttcggtgcgtctgtttcaggcttttgtcgggcaacaaaccgatgcgcagtggctagcctcgctggaacatctcaaggcaactgacgaaaaagccatgctgaaagccctgacgatggatacgccggaaaaaagcggcagtccgctgggtcacctgccccctctggcgcgagtggtggcctggctgatgctgtcgcaccatcgtttaccgcagtcccattcggcagagccacaattactgtactgcgatggctggcttgagcgacagctgaacgcagactggaactcgcttaatcataaatccaccgaaaaacatcagtggaaagagcgtgatttaaaaaatgtctggaaattccctcacggcacgccgctaagaagtaaaacctggcgcgagaaagcccgacagattggcaaacgtatcaggaatacccccgcgttacttgactttgggtcgcttgataacctgtttactctccaccttgcgcgtctgtcgctgatgctggcagatcatttctactcgtcgcagcctgcgtattcaggttggcaggacgacgctgtccagatctgggccaacagtaatcccgagcctaaccaaaagctggatgaacataacgtgggcgtggcgcatcatgctctgctgatgggtcgttcccttcccacattacggcgcgcattacccgccatcgcccgacataaagcgttcagggaaagggcgaaagatccgcgttttttctggcaaaacaaggcctgggatgtcgcctcttcgctacgggataaaagtgctgagcagggcttttttggcatcaatatggcctcgaccggatgcggtaaaacctttgccaacgcccggattatgtacgctctggcagacgagcaggagggatgccgctttagcgtcgcgctggggttgcggaccttaacgctacagacgggacatgcgttgcagtctcgcctggggctggacgatgacacactggccgtcgtgaccggtgcggcagcggtgaaggagctttaccaggggaacgatacggaagataacaacagcgccagcgatgaagcgtttttcgccagccatcattatgtccattatgaaggcgcgacgagcggcggcacggcgcagcagtggctgtcgaaagaacccgcgcttaatcgcctggtcagcgcgccggtgctggtgacaacgatcgatcacctgatgccggcaacggaaggcgtgcgtggcggcaggcagatccctgccatgctgcgtctgctgaccagcgatctggtgcttgatgagcctgacgatttcgacattgatgatttgcacgccctttgtcgactggtgaactgggccggaatgctcggttcccgggtgctgctttcctccgcgacgctgccgcccgcgctaacggaagcgctgtttgaagcctatcgggaagggcgcaaagcctggcaggccgcatgcggtcagtctgacagaccgatgaatatctgctgcgcctggtttgatgagtattgcgcgcagtcgcaggacgtggccgacgacgcgcattttcaccgggcgcatggcgattttgttcgccagcggatcaaacgtctgcctgaccagccgcggcttcgtctggggaaactggctgccgtggagccgcaatcttccagcaagacagatgttgtctccgcgctggcgcagacgctacgccagcaaatgatcgcgctgcacggccttcatcacagcacgcataacgctggcaaaaccgtgtcgtttggtctggtgcggatggccaatatcaatccgctggttgccgtcgcgcaaacgctgatggcattaccctccccggataattacagcatccattactgcgtttatcacagccagcatccgctggcggtgcgggcggcgattgaaaaacgactcgattgtgcatttacgcggcacgcgccggagcggatctggcagttgcctgaagttaagcaggcgctggcatcgcaggaacaacatcatctttttgtcgtgctcggaacatccgttctggaggtcgggcgcgattttgatgccgactgggggattattgagccgagctcaatgcgttcacttattcagtttgcgggacgtattcagcgccatcgtcagatcgctcctgagagcgaaaacctggtaattctggatcgcaacgtccgcgcccttcacggggaaaaggttgcctactgccgacccggttttgaaaccgggcagcatctgctgcttcatcatgacctccatgcactgatcgatgaagaaggctatcgcaccctgaatgcgatcccgcgcatcgctgaggatgttcccggcaatgcccttgcggcgctggagcacacccggttgcgtgccgcactgctggaaggcggcgataaatcagatgcggtcgccgcattgtggtggcggttgccgctgacctggaacggtgagcttcagaaacggacaccatttcgacgcgcttcagctcaggcctcgttctttttgagtatggaagaggagggtgatgaacctgaattttgcctgatgcaggaagacggggtgttaaaacctgcgggacgattttgcatacagccgttattcatggctgatggcgttgagccgtggattgcaattgattatgccgaggtattacaggcgctggcggatgagaagcagatggagttggctgtggtgtcgcgacggtatggcgaaatcacgctgagggacgaaagaaaagaaaaggcagaggaatggctgtatcaccaggtattgggtgtattcagggaatatctctaa

SEQ ID NO: 129222 - DNA, 882 bp, Enterobacter cloacae
atgaagacgttgttttctggtcgttcagatatgcctttcgccatgctgctgttggcccccagcctaattttgctggggggcctggtggcctggccaatgatttccaacattgaaatcagttttttacgtttaccgctgaacccgcgtattgatgcggtgttcgtcggcctggataactacattcgcattctgggcgatgctgcgttctggcactccctgtggatgacgttctggtatacggcgctggtcgtgctcggcagcaccgggctgggactggccgtagcgatcttctttaaccgtgaattccgcatgcggaaaacggcacgttcactggtgattctgtcctacgtgacgccgtctatttcactggtatttgcctggaaatacatgttcaacaacggctacgggattgtgaactatctgggcgttgatctgctgcatctctacgatcaggcgccgctgtggttcgataatcctggcagcagttttgtgctggttgtgctgttcgccatctggcgttacttcccgtacgcctttatctcgttcctcgcgattttacagaccattgataaatcattgtacgaagcggcagagatggacggagcaaatgcctggcagcgttttcgtatcgtgacgttgcccgccatcatgccggtgctggccacggtggtcacgttgcgaaccatctggatgttctacatgtttgcggatgtgtatctgctcaccaccaaggtcgacattctgggcgtatatctctacaaaaccgcctttgcgttcaatgacctgggtaaagcagccgccatttccgttgtgctgtttgtgatcatcttcgctgtcattctgctgaccagaaaaagggtaaacctcaatggcaacaaataa

SEQ ID NO: 129223 - DNA, 666 bp, Enterobacter cloacae
atgacgcttaacgctgttgtattcgatctggacggggtgatcaccgataccgcgcatcttcactttctggcctggcgcgccgtggcggaggagattggtatcaccttcgacgaagtatttaacgaacagctgaagggaataagccgtatggactccctacagcgcattctgatacatggcggaaaagaagggatgttcagtgacgagcagcgcctggcgctggcgacgaaaaaaaacgcgctttacgtccagtcgctggcatcactgacgcaggattcgctgctgccgggtattcgcgacgtgctggcggatattcgcgccgcgaaggtcaaaattggcctggcatccgtatcgcttaatgcccctggaattttgcacgcgttgggtattcatcaggctttcgatttttgcgccgatgcgtcgcgcatttgccgctcaaagccggacccggaaatcttccttgcggcctgtaaaggactgaacgtacgtcctgaagaggccattggtatcgaagatgccgccgcaggggtagatgcgatcaacgccgcaggaatgctgtcggtcgggattgggcctggcctgaaccatgcgggattacaacttcattcaacgcaggaactgacctgggaacgcctgacggcgttctgggcatcccgggcgtattga

SEQ ID NO: 129224 - DNA, 1932 bp, Enterobacter cloacae
atgagtgaaaaaacagatacaaccaggactttagagttaaagtatgacgacaatggaaaaccttcatggcgttcatgcccttctcataaaaatataaaggtccgcggaggatgtgatttacctcctcatctccctggtttgataatactcgtccatggggttaactcaacaggtgaatggtatcaaaatgcggaagagtctctctgcaacggattaaatgacaggttagggctcaatggttctcaatttgaattgaagccgaacaaatatagtacagattgtgagaaggaggaagggaaaagtaactcgtcaccttcacctttagctcgtagaaaacttattgaaaattctgagcgctctccaatcattcgattctattgggggtattcttctgtgaggggggaagaggataaatatgttatcccgttaactaatgcggatggtgaagattatcatgaaatgaaaagaacaggtataaaacaagatgacattcaaaaaaaagggccatatatatggggaggtggcccattccaaaatggcacgaataacttacactcgctttggagtgactatggattcgatgagaatctggcgggaatctctggagcaaaacttcagtatctcaatgaagataaagatagacttttaacaaatgctccaccaagaaaatactattcacatgcagctaagagattagcagatcttttagaccttatccgggataaatatccaaatgatacggttagtattatctctcatagccaagggacaatgatttcgctagccgcagtcgcattagcaaaaaaagggccagatgctctttttatattaaactccccttatgcaatgcataatagccagcttaatgagctttcaattcctcagaaagagagaatttctccaagcggacgcgaaaatacattatcatcaataattgaaaaaattgcaaagcaatccacgcatctgtcctctgtgggttataaagggttatgtgtaggcaagtttactgataaaacgaattggaagcctgaaggtgagaatgtaatacgggctggaaaaatacaagagcgtgataatcatggcagaacgtatatttatttttgccctcatgaccgagttatggggtcattaccgcttcgctcgatagggtggcaagggctacctaatgataaaaatggtaatccacatccattaattgtgaaatttaaaaataatttgtaccagaggatgttggccaggaatacgccatgcggttcttatcctgataagcagacaccatttggtactttacctgatggaaaaccattttgggatgatgatggtgataaatatcaaagtagtagcattacatatcctgaccctccaaaatggcaaacagtgtttgtaaatgcagagaaagtccctgagcctattaatcccagtgagctggccgaatttgacgaaaccagagtaggtaaagagcatggctcaaaacaacaggatgggtggggtgagatagcccctaaaactggaaagaaaaatgacaatacatatgataactatgtcaatttatatccaaaccaagatgttgtaatcggctataaggaacttccaagtggttatgtgcaagagataacaaggaaggaaactttcgaagaaaaagataaaaggttacgaacttatgtttctcaaccaacagatcacagcacactgcccggaaacaaggaatttatgaccagagtagtagcttatgatttaccgataggttactgcgatgctacatgggataaagaatttctttcaacgctccgatatcttgctgattggaccactggcgcagacccttatatgaacactggggttgttgaaagaattaatgaaccttcaatgataagtcgggaaacgggtatcgaggaaattattcgagaaaaggcaaaggagtatggttattaa

SEQ ID NO: 129225 - DNA, 261 bp, Enterobacter cloacae
atgagtagatacgtcgttgttttaggggatgccactacgcatgatggtaaagttacatcagcctcatccagtttcgatatagccggtaaaaatgccgcacttttgaatgataccgtcagttgcccggaacacggtatgaataaaattattgaatgcgatgtttctgcgtatgaagaaaacgggcgtggaattatattgcatggctgcaagacgcagtgtggtgcgagtgtcattgcaagttatgcagctatcagtcagtga

SEQ ID NO: 129226 - DNA, 624 bp, Enterobacter cloacae
atggctgcaagacgcagtgtggtgcgagtgtcattgcaagttatgcagctatcagtcagtgataatcttacgctgacagcgggtaaacagctggatgttggtgcgcagaaggactttacgctggcggccggtaaacaactcagcctgtacagccgtgaaggggcaaaactgttcagctcgcaaaacgatattgatattcaggcgcagggcggaaacatcaccacatggtccacgcaggatacgcatgtttcaagcggcaggaaaatggttgtcacggcacaggacgagctgacgctgatttgtggtggtggctacatcaaaatcaacggcggaaatgttgagattggtggtccgggtaaactgctgattaagaacacgggcatcaggaaagcgggcacgggcagtatgcagggggtgatgaagtcgtttgaaccttctacgtttgatgagaaatttgtcatcagaaatgcgctgacaaaagaacctataccaggtaaagcgtacaaaatcaccatgccagatggttctgttgtttccggtattacagatgcttctggagcaacgtcactcaattcttctgatgttatcgacaatatgattatcagcttagttaaggcgaattaa

SEQ ID NO: 129227 - DNA, 945 bp, Enterobacter cloacae
atgggagccagttttggggtgggtctgggaggaatgagcggttctcagaaggtagaagagtcacgaaaagttgaaacaaatgctccggctcaaattatttatcgcatagataaaaatcgatacctgacgctggaaaactacatatcctgtgataagggtggacaggtttattacaatgactctctgcggggaataaaaacacacctgggatgggataacgatttttatgatttctcatatcgccggggaaataatattgcggcttatcaaggctctattattaatggggcggataatggttatctggcattccctggcgcatctaccagacaatattgtggtagtggaaggtcagaaacaggttgccctgtgtttttcttcttttcagcagatcatgggaacacatttatatataaaattgtagctatggaatacagcaccccagaacgttttagtcagcttaaagtagtagtggctaatgatggtgtttatctaagggatgagtctaaaacggaggatagctattctcgccctacaggtctcaatgaccttagctcagtgaataaattaaggttttctgacggcaatttaatcagtgtttatgatgactggcagaaaaaaattgatgagttagtgaaagaagaactgataagaaaaaaaatgccctatgcaaacgagtatggacctagatttcatatattcgactatctcagaacattaacgccaccgaaaacacatgaggaaaggaatttaatggcaaacgaattgtctgaaatccagattaggattgaagatgaagtttataaagatggaattaaatttccgaagctttcaacgtcaagtattgatgttaaatatcaatgtaataaaaatattaaagctaaagccatcacatatactaatgagtcaaatgggaaaaaggaggtggtgaaaaatgaacaataa

SEQ ID NO: 129228 - DNA, 1431 bp, Enterobacter cloacae
atgggatggtctcttccggaagtgcctgaaaaagagcaggcaccatcctggtcaccgtggaactgtctgttgattattattctcggacttttcaccgggctgcttgttgctgtactgaaatctccggcgacagggttactttcattgagcagtggggcctggttgccactgacggcctggacatttgcgggcatttcggcagccatcgcggtctacactttcaggcaggaaatgctggcagttcgtgtctggaactggaatgagtggtgccggaacatgcgtctgaagtggcgcttacgtgcacaacagcatcttgtcattctcagccatgttttcattactgccgatacgggactgttagatcgtctcgcacatacgcaggaagaggaaagtgcagacacatcgcctctcacgatgttgccagacgaaccgcttacacccggtatttcacgttttgagcagctgcttcgtcatctcattgctcagataatgccctcgattcggcggcgatattcttccggcccactccagattattgttcagaccaacggtagcgacaaagaccgtgaatctcagtcattctatcgtatctggtcagcaggttcccctccctggaaagctgagattcattttcaggacgcagactcatcctttgatggctggaatcagtttgtggcgtcaacaaagcggcccgtattggtactggcaatgcactatcgtttgcccaatgatgttctgccggaatttgccagcgcgttatttttgatgccaccatcgatgctgaatccgggtgagcaaaaaaatgcattacggcttttccgggcgatgccgctcaacacccgtatgcttgcaacggaactcactgaattacgggatatggccctcacgtctgccagcaagaaacaccttgtctggcacagtgggctctcagatgcgccaagacagtcagtgagcagggtgctgaatgatctttcggttcctttgtacgatagcattggcactggcggtgtcattgactatgacaccgccagtgtccggtatggcggtcttgctggctgggcaatgactggcgctgcggctgagatggctgcttatggccccaccagccagtggcttcttctcgaaggtgaagacgatgcctgggctgtgtcgctcggaaacgccgctcctgcagtcgggcatgatcatttcgtgattcagcctccctttcccgggggatctgttcttatggcattactgcttaatgctgggctgtacagtctgatgatccgctatttcccttcaactgcattctcctgggcagggatctctcttcttctgctgtcaatgattgtgacattgcctgggctggccattttgctgagacgaattacagcccgtcttcagcgcccggaatttatcagggttgcacgacactccggaaaggaataa

SEQ ID NO: 129229 - DNA, 1617 bp, Enterobacter cloacae
atgaaacgatctcccttagccggggcgtgcttgctcgcgctctcgctgatgatggggagcggtgcggcgtacgcgaaaacgccgcccgaccagctcatcatcggcatgaacatgaataacctgctgaccctcgatccggcggcaatgaccggtaacgaagtggtcggcattgtggtcaatctctacgactcgctggtggagctggacccgaacgcgctcaccaacgtcaggcccgcgctggcgacgtcctgggatatctcgccggaccgtaaaaccctgacctttcacctgcgtgacgacgttaaattccactctggcaacccgctcacggcggaggatgtggtctggtcgatgcgccgtctgctgcacctcaaccttgcccaggcctcggtgtggaagtcgtatggattttctaagcaaaacatcgacagccaaatcagcgcccccgatgcctacacggtgcaaattgttctgcctaagcctaacgatccgcagctggtgatctactccctcggcgcgctcggcaacctcggcgtgctcgacagcaaaacggtgcagcagcacgcggtgaataacgactggggcaaccgctggcttaccaccaacgaagcgggttccggcccgtttatgctggaaacctggcaggcgaaggatgtgctgcgcatgcagcgcaacccgcaatactggcgggaagaacccaaaatgagccgggtggtgctgcgtcatttccaggagtcacaaaccctgcgcctgatgattgagaaaggcgacctcgacgttgccaacaacatggcggtggcggacattaacgccctgcgcaaagacccgcagctcaccgtcgaagccgtgcagaaaggcacggtctactacgtggcgatgagcatgaaagaggcccatttcgctaacccgaaggtgcgcgaagcggtgcgctatctgattgactatcagggcatcaacagcgcgctgatgccgggctacggcgtgctgcaccagcgcccgatcaaggcgggtatgccgtccacgctgccggacccgggctataggctcgatatcccgcgcgccagaaagctgctggcggaggcgggctacccggacgggtttgacaccaccctgcgggtgctggcggatcagccgttcctcaatatcgccatcgccgtgcagtcgacgctgatgcaggcgggcatcaacgccaaaatcatcaccggcaccgggaaccagatttacggcgcaatgcgcgagcgcaagttcgacatgctggtggggcgcggcggtagcggcgtcgaaccccatccgcactccagcctgcgggcgttggtctataacccggacaacagcgatgaagcccgtctgaccaacttccagggctggcgtaccagcttctacgacaagccgctcaacgaaatgatcgacaaggccctgctggagcgcgatccggaaaaacagttcgccgactaccagcagatccaggtccgctacgacgcgctgatcccggcgatgatccccctgtcacagatggtcgattcggtggtggtgcgtaacgaggtgaagaacttccagtcgcacccgtcggccaccaccttcctgcgtgaggtctacaaaaccggaggtgacaaatga

SEQ ID NO: 129230 - DNA, 2592 bp, Enterobacter cloacae
atgttatttaaacgttctcttttatgtcttacgataagtgcagcattgcctttttatgcctgtgcagaaaatatcacgccagcaaaagatctgcctgataatgaagaagaggtcgagtttaacgatcaatttcttttaaatggcagcgctaatattgatattaatcgtttttcacatggcaacccggttttaccggggacctatcgcactaagatcaacctgaacggtaaactgaagtccaccgtggaggtcacgtttaaagataacggaacacctcgtgcgaccccgtgcataacaaaactgctgctgtcacaatcgggtgtcgacatcagcacattgcctgacggaccggaagacgatgaaacctgcgtcgatattaaaaaatctttcgctggcgctacggttagctatgacagtggcaagcaggctatggattttaattttccccagatttatgtgctgaaacgcccggcgggctatgtcgatccatcgttgtgggataacgggattcctgccgctctgctctcttatgacatgaacggctggcgtagcgagaacaacggcagtacatcagaaagtgcatatgtagggttacgctatggcctgaatatggggccatggcgcctgcgctcgcgtggcaattttaactgggacaaagatagcggcacaaaatactccagtcaggatgtctatttgcagcgcgatatcacaccgttgagtgcccagtttgtcatcggcgactcttacacgcgtggcgaggcatttaactctatgagcctgcgcggcgcacgcatgtacagtgacgatcgcatgctgccaatggggtccacaggctacgcgcctgtcattcggggtgtcgcgaacagtaacgcgaaggtcagcgtcacgcagagcggcaataagatttatgaaacctcggtgccaccaggcgcgtttgaaataaacgacctgagtaccacaggttacggaaatgatttactggtaacgattgaagaagctgatggcagcaaacgctcctttaccgtacccttttcatccgtcacgcagatgctccgtccgggagcctctcgctgggacgtcggtttaggtgaattaaatgacgattcactgattgatgcgcctaaagtgggttacggtacgctttactatggcctgaataatacgttcacgggttatattggcgcgcaatataccgacatggatttttatgccggtattctcggcgtggcaatgaacacccctgttggtgcgtttgcattcgacgttacgcaatcttatgcagatattgaggggctggataaattaagcgggcaaagttatcgtttaacctacagcaaaatgattgagtcgacgaatacttcctttaacgttgcggcttatcgtttctcgacggaagactacctgacgcttaacgatgcggcgcaacttcaggacagtattaggcaccagaagtactcaaaccgtagctatgactcaaacgaagcgttatatgcagactatcagcgcaccaaaaaccaggtgcaaattagtcttaaccaaccgctgacctccggagaagacaattttggctccctgtatgtaagcggcacctggcaggattactggaacgcgacgggctctacttccaattacaatattgggtataacaatagcttcacctacggcagctacagcttgtcaatacagcgaacctatgatcagaacggcaagaaagacgacagcgtttatttaagcctaagcattccattaagtgtattctcaaaagatagagggaatgccggtggattctcgaacatcaatatgggattacgttccgaccttaaaggcggcacaagttttaacacgtccgcgggtggaaatacgcaagataataaggtgagttattccgttagcgcctcgtcaaacagtggtaattatggtgacctgaatcagataagcggctacgggtcctataacagtgaatatggcccgctgggtttatctgcctcttttggtgatgacaacagtaaacaatattctgcctcctataacggtggcatggtcatccattcaggaggtattgcatttgcgccagggagtattggtgacaacgatgcgctggcactggtcaaagcgagtggtgcgaaaggcgccggtatcggctttggtaacagcgaaataggcagttccggctatggcattctgccttatatgtctgcctaccgtgaaaaccgcgtataccttgatatcagcacgctggaaaacgacgttgaaattaaaaacaccagtgaaattacggttccccgcagtggttccgttgtgctggttgattttgcaaccgatgaaggccgttcattaattttagaacttaagcgcaccgataacggatttattcctttaggcgctgatgttttaaatgaaaaaaatgaatctattggcaccgtgggacaggcggggcaagcctatgtccgcggcgttgaggatgaaggcacgcttcatgttgtctggggaagcgataaagacagtaaatgtgacgtgcattataacgtctcatcacatgctcaaaaagtaggacttacaacggtgctcagcaatcaagtgtgccagatgtaa

SEQ ID NO: 129231 - DNA, 1299 bp, Enterobacter cloacae
atgtcgcttttgctacaatggcgactgattttccgtatcgatttatatcccatgctcatgcgcgttatctttatccttctgctactggtctccggtggtgcgtctgccaacctgaccagtcagcaaggccttcctgcccaatatatgcaaaccaccgaagatgcggccatctgggcgcaggtgggaaatgccgtcgtgaacgtgggcaatgtccgcgccgggcagatcctcgccgtctttccggccgcggcggattactatgaatttcgtttcggattcggtacggggtttattgataaagagcacctggaaaaagtgcagggtaagcaacgcgtcgaggatagcctgggcgatctgaacaagccgctcagcaatcaaaacctcatcacctggaaagacacgccagtgtataatgcccccagcagcggaagcgcgccctttggcaccttaagcgccaatcttcgctatccgattctgaataagctgaaagatcgcctgaaccagacctggtttcagatccgcatcggcaatcgtctggcgtggatcagcagcctggatgcacaggaagataacggactgccggttctgacctaccaccatatcctgcgtgatgaagagaacacccgttttcgacatacctccacgacaaccagcgtacgtgcgtttaataatcagatggcctggttacgcgatcaagggtataccacgctgacaatgtaccagcttgaagggtacgtgcgtaacaagatgaacctccccgcgaaagcggtggtgatcacttttgatgatggcctgaaatcggtgagccgctacgcgtatccggtgctgaaagagtatggcttcaacgcgacggcgtttattatttcatcccgaatcaaaggtcacccgcagaagtgggatccccgatcgctacagtttatgagcgttcaggaaatcaagggcatccaggatgtgttcgacattcagtctcacacccacttcctgcatcgcgttgatgggtataaacaccccatcttattgagccgcagctatcacgtgatcctgttcgattttgaacgctcacggcgtgcactggcgcagttcaacccgcgcgtgctgtatgtttcgtacccgtttggcgggtatgacaataaagcgattaaagccgcgaatgatgccggttttcatctggcggtgacaacggtgaaggggaaggtgaagccgggggataatccgttcttactgaagcgactgtatattctgagaacggattcgctggagacaatgtcgcggctgatcagcaatcagccgcaggggtag

SEQ ID NO: 129232 - DNA, 1344 bp, Enterobacter cloacae
atgccaaatgaaaccaatacaaatacatcattcaaaattatgggcgccagaacaaataacactagcccgtggctttacgccagaaaaaaactggtagcattagacaggcaaacattaatcccaattgaagtccactggcgttacgaaaacgaaaccgagagcaaaacaggaaaatatttctctgatacagatcccaatcagcgtattattgcgacactaggttcagaaaatattactctcaacatagcaaatatatcaagcgattgcacatccattgtagcaataaaaaacgacggtaaagccacctcctatgtgaatcctgcgaatggtggaacaatgccagatttcatcgaaaaccataatatccgtctcgcttctggtggaagtgattcattattggccatcaataaagaaaacgaattatttacctggggcagcgatgaaaatggcgttttagatactcctgatggattaagtacgatggagatagaacagataagagggggtagtggtgcaatatgtgttacggggaaaaaaggtgatataaaagtctggggaaaggaaacacaactgcctccgaatgaaatagccacccttagtgatgtgaaaaatatttattctggttttgattttgccgtactgcgtaaaaatggaaaaatcgcatcatggggcgaggtgactaatgctcctcctgaagatatttcagctcttgatgacatagttgatgtagcagctggtggttatggatttgccgcaatccgtgaatatactgtgcgaaaagtcgttggttggggaagtaaatattatgatatggatgttcctgataatattgcttcgctggatgacattgctgaagttcacgcttctctcgatttttttgtggcccgaagaaccaatggctctgttgtagcatggggagagaatgatcacggttgtgctcaagtcccttcgcaaattgcagctttaacggatattattgacgtccagcttgcaggtgagaccgctgtcgcgattttgcgtgagaatggcaccgtgatggcctggggcggcccaatatctagcgcagtaccagcaggattgaatgatgttatcgccctttccggcatacgcggtgcattcgcagcccttaaatctaatggcaccgttgtgggttggggaatttatactacagaaggcatggaagatcagcttactgacgtatgtggtgtttattctaatggcaatagcttctgggcattaaaaaacgatgataccgtcgtcgtctggggagataaaggttggggaggagatatggctgatgttccaacggacctccagggtaatatatcctacgaagctaagtaa

SEQ ID NO: 129233 - DNA, 1395 bp, Enterobacter cloacae
atgctatcagttcaatcatggcttgaaaaatttgttgaacaggccgatcagaaaatttcacaatcaactaaagactacccagatacacttcatggacttaaggtgaaggttagtttcggctttggtaattacagttctgttccctggattgcatttcttgctgagggtcaggaagtgtctcatggtatctatcctgtcatactttattataaagattatgacgaacttatacttgcttatgggataagtgatacaacgatacctcaacttcaatggcactttaactctgatataccagtgacaattagagagtatttacatactaaccttgggatatacccaaagaaatatggtcagtcttactatgcgttctcacaaaaagtttccaatggaattgattacgcaaaatttgatgaagagattgaaaaaacaatcaatgtctataaaaaaatattttccaactccaaaatattgccccacccagatactcactccattactatggttaaaaaaccttacgatataaacgatgcattgaacgatctctttattcctcaatcaacaatagaaacgattattaaacgtttgatggtaaagaaaaatgtcattctgcaaggtccacccggagtaggcaagaccttcgtagcacgccgcctggcttatctgcttatggaagaaagggactcacaaagagttggcatggtccaatttcacccatcttatagttacgaagatttcgtacaaggttttcgcccaaatggtgatggcttccaacggaaagatgggattttttatagcttctgtcagcaggctctgaaagagccagataaaaaacatatttttatcattgatgaaattaatcgggcgaatttaagcaaggtttttggcgaagtcatgatgcttattgaacatgataagcgtggtgctaactgggcagtacctcttacctactcagaaaattacagtgaacggttttatatacctgctaatgtctatatcattggtttaatgaatacagcagaccgttctctggcagtcgtcgactacgctctccgcagacgcttttcatttattgatattgaacccggatttgaaacagagcaatttcgtactttcttactggataacaaagccgagcctgaattcgtcgaatcattatgttttaaaatgatgcaattgaataatgaaatcagtaaagatcctgaaatactcggaaagggttataggatcgggcacagctatttttgcaatggtttagatgatggcaaccaaccagatgtggaatggttcagaacaatcgttttttcagatatagcgccgttgcttgaagagtattggtttgataatcctggtaaaaaacaaaactggctcgacctgttacttgaggacatataa

SEQ ID NO: 129234 - DNA, 1047 bp, Enterobacter cloacae
atgaatcagccagcgatcccaatacgtaacatctattatatgctgacttatgcatggaatcatttacaggatgctaaaatagtaaatcttgatgcgataccggccaataacttactagatatactcggacatgctttaaataaatatgttctttatctttttcgtcgggggtttgagctggattaccagccaaatacggaactaatctcaggagtaaaaggaagggtgaatctcactcaaacactccgcggtttacatatgacacaaggaaaaacagtcagtacttttgatgatctaaatccggatacgcttgcaaacgaaattattaaaagttctctgactgtattaatcaaaaatgaaaatttaaataaaaccatccgagaagaatctcgctctattagagcaagaatgccagaagtgaaagaaattaatctatctccccttcacttcaataaagtgaaagttagggctagtaatcgtcactatagattcgcaattagtttatgcaagtttattgcagaaaattctataagcaatcaaaaaaatggtagttatcgtttttatgattttgaacgtgatgaacgtagaatgtcgcttctttatcaggaatttttatatcatttttgcatgcgagaattaaaaaatgctgaagttaaacgctcatatttgaaatgggatgcatatagcgatactgataaaaatttaactttcttaccacgaatggaaacagacataacaataaccagcaataacagaaccttaatcgttgatgcaaaatattataagaatatcttttctagccgtaacgaaacgcaaaagtttcactcatctaatctctatcagctgataaattatttattggcctataaacctacgcaaggtcataaaattagcgggttgctaatttatcctcatgttaagggagcagtaaaacatcgatataatgttagcggtttcgatgtggggctatgtactataaatcttgatcaagaatggacgcagattcataaagatctattatctatctttaccgaaaatttagaataa

SEQ ID NO: 129235 - DNA, 1392 bp, Enterobacter cloacae
atggctaagtataaggcgtatccggagtataaggattctggggttgagtggttgggggcgattcctgagcactggaaacttagtaaacttcgttaccaatttgtttttggtaaagggcttaccatcacgaaagagcatcttcaggatgaaggtattccgtgtgtgaattatggcgaagtacactcgaaatatggtttcgaagttgacccagaaattcacactttaaagtgtgtgagtgataaatatctcaaagataactccaactcgttattgaccaaaggtgatattgtttttgctgatacgtcagaagatataaatggatccgggaattttacgcaattagtgagtgatacagtgacgtttgctgggtaccacacaattattgcgcgaccttttgaaagagagaatagtagattttatgcttatctcttggattgcaaagagttaagatcgcaagtgcggcatgcagtcaaaggggtcaaagtatttagtatcactcaagcaatattacgaaatatttcaatatggcttccatcaaaagatgagcaagcgaaaattgctgctttcctcgatcacgaaaccgcaaaaattgataatctgatcgcgaagcaacagcaactgattgaactgctgaaagaaaaacgtcaggcagttatcagccatgccgtcaccaaagggctaaaccctgatgtgccgatgaaagattctggtgttgagtggttggggaaaatgccggagcattggattttaaaacggttaaaacatatctctcctaaagttggtgttgggctcgttattaatccttctacatatactaaagatgaaggtgtctattttatatttggtggtgatgttaaagagtttggatttgacttaactaaaacaagacgaatttcacgtcaagatagcaataaactacttccttcaagattaaatagtagagatttagtctcagtacgtgttggatatcctggaatcacgtcagtggttaccgatgatttagagggctctaattgcgcgtcaattatcatcatcagaagaggcagttacaactctgactggctatgtgctgcaatgaatgtctgggttggaagacaacaagttgatcttgcttcttatggtgcagcacaaaagcagtttaacgtatcggacgctattgaatttgtatttcctgtacctccgataaatgagcagaatgatatagctgatttcgtccaaaaaacgttgaacaaatttgatgatttaactcagaaagctttcaaacagatagagttgctacaagagcgccgcaccgccctgatctccgccgccgtcaccggaaaaatcgacgtccgtgattgggttgccccagacacacagaatgttgaggagccacaggaggccaccgcatga

SEQ ID NO: 129236 - DNA, 1092 bp, Enterobacter cloacae
gtgaagatcagcgattttatatttcagtttacgccaactaacttgtcacgaacggatagcctatgcagagtacgtattttcttgaaagacaacattatgcatgcactacttacaaacattgatggaaaatacagtcccgcaagtgttacaaattccgttgaacatattagaaagcagcttatagaaaaaggatttatctcagataacactcttattatagaacattacgaagaccggttatctggctatggttcatttgatagggtaacatttggtcctggtggctcgcccagatgggagagcatttctattaataaaattagcgaacggtttggttgcaatcatcaggaactagtcgataagacactagaaaacaaaaggttattcaatgaacttgaacgactgcatgagacaattcgtccgtttaccactaacacctggattgaggactatgctgttctgtcccgacggtacaaaataatggataaagctattactaagagtgaattagcagaatttttatctgataacccgatagaaagagagctggccaaattttttaaacgtgatctcgctttttttgccgatatgtatgcttttccttcagaagaatatatcgtagttccagaacttaaaattgaagaaggttttgtggattacgccatattttctggccgttcacgaatggacgttactcttattgaaatcaaaggtgccaatttcgatttaatgggttcaacgggttaccataatttctcttataaaactaatgaagcgctacaacaagtcagaggaagacaaggcaccattatcaggaattaccaaaaatttcgggaaaattttcatggtattcgagaaatgatagaaacggacaagcataaatttgaggctttttgcggaccaaaaggaaaattactggttgatcccaataaagatgtaaatatcagaacggtggttatcgcaggccgatctaaaaacgatctggaggaaagcattgagcggcacaaccttgaaagaaattcctcgcttcccctaaggttagagagctgggacagcttgctcaataagctgtccgggcagagagcagcgtag

SEQ ID NO: 129237 - DNA, 267 bp, Enterobacter cloacae
atgcaggtgcatgatcggcctcagggtgcaccagtgctggcgctggcggggtattcagtgtcgttaaaacgcatgcaaaaccatgcacctatgcatgcatggcttttgtacgtaaaaatggagggattttcggggattttttttagcgggctactgcacggccagttctgtacggcggcgggtgcaattcaggttctgtgcaggcgtgaatttttcacgattatcatcgcgcgaagccgcgtcaggtctgaatccgatggccgttaa

SEQ ID NO: 129238 - DNA, 2547 bp, Enterobacter cloacae
atgataaattcttttgaaaaatccaacctttggcaattaactttgggcttggccgacaatgaagatattgaaagattgaggaatagttattttgactttagaagaaaaattgaacctttagtaaaaaacattgaatttgaaattcctgggctgaccatccatgatatatctcacatagattcactttgggaagtagccgatcaaataattggtgaaaattattatttaaaccccattgaagcatatgttttaggaggctcgtttctgttacacgatgcagctcatgtaagtgcagcatacaatggtggtttcactgctttaaaagagagagatgaatggaaagatcttatctcactaaaatacaacaatattgagccagaaaaaaactctgaattagaaaaaagagctttatttgaaattgttaggcaattacatgcaaaacaagcaagaaatttaattcaacaatcttggaagtctgaaacaaatcagaactattactttcttatagctgatgaagagattagagactattactcagaaataattggggaaatagctgaaagtcaccattggtcagcaaaaaaagttaatgatagtttctcaaatagagtaattaatccccctgcatttttcaaaagtacaaattgggaagtcgaccctctcaaaattgcatttattttgcgtacaactgatgcatcgcatatagattcgagaagagcgcctacttatgctttcaatattcttaccccgcaaggtctttccaaggaccattggcatttccaaaataaacttggtagagctaaactggttgatggagaaaacctgagagtatcatcgggatcctcatttaacgagaatgaacgtaatgcatggtggttagcattcgatacagcacgaatgataaatagagaacttaaagatgctaatagttttttaatcgaatcaggccgccctcctttagcagctaaatcagtattaggtgcagaatcaccaaagtctttttcaaaatatgtactagcaaataattgggaacctgaagatatttcagttcatgtgagcaatcttccaagactaatttcaacattaggaggaaaagcactatatggggaaaataaatacgtagctctcagagaattaatccagaatggatttgacgctatcattgcagctcgaaatctcggctatcttgaaagctttgaaggtcacataaccatccaactaaataaaattgataacgaaagttggatgttaaatatatctgataatggtttgggaatgagtagatatgtgttatctgatgtcctcctcgattttggtaaatcattatggaaccatgatactgtcaggtatgaacacccaaaacttgcgcagactggttttagttccattggtcaatttggaattggtttttactcagctttcatgatatctaaccatgtgaaaatcataacacatcgatataagctgaaatctgatgaatccaattcccattggaaattaactttccctaacggccttgaagaaagaccatttatttcaaaaccaaatgaacaagaagaattaaaaaaacatggcactaccatatcacttcgtattgaaaatgaaactctaaatgatttattgataccagaggaagaggaagaggaaaaggaaataattagtgaagagaaaatgcagggtaaacttaaaaaaatcatcaaatggatatttcctgcatgtgaaatagacatttatttgatcacaaaagaaaaaactgaaaaaataataagcgcaaacgattggttggaaatatctgacatagatctacttagaagaatacacaataaaagtaaagaaaaaaaactttatccattaaaagttaatgggcgtactgttggacgtttaagaatcactagccactattattttctaattaatgagtacccacctttaattgtatcctacaaaggggctcgtgcagggcaaatttatggccttgatggtttatgcttatcattcgaaaataatgaaaaagcagagagaaatgatgctttaccaaactatcctcttgaaagctggattgattgggctagggaaattgtcagttcagaatcaatgctctcgattgatcttttacttaaacttcacattctcttgccaaatgacgatctaaatgtttggtttataagcaataaaagatgttcattatccgatattaaaaatcttctgatttcctcagatgaaattctctttcatatcggcgatctggaatacgatgacgatgatagtgtaagaaaaacagatttcgaacgtgatttaatgctcgagaataatgtcatagttagccattcaaatagtgtttatcatttccacgaagcattcacatttgataaggtaattgaaaaatacaatctccctagagtcagttatgcagaaaaacttgaagatctaattaaagagatttggggagattttgaagagaaagaggaatacgaagtcattgggttagtaaacaacaccgaaataatgagaagggtgacaaaatactctaaagttacttttaagtaa

SEQ ID NO: 129239 - DNA, 504 bp, Enterobacter cloacae
atgtttgattatcagacttctaaacatgctcattttgatgcagcttgccgagcgtttgcgctggcgcacaatctagaagatgtagccgctgccgttggtatgcgtccgcagatcctgcgcaataagttgaatccggttcaaccgcaccgcctgacctgtgacgagctgctggctatcaccgattacacagaagatgcccgtttgctggatgggatgctggggcagattaactgccttccgtccgttccggtcaataacgccactgtagccaacatgcaattttgcgcgttgagcgccactgcaaatgtgggcgcaatcgctggggaagctgtatcaactgagcacatgaccgccgcgcgcagaacgcaaattcttgatcgtgcccgtgatgccatccgttccctttccgtactggcttacaccgttgaaagccgcctccagtctgcgccggttcttgctgctgccgtcgatatcgtgactaccagcgccagcagcatgatgtga

SEQ ID NO: 129240 - DNA, 195 bp, Enterobacter cloacae
atgaaagcgttcgttacctacctgaaaaaagaatctccggccatgcaactggcaagcgggtcaactggctggcttgaactgccaaacggccagcgctggaaccctggccaccagtacaaattcaatgcccgttcgtctcgtcgtccatggtggtttcgtttgttcgggattatcagggggcgttatggccattag

SEQ ID NO: 129241 - DNA, 429 bp, Enterobacter cloacae
atggccattagcgaaaagcagcaggaaatcggcctgaagtggctggggaatatccgccgtaaatactggagcgagaaaagcgaagccgccgaatggtgggacaaattaacaccagaatggcgcggggttgttttacatgcggccgcagttgcttctggaatggacgttttcaaagcccatctgagcaaatgctattggtcagagttattcgaacgcctggactaccgggcaatgattcagctgcgccagggcatatccagggcgcgtctgacgtttgaagggttcgggagtctgagcgacagcgatttttcaaagcgcagcgctaaccgccaggtgaaaaaggcacatccgatccacagcagtaatggcgtgcagatgattatcgcgcctcatatcgttcataagatgcaacagcaggagaatcattaa

SEQ ID NO: 129242 - DNA, 402 bp, Enterobacter cloacae
atgtccattatctctgtaaacgccaaagaactgggacaagaactggctgcgtggggcgttccacacaattacgccattctctttctggagaaaagcaccgttaaaaatggccgtgtggccttacatccgtttttctttaatgacaccgagcacatgacaaacaaacgccactggctggccgttaatgttgcgtactggtgctgcgtctatcgtgaagcggaaagccaataccagcaggttgaagcgctggccagcattcgttccatgtattacatcgccgggtcattgggtactggggaagtcaaagcactgatccaggagtggtggcgcaatacctacgagctgcacaaagtacccgcgccgagctattcagccgctcccgttaccgtctctttccactaa

SEQ ID NO: 129243 - DNA, 234 bp, Enterobacter cloacae
atgcaaacaacacgcatgtttttacccgtcaaccaatccggtactgacctgctggcaatgctggcaaaagctactgaggaaggtaaagcggcctccgcagatctgtgttctgcccgtctggataagctggccgcgtatgccgcgaacgaaggtttaagcgctgccgaaatcgtagagctgatccgtgaagaagctgcggccatttgcagcaaaggcggtgcggcatggaactga

SEQ ID NO: 129244 - DNA, 324 bp, Enterobacter cloacae
atggaactgagtaagcgggaacaattcactaaacagcagttgattaattacgttgccgagaagcttgaacgtattcacatagcacaaacgctgcccgattgtatcgcgcagcaagctcacttgaataagaaagcgctagaaatcgcactggctgttctgacttctaaacccactgcctgggcagatgaagttgatctggaggaaatgcaagaggaaggacgtgcgtacatgttcaagtcccgccgagcaatggggcaacctgatcctaattgcgtagtggagctttaccgtctaccgattctgtggaaaggggctggtaaatga

SEQ ID NO: 129245 - DNA, 858 bp, Enterobacter cloacae
atgactatcaaaactcctcttaaatgggtgggcagtaaagtccgccttatgccgcagctgcgtgaccatttgccggaaggcaaacgcctggttgagccgttcgcgggttcgtgcgccgtcatgatgaatactgattatgacgaatacctgattgctgatctgaacccggatttagtcaatctgtataaggtcatggcgtatcacacagaagcattcctgaacgagctggaaatcctgttttctgccggggctttgggtgatcaggaaagccgcgctgtttacttctacgctatccgggatgctttcaatctttcaggaaagtctctcggctctgaaagcgtagaagccgctgcccgtttcatgtacctgaaccgccactgctttaacgggctttgccgttacaaccgccgtggccagttcaatgtcccattcgggaagtacaagaaaaactatttcccactaaaagaaatccgcgcatttgctgaaaaggcgaagcgtgcaactttcatcaccgcgcattactccgaaacgctggctatggttcgtgccggggatgtggtctattgcgatccgccatacctgacggaatcgggaaatttcacctcatacactgaaagcggtttttcacatcttgatcaggggcggctggccagaaaactgcgccgtcttgctgaaaagggcgtgaatgttgttgcctcaaacagcgatctggaaatggtgcattacctttatgccgggtttgaggcggtcaaagtcaacgcgccccgtagtgttggtgccgcagctgcaagccagaaatctgccgcagagctgatcctgaaatccccgcttgaatccgttgcaagggctcgcgcatga

SEQ ID NO: 129246 - DNA, 2022 bp, Enterobacter cloacae
atgacgcttgctgctaatggccaacatcacgccgtcgatacctggcggcgtgataccttttcgccaggaacgccagcgaacgcgacgatcacagagcgccgtttgtgggcagttaacccacaggactacgaatggcgatcacaattccttcatgagatacccgactggctagccgggtattttggcaatcgttacgaaaagctgtttgctggccgtgacggccgccgccgtgccaatacattcctgcgcaaaactatcggtgagaatgtattgccacgtctgcggaaagtggcggcgcgttaccagctggccgctgatgtaagcgatctcccattcggaaagtcattgcagcgcttgccgtcgcttgaccgtaccgatctcaaaaagctgtctggccagatatctggctggatagctcagatgttttatgacttcaccgacacgctgaagggcaaaccaaaagacgaaagggaaatgcgtcagcgcacgctggcggcttaccgcaacctttgttcgctttccctcatgctgaacaatcagccgccgtactgggcagagcatgaagccaacgaaggccacctggaaacccgaaaggcggagtccggtattttgcgtctcatggcaccggaatggtggtatcagcgtctgaagcgtgcccgtgacctgcaacgtgaacatctggccatcgccgttggccaggtgcagaaatctgccagcgcctacgtatcacgtaaaaccctgggcgaatggatagagcagaaaaaacgaaatatggaattcttcaaaaagtttgatctgatggacgaagagggcaaccgtattgcgctggacagcatggtacaccgcagcgttgctaacccggccattcgtcgctgtgaactgatggtgcgtatgcgcgggtttgaagatatcgccaatgaacagggtctggctggcgagttttacacaatcactgcgccttcccgttatcacgcggtacacagcaaaggcggctttgtgtctcagtggaacggattaagcccacgggacacgcagcgttatctatgcaacgtctgggcaaaagcacgcgcggctatctcccgtgccggtattcatgtttttggttttcgcgtggtggagcctcaccacgacgggacacctcactggcatatgctgctgttcatgcgtccgcaagacgttgaggcggtgcgggatattctttgctatcacgccagaattgccgattcagaagagcttcagacacccaacgcgcttaaggcgcgttttcatgttgagcctatcgatcccgctaaagggtctgccacgggctatatcgctaaatacatctcaaaaaatatcgacggctttgcgctcgatggcgaacaggatgaagaaaccggggaaaacctgcgtgatatggccaaatccgtatcagcctgggcatcccgctggcgtattcgtcagtttcagcaaattggtggtgcgccagtgactgtctggcgggagctgcgccgcctgggcgatcagcgcctgactgatagccgcatggatgcggtgctggcggcggcagatgttggggactgggctgcctatacccagttgcagggtggcgcactggttgcgcgtcgtgatctggttgttcgcctggcgtatgaaatcacagagcagggtaacgagtacgccgaagatgttcagcgtgtgcaaggtatctattcgcctttgatcccggattctgaagtatgcacccgtctggtcaagtggcagaaggttgcgaagttggccgaagcgccagcggaggcgggtttttctggcggcagcgccgccccttggagttctgtcaataactgtacggaggggggagcccggagacggttaaaactggaactgaaccagcgaggtattgccggaacggatgacgaaatcgacattctgaggcgcgggagtggtcttaaatttggccgttctgccctgatttacagagagggtcggttgcaggagaagcggaataatccggaagatgaacaatggccaggctggcagtga

SEQ ID NO: 129247 - DNA, 207 bp, Enterobacter cloacae
atggatatcttagaggcatcagcaaagctggagcgtatcgaactgctggcaaaaatagcccatgcaagtgagatgagctcgaaagaaaaaactattgccttaacatggatcggtgagattgctgaagaaatgcgatgtgtggtcaggggggaaataaaaaacccccagagcgggggcgtttcaggctgcgggtgcggccttcaataa

SEQ ID NO: 129248 - DNA, 270 bp, Enterobacter cloacae
atgagagtcctgaagattgaatgcccagaatgtggctcaaaggctgtgattcgcaagaccaaccggaaacaccgccagattgcagatatttactgcgcctgtgctgatgtggagtgtgggcacacctttgttatgaatttgacgttttcccacaccctcagccccagcgctaaaacgggtgacgcgcttgtgcaaacattgctcaaaaacctgtcacccgatcagaaacaaatggctctggatttattgaaggccgcacccgcagcctga

SEQ ID NO: 129249 - DNA, 1053 bp, Enterobacter cloacae
atgagcaaaaagaaacgctttgtgaaacgcgagcagcgcggcgacaaatcaaaaaaaatgagcattatcagcttcggcaagccggaaccggtactgacaaccggaaccgattaccgggaaatctggtatgacaacgccgccgatcactacacccagccgattgaccgcctggcgctggcgcagcttatcaacctgaacggccagcacggcgggattatccacgcccgtaaaaacatggtcacggcggactatcagggcggcggcctgacgttcgacgagctcgaagccgctgtgtttgattacctcaccttcggggatatcgccgtggccaaagtccgtaatggctggggcgatgtgatcgggcttcagccgctgccggggctttacctgcgccgccgtaaggagaaagaaaacgcggagactgtgccaggggattacgttgttttacaggaaggtgagccgctggcgttcccgcctgacgatatcattttcatcaagatgtatgacccgcagcagcacatctatggtctgccggactacatcggcggcgttcactctgccctgttgaacagtgaggcggtaattttccgccgtcgctactaccacaacggcgctcacacgggcggtattctgtatacccgtgaccccagcatgacggacgaaatggaggaggagattgaacagcaactgcgggacagcaaggggatcggcaacttctccaccatcctggtaaacatccctggcggcgacggtgacgcgatcaagtttattgagatgggggatatttcagccaaagatgagtttgcgagcgtgaagaacatcagcgcccaggacattctgaacgcgcaccgcttcccggccgggctggcgggtatcgttccgcagaacactgccggactgggcgacccggagaaggttgaacgcacctacaaaaagaatgaaattctgcccattcagcgccgcctggcgatggccatcaacagcgatccggaaatcccgcgccacctacatctgaattttgcaatggaaacaacggagaagggtgcagcatga

SEQ ID NO: 129250 - DNA, 1776 bp, Enterobacter cloacae
atggctaaatactcagacgaattaaaaggcgttgtccgcgctctttacctgcgccgctacacgccaaaagaaattgcatcagaattaaatctgccgaacgcgcggatcgtttactactgggcggaaaaatataaatgggctgacctgctcagtttcgaaagcacagaggaggcaattgaacgccgttaccagctgttagccgggcgtgacaataaaacggatctggatttaaaagaaatggatttgcttattgctcacgccacaaagctgcgtgcccagagcaataagcataaagaaaagctggccagcagccagggggaacggcaagcagctgcgcgaggggatagcgaggacgaaccccgcagcaaacgcaagtacaagaaaaacgatatttcgtcactgactcaggatgattttgacacctgggcggatgagcatcttttcgaatatcagaaacacctgcgccgcaacataggccagctggtcaggaacatcctgaaaagccgccagatcggtgcaacctggtactttgcgtttgaggcgttcgaaaatgcagtaatgacgggcgatccgcaaatctttctgtccgcatccaaagcacaagcggaagtgttccggtcttacatcgtcaacattgcagaacagtattttggtatcacgctgaccgggaacccgatcagcttaagtaacggcgcagagctgcgcttcctgtctaccaacaaaaacacagcccagtcatacagtggccatctttactgtgacgaatatttctgggttcctaacttcgcaaaattgaacgaggtggccagcgcaatggccacccatgacaaatggcgtaccacctacttttcgacgccatctgccaaaacgcaccaggcctatccgttctggacgggtgacgagtggaaacagggcagcaagaaacgcgcggccattaaatttccgctgtttgatgaaatgcggaacggcggccggctctgtccggatggccagtggcgctacatcatcacgatggaggatgccattgcgggcggcttcaacctggccaacatcgagaagctgcgaaaccgctacaacaccgccacattcgacatgctttatatgtgcgtgttcgtggacagcaaggattccgttttcagcttttccgacctggaagcgtgcggcgtggaggtggacacctggcaggatcataatccggatgcaaaacggccgtttggagacaggccagtctggggcggctttgacccggcacgcagcggcgatttgtcgtgtttcgtgattgtcgccccgccgatgttcgccgttgaaaaattccgcgtgctgaaggtgatttactggaagggcatgaacttccgctaccaggcaaagcagatcgaaaagctgttcgaccagtacaacttcacttatctgggcgtggatgtaaccgggatcggccagggtgtctttgacaacatccagcattttgccatgaaggttgtcgtgccgattcgctatgacatgaacaccaaaaaccagctggtactgaaagccgcggacgtggtggaaagccagcgtatcgagtgggataaaaatctgaaggaaatccccgccagctttatgtcagtaaggcgcacgaccacaaacagcggtaacgccatgacctttgttgcagaccgcagccaggacactggccacgcagaggcattctgggcaatcacccacgcactgcataacgaaccactcaactatgaaaacaaaccaaaatcccgctggggtgtaaggaaacaggcagcatga

SEQ ID NO: 129251 - DNA, 795 bp, Enterobacter cloacae
gtgtcgcatttaaaaactggctggctgtgtgttgctactgaaggcgatacggttgatgggcgggtgctggagcggcaatggattatcgacatgggggaaacctatgaccctaaacattacgccgcattactctggccggaacatgagcgctacgccggaaactttggtgaggtgctggaagcaatgtggcaggacggtgatgacgggctggcgcggctgtatgtcagtctgtgcccgaataagcgcctcatttatgcaaacgacgaaggccagctgctttatttctctgtagagccggagctgaactggcgcggaggggatcgtacatatctgaaggggctggctgttactgacaacccggcaagtgtgggaactacacggctgcgctttagtcggcgcaaattaaacaaacagggatattacagttgtgtgatttcccgtaacggtaaaattacgcaggaagggaagatgaaaaactggcagcaattatttggtattaagccgaagttcgaagatgaaaacccgcaaaacgatccgccagctgacgataaattacaggccctggccagcgctctgaacgatctggaagcgcgtgtgggtgctattgaaacccagcttaattctgtgcaggacgatgttgacactattaccgaagtagtggacacggaagagtttgccgctattcgtgataatgcaaaagagattgttacccgctttaatgatttgggtaataaaggcggtcagcgcaaacagcgtcaggtgccagccaaatccggtaaatttagttacctgtaa

SEQ ID NO: 129252 - DNA, 1023 bp, Enterobacter cloacae
atgttactgaataaccgtgcgcgggatttactggacaattatacggcggggctggcgcagcattttggcacgcaaaaccctggccgttatttttcgctaaatgacccgcaggaaaccgcgctgcgtctggccatgctggagtccgtcgagttcctgaactggatcaccacgctggacgttgaccagctgagtggtcaggtcgtcaacgtgggcgcatctgtccttcataccgggcgcagtgaaacaggccgtttcgtccgccaggtgggtgttgatggcaatacctattccctggttgaaacagacagctgtgcggcgctgcgctgggatctgctttccgtctgggcgaacgccgggaaggaagaaaacgagttttacaacctggtgcagaccttcagtacccaggcgtttgccatggatatgctgcgtatcggctttaacggtacacaccgcgccaaaaccacagacccgattgccaacccgaacggcgaagatgtgaacattggctggcatgaaatcatgaaaaccatgctgggcggcaagcaaatcatgaccgatccggtggtgctcgatcaggcgggtgattataaatcgctggatgcgatggcctccgatctgattaacgccaaaatcccggcacagttccgcaatgacccgcgcctggtggtgctggtaggtgctgacctggtggccgctgaacagtaccgcctgttccaggctgctgaccgcccaacggagaaaatcgcggcgcagctgctgggcaacaccatcgctggccgtcaggcgattatcccgccgttcatgccgggcaaacgcatggtggttacgcctctttcgaacctgcatatctacacccagcgcaacacgcgccagcgtaaagcgcgctttgaagatgaccgcaaacagttcgaaaacagctatctgcgtaatgaaggttacgcgattgaagtgccggagctgtacgcggcgattgatgaagatgccgtgaccatcggcaagccgtctgagccagtggagggttaa

SEQ ID NO: 129253 - DNA, 702 bp, Enterobacter cloacae
atgtctctttcacccgcgcagcgtcataaccagcgcattgcgatggaacaaaagctgaaacaaagcctggccgttggcaccacggaaagcatgcacctgctgattaaggcgctggaaacagacgtggaacaggtgcgaagcctgccgctgattgcggatcgcgttgagcataagcgcaacgtgctgctgcccaaatgggtgccgactgtggaagcgtatctggccagcggccaggtatatgccaatccggttctggcctggtgcgtgatctggctgtttgacgtgggcgatctggataaggcgctggaatgggctgatatcgctattgcccagcaacaggccacgccggaacggctgcgcagcaatttcccaacgttcgtggccgatacgatgctggcctgggcggaggagtctgcggggcgcggggagagcattgagccatatttttctcgcacatttgagaacgtggccaccaggtggcggctgcatgagcaggtgacagcgaaatggtacaagttcgccgggttgcagctgctgcgcggtgaggatggccagaaaacagctgcgggtgtggacgatgtggaaacacttcagaaagccgatcagctgctggccaccgcagaacagtattacctgaaaatcggcgttaaaacgcagcggcagaccatcgccgcacgtatccgaaaactgacgcagggttaa

SEQ ID NO: 129254 - DNA, 453 bp, Enterobacter cloacae
atgtttagtggaaagccgcttgattatcaggacgagccgctaaaaaacgaagaattctggccagacctgaacctgaaggactttcaggcacagcgagcgatcccggctgatgttgaggcggacaccgttgcccaggcgctgctggcggctgtggcggaggtgaacgcggagctgggaaaagtggaagccagctggaaggcaaaaggggttatgagcgcaggggacgcgccgggggcacggatgggggagttaaacgccctctgtgcgcagtacatgaaggcggtttttgccagggcaaaagcggacctgttgggggagtttgccaccgttgggcggcgtgactctcacccaggccaggaaagcacggaaacccgcgccggattgctggcagaggcgtcagttgtgatccgccgcatgaaggggctgaaaagggcaacggtgaagaaagtatga

SEQ ID NO: 129255 - DNA, 507 bp, Enterobacter cloacae
atgagccagacacagcttgaaaacctgacggcgttctttaccagcaacgtgccagcccgtgcgatgcagtcgtttgacagcgtagtggatgaaatggagttcgtaccggctgcaaaggatatggggctggggcagtaccgccaggcggtgatccgctatgacgcggtactgagctgggagcgtttcccgtatcgcctgtgtcccccgcagctgcttatgtcgctgatggctgcctggctcgatgaggcagacagggaactgcttgacgaaatcggggtaactgaggccgatccgcagtgggatgtgtcggtggccgatgaagaaaccgccgatattgtcctgacggttcccatggcggaagagctggtgatccgtgaggacgaaaagggattaataccctggcagggcaagcgctggtcactggttgagccggaaatctggacggcgctgaccgcaacgatttacggcgtggatgaatccggtgcgcctgtgggcgatgcgtcgtga

SEQ ID NO: 129256 - DNA, 708 bp, Enterobacter cloacae
gtgattgccggaggggagcttaacaagcgccagctggcggagctgaaaaaggcgctggccagcatggagctgccgcccaaaaaacggcagcggctgctgtggcgaatggcgaaatatggcgttattgccgccgccaaacgcaacgtgcggaatcaggaaacaccggacggggaaggctgggaaggtcgcaaaacaaagcgcaaagggaagatgctgcgcaacatgccgaaactgctgcatatccgggaaatgcctgagattcaggccgtgcggatttacttgcagggtggcggctaccggaacggggaaacgcctgtacccgctggcacggtgggctattcgcagcaaaacggcatgcgcgtccgggtgagtcgtgcaagccagccagggaaggcacagccaggcaagatggccaccgctgcgcagggaaaaaaactgcgtgcgctgggctaccgggtgcgccgggggaagcgctggaaaaagcccactatccgggaaataaccagcgaaatgccatacgcaaaggcggggttgcttatccggaagttaagcggcaaggccgtcaaaacaagctggactatcgatcttccttcccgcgtatttctgggaatgggtgatgaggactttaacaaggcgctggcacgccagcttcaggccatcggctttggctgggatgtgaatgcgcaggatatcagggggagaacatga

SEQ ID NO: 129257 - DNA, 1128 bp, Enterobacter cloacae
atgacctggccaaatgtgaccgttaaccaggtaaaccagctactgggcgaaaccaatgaggtggaacgcgcggtgctgtttatcggtacgggaaccaaaaatacaggcaagaccctggctgtgaacacacagagcgattttgacgcgcttctgggtgaggctgacagccagttaaaaagtgacgtgctggctgcggtgtcgaatgctggccagaactggtgggggttcgtccatgtgctggctgctgacagcgagccggaggcgtgggttaaagcggtgctggctgcgcaggtgtcgtgctcggttgaaggcgtggtgctgagcaatgacatttccacaaaggcggaaattaaccaggctattacgttacgtgcggatctgatcgcgaagtatggccgctgggtatggttcattctggccacgcagggaatgcaggatgaagaggggcaggcggattaccttgtgcgtatgtccacccttcaggctggcattgcggaaaaagcggtgcagctggttccccgtctctgggggaatgaaccgggcgtgctggctggccgtctgtgcagccgtgccgtcaccgtggcggacagtccggcgcgtgtaaaaaccggggcgctggtcagcctgggcagcgatgaactgccgctggatggcacaggtgcggtgctggagctggccacacttcaggcgctggaggcgcagcgcttcagcgtgccgatgtggtatccggactatgacgggttctactggtcagacggccgcacgctggacgtggaagggggcgattatcagtccatcgaaacgctgcgcgtggcggataaagccgcacgccgggtgcgtctgctggccatcggcaaaattgcagaccgttcgcttaacagcacgccgggcagtattgccgcacaccagacgctgtttgcgaagccgctgcgcgaaatgtccacggcagcaaacatcaacggggtttcattccccggcgaagtgaagccgccgcaggatggtgatgtaaccattgtctggaaaaacaaaaaggcggtggagatttacattgtggtgcgcacctgggaagtgccgctgcaaatcaccattagtctgttactggatgccagcctggaggccgccgcatga

SEQ ID NO: 129258 - DNA, 456 bp, Enterobacter cloacae
atgagtaagcgtatttcgggaatgtcgtttgattcttacgttgacggcgatctgatccacattgaaaaaatttctctcgatatcacggacaacagcgccgccgcgcagacccgtggcgtgccggatggccacgtagatggtgatgtggccgcagagggtgaaatcgaagtcagttccaaagtgctgagcgtgctgacggccaaagcacgatcagcgggttcctggcgcggtattgaacccgtggatttcctcttctatgccaaagccggtaatgaggaagtcaaggtggagacgttcggctgcaaacttcagctgagtaacctgctggatattgatccgaagggtggcagcgtggccacgcacaaaatcaaatactttgtgaccagtccaaagttcgtaaacatcaacggcgttccgtatctggaagcggaagccacggaaaacctgatcggttaa

SEQ ID NO: 129259 - DNA, 300 bp, Enterobacter cloacae
atgcaggaacatgaaaagagcttttacaccctgatcaccatcgggctgcttgtcgcgctggggaaattactgatcagtgacgatgtaatcacaccgcgtctgttctttgggcgcttgattctcggtggcctggtttcggttgttgcgggtgctgcgttgttccagatacctaatgccagtccgctggctatcaatggactgggaacggtgctggctattgcaggttatcaggtagttgagatttacctgcgccgcagggctctggggaaaaaagagggtagtgacaatgacactgagtga

SEQ ID NO: 129260 - DNA, 342 bp, Enterobacter cloacae
atgacactgagtgaaaagcagcaactgtttaccttgatggtggccagtctaatccactgggctgaagaacacggctatcgcctgacctttggcgaggcgtaccgcacgccggaacaggccgcgctgaacgctaaaaagggcagcggcatcaccaacagtctgcatacccagcgcctggccgtggactttaatctgttcgtgaatggccagtacaaaacagacaccgcagattatctcccgctgggtgaatactgggaatcgctgggcggtacgtggggtggccgctttaaatcccgtccggacggtaatcacttcagtctggaacataacggggtgcgctga

SEQ ID NO: 129261 - DNA, 369 bp, Enterobacter cloacae
atgacaaacggccagtggctggtagtggttgcgctggcgtttatctggggctggctgaccgctgactggcggcgtgacagcctggagctggcgatcaactccgccgcgcaggttgcgggtaacaagtcccaaaaggcgatgctggaaattgccagcgaatccgccagggggctggaagataagctggaggcgctggagagtggcagaccgaaggaaatcaggacggaaattcttaagccggttttcactaacgtttgcgtgtctgatgattttatccggatgtacaacgcaaccgtcgacaataccgaacgtaccttatcaggaaaacctgaagcgaaaatgcccaacggaaaatcttccgcgcattaa

SEQ ID NO: 129262 - DNA, 261 bp, Enterobacter cloacae
atggaacagaaaattaatctggttgtatgtggtcaggaaattgttttcgcgcctaaccagaccgcctataacaaattcattaatgaaatggcgatggataacaaagttgctccggcgcacaactacctgactcgcatcgtggagccggagagtaaagacacgctggccgagcttttaaaacgtccgggtgcagcgttgcagctggctggcaaggtaaatgaaatttacgcgcctgagctggaaattgaagtaaaaaactga

SEQ ID NO: 129263 - DNA, 2163 bp, Enterobacter cloacae
atgaaacagttagattttacattaagcctgatcgataaattgtcgcgcccgttaaaacaggtgcagaacaatgtgaccggctttgcggataaatcaaaagcagcgtttatgcagattggcggcggcgcactggcgctggccggaacggggatggccatcaaaggcgcattatctccggccattgaaatgtatgacgcgctgaatgaggcggccgcaaaaggtatagacgattcagcgctgaaaaccgttcagcgggatgcgctgacgttcagcacgacatacggcgcaagcgcggtggagtttgttaaatccacggaagaaattaacgcgtccattgccggactgacggggagcgaactcccgaaagttaccaaaatcgccaacgtcctggcgtttgccctgaaaaccacagccgctgatacgtcagagtttatggggcagatgttcggcaacttttcctctgatgccgcacgcctgggcaaagtgcagttcgctgaacagctggctggaaaaatggtttacatgcgcaagacgttcggcgcggaaatggccacgatcaaagacctgatggaaggcgcgcgcggcgtggggacaaactacggtgtcgggctggatgaacagctggccgtcctgggacaactgagccgcacgctgggaacggaagcgagcagcgcttacgaaggctttatgacaggcgcgattgatggcgctaaaaagcttgggctgtccttcactgacgctaccggaaaaatgctgtccatgcctgaaatgttggcaaagctacagggcaaatatggcaagagcctggaagggaacctgaaggctcaggcggagctggatgaagcctttggggacagttcggcggtggttaagcagctgtatggcaacgtggcgctgcttcagcggaatattaccgagctgggcggtgcagacgggctgaagcgtacccaggaaatggcgtccaaaatggttaaaccgtgggatcgctttattgccatcctgacggccattaaaaccgtgattggcctgacgctgatcccggtgctttacccgctgctgaatcgcctggcaaatatggggcagacctttgcacgctggatgcagctgtttcccaatatcgcgcgggtagtggggtatgccgcgatggcactgctgggatttgcagctgtaggtgctgtgaccaatatcattatgggcgtttcctcgtttgtaatgggggggctgcgtgggctctggaaagcccttacatcggtaacgaagatttacactgcaacaatctggctggcgcaaaaggcggtgcttatctggaatattacgctgggggcactgcgcggaatactgctggcggttcgaatggcagcgattatggccggggttggtatcaattttatgagctggcctattctcctgatcattggtgctatagctttgcttgccgttgggtgctatctcctgattaagcactgggatgcgatcaaagccgcggtaatgaatacggaagcctttactgtcgtagctgctgtagtggagtggctagtgggtatatttaccagcgcctggcagtatatcagtgacggctggaataatttcattgccttactcaaaggattttcaccttcagaagcattaagcggaatggccagcggcattgtctcaatgtttgataatgtgtggcagaccattaaagggagttttctgaagtcatggaactggattttagagaaattaaataaaataccgggagtgaatattgatttggctgctgagactgtgccaggtattaaaaagaacgccatgccgcagcctgttgctaataatttggcgcagcctgttaatgtgccgccaatgccgtatgatgttaggcatgttgagcagccatccattacaacgcctgaaataaaacaagttacttatggtgggaatataacgcagcaattaacgcaaaactcattaatgccagaacctccgccagcaattgcccctagtgtgcttttaactggtggggagctgaaaggagttgagcgtggcggaatcagtaaaaccataaacagtaattcaaaatctgtaactgataacagcaaaaaaattgaaacggtaaatatttatccaaaagaaacactttcgccgggacaattgcaggagtggcaggagctaaacccatga

SEQ ID NO: 129264 - DNA, 330 bp, Enterobacter cloacae
atgagtgatttgctttacatcgatctgctgattgaaaacggtaatttcgttctgaataccggaaaagagcctgagctgtgtaataaccgcaaaagtattgggcaggacattattcacagcattctggaaagcggtctggccacgcagctggttggcgaacgtagcccgacgttacgcgctgatatcttcacgcagctggagctgctgattgaagaggatgaacgcattgtgccgggtacggtggaggtgagcgaggaaagccagaagcgtttatgggtgacggcgagcacgtatgactttggcggaatatcggcgaaggtggatttatga

SEQ ID NO: 129265 - DNA, 1185 bp, Enterobacter cloacae
atgactgaaaagccgcaggttgattttgaagaggtggtgaagtccagcgggatgcccgtaacggaagaggcggtgcgtacccgtttcaatgccatcgccgcgcaggaaggactgattaccaacacgtcgcgcatgtctccgttctggcggctcattaccgccattgtgaccgcaccagtgatgtggctgaaggatgcgctggtgtcggtggtcatgtccaatatgtttgtggccactgcgggtgggcagatgctgcgtctgctggcgtgggcggtgaacgtcacggctaaacctgccagcgcggcggaaggcatgatccgtttttacaaggaagattcaaaacaggccgtcaccgtgacggcgggaacggtagttcagaccgaaaggattaacggcaaagtatacgccatggccaccgtggccgatgtggtgatcccgtccggcacggcaagcgctttgcttgctgtcaaagcaaccggaacgggcggggcgtacaaccttgcgccgggctattaccgcattttgcccgttgccgtggacggtatcagccatgtggccagtgaagaggactggctgaccgtgccgggcgcggatgaagaaagtgatgacgagctgcgcgagcgctgccggaaccagttcaacctggtggggaactaccacacggacgcggtttaccgttcgatgattgcgagcgtggccgggctcagtattgaccggatcttttttcttcatgatgcgccccgtggtccgggtacggcgaacgcttatctgttgctggatagcggggtaacgtctgagccgtttattgaagcggttaatgactacatcaatacgcaaggacaccacggccacggggacgatatgcagtgttttgccatgccggaaacccgccacgatctgagtgtgacggtgtatgtcagaaacctgggcaaccttgaaactgagcagcaggacacgctgaagaaagggatagaaaacctgatccgctgcgccttcagggaaaacacggattatgacgtgaaaaaaacatggccatattcccgcttttcgttttcgcagctggggcgtgaggtgcacaaaaccttccctgattcggattccatagagttttcgctgaaggatatcaccagcgaactaagcgtaccgcgccttaactccttaacggtgagcctgaaagatgactga

SEQ ID NO: 129266 - DNA, 588 bp, Enterobacter cloacae
atgactgattttctcaaaaagctggccagcatggcgctaccgtcctggatgaataaaggcgagccactggctttattgcgtacggcgcggacgttctggactgaggtatacggctggataacgtggccattgcggcagtttgatccgctgacctgcattgaaccggtactcaatttaattgcgtatgaccgtgacataagccgctttagtggcgagccgctgagcatgtaccggaagcgcgtggcctatgccttcatcaatgcgcgtgatgcggggtcagttgagggcttcattaatatctttgagcgtctgggaattggttacgtggagctggttgaacgccagacggggattgactgggacgtgatcatggtgcgtgttacggacagccagattgcagacaacacgcagctgatgattcagataatccggcagtacgggcgcacctgccgccgttatcagtttgaagtgatcacgtcggaaagcctggctatacgggcgggatgggatcagggggaatacgtggtttatccggcacgcatgaacagcacggaagccagcggcgcgacgtttagcgcgagtttatag

SEQ ID NO: 129267 - DNA, 2313 bp, Enterobacter cloacae
atgtcacagacagctatcacactggcctttgaacagtggaaagccagccaggcggtaacgggtgaacccgtgctgctggatgaatttgtttttgccaacgtaccggggctgaataccgataaagcgattgatcgcaatgaggtgttgccgccagcagcgcaaatcgttcaccgtcaggccgtaagccgtaaaggtgtggtaaacgaaaacgccgtggtgcattccgttgtgctgggtgctgatgtgggggatttttcgtttaactggatagggctgattaacaaggcaagcaacacgctggccatgattgttcatgcgccattacagcaaaagcttaaaacgaaagatggccagcagggaaacgtgctcacccgctcgtttttgatggaatacaacggcgctcagaccgagaccgggattaatacgccagccgaaacctggcagattgatttcactgcccgtatggccgggatggatgagcgtcaacgcctggagaatatagacctttacggcgcagcggcattcctgggcgatggctggctggttgcgaaatcgggttcacaattttacgtgactgccggggcgggctatgtgcgtggtctgcgggcacagttgcccgctaaccagaatattacgataacaaccaagccggtaaaggtctggctggatgtggcctggacaggaacgctgactagcgcatgggctgtaagcgcaaaaataaccgtggcggcgagcctggctgattatgttcagaacggcgtccagcattatgtttttgctgtggccagtattgatgcaaacggcaatattaccgatctgcgcccgaaaggaacgcttaacgatcagactgcaagtgatgcgctggcaaaacatgagcagtcacgcaatcaccctgatggcaccctgaatgccaaagggtttgtgcaactaagtagctcagtcaccagtgacagcgaagcgctggccgcaacgccaaaaggcgtaaaaatcgccaacgataacgcgaaagcggccaatgacaacgcgaacaccagactgccgctcgcgggcggctggttaacgggcggttttggaattaaaaccacgattggcagcgtgtcgtttggggtgggtaactcagatgtgtatatcgctaacggtgcgtcgaataagtttctgcaactgaagcatacgggcgagctgaagtatgacgacaaggctgtttaccatgagggatataagcccacggctgacgatgtgggggcgctgccagtaaagggcactgccgaagcggctaagaagcttgccaccgcgcggaaaattgccggagtggactttgacggcaccaaagatatcagcctgaaaacctcgaatctcgatgatgcgggcacggcggccgcaaaagatgtgaccagctcaagcacggatactactgcggggcgagtcttgcaggtaggcgattttggtgttggtgcggtggcaggtgtcagtctgactgatgctaataatatcaattttaatggttttttcagaatgggcgccgagggtgttcatggcccggttgcgaatcaggcctctgagctgattcattgccagtacgatcagaatactggccgtcagattggatggcgtgcaggtcgcccggatgagcccctgcgccaccggacaaaaatgaacggccagtggcagggctggattaagctctacgattcaaataacccgcccacagccgatgaagtcgatgcagtttcagcgtcaaaggggggcacctaccagaaagaggttactttctctgaaggcgtgaaaatcaggaacgcaacggggatttatcagggtgaggatgccgcaggcttttccagtaataacctgatgctgaaatcatggaacggtatcggattctattgcaccctcacgggcagtgagggcgtaacggtctatgtcgatacccgtggcgggcatgtggaagcgagaggccagattaggccgggcagctatgagaatttcgataaccgtttttatacaaagacgctggctaatagcactttccagaaggtcaacacggtatcaaaagggtcgcgtggatggtttaaagattcaaacacgggaatgatttttcagtgggggattgagaacgttagcggagcaagcacacggacattcagtttcccggtttcgtttccgaccggatgcgcctctttggttgtttctaacaataaggagcgtactgaaggggaaaattccatgacaggttttattaaatcttcctcgcaatattcgttatcaaatacggcggccacagaccgtcaaatctgctggtttgcaattggttattaa

SEQ ID NO: 129268 - DNA, 414 bp, Enterobacter cloacae
atgtcctattacttctcagaaaaagagtgcggtttctattgcgaggaagtgaatgacactgttcctgatggtgccgtagaaattagtgatgaacgttattattcgcttctggaagggcagtccagagggatgctaatcactgctgatgctaaaggaaatccgatactggttgagcagccagccccaaccatagagcagttaattgcaagtgcccaggtgaaaaaatctggtcttatgttgttcgttaataacgctattgtaccgcttcaggatgccgaggatttaaacctggccactgatgaagaaaagcagcgtttactgacgctcaaaaaatatcgggttttactcaaccgagttgatacaagtaaagcgcctgatattgagtggccggaggtgcctgacgatgtggcgtga

SEQ ID NO: 129269 - DNA, 726 bp, Enterobacter cloacae
atgtggcgtgaagcacgtattgcgttcagtgattcaattgccgcgctgaattgttccgttatcccggtacatccctgggtgtacggggtagggcaacaaacagaaaatggtgcctatctcagcccggtaaacgcgatcaattacctggctgacaaactggccggaacgggtggggcggctgatatcgtgatcatgatggtttctggccagacgcatgacagctttatggccagcctgaataagcttgtggatgtattccccagcccggccttcacccaggtgcgaaggctggcgcagtccgccgcgcaactggctgcggagaagatgcaaattccggcgaaatacagtcagagtttgcctgcggctatcccgctttccgtgcctacaagccgtactgccctggcggccgcagcggtgaagaaagcacagcaggaagccgcagccgtcgcggatttgacgggcgtaaaaaagctgatgggggattttaaacagctgcgcgaaagcctgatttctggcattgccagcggcttaacagaattgcagggaaaaagcgccagggcatgggtatttactgccagcggcgatctgccgtccatgcttctggagctgataaaagggatcccgcttcagtcctccgtatacaccgccgccatgatgctggttggcgacaatctcgacggcataaaaggaatgatacatgacctcgaacccgacactggcgcttaa

SEQ ID NO: 129270 - DNA, 549 bp, Enterobacter cloacae
atgacctcgaacccgacactggcgcttaacggtgaagccattctgttgaagaacatgcgcgtgacagtatcgcagcaattccaggacaaagaccagtccggccagacgagtgcaaccacgaaatcagagcagggcatcaaaggcaaggagctgcgtgtttcaggcgaaattccgtataaaaatccggagatcctgcggcgtatctttgagctgggcagcgcgacggatgccagcggccagcgacagaaataccgggttgcacatgaggcagcgcgagctgtgaattttcgtgaggcgacgttcaccggaaccctggacgcgccgccgcaggacgggcgcatgtcctggcttgtgacgttcacgctgaccgaacatatcagcgtgcaggaaaaacgtgaggccagggcaagcggcaaaaccaaagccgtgaagcaaacggcgggaagtggcggcggccagaacggtggccaggccgctggcgaggatgaagaaaaactgacgtggtttgaacgtaaggtgctcaagcccgtgaatgatgcactgggataa

SEQ ID NO: 129271 - DNA, 1677 bp, Enterobacter cloacae
atgaagccgattaaacgcctgtacctttcaacggatgaaattcacctggctgatgccagcctggtgctggagctgaacagctgcggccgggggtttattactgccgggacgacgcaggactatacggggaaactggtgcgtcttgatgtgggttacaccgatctggtgttgcgctggtttaccgggtacgtggaacgctcacaacctgctgaaaacggctttcagcgtttgtttgtccgcgagctggtcggcgtattcgaacgcctctggccatgttccttccagcaccccacgctgcgcgatgtggccagctggctgacagaacaaagcgggttgaccttcagcgtgccggatgccgattactcagaccgtccgatcccacatttcaaccacagcggcacgggctatcagctgctggataatctgggacaggcttttggcattacggattacgtctggtatcagctgccggatggcggggtttatgtaggcggagcggaaaaagccctttttgctgatcgaccaattgagatcccccatgaatttaatcagggggcggcaggggggaactcaatgacacttcccctggtgcagagtctgcgcccaggcgtggagctgaacggggaaagggtcacaaaagtccacctgcaaaatgacacgatggccgttacctggacaccccgcaaccgtcttacgggtaaggcattgcaaaaaacgcccgctcagcgccagattgaaagtcattatccggagctggcatccgggatgcatttgccaaagtttggccgtgtgatgaatcccgttgaagcggtgaaaagcggcaatttctccgatccgttccgtccccgctatgcggttgatgtgcagctgctggacgcggacggcaacccggaaaaagacacgcctgtttattcggccgttccgctgccggttcctatggcgggtaatgattcggggatgttccagtttccgcctgaagggacgctggtcgaaatcgcttttactggcggacggccggataagccttttgtgcggcaaaccgtaccggacggaaccagcctcccggatatccagcccggcgaacagctgcaacagcagcgcgcggaagtgtcgcagcgcgtcacccaggcgggggactgggtgaggcagacagaccagacgatcagtgaaacctcaatggcgcgggtggttaaggccgatacagaacagcgcgagctggtcagccgggaaacaacggttaaggccacggataaaattactgtgctgggcacgtccacattgctggccggagccattcagcaggtgtgcacgggtgattacagccaggcagtaaataaccgcgtggcgagtatcggcggtaatgatgaaactgacattgccgggagccagacagtcacaacgggtaaagacctgatcgagaaaattggccagatacgtaaaagcgtggcggccgtgcaacagcagattattgccccggtggtgtggattggctctggcactatcaatgtggcacagctgatgctcgacacgctcgacgtggttaaagagctggcagagcaaacggcaagccatacccacagcaatacgggaacaccgaccaacgcgggagccatccggaacaccggggcgaaagcggacacgctgaacggcaaatactccccggtgattggcaagtaa

SEQ ID NO: 129272 - DNA, 339 bp, Enterobacter cloacae
atgcggaaagtttctatcaacggcgcggtttttatcttcatggccagaggtgaaaagcttaaggattctgactggctcccttccaatggactgccggacagtaaatatgttttatggccgcgcggggaagggtgggatgtgcgttatttggtgtttggcgctgagggggtggaatggctaccgataacgaaaacgctgtttgccgatgaggcggaagcatggcaagcagcatatgagcactggatgaatcgaagtaaaaaaaacgcgccgcctaaaaaacatgacgattaccagtcagagtttcccttctgtcaccttgaggccaacaatttcttttga

SEQ ID NO: 129273 - DNA, 495 bp, Enterobacter cloacae
atggctctcacaaagtgcaaagagtgtaaaaaagaagtctcagcgtcagcaaaaaattgcccacactgtggcgttaagaatccaggcgtgacagcaaaacagactctaggcggttgcctggtactgattgttctggctgttgggtttggtgtttacatggcttctggcgatgatgaacaggcgaaggccgcacagaactgctcaaacacagacacgcagtgcaatttcgatcagaaccttgtagacgctgtgaccaaatgcaagccgttaatccaacaggcggcaaaatacgaatatgaatggacagacagccttgttgatacgattttctctcatggccgtattgattcaaaaaataatcagctcacttacataggggataaagtcagattcaccaacggctttaacgcaaaggtcaacatgacctatgcgtgcactatggatctcaagtcaaaagaaattgttggcctcaaggtgacagaagggaaactctga

SEQ ID NO: 129274 - DNA, 1080 bp, Enterobacter cloacae
atgtgggatagggtcgattttgcccggcatatcgataatgcgggaatccaccccgctccagcccggcagcgcctctttcaccatgatcgcggtgttgcgcacgtcgcggatctcgctgaccggttcaccctgcgccaggcgatgcgccacctccaccagcggacgctcgccgttgccgaagatcagcatgtcggctttcgaatccaccagcaccgaacggcgcacggtatcagaccagtagtcgtagtgtgcggtgcggcgcaggctcgcctcgatgccgcccaggatcaccggcacgtctttccatgcttctttgcatcgctgggtgtagacgagggtcgcgcgatcgggacgtttacccgccacgttgtcagccgtataagcgtcgtcatggcgcagcttacggtcggcggtatagcggttgatcatcgagtccatgttgcccgcggtcacgccgaagaacaggttaggcttgcccagacgcataaagtcgtctttgctgttccagtcaggctgggagatgatccccacgcggaagccctgggcttcaagcatacggccacagatcgccatgccaaagctcgggtgatcgacatacgcatcgcccgttaccagaatgatatcgcagctgtcccagcccagttgatccatctcttcccgggacatcggcaggaacggcgccggtccaaagcaggctgcccagtactggggccaggagaagaggtcgcgatccggctggatcagggaaatagcgctcataatgcttccgaagaaaaaatagacaaaaggagcgggattatacgctggtttaccgggggaaatgaaggggtattgtgcgggctgttgccctcaccccaaccctctcccacagggggagggagaaagcgttttatggtgccggattcaccagcatctgccctaccgatcccctgtccatcatctccagcgtctggctgtggaacaggaacgggaagtgcggccaggaaggctggccgtagtagacgagcagttcgacctggccatccacccagacggtatctttccagcccctgtcttccgggaacggcatcgccccgttga

SEQ ID NO: 129275 - DNA, 483 bp, Enterobacter cloacae
atgtctataccagcatacttatggcttaaggacgacggcggagcattaatcaaaggcggagttgatgttcagcacagagagtgcagcattgaggtaaaagggttccaccacaacctcatgatcccaacagataacgcaaccggcaaaataaccggtacacgtatgcattcccctatgctgatcattaaagaattcgactgctctagcccatatctttataaagcagttgcgacaggtcaaagcctggtgtcagcagaaataaaatggtatcggatcaactactctggacaggaagaggaatacttcaacatgctgcttgaaggcgtgcgaatagtttcgatttcaccagcaatggcaccaggggataaccctaacgaaaaccatatggaaacggtcgaactgcgttacgagaagattacctggaagcataacgacgggaacattatcttcagcgatgcatggaacgaacgccagtcagcatag

SEQ ID NO: 129276 - DNA, 453 bp, Enterobacter cloacae
atggacacagtagaggaatctggcgggacgtatttctatcacgggaatgcgaacgtaaccccacaggagctatttttgctgatattcgctgagggtctggcgaaccatctgggcgtaactgtggagactgctgcaacaatcctggcggggcagcctatattacccaagcgtaaggtattgggtgcgtccggttcgcgtacaagtatcgcgtctaaggtagcgcgtcgcattttaaagggggtccactttcctgaaggcatgagagtggagacgatcatcggtatgggtaaaaccagacagacaaataaggttggggccgtcgtgggaagagcagttccctttgttggctatgcccaggcggtaattatctttgccctagttgccagagaaaccagaaacaagtacaacctcattgcccgaccgaaagatcggattgcctggacttatttctaa

SEQ ID NO: 129277 - DNA, 744 bp, Enterobacter cloacae
gtgaaagatttttcaaaatactcgaaagcgttagggatggctaagttctatgtttatgcattttatgacactgaagatgtatcaaaaaaaccgttttatataggcaaaggcaagtcagaacgctgtcttgatcatataaagtgtaatgattgctctccgaaatcagaacgaattaatcatctgttaaaaacaggaaatctgggaatcgacatactacgccatggcatggatgaggcaaccgcgaagcttgttgaagcaacatgtattgatctcttaggtgttggagaactgaccaacaaagtacgaggaagcagctcacttatggggcgaatcacgctggatgagctcaaccatctccttcttaagcaagagacggaaattgcacctgaacatgcagggctcgcttttttgctaaacagcacctacaagtctggcatgagtgcacttgcattatatgaagctacgcgtggcgtctgggcaaaagtaccaaaagatgaaaacctgcaatttgcatacgcaacctacggcggtttggtgatggaagtctacgagatacagtgctggctaaaggcaggctctcaacagtactttactcgggaactgattatcccccccgaaaccaaccgttcagagtttgttgggcgaattgcatcaccagaagtcagagaattatacgtaggcaagctaatcaaaaaatcgcgcagtcacggtagccctttcgtaaaagttgggctggcacaataa

SEQ ID NO: 129278 - DNA, 1080 bp, Enterobacter cloacae
atgaacatatatgcaactaaaactgaaacttttaagaggttcgtagctggagtcttaagtagctatagtgcaacaatttctaacgaatcaaaacttaatttgcaaaatggaacaacctcctcggaagaggccttaatgtggctaataaataaagcttttcaaaaagagtttgaagacgctaacaaagtttttaagcataattaccccggcatagattatgttgatgagcacaataaaattgtgatgcaagtaacggcaaccgcaagtagcaaaaaattcggagatagcatagataaaacacctgattggctcagaaaaagcggatataaagatttttactttttcatcaactccactaacaaacgaataaaatattctcatcaatactttaacgtgaaagtttttgatattaatgacttaatatcctctctatgtacgttagaaacaggagaacggcataaagtcgttgcttatcttaaagagaacttttccgattggattcctttaaactcttcgggattattcataccacaagtgaccagtttcaaaagaaaccaatctctttttaataagttcattgaaataaataaattaggtgtaaattggaacttaactgactcccataaagaatggttgcgtgagcagtgtgaaaatgatttgtatcatcttcaaaaaaaattatcagaactatcaatgttgcagcgtaattttatttgtatgatttatcagtatggttttgtaaatggcaggaatagggcggatgacgtttcgcaagaaattcgatttaaccttgcgcaatatgcaacgcattttactgaagaagaagccgagcgatttgatgatatatattatgggttaaataagtggggaatttgtgagatcatagaagttttcgatacagaacgctacgttcaagatagtgagatttttccgcattacaaagaattaatcctgaaatggtctaactgggatgcgaattataatttatttagagctattggtaatttttacatgtcgagatatgatgaaaaagaattgtaccgtgcaattagaaataatgattttttcctaatttactaa

SEQ ID NO: 129279 - DNA, 1041 bp, Enterobacter cloacae
atgtcagatttagaaaaattcctgccaactttgaaacgcttatcaaaattagacaagctctctgagaatgaaattttaaatcaattcaggagaaatcatagcgtagaaccagtgatctcaaaaagtgaattttgtcatgcttctttcacagttaaaattgatgatttaaacttcttgcttaccgaaaggccaatatcgtacttaaatagacattggggacgatgttcgaatattcagttgcatgcaaattcacttggtatagcattacccctatatattggagaaggtactctttcttctgcaatccatgaaattaaaagatgtgaaaatccacttgagaattcaaataaatggttgttcgaaaatttctcattagaaattgcaattgcttatttcaacaaatattttataaagagtgaatcactaaaaaactacaaaacaattatttttgaagctatagaagctttttatttggggtatgatcatatatctataatgtcgctcttccctgtctttgaaggagggttgaggaacttactcgtgaaattttgtgatggtgacaacacaaatacaagtgcagacagatttgaaaaagaaattagaaaactcattattacatggggaagtcggcagctaccaaattttgactggcatcccggcaaaggttatgacattgaaactgaggtggattttttcacacatttaaacccccagtgtgatgtgattaattcaaccagatctttttttaaaaatgtcatatataaaccaactggaggtgttaatgaaggtagtttcaatagacatttgacactacatttgctgaatcagaatttcaatgagccatctaatttcgttaggattttcttggcgttaacacatttaacctttgcagaaagtctgatgaacaataatgtccctttcttctgggaaggtgtagatgacaatgaccgacgcattgcttcattcatttctagaagtggtgatgttatttttggaatgcgtagaaaagaaattagtaagcttgggttaaatttatactga

SEQ ID NO: 129280 - DNA, 1308 bp, Enterobacter cloacae
atgacgcacctcacggttcgcgaatggggtggtgtttgtgtgaacactgaaagcagtataaacgctcctcatgcttttacccgccctcaggctaacgcgctgcttacggcggcgcgcgagcatccgctggcaaatcagcacggtaccaatatcttaatcgatcgccataacaaaattattgccgggcaaatggttggggtcattgccgctccgggatgtagccttgagatcctgcccaaattcgacgacgagacgatagaaccggacgccacaatacgcaatcgcctgatacgtatgcttgatgtcgccctcggccttaaactcgtcaatggacaggctgcaacaatggcgagacaagctgaaagcctgctagagatactcatccgcttgttcgccgagcgactcttatctgaagtacatcggggattaccgcgcacctatttggcacaggaagacgatttgccctcattgcgcggaaggctcaatatcaaacgacaattcactacgcttgccgtccgccccgaccgtctcgcctgtcgttacgacgaactgtcggctgataccgccctacttcgaattatgaaggcgtgtgtagttctgcttcaccattatgcccgcgctgctgatacgctccgtcgactgaatgaattgcgcatcctgttagcgggtgttagcgacgtccctttcagtcatctgccgtggtcacaggtacggatcgaccgaaccaatcatcgctgggaagccctctacaatctggcacgtcttctcctgcgacgcgactggcaagctacacaccacgataaacgagcgcagaacgggattacgctgcttttcccaatgaacgacctgttcgaggcatatatagcggcgctggcgaagcgtgctgtacgcggtacggaatggacggttcgtgcacagacaggcagattatactgtctgatcgaggacgtaaaagaaggcaaaccacgcttccagacccgaccggatctgcttatcgagcgggagcagcagattgttatgatcatagacactaaatggaagcgtattgggcgtcatccagaagatgtcaggcatggagtatcgcagactgatgtctaccagatgatggcctatgcccggctttatcactgcccacaagttatgcttctctatccacatcatgcaggtctgggaacgcaacctctgaatgcaggctataggattctagcaggcaaggaacaattacaggtggctagtgtggatctgattctcgatgaggacaagattgtcgggcagttaattaaccttctcggcatcaacacgcagtga

SEQ ID NO: 129281 - DNA, 2157 bp, Enterobacter cloacae
atgctcgaagttgaatttcaggaatggttgaagagcagaggcgccaaaacgcaagcaggcctcaattcccgtatttatgctgtcaaaactatagaaaaaaatctcgcagcacttggttctcctcatgcagatctggatgcagcctacaaggcggatggatttgcgcaattgcggcagcggatcaaagagattcgccgtgatgccaaagatagcggcaatgactatcggttactaatgcctgaatcagagcaaccgcttaaccgattgtccaactggaatagctggctcggacaatatggacgttttctgagcggtgatgactctcaggccgacgaaattcgggattatgttcttgaaaactacatcaccccagccagagagcgaggtgacgcaagtgtcaccctggtagttggtcctctgaatactgaaatgggtctcgacaagggatggccgaacatctgtcaggctcttgatggtcaaaaatttcaggaactagcggatgttccccctccggtgacggaaggacctaaaaagagcacaacccggaaatatacgttcatccttacggaaggaagcgaactggtggcccagaataaaccaactccgactaaccttattttttacggtcctccaggtaccggaaagacctatcacacggcgagggaagccgtagcgctctgcgatggcaaagatgcctatccgaactcaaaagatgggcgtgcggccctgatggcgcgctataacgaactgatggcagaaaagaggatctctttcgtcacattccaccagagctatgactacgaaaccttcgttgagggccttcgtccagaaatcggtgaagatgagtcttcgtctgctggtttcagactcatgcctacgccggggctcttcagagaaatttgtgcccttgccgatcaggccagaacacaaccccgtgcacagacagatgcctcggcactgcaactatcccaaaaacgcttctggaaaatggggcaagggacaattggcaccgaagacgatgtgtatgaagatgcccgcgacaatgggtatatcgctctgggttggggtgggaccatagactggagcgcggatagattctcatcgttcaacgcgattcatgatgaatggatcaagcaaaatccagggaatctgacacctagtaactggacgcaaacctatcccttccgttgcgaaatgaagcctggtgatatcgtgattgtcccttacgggaacactgcgtttcgcgctatcgctgaaataactggtgattactatttcgttcctgaagccgaaggttactatgcccaccgccgcccagttcgctggctactgacccttgatgaaccactgccactcgatacaattatcgatggtaacttcaccatgcggacgctctattccattgccaccagtcgtgtgaatatcccggcgctaggcagactgctctcaagtacagagaacctgaataatagttccgatgttaaaggccaaccagaacaattcgtcctcattattgatgagatcaaccgagcaaatatctcgaaagtgttcggtgaactgattacgttaattgagccggataaacgtcttggaatgcctgatgcactcaccgtaactctgccttattcgaaaaagaaagattttggcatccccgccaaccttcatatcataggcaccatgaataccgccgatcgatccatcgccttgctcgacacagcattaaggcgacgattcaacttccgggaaatggctcccgacgcgaccctgctaagtgaagtagaggggatcgatctcaaagccgttcttaccaccatcaaccagcgtattgaatatcttataggccgggaatatcgcattggacacgccttctttatcaattgtgaatccagggaacaagttgaagatgcagtgcgcaataaggtcataccgctgttacaagagtatttcttcgaggactggagccgaatcgcggcagtactgggcgatggttttatgcaggaagagcagattttaccgccacccggaatagagggggaaccattatcaagctggtcggtacgtgcaccgttcagaaatgacgcctttgatcgactgataggcaaagccagaacgttaaatgtcaccgctcttgaggtggctggtgaatcgaaagaatga

SEQ ID NO: 129282 - DNA, 174 bp, Enterobacter cloacae; identical to SEQ ID NO: 110963

SEQ ID NO: 129283 - DNA, 1152 bp, Enterobacter cloacae
atgtccctccctacaaattttaatgatattcttcgtgtttttgaaaaagattacgatacagccaaagaagataatgccctaagtgcacgcggccaatttctgcaactttacccccttaatcacctaaaaaaaatgacgcttgatgactatgtcatcggcaaaggtacagcttcattttgtgcttatgttgaagtaaaaaccagaacatgggcaaatatgcaaggtgcgacggcgctcaaatttggtatttattatggaaaatcaaaatcagatccaaccgtccgctatcgttttactcagaaatttggcgatgataatagtactaataaagaagttttcgctaatgttaaagacgctttactagacctaatacagtcagggaaagaattagattttagagcgattgacgagaaccccctatcccaaatgtttaaggctaaaatattgagcctttacttcccagaacactttataaacatttgcagcaaagaacatcttaaagatattgctatggaaatgggtataaaagagcaacagtttattagtaaatatcaacatttgttattcaagaaaaaactagagcataaaatcacccgaaactggagcaatccaaaatatatgaccttcctttatgcccaattcatacgtaaggatcttagcagcgctcctgctgttatagttaaaaaaccacaaaaaagaaaccatcccgaagtcaatttcgaagaaataacggaaaatcgtgatttaataggcaaaaaaagcgaagaatatgcattaaactgggaaaaaaaccgcctaatcggtctcggctattcaaaactagctgaggaaatagatgatcgccgtaatcgtccaacttatggttacgactttctttcttttaatgccccaggtgatgagcgatacatcgaagttaaatcaattggccgggatggaaaagagggagcattccgttttttcctgtcaggaaatgaactcaccgtttctaatttaagtaaccacagtaaaaactattatttttatcttgtacagtatgggaaagatggagagccatgcaatctatatgtaaaacatgctcaagatctttacactaatagtgaaatgtccccttgtgcttacgttgttaggttcgatctggaagaacctgcttaa

SEQ ID NO: 129284 - DNA, 417 bp, Enterobacter cloacae
atgtctaaaaaagataatcaattttttgatcaagataacaattttcagtttggcactcgccttgccgaagcgatgtcgttatctgaagacacagtcagttctctggtagataaaaccggtattcccaattcaaccattcgaagctatctgaagggagaatccgttcccggaatcatgcaacttcggaagatagctgctggtatgggcatcaaagcgggatggtttttaggtgatgatgaagagtttgcctgtccaaaggacgggatatcagaaattgaaaaggatcttgagctactcaataacctgttcaaatacatggcccctgtacagcgagggcgggtactgaaacgcgttctggcaagtgtggcgcgtcagatcgaccataatgttgacggtgacaataatactgagcaatag

SEQ ID NO: 129285 - DNA, 237 bp, Enterobacter cloacae
atgcgtaaagcatgtattgaacttatggcgggaactaacgcagcctgcctggttgcaggcgaacttggcactggccgctgcctttacttggttgtggtaatggaagatatatttggtaagcctacaacagaacaatggctaaaagccttccggctttgcgaggccaaagcggctgaacttaagtatgaagttgcccgcatccgcggcaagcctctggcttgtaagctttcattttga

SEQ ID NO: 129286 - DNA, 1311 bp, Enterobacter cloacae
atggctaagagtgaaatatctcagttaagagatgaacaagtagataacttgatcattttgtgtgatgaagccatgagggctacacccgaaaatgtcaagagatttattgaacctgcgcccggagttcttgctcaatcgaaagctaggcagcatagtttgatttttgggagaagggggtcgggcaagtcctcattattgaggaaggtagttgccgatcttactattgatagaaggcctatttcttttgttgatatggagacatttaaggggcattcatatcctgatgttctaattagcgttttaattaaaagtttacaagaatttgagagttggttagaaactgctgcattaacgccagctactaaaactacattttggaatcgtctttttggtaaagcaccagaaagaaaacctttcaaaaaaaatcctaccaatgagcttatcggtgaactgagagttatcattcaggatttagaaaataaacttctgcagccagaagaaatcaatgtgcaaaaaaaggaaacttccactggaaattttgaagcatcaggtaatgctgcattgaagaaaggtccagtagaaataggcggtgcagttaaaaaagggaatacggatgttaaagaaataagcgagggatataaatcaataaaaacagagtatttgcatcaaaacatactcaagtttcaaaggttttttaacaagctctctgttttatctgaggggcctgcctatttaatacttgatgatctttatcatattagaagaagcgatcaggctaaagttattgattacttccatagggttgctaaaggaaatggtttatggctgaagattggtaccattaagcacagaagtgaatggtatattcatactgatcctcctacaggcgttaaacttggagatgatgcgaaagaaataaatatagatatttctttggagaagtttgcgactctgaagcagttcatgcaaaaaattctcactaatttgatgattgaaacaccacctatcacagtcagtgggctattaaatacaaccgcagttgatagattgattattgcttcaggtggtgtaacgagggattttattggtatatttactaaatctattaaccatgctagggaaagaggaccagatcatcctcgaggccctcgaattggtgctgaagatgtgaacctagcaactggcgaatatggtgacataaaacgtgaggaatttaaactagatgctgatgatgaccgtgttgctttagaagattcatttgcaaagcttgtggcattttgtttgaatgatgcgaagtgtaatattttctag

SEQ ID NO: 129287 - DNA, 183 bp, Enterobacter cloacae
atgcgtaaagcccgattcaccgaacaccagatcattgctgttctgaagtccgtcgaagccggacgcaccgtcaaggatgtctgccgcgaagcgggaatatccgaagcttcctattacaactggaaagcaaagtcgatgatgtactgcttgaagacgtgcgcttgcgccttgctggcggagtga

SEQ ID NO: 129288 - DNA, 354 bp, Enterobacter cloacae
atgagcgaagatggcaggaacgaggctgatttaaatcccaaggttgccaaccgcaacaaaggcccgtgccgccagcccgaaaagaatgttttcaccgacgaacagatcgagaagctgcaggaggttttccacggctcgatgttcgcctaccagcgccactggtacgaggcaggcaaccgccaccgtatccacaacctgctcaaatcgcgccagaccggggcgaccttcttttttgcccgggaggcgctgattgacgtcatcaccatcggccgcaaccagatttttcactccgccagcaaggcgcaagcgcacgtcttcaagcagtacatcatcgactttgctttccagttgtaa

SEQ ID NO: 129289 - DNA, 981 bp, Enterobacter cloacae
atggaaaacaaaaaccaataccaagcattattaaggggcaaggttgcagcagcaatagcccaagcaaggtccgcagcagatgtaactcacaaaggggttaagggtgcggttctagaaatattattgagtaagcttttcagaccgcttttacctgcagatattggagtcggtacagggcaaatcatagatgcttttggaaacgcgccctcacctcagattgacattgtcatttacaacaaagaaatcctcccccccgtgctaattgatgaaaatgttgggatattcccgattgaatcagtactctatacaattgaagttaagacaacattaaatgcaaaagagttgaaatcagccaatgactcggcaaagaaaatcattaccacatttaaatatcttcctggaaagcttgatgagaaaggaaagcgggtgaatcactcaattagtaaaccccgagcagtcttgttcgctcttaatagtaatttaaaggaaggtggtttaaccgaagccgaaagatatataaagtcctatcaacctgacaaaccttatttaagtgctatttgcgttgcaggaagagagtattgctatgaggatagagattgttgggtttcgatgaaaacaccagaagatcacgatgaaacactcaaccttttagctggaataacaaatacttacagggaggtatccctaagtagagggtatcctcaattaggctactacattgcatcagaccggggtggatatgcacttaccccctccacaaatctacctaagctaactgtaatttgcgaacaatgcggaaatcaagatgaaattatttgtacttttgaccaagatgatttcaaaataattaatggcactatatcaaatgatacattatgtgagtgtggagggaaattaacttcagcaaaagggaattatgtcataaaaggaggacgattaagagaaatagcaccgttagggccaatggaattcaaattctag

SEQ ID NO: 129290 - DNA, 723 bp, Enterobacter cloacae
atgctttcccactcttttgaagatcttgcacaggccttccgggttttattagagtctaattggtcgctacagcgcttgttggctgttgatcgtgctgaagcaattggcaatttagaatcgggcctgaacacgcagctcaatgcttttcataatttgtatgacaacatgcaaagtaatgggttagagcctgattggtacttgaaaccagagttgttaatgatgcttgttattagaaatgctcggcatcataacaaggcaaaccgtataagaagtatttataattttcaccgtcaggctacgaatgatcctacacagcaaaaaaactatttttatgtgaatttcccagctcctcctgaagaagaaggtggaggttactttgaggttcctatctcatggggtgatattgatgagatgctctctctaccgcgtcaagaatctcgacttaggccagaggctaaagaacgcatccgtaattatttagatgctgattcatttgaagctaaagcaagcctactcgggtttgcaaaagacaatatatttataaattacgtgccgttgtcaatgtgtgcaggaatcgcactttatcctttcataaaagataatatttctttgaatgaggattcagttgaagctaaaagttttttatcactttttaaaacaacacatcctgctttaacaagacagcatgtctgtaagtcgatagctttttcattacccatttaa

SEQ ID NO: 129291 - DNA, 957 bp, Enterobacter cloacae
atgagtttaaataatgaagatgaaaaaagagttactgaagatgcttcgaaattaactgatggagcgaagaaaataagtggtgagcgaagggttatctcccttatggcaagaaatcccggccttataaatatcatggagatgtttttatggttctatgtttctttcttgacttttatgatttataaatctcctgggatcgatactgtcccttctgaaacatcagctttctccatgtttttaaatatgagtgcaggtgttaaggctttagtcttgggcttgattccattggcatttacgatggtgtatcgaatatctccgatacaaatgatccttagacgtgccttgtctatcaatgacgaggttagaattacttcagtggctcttggtgttgtgaatgatgaacctcaaaaaagcaaatcagatttagctgaggggtatttaagcaatttggtcgtgagctccgctaggttatctaaggatatatatagccgaggtagtttatatttactgtttggggtgatattttcaatagtggggttggtgtttttttactcgcaagttcatgtttctgattcgctatcgactgtagttaatattccgaagtcgaacagcttcgtaaatgaactggtttatctcgctcctaagtttggtatccttttttttattgagctaatatcatttttcttcctcaagcaatatagagtcacaatggatgaattcagatattatgaagcgataaaacgctctcgtgaggaaaccttagctgtggtaaagctactttcagttaactctgagaatgtcgattatatggctgttttagatagattgaagtttagttccaatgttgggagactcgaaagcgggcaaacgacagagctcctagaagccaggagattcgataaagatgaattggattttctagccaaaattgccgaggtcgtggctaagaaaggatga

SEQ ID NO: 129292 - DNA, 534 bp, Enterobacter cloacae
atggaagagtggcagctcaagctacaggcgaaaaacgctcaactgttgcgtaccgctatgcacgatccgctcacggggcttgcaaaccgcgccgcgtttcgcaacaacattgcggcattaatgaacgacgcttcagcaaaaaccaattctgccctgctcttcctggacggtgataacttcaaggttatcaatgacacctggggtcatgccgcgggtgactgcgtactgatcgaagccgccaaaaggatggtcgagtttggcgaaaaacgtcatcagtcttaccgtcttggcggcgatgaatttgccatgatcctttacggggtccacaccgcacgtgaggtcgaatttatttgcgctgcgctgtcgcagcaatttatccgtccgtttgatctgcataacgggcacacagcatcaatgtccctcagcattggctttgctctggcgtgggaaaatgcctccgttgaagcattactggagcaagccgatcgcaatatgtatctggtcaaaaaccagcgttcgaaaacaatatcctga

SEQ ID NO: 129293 - DNA, 687 bp, Enterobacter cloacae
atgaataaggaagtcgcaccaacaccgcgtccgacgtttaaaagaacgttgcgacgaatcagcatgataagcgtcattataacgatgacgtttatatggttgctgctgtgtttcgcttccgtggtgacattaaagcaatacgcgcaaaaaaacctcgaacttaccggcgccaccatgagccacagccttgaagcctctctggtgttcaacgatgccgtggcggcaaatgaaacgctggcgaccctcggcaagcaggggcagttcgccgtggcggaagtgcttaacgcacatcataaacggtttgcctggtggtcatggaacccggcggataataccgacacgctgggcgcgctggtcaaccggtggttgttccctgttcctgtcgcacagcccatcatacataatggcaatgtgattggcgaaattcgtctgaccgcgcgagacagcctgattagccactttatctggctctcatttgcggtcctcaccggctgcattctttttgcctctgccgtcgcattgaccatcacccgctcgctacatcatggcatggttgttgaaatgcaaaacatcactgacgttgtgcatgacgttcgcactaaccgcaacttctctcgccgggtaacggaaggccgcattgaagagttccaccagtttggtgaagacttcaacagcctgctggattaa

SEQ ID NO: 129294 - DNA, 936 bp, Enterobacter cloacae
gtgaaagttgtctttaatgttaatggtaaaaaagtcccgctcgaatctctgcaatatataagtaaagcaaatcaacttgaagttatgcggaattggttttttgaaaatttcgaagatcccgcaaactcttgtccgtatgaatcccgtgaaggcggatatgcttacatttatggtggcccatacgaagcaagtgaagagttgcaagcgatgtttgaagggtacgtgaaatttgattatatccaagaactagttaatgatttacaagaacagtgctacgagtggtcaggtaattcaaataatattaatgattggtacgacgaagacttgtacgatgctgttacatcttccgaacaacccttttctaagttcgttgaaagcattgatggaataaaaatgctggctaaaggcgaatttaaagataagcaaaaagaacatctgcttagcatcttatacattaacgtcattacagctttggaaactctttatgttgagttgtttattaactccatagataaaaatgactcataccttaaagatttcatagaaaaaggtaagacggaatttaaggtaagtaaagaaatattggctttgccattcaaaggagaatctattgaaaacatgagggcggaattgattaaagcaatcaaagaacatctgattagtgcaagttggcatagtacaaacaaagttgtaggtcgttataaagctacatttgatattaatgtacataaagagtggccaatagatgcgatagaaatagctacacaaaagcgtaatcatttagtccatcgtggcggaaaagataaagaaggtaattcggtagtgatcaccgaacaagatttagaaatgttgctggatcacgcacaagctcttggagaaaaattgtttgatagccttggtgtggcattacagaaaaaagatgagagtgaattttga

SEQ ID NO: 129295 - DNA, 1704 bp, Enterobacter cloacae
atgaagttaattcgcttaacttgcgatcagccaacctttcatccagtgcatttcaatgacacagggctaacgttgattattggtgatagctctaaagaaaaagaaggcagtagtaacggagtcggcaagacacttattctcggcctcgttcaacattgcttaggcgctaatgctgataaaaaattaacttcagcagttccagattggtggttctcgttacttttttctcataatggagttgaatacttaatatctagaacgggaaatgggaaaaaattattattaaatgacaaaacaatatctctaaaagcatttaaagatctattagacaaaatagggatatttaatcttgagaataacattccgtatttatcatttagatctttatttaagcgtttttcgcgatataccagagatgactgcatcagtccaactaggacaaaaaaggagcaagactttgaagcattgcttcgcaccgcatttcttctcggcatagatcataatttaatattatccaaaagaaataataagcaagaactggataaagtaagtcaatccctaaaaaattggcaagacgatgatattcttaaagacatgtttagagcaggctctcaacctaaagtacgctatgaatggctagaaagagagatcccaagactgcaagatgaacttaatacatttcaagttcacgagcaatacagagctattgagaatgaaacaaacagtttaactataaaattacgagaagttgaaaaaaataaaaatatagctgaatttaaagttagtaatatagaaaaaactttattatcacaccctgatatttcaagagaagatcttcttgaactgtacaatggcttacaagagattttcaagccagaaacattggcccattttgagtcagttgaaaattttcacaaatcattatcttttaacagaaagaaaagacttgaaaatgataaaataaaacttttgttagaaattgaatctcttaaaattgacattaatgatatttcggcattacgtgattcatatttggaatccctgcaaggcaagaaagcatttgatgaatacgcagtcatagcgagacaactggctgaatttaaagaagaaaaagaaaggctgcatgattatttaaatttctctattaaccttcaaaagaaagctcaaaatctaagagaaagaaaagttgaacaagacagattagcggtgaactatgcttctacaaatcctctttcagaatatgataaattttttgctgaactcgcagaaataatgtacccgagggtaccagcaggaatagttttagatgttaatactggtgacaacaaaatccgttatgatctaagcatccaaatcgagggtgatgattcggatgggatcaatgatgctaggatattatgctttgactggttagtatttacatgtggcgaaaaccatgccatggatatgctatggcatgataatcgtctttttgccgatatagatccaggtgttcgcgcaagatggttctcttttgtcaatcagtcattaaaacgaagcggaaagcaatatatagcatctttaaatactgaaaactttaatgctatggaaacaactttatctgaaatcgaaatgttagaactgaaatcaaaaattgtccttactcttcgtggtgataaagcagagaataaacttctcggcattcaatttggaagtaaaaagtaa
